United States Patent Application Publication US 2018/0305689 A1 - sequence listing, part 26

SEQ ID NO: 318223 - DNA, 4001 bp, Homo sapiens
taggtgaagcactttgaaaactgacactactatacaaaaagtatcatttccacctatgaggcccagagaagaacacacataggaagttaaccacacagaaccagggcctagaactgagctcttcactcttaatcccacactctgaacatgccaagtgagctattttaaattgttgtgggaagcttcgataaaactgtatgcacatatttatgcatacatggcatttgacaaatcctacaagctagactttgcaaaattagtacaacccaaagggcacaccactttccccaaatagtaacactgtgctttcttagaacattactagtccctatctcacctctagtttcactccctaatacaaactcaactactctaacctcctgttcaaaccctttattctttaaatgatgcaagtgtattctataaacagtcattttcaaacacttaggaaaaagaaaacaaatctacacatctagactcccatcaggtgaatgcaggagccctcttcagtaaacccaacaaagaagcaggatgtttaatgttgacaacagattcagcacttaagcaaagatgatttacaatttcattttgatgcctctacaaaataacttcgctaagatcacacgataccagaagtttccaacaggttgtctagtcttgcacagaattaaactaaatcagttatgtgcaattaattccaaaaccttttggtgcacagtgccaacaattaagagatttccaatatatttttctggacatactgctcatggtagcaccgggcactctccttttcctaaagttggtggatggtggtatgggatcagaaactgtttttaaagttggtggggggggatgacaacaggaagattcaaactctggtttttcccttggatttgtatctttgcagatatattaataaacatatcaaatatggtatattgtggagatactgctgcacaagagtcgcaggcttttttatttcacacactacccagtataccagccccttgtcctgacatttctccttaataacgtacatatacaagtcaaattttctcccttttccttcttagcaccaaagacctgtgcttttaaaacaagctcgtagtgtccaacgaccacgttccagcaaggaaaaggctcacgctgaaggactttccggagtgccctaggcctcgcagtcctgcagagtaaaagggggtgtgtccgcggttgtttcggcccttttcccccggcagccctcagcggcgccctgggccccctttctcgcggcggccaggggagctgttcgcagggcgtccagacctcaggccactggctcactttcttggagtgggtcccaaccagggaacgagggcgggggcggcgagggcaccaacgaatcctcaaacccctcactctgaggccactcggcagcccctcttcgccctccccgcggcgcccctgcctcctaagtccctgcatgaaccactgtccctctctctccccctctccccggccctgcctctccctcgcacacacgcccaaaggcaaaggaggcccagggagaagccagaggacctgggggccgcgagagaggcaggaccggcatctgcggtgccctgggaagagtcgtcccgagaggtccccccgagggggcgcagccgccaccagagccccggccgagcccgggagcgaagcggggccgagccaggacccaccagctgcttcaggtcctcctccgagagctccgcgtaacggtaccgctgctgctcgaactcgtaccgggtggttttggccaccaccaccacccgggaggggcggaagccgccgtccgcgcggctgccacagcccgccagctcgcgcggctgcccctgccccaggtgccgccggccgccaccgtcaccgcccagccggggccgcgcggcggggcctcccgcacccggtccccgcagcgccgccgcccggccgcccgccacgcgacaacagctgcccagcaagaagcctcggtagcaagtcatcgtgggccgggccgcggccgcgggcttgggctcgggccccttgcctcagctccctaccgccgggagtgcgcgccgtccgcgccgcccgggcctctaacttcgcgccggacgggcagaggttaagtgccaggacgtgcgtggcccacgcggctagggggacgtacccaggcgttgacgaaggcggggaaagcgtggcgattgggaaacgggagaccccacgcgggagaaaggtgggcggggaagaaatggaggccccagctagtgggttttgtttgtttgtttattcgtttcactcacgcctgcataatggctgcttcgccgcccgggggcgacctccccgcaccacacgcttccccgaggtcgctcttctcccgcccccaggctaactctatcggccaatcagagcccgcggcggctccggatccgaggggccgcgccattggctgcggcctgagaaagaggtagaattctgttaggcgattgcgtcgccctgaggaatccagctggatccggtctgaggcggcgcggggccagcgggtggggttttgagcggctggcgggaaggcaggttcctggcatatgctcgcttgggttctgttctgcaggccgaccacgtgcccattggtttatttgaccagggtcggtgtgatagctggtgtgtctggggccgggctgggggctgaggaggcggacccggctcctgctgcaccgtgtgcgtggcttggcacgaaatcctctcggcgtgggacccagtgcccgccccgctgccccctgcccccccgaagagccctacctataggacaaagtccaaatgaattagttctttgaaagcttttaactggaaaggagtgagttaaagcaatgtttgatgactattgatctggctttggaatcttgggtagcttgggaggcaagaagaggaggaagggatgctgttgggataatgacccgtggagtgatcaggacctgggctggggtgtgacgagaacagaaggaaacgtcccattgtaaggggagaaccacatggcagtgcacatcctgctgttcaattccgcagctccttagatccccttcccctggcactgtgtttgctcctttgtagtcctggcgctacgtcgcttctggactttgggcaggttacctcatctttctgggcctcagattcctcatctgtaaaaagggggttagggtgaccccaaggttctaccaagtccaaatcgattcagtgaatctatgactctcctcacgggcccaccagcaccagcgttcattcgtgggttcccgcggtgtgcctgctgtgtgccaggtagtgtattggactgggagcatacacaatgaagcccgataggtgtttacttggtaaagttctaccactgacccgttctcaccaagaactttccctcacagcagctgctaatagtgacgtgtagtgtaacaaccttaataacctgagcttctagaggtaacatctataactatcctcagactcctttgtagtcttactattttaaacttcattagcattaggaaggaaaaaaaaaagggagaaatcacagatgacgcttaggtttgaggccagggtgaacaggggaatgttaattgatccattcgatagagaaaaaaaaatgcgtagggagaaactgtttgggatcaaagtctgagttttgttgctcatatttgaaatctcggacctcatttcttcccatttcacagataaaaacccagatttttgactctcatttcagctgcaaacatatacattgacatctcagttggaatagccctttgtccatagttattttgcgtctcatcttccacctcctcaaaaatagtgtttctgaaggcatcctctcacaggtatcttgaattttccctcccaaatgagtttgcctcttcagtatttaaatatgctcatgtctatgacatctttaaaatttttctaaaaaaacaaaacaacctctaagcctttgtttttacatattgcctgccttacctttacag

SEQ ID NO: 318224 - DNA, 4001 bp, Homo sapiens
ggaacttatccaataaaactgtaatgacaacaccaccaacaaaaactattccactgcctggcaattacaaaactgtgtattctacagcccacgagttttacttcaaagctggcttatcccaaacagcattacctagcaatagacaaatatttacctattagagatttctccactcagaacgggtacacttaggtagtttgactttttaagacttattgattttccctacattttaaaagtttttttattaagtggtaatctagttcagaggtccaagagttaatcctaactgagatgccacccattttcttgaggccttgaaaacgttatccacagtttcaaaatgccagtactgtaaagggccttggaggctatctggtactacctctgcaattcacatactgaattaggtgaagcactttgaaaactgacactactatacaaaaagtatcatttccacctatgaggcccagagaagaacacacataggaagttaaccacacagaaccagggcctagaactgagctcttcactcttaatcccacactctgaacatgccaagtgagctattttaaattgttgtgggaagcttcgataaaactgtatgcacatatttatgcatacatggcatttgacaaatcctacaagctagactttgcaaaattagtacaacccaaagggcacaccactttccccaaatagtaacactgtgctttcttagaacattactagtccctatctcacctctagtttcactccctaatacaaactcaactactctaacctcctgttcaaaccctttattctttaaatgatgcaagtgtattctataaacagtcattttcaaacacttaggaaaaagaaaacaaatctacacatctagactcccatcaggtgaatgcaggagccctcttcagtaaacccaacaaagaagcaggatgtttaatgttgacaacagattcagcacttaagcaaagatgatttacaatttcattttgatgcctctacaaaataacttcgctaagatcacacgataccagaagtttccaacaggttgtctagtcttgcacagaattaaactaaatcagttatgtgcaattaattccaaaaccttttggtgcacagtgccaacaattaagagatttccaatatatttttctggacatactgctcatggtagcaccgggcactctccttttcctaaagttggtggatggtggtatgggatcagaaactgtttttaaagttggtggggggggatgacaacaggaagattcaaactctggtttttcccttggatttgtatctttgcagatatattaataaacatatcaaatatggtatattgtggagatactgctgcacaagagtcgcaggcttttttatttcacacactacccagtataccagccccttgtcctgacatttctccttaataacgtacatatacaagtcaaattttctcccttttccttcttagcaccaaagacctgtgcttttaaaacaagctcgtagtgtccaacgaccacgttccagcaaggaaaaggctcacgctgaaggactttccggagtgccctaggcctcgcagtcctgcagagtaaaagggggtgtgtccgcggttgtttcggcccttttcccccggcagccctcagcggcgccctgggccccctttctcgcggcggccaggggagctgttcgcagggcgtccagacctcaggccactggctcactttcttggagtgggtcccaaccagggaacgagggcgggggcggcgagggcaccaacgaatcctcaaacccctcactctgaggccactcggcagcccctcttcgccctccccgcggcgcccctgcctcctaagtccctgcatgaaccactgtccctctctctccccctctccccggccctgcctctccctcgcacacacgcccaaaggcaaaggaggcccagggagaagccagaggacctgggggccgcgagagaggcaggaccggcatctgcggtgccctgggaagagtcgtcccgagaggtccccccgagggggcgcagccgccaccagagccccggccgagcccgggagcgaagcggggccgagccaggacccaccagctgcttcaggtcctcctccgagagctccgcgtaacggtaccgctgctgctcgaactcgtaccgggtggttttggccaccaccaccacccgggaggggcggaagccgccgtccgcgcggctgccacagcccgccagctcgcgcggctgcccctgccccaggtgccgccggccgccaccgtcaccgcccagccggggccgcgcggcggggcctcccgcacccggtccccgcagcgccgccgcccggccgcccgccacgcgacaacagctgcccagcaagaagcctcggtagcaagtcatcgtgggccgggccgcggccgcgggcttgggctcgggccccttgcctcagctccctaccgccgggagtgcgcgccgtccgcgccgcccgggcctctaacttcgcgccggacgggcagaggttaagtgccaggacgtgcgtggcccacgcggctagggggacgtacccaggcgttgacgaaggcggggaaagcgtggcgattgggaaacgggagaccccacgcgggagaaaggtgggcggggaagaaatggaggccccagctagtgggttttgtttgtttgtttattcgtttcactcacgcctgcataatggctgcttcgccgcccgggggcgacctccccgcaccacacgcttccccgaggtcgctcttctcccgcccccaggctaactctatcggccaatcagagcccgcggcggctccggatccgaggggccgcgccattggctgcggcctgagaaagaggtagaattctgttaggcgattgcgtcgccctgaggaatccagctggatccggtctgaggcggcgcggggccagcgggtggggttttgagcggctggcgggaaggcaggttcctggcatatgctcgcttgggttctgttctgcaggccgaccacgtgcccattggtttatttgaccagggtcggtgtgatagctggtgtgtctggggccgggctgggggctgaggaggcggacccggctcctgctgcaccgtgtgcgtggcttggcacgaaatcctctcggcgtgggacccagtgcccgccccgctgccccctgcccccccgaagagccctacctataggacaaagtccaaatgaattagttctttgaaagcttttaactggaaaggagtgagttaaagcaatgtttgatgactattgatctggctttggaatcttgggtagcttgggaggcaagaagaggaggaagggatgctgttgggataatgacccgtggagtgatcaggacctgggctggggtgtgacgagaacagaaggaaacgtcccattgtaaggggagaaccacatggcagtgcacatcctgctgttcaattccgcagctccttagatccccttcccctggcactgtgtttgctcctttgtagtcctggcgctacgtcgcttctggactttgggcaggttacctcatctttctgggcctcagattcctcatctgtaaaaagggggttagggtgaccccaaggttctaccaagtccaaatcgattcagtgaatctatgactctcctcacgggcccaccagcaccagcgttcattcgtgggttcccgcggtgtgcctgctgtgtgccaggtagtgtattggactgggagcatacacaatgaagcccgataggtgtttacttggtaaagttctaccactgacccgttctcaccaagaactttccctcacagcagctgctaatagtgacgtgtagtgtaacaaccttaataacctgagcttctagaggtaacatctataactatcctcagactcctttgtagtcttactattttaaacttcattagcattaggaaggaaaaaaaaaagggagaaatcacagatgacgcttaggtttgaggccagggtgaacaggggaat

SEQ ID NO: 318225 - DNA, 4001 bp, Homo sapiens
catcaggtgaatgcaggagccctcttcagtaaacccaacaaagaagcaggatgtttaatgttgacaacagattcagcacttaagcaaagatgatttacaatttcattttgatgcctctacaaaataacttcgctaagatcacacgataccagaagtttccaacaggttgtctagtcttgcacagaattaaactaaatcagttatgtgcaattaattccaaaaccttttggtgcacagtgccaacaattaagagatttccaatatatttttctggacatactgctcatggtagcaccgggcactctccttttcctaaagttggtggatggtggtatgggatcagaaactgtttttaaagttggtggggggggatgacaacaggaagattcaaactctggtttttcccttggatttgtatctttgcagatatattaataaacatatcaaatatggtatattgtggagatactgctgcacaagagtcgcaggcttttttatttcacacactacccagtataccagccccttgtcctgacatttctccttaataacgtacatatacaagtcaaattttctcccttttccttcttagcaccaaagacctgtgcttttaaaacaagctcgtagtgtccaacgaccacgttccagcaaggaaaaggctcacgctgaaggactttccggagtgccctaggcctcgcagtcctgcagagtaaaagggggtgtgtccgcggttgtttcggcccttttcccccggcagccctcagcggcgccctgggccccctttctcgcggcggccaggggagctgttcgcagggcgtccagacctcaggccactggctcactttcttggagtgggtcccaaccagggaacgagggcgggggcggcgagggcaccaacgaatcctcaaacccctcactctgaggccactcggcagcccctcttcgccctccccgcggcgcccctgcctcctaagtccctgcatgaaccactgtccctctctctccccctctccccggccctgcctctccctcgcacacacgcccaaaggcaaaggaggcccagggagaagccagaggacctgggggccgcgagagaggcaggaccggcatctgcggtgccctgggaagagtcgtcccgagaggtccccccgagggggcgcagccgccaccagagccccggccgagcccgggagcgaagcggggccgagccaggacccaccagctgcttcaggtcctcctccgagagctccgcgtaacggtaccgctgctgctcgaactcgtaccgggtggttttggccaccaccaccacccgggaggggcggaagccgccgtccgcgcggctgccacagcccgccagctcgcgcggctgcccctgccccaggtgccgccggccgccaccgtcaccgcccagccggggccgcgcggcggggcctcccgcacccggtccccgcagcgccgccgcccggccgcccgccacgcgacaacagctgcccagcaagaagcctcggtagcaagtcatcgtgggccgggccgcggccgcgggcttgggctcgggccccttgcctcagctccctaccgccgggagtgcgcgccgtccgcgccgcccgggcctctaacttcgcgccggacgggcagaggttaagtgccaggacgtgcgtggcccacgcggctagggggacgtacccaggcgttgacgaaggcggggaaagcgtggcgattgggaaacgggagaccccacgcgggagaaaggtgggcggggaagaaatggaggccccagctagtgggttttgtttgtttgtttattcgtttcactcacgcctgcataatggctgcttcgccgcccgggggcgacctccccgcaccacacgcttccccgaggtcgctcttctcccgcccccaggctaactctatcggccaatcagagcccgcggcggctccggatccgaggggccgcgccattggctgcggcctgagaaagaggtagaattctgttaggcgattgcgtcgccctgaggaatccagctggatccggtctgaggcggcgcggggccagcgggtggggttttgagcggctggcgggaaggcaggttcctggcatatgctcgcttgggttctgttctgcaggccgaccacgtgcccattggtttatttgaccagggtcggtgtgatagctggtgtgtctggggccgggctgggggctgaggaggcggacccggctcctgctgcaccgtgtgcgtggcttggcacgaaatcctctcggcgtgggacccagtgcccgccccgctgccccctgcccccccgaagagccctacctataggacaaagtccaaatgaattagttctttgaaagcttttaactggaaaggagtgagttaaagcaatgtttgatgactattgatctggctttggaatcttgggtagcttgggaggcaagaagaggaggaagggatgctgttgggataatgacccgtggagtgatcaggacctgggctggggtgtgacgagaacagaaggaaacgtcccattgtaaggggagaaccacatggcagtgcacatcctgctgttcaattccgcagctccttagatccccttcccctggcactgtgtttgctcctttgtagtcctggcgctacgtcgcttctggactttgggcaggttacctcatctttctgggcctcagattcctcatctgtaaaaagggggttagggtgaccccaaggttctaccaagtccaaatcgattcagtgaatctatgactctcctcacgggcccaccagcaccagcgttcattcgtgggttcccgcggtgtgcctgctgtgtgccaggtagtgtattggactgggagcatacacaatgaagcccgataggtgtttacttggtaaagttctaccactgacccgttctcaccaagaactttccctcacagcagctgctaatagtgacgtgtagtgtaacaaccttaataacctgagcttctagaggtaacatctataactatcctcagactcctttgtagtcttactattttaaacttcattagcattaggaaggaaaaaaaaaagggagaaatcacagatgacgcttaggtttgaggccagggtgaacaggggaatgttaattgatccattcgatagagaaaaaaaaatgcgtagggagaaactgtttgggatcaaagtctgagttttgttgctcatatttgaaatctcggacctcatttcttcccatttcacagataaaaacccagatttttgactctcatttcagctgcaaacatatacattgacatctcagttggaatagccctttgtccatagttattttgcgtctcatcttccacctcctcaaaaatagtgtttctgaaggcatcctctcacaggtatcttgaattttccctcccaaatgagtttgcctcttcagtatttaaatatgctcatgtctatgacatctttaaaatttttctaaaaaaacaaaacaacctctaagcctttgtttttacatattgcctgccttacctttacagctgattctcgaaagagtagtctgttcatcattgccacatccctgcctcctagtcattcctcaacctgttgtacactagcttctccccactactttgctaattactgctgtttccaaggtgaccaaaagatcttgttggaactcaaaagacttttttcagttctttaattgattgatctttccaaagaatttgaaatggttatcatttcttcttgaaatcttttactgtctcccaacataccagtccctaacagtgtttctcccatctctatgtccctttttgacttcttcctaaacccatctccaagatgtcttctgtcctcgtctccttgtctcttcttctccgtcttttttccttctctctctctctctctgtcacacacacacgctcctgagttcattcagtgttgtgtaatggaaggatcttggttcaaatctcagttttattgtttattagctttgtgaaacttgaactggttgtt

SEQ ID NO: 318226 - DNA, 4001 bp, Homo sapiens
catttctgacatcaaatatatgggttttccaccaaccaattctccaattctccacagacagcagctgagtgtcttacaattttactcaattctgatgctaattaaccagagttagtgcagaccccacgggttaggggctcagcccccaagactgccccctacttcagatgccagccacaactattaggacctcagggtacccacacttctgtctgagttcactacaaatcatgggtatctgcaaccccctcaggttcgataatttctttcttgggggttgggggagtttaggagcagaggtttaataggcaaaagaaagaaaaacgagaacagatctctcccttgtgaggggcttccgaaaggaaaatccggcctgcggtggactgcaccagattttataggtaggcctgaggaggcggcgtctgatttgcgcagagcccacaggttggtttgaacaggtgtgacgtttacatagcacgcggggaaggttgggcgccccaccctaatcttactatgacaaagggcagagtgaccttgacatgccatgtgctttccagagcaagggcagagagtgacgctcactgtggtgggagaggagaccctctgttcctagaaaatcacaacagcatgcccctgtgctatatccctggttactacagcagtctttgttcttgcctaacaagattacttccctgaactgtaaaactccctcagtactgcatacagagagaggttaggagacatggtggtcgtggataggaaatgagggaattatgataggaaagttggaggtcctgttgccgacaccccttagggtggccggaggctggggtcagtccagaagccttcggatggcaccaggaggtagccccagccagaaatcctcagttgctccaggacctcttccagccccacacgacagcttggtcctccgtgaaaggaaactggttcaaacatggccaatatgcccagcagcccgtgggtattggggggttctccatgttctccccagcaagcctgtcccccaaaacttgtaaggctggcagccacgctcataatttttaaatggctaattggtgaaggcagagttttctcattcacagaagcagaagggggcccagtatttggtttggtttgattctaaaatggaggccaagagcctcgaaatcaaaggacagagttgaggtccgcccctttactcacctttgcaatgaatgcaccttggaatcccagacgaagtccccaatatgaagtggcattgttgtctggggtcaatacccggggttcgtcgtctcgcaccaacaaggttaaggacacgatacacacgaagagtgggtttaggagcggaggtttaacacgcaaaagaaaaaggagaacagctctctcccttgtgagagagagcggcttccgaaaggaaaatcccaggttcgatcgtttcttataatggctcacagaactcagaaactttacttatgtttactgctttattataaaggatacagatgaacaggcagtcgaagaggtacacagggcaacgtccagaagggtcccaggtgagcacaggaccttttgtcttcatgcagtttgaggtgcatcgccttcttggtatgtggttggggttaaccaaaccgaaagctctccaaacctgtggtttattttttaatggaggtgccatcacttaggcatgattggttaaatcactggcaactggtggttaatcaatctccagcccttttaccctctctggaggtcgaggcgtggggctgcaaatcccagacctctaatcatgccttagtctttcaggggatagcccccatcctgaagttgtctaaaggatcccagccaccagttagctcactgtcatacactcttatcacttggagattccaaaggtcttagaagctcttgtgtcaggaaccaagaccaagtattctaataaaagatgtttctatcacccctgtcactcaggaaattacaagggtttctggagatctgtgccaggaactggatgaagatcaaatatatatatttattatatcacaatattgcagcctactacttgccaggcacaattctaagcactttacatgtgtccacttaattcctttaacagtccaaaatcagctattgctatatcatctccatattacagataaggaaactcaagcacataggggttaaggttaaccagtgatctggctagtctgtacttttacctgatgttgtgctgccatacagactagatatattttttttttttttagactgagtcttgctctgttgccaggctggagtgcaatggcgtgatctcagctcactgcaaacccagcctcctgggttcaagtgattctccttcctcagcctccccagcagctgggactacaggcacatgccacctcgcccagctaatttttgtattttcagtagagacagggtttcaccatgttgaccaggatggtctcgatctcttgacctcgtgatccgcccacttcggcctcaccaaatgctgggattacaggcgtgaaccacagcacccagccaagactagatttttaagaaaaggcaatccagatatcctagaaggttcatttcctctttttggtggtttagcaaatttcttagtaaggcttctagctgttatagcagcattagtatgtgaaccacagttaagctctagtccaacaaggccatttcttcagcagagaagcaattgttaaataatcgaccaagtattcattggctccctctttttgtatcaacatacacaattgttacagtgccagtgtttattggaaccactttccatggtgcatccagctgtgcctagaccagcaggtctttttccagaagtccagatggcaggggaacctcttcacgttgttgacccttctccctgtaattttttccccaataaaccttttcattatgttgctgtatttatacccaaatacacattacatttattttagtaccttgtacattttgttgcccttataaattggaggggttttaaaaactattttttattctcaatattcattgatgatgtataggactccttctggactgtttaatatatgactgtaaatccccctgaattttcttagatgtttgtagtatctgattatgacagttttgtcttttatttattgccttgttgcattgattaggtcctctaatataatgttgcttaataatgaagatagatatcctatcttattcttgacttttggtataaattcttctaaagtttgagcattaaacatgatgtttgatgtagattcttagtggatactctttagcagttaaagtaacttctcttttacttccagtgacactactacctaatttgaagagaggatttggaattttgagtttcaaaataatactgttttcaaacacttttttagctaaaaagtacacacacatagggcagtgttttaaagtttagctacttcagggcatatgtgtatactcactgaagttttaatttaatggcttattggtcattcatgtatcttctttggtaaggtaattaaatatttttctttttttttaaaagacagagtctcgctctgccgcccaggctggagtgcagtggcacaatctcagctcactgcaacctccgcctcctgggttcaagcgattcccctgcctcagcctcccgagtagctgggattacaggcgcccaccaccacgcccagctaatttttgtatttttagtagagacagggtttcaccatgttagccaggctggtctcgaacccctgacctcgtgatccacccacctcggcctcccaaagtgctgagattacaggtgtgagccactgcacctggccgtaattaaattcttgacccatttaaaaattgcgtgttttcctttttattactaaattataaggattctttatatattttgcatactagtcctttgttagatatttacattgcacatatattctctcagtctgttaaccatcttttcattttcttaatggtgt

SEQ ID NO: 318227 - DNA, 4001 bp, Homo sapiens
tcttttttttttctatatctttattgctgctgcacaaattaaagagaccagtaggctttgatattgcaagtatcagcgttcaagttgtcccttcacagttacagatggaatgatgtctagagtttgcttcaaaataaacggggcggggcgggggggaagacaaaaagagatagggacaaaaaatcaaaagaagaaataaacaagcaaagcctttggaaaatgtttgagtttttacctgatgccataggtaattctctctggacccaggaattcacaaaatgttctccctgagggaaattaaaattcaagttgttgattatctgactttttttttttttttttttttttttgaggcagagtctcactctgttgcccaggctgaagtgcagtggcaggttctcgtctcactgcaacctccgcctcctgggttcaagtgattctcctgcctcagcctcccgagcagtacaggcatgtgccaccacacccggctaattttttttttttttttgtatttttagtagagacagacacgatgttggaggtctttttttttttttttttttttttttgagacagagtctcgctctgtcgtccaggctggagcacagtggcacgaccttggctcactacaagctccgcctcccaggttcacgcgccattctcctgcctcagcctcccgagtagctgggaccacaggcgcctgccaccatgccgggctaattttttttttttttgtatttttagtagagatggggtttcaccatgttagccaggatggtctctatctcctgacctcatcatccgtccgtctcggcctcccaaagtgctgggattacagacgtgagccactgcacccggcccatgttggaggtcttgaggctggtctcgaacacctgatctcaagtgatctgcccagctcggcctcccaaagggctgggattacaggcatgagctactgcgcccagcctgattgtttgacttatgaagtatatacctatctatgaacaagaactgaaggaactttaccccagaatgaagagtttcactggatggaacggcagagtcggaggagaattattcctttaatttttatttctgttgatgttgcaattgtttttatgcagtgcaagcaaacatacacacacacacacacacacacacacacacacacacacacgcatgcaagctgtgaatgtttatgcatactcaggaggaagccttctcagggtcactgtttccggaaactgaccttgaaaacagacctgcatttaaatatcacagatgtactttgacgaatgaggaagtaagagacatagaatggtaactaaattcatcagggtattatatattgagcaactgattcttctgggaaagctgcacccagtttctttttgaggaaacacctctcttcccccactgtcaggccatgttctctatagagttctggtctcctgagtcatgttaatcaataaattctcatttttgtttaagccagtttggattcgatttcccatcactctccactaggaaatttttactgattcaggatagttagccagctaggaagagccagctctgcagcccactgtgggtgacagcgcctaggtcaggagatcttagcaagcctgcagataggggcagcagagggaagctggggcaagtggcttcattcataaaggggaagactatcaggaaggcaagcagagcccgtcagaagccagccctggaaaaagaaaaaggctctaggtcagcaagtgaatgtgatatttttcactttgaagatgggagccaggggaatgaaaggagaaaggaagaaagaaatcaaacccatgacataaaaagaatgcctatgcccttctgagtcagacacttacaggtaatccaaaaacttgagaaaaaaattgctgttatacattaccgttatgtcaacaaatcccttgtagctttgaatatactgggtaatttcctctgaggatttcttactccgaagaaattcacatctgtaattaataaatataattaaaatttaccccagtactgtgatagagctgtcctatatcacaatgaacatttataaagacgtattgaattgttgaattttattatacttcaataaaattgccaaaaaatttaccacaaaacttaggagaattaccattattctcatataattatttgttatttctattagtgacaacatgtgtagttatttaaaattaaatcttcaggttaacttttttcttgaaataaaacatgcaatacaatcaaagagactgatttacagtaaatataggatggagcttttgttttttggaattaagcagtggtgactaaatctagtcgctagggttatatgaaagctactggcagtaaagagaactatatttaaaataataggccagacgcagtggctcacatccaggagttcaagactagcctgggcaacatggcaaaaccccatctccacaaaaaatacaaaaattagccgggcatggtgccacacctctgtagtcccagctactcaggaggctgaagggggaggatcacctgagcccggggaggtagaggctgcactgagccatgatcaggctgctacactccagcctgggcaacagactgagacccagtctcaaaagtaaatacaaaaaatctttttaagataacaatatatttatctactgaacaaaaaattaccatgcattaaaaagtaatggctattaggccaggcgtgatggctcacgcctggaatcccagcactttgggaggccgagacaggtggatcacgaggtcaggagttcgagaccagcctggccaagatggtgaaaccctgtctctactaaaagtacaaaaattagctgggtgtggtggcaggcgcctgtaatcccagctacttgggaggctgaggcaggagaatcgcttgaacctgggaggtggaggttgcagtgagctgaaatcatgccactgcactctagcctgggcaacagagcaagactcaatctcaaaaaaaaccaaaaacaaaaaaagtaacggatgttaatggataatttttgatttttttaaaaaagagcacactgaataccatttaaaaacatattcctttcccataaaagagaagcagttttaaaattaacttttaaaatttcctccaattcagctgggcatgggggatcatgcctgtaatcccagcacttttggaggttgaggcgggtggatcacttgaggcctggagtttgagaccagcctggtcaacatggtgaaaccctgtctccatcaaaactacaaaaattagcctggcatggtggcatgcgccttgtagttccagctgctctggaggctgaggcaggagaattgcttgaacccgagaggtggaggttgcagtgagccgagatcacgccactgcactccagcctaggcaacgagagcgatacttcgactcaaaaaaagagaagttatctctaggtaagatcatgatggaaattttcatcttactttatacctttcactgttgaaattattttacagttgaagtaaaggaaattttacaatatccaacaagagccgatgtcatttatttaatatcaaaattaatattggaaaaatgtctatactttaggctaccacccatctgcctgaattaatcagcattaatacttaattttaaatattacctgtcaacgcaggtcactgaatatgatctcctttaaggtattatcatgtaataaactgctacaaaaagtctaattctctcaagagttttatagtcatccacttcattttcaggtcaacattttaacatattttcccatatttttttctgaagctttaatctctgcaaagcccatctttaaatttgaaggaaaaggtagaagagtgaggagcagcagtaattaacttgaatttggaacttggatataactaaagacacattttgcttcttcatttttatgtcagtttgcaaaggaaacagttatgattttagctaaatacagaaatttttttct

SEQ ID NO: 318228 - DNA, 4001 bp, Homo sapiens
tttttttttctatatctttattgctgctgcacaaattaaagagaccagtaggctttgatattgcaagtatcagcgttcaagttgtcccttcacagttacagatggaatgatgtctagagtttgcttcaaaataaacggggcggggcgggggggaagacaaaaagagatagggacaaaaaatcaaaagaagaaataaacaagcaaagcctttggaaaatgtttgagtttttacctgatgccataggtaattctctctggacccaggaattcacaaaatgttctccctgagggaaattaaaattcaagttgttgattatctgactttttttttttttttttttttttttgaggcagagtctcactctgttgcccaggctgaagtgcagtggcaggttctcgtctcactgcaacctccgcctcctgggttcaagtgattctcctgcctcagcctcccgagcagtacaggcatgtgccaccacacccggctaattttttttttttttttgtatttttagtagagacagacacgatgttggaggtctttttttttttttttttttttttttgagacagagtctcgctctgtcgtccaggctggagcacagtggcacgaccttggctcactacaagctccgcctcccaggttcacgcgccattctcctgcctcagcctcccgagtagctgggaccacaggcgcctgccaccatgccgggctaattttttttttttttgtatttttagtagagatggggtttcaccatgttagccaggatggtctctatctcctgacctcatcatccgtccgtctcggcctcccaaagtgctgggattacagacgtgagccactgcacccggcccatgttggaggtcttgaggctggtctcgaacacctgatctcaagtgatctgcccagctcggcctcccaaagggctgggattacaggcatgagctactgcgcccagcctgattgtttgacttatgaagtatatacctatctatgaacaagaactgaaggaactttaccccagaatgaagagtttcactggatggaacggcagagtcggaggagaattattcctttaatttttatttctgttgatgttgcaattgtttttatgcagtgcaagcaaacatacacacacacacacacacacacacacacacacacacacacgcatgcaagctgtgaatgtttatgcatactcaggaggaagccttctcagggtcactgtttccggaaactgaccttgaaaacagacctgcatttaaatatcacagatgtactttgacgaatgaggaagtaagagacatagaatggtaactaaattcatcagggtattatatattgagcaactgattcttctgggaaagctgcacccagtttctttttgaggaaacacctctcttcccccactgtcaggccatgttctctatagagttctggtctcctgagtcatgttaatcaataaattctcatttttgtttaagccagtttggattcgatttcccatcactctccactaggaaatttttactgattcaggatagttagccagctaggaagagccagctctgcagcccactgtgggtgacagcgcctaggtcaggagatcttagcaagcctgcagataggggcagcagagggaagctggggcaagtggcttcattcataaaggggaagactatcaggaaggcaagcagagcccgtcagaagccagccctggaaaaagaaaaaggctctaggtcagcaagtgaatgtgatatttttcactttgaagatgggagccaggggaatgaaaggagaaaggaagaaagaaatcaaacccatgacataaaaagaatgcctatgcccttctgagtcagacacttacaggtaatccaaaaacttgagaaaaaaattgctgttatacattaccgttatgtcaacaaatcccttgtagctttgaatatactgggtaatttcctctgaggatttcttactccgaagaaattcacatctgtaattaataaatataattaaaatttaccccagtactgtgatagagctgtcctatatcacaatgaacatttataaagacgtattgaattgttgaattttattatacttcaataaaattgccaaaaaatttaccacaaaacttaggagaattaccattattctcatataattatttgttatttctattagtgacaacatgtgtagttatttaaaattaaatcttcaggttaacttttttcttgaaataaaacatgcaatacaatcaaagagactgatttacagtaaatataggatggagcttttgttttttggaattaagcagtggtgactaaatctagtcgctagggttatatgaaagctactggcagtaaagagaactatatttaaaataataggccagacgcagtggctcacatccaggagttcaagactagcctgggcaacatggcaaaaccccatctccacaaaaaatacaaaaattagccgggcatggtgccacacctctgtagtcccagctactcaggaggctgaagggggaggatcacctgagcccggggaggtagaggctgcactgagccatgatcaggctgctacactccagcctgggcaacagactgagacccagtctcaaaagtaaatacaaaaaatctttttaagataacaatatatttatctactgaacaaaaaattaccatgcattaaaaagtaatggctattaggccaggcgtgatggctcacgcctggaatcccagcactttgggaggccgagacaggtggatcacgaggtcaggagttcgagaccagcctggccaagatggtgaaaccctgtctctactaaaagtacaaaaattagctgggtgtggtggcaggcgcctgtaatcccagctacttgggaggctgaggcaggagaatcgcttgaacctgggaggtggaggttgcagtgagctgaaatcatgccactgcactctagcctgggcaacagagcaagactcaatctcaaaaaaaaccaaaaacaaaaaaagtaacggatgttaatggataatttttgatttttttaaaaaagagcacactgaataccatttaaaaacatattcctttcccataaaagagaagcagttttaaaattaacttttaaaatttcctccaattcagctgggcatgggggatcatgcctgtaatcccagcacttttggaggttgaggcgggtggatcacttgaggcctggagtttgagaccagcctggtcaacatggtgaaaccctgtctccatcaaaactacaaaaattagcctggcatggtggcatgcgccttgtagttccagctgctctggaggctgaggcaggagaattgcttgaacccgagaggtggaggttgcagtgagccgagatcacgccactgcactccagcctaggcaacgagagcgatacttcgactcaaaaaaagagaagttatctctaggtaagatcatgatggaaattttcatcttactttatacctttcactgttgaaattattttacagttgaagtaaaggaaattttacaatatccaacaagagccgatgtcatttatttaatatcaaaattaatattggaaaaatgtctatactttaggctaccacccatctgcctgaattaatcagcattaatacttaattttaaatattacctgtcaacgcaggtcactgaatatgatctcctttaaggtattatcatgtaataaactgctacaaaaagtctaattctctcaagagttttatagtcatccacttcattttcaggtcaacattttaacatattttcccatatttttttctgaagctttaatctctgcaaagcccatctttaaatttgaaggaaaaggtagaagagtgaggagcagcagtaattaacttgaatttggaacttggatataactaaagacacattttgcttcttcatttttatgtcagtttgcaaaggaaacagttatgattttagctaaatacagaaatttttttctttt

SEQ ID NO: 318229 - DNA, 4001 bp, Homo sapiens
ctatgtatatttacatagctataaacccacaagaatgcacattaaaatattacctttggttatctatttggtttttgtttagggagggttttgcagttttttgggctttcatcttttacaatttttctaggaagatttttttctcttttttttatacttcaattctgcataattaaaaaatattaaatgccacactaaggaatacatgattttgatactccagcaaattttttatattctagcagtatgtcagcattacctaatagctcaagaagatggcagtacaaagaaaaaccacagctcttttgctcgttagccttatccaagtcaggatgaaaaggatgaaatcagatgacagtatacagtaggggtgatttgcaaacactgtggtgacagttaagtggcatctgttattcccattttattaaagcagtaaggaacccgcaggctgcccaaggtcatagaaaaaaagcatgtgctagatccatgtgctctgaagagatctaaggattaactgcattgccacaatttgggccgtgtttataaaaccaagaagtgaaattcttaactagtcattttgggagtccaagcctgagtggggacggattgcaacacatggctgatgatagcaaaacaaaccagtaaccggccggccgcaccagggttaatctacgttttcatcgtactggctggctttccttacttctaaaatataaaattgtagatcgtctaagataggacattttatttgataaaaggaggattgacatctgtatgcaccgaaagcatctgaaacatgacaaacacaagccgttatttgcggttccaatcaacatcagtttaccacctggctcaattcccaccattactgtatgttagattaacacttccaaaaaccctgcagaaggtctctaaatttcctgggggaacttagctacagacgcggagtgaaacaagcagctcttttccctggggcctcaatgtattaaatcaaacccgagaaaatgatccaatcatttcctatacatttcctccccagctatgccatcaaatctcttaaaacgtcacttccaagcatttaaaatacacccggcacacgccctgcagacttcatcgtagctctcccttttggggcatcaccacagccaaacatcgcctcttccaaatctactgcaaactgcgggcttgtctcttgcttcattttttacttttgtcttaaaacggaggcgagggggatgggtttcgacaaactaggctctgaaaccctgagcaatagcatcttgctgtggggagctatcggcagcagcagagattttaatcttttctctccacccagtttccgtttcatgcttttttctttctttcttttccaatgacatcaaaccaaaggtggaaaaatgaaaaacgaatgcctcagatcgatgccgcctgtgggtcgcgggttctgactcagggacccgcccgccctgggaaatgcgggaaacgaggccgggaggaggactttccaccgccggagtcccacctggggtcgcagacgggcaggccgggcccgtggcagcctcgaatccgagcccggggcccgacccgcccctccaggcccagcgcggcctgccaagccccggcgtcgagttggccgcgggccggccagagaggcctgaggcggccagcgggcagggcagagccagggaccggagttcggggctggagtcgggcgccgcttacctgctggtaccggctgccgcaggccggctcgaccgccgccagcgccgccaacgccaacgccatggcgcagccggcagcagggaagcagagcgagcgagcgagctagctgaaggggcgcggccgctgcggcttgggagcgctgggaggccgagggggacgcgccttgggtgggtctcgatggccgccgccgctcccgggcgagacgctcttctcaggctgtaagcaccgccgccgccgccgaggctccgacgcggcccctggggaagaggcggggactacgacgacggcgctgcgccgccgccccacccccgactcgcgccgccctgcccggcccggcccggcctagcctagtcctgcgccgccgccccgaggtgcaccggccctggtgtagttgctccgacgacctgagcctccgaggctcaagtgttgtattcgattccactaaaaacgaattactaacaggccagcccaaagcaagggcgatgctgctgatgagcacctcgtgccaagcactgagcttcacctacgtgccctcatccagccttcagcacaaccgccctgacgcagggaccacaaccccattctcgaggtcgttggcaaccagagaggttgacaatcttcacagcagcgacctgatccctcgtgtctggcagcagaatcgtggttcttattcactcccttcttttatctgccgtactcataaaccaggggtcagccagcgacagggagggggccaaatccggtctgccaccatgactgtgaaaagtacatgaaattcaagtttcagtgtccataaataaagttttattggaacacagcagcacccatttgtttggtatggcctgcaaaccctataatacttgctatctgacattttacagaaaaagtttgctaaccctaaatccttgagaactgcttggatctcaaatcctacttagggtggatgattataatagcatcctcatgtttatgccatcctttagtattttaacagcctcatctgcggaatcggaaacaatattttccaaaaaagctccctgactcggtgacatgaagtcaaaacttgaagggtttggccatgctaaaggctttcccgaccacaggaacaggtgcaaagggcggtccagagagagattgtcttgtggaagaacagaaaggaggctggcatagctgccatataggagatacaattatcagtgtttcacagatgaggaagttatgcccaaagaaattaaatatctcacccaatgacacagagctactaaggggtgaagctggaatacaactccattaagccagctttcttacccagtattgcacaactaaattataagctttgtgaagacaagagtatttgtcttttaaatcttattacctcccaatgccatgtagcacagtatagctatatagcaggcttgcaaggtctgtttctttcacacccagccatctgcaattgcttctacccacatgtcctacagagaaaaacaaaatcttccatctctgaagcttgttgcaattcccatttcttcttcattgcctttccaagttggcagtgtagaggttatattaatatgattattgtcttagcttctaattttgaagtttagttaattatgtattttaaaagagaactgtgtttagaacacaccctgaggtttctgtatatatgagaaaattgtaatcaataaaaactctagatgtttaccatcttcactttgagttctctctcagcatccaaactcctctatatctgtcgctatttccaagtattagtctcacatattaacatgctgggagagcgaacaaatgtagcaacattccaagctctcaagtctatttagagcctccttactctgtccctcagttgttgtttataatccagaaaaacaacatttaaatgtaatcaggtacagtgaatcaaacataatgtcctgccatgtagtcttgtataaagggtgcaaaaatctaatttgaaattttttaaaatgtcagcagtggaaagtagaaatccagacttctttgtccagattgtctacatttacgtgtaagaaagaataaaaaagaatgtccactgggcacagtggctcacatctgtaatctcagcactttgagagcctgagactcgaggatcacgtgagcccaggagccaggagttcgagaccaacctgggcaacatagtgagacacaatctctgaaaaaaaaaaagaaaaagaaaaaagaatttgtcggcctaccacataaggctattggagcaacaactgcaatctttatgcatgtct

SEQ ID NO: 318230 - DNA, 4001 bp, Homo sapiens
gtggggcccgccctttcagggactgttatctgcagcttaagaagccgcctgggtcagtggctacgcaggcagagcttatcttgggggaggattcgagggtcacagagcaggctgacccagaggcctctagcaaatggaaccttcacagctggagggatagaccatggccacacctgctttcacacaggaagcacttgttatgctcctactggggaaaccgtcctgagcctaagcatgatgctccaatgcttccatgcttcgagggacacaaaggtgattcagcccacagcccttacacccgctgccttagaagagcccacaaaggaacaaggtaggagagaaagtggttcatagcttaaggacagggttgcaaactcagatgcctccagtgaccagaaagatcatgtaagcatatgaaatggctggctggggatggggtgaagtgtacatgcctcacctccagcaatgacccctggagaatgtaggctcaaggttttcctgtcttccaatttttgaaataaagccagaagtctgagtttttatgtaaaacctctggttggcaaccagctcaatatttggcatggaccaaacaaaatctgcccatagggcaaatgtggcctgccagtttgtgacctctgttttcttaaaagggacagagaacacactgtggagctcagtagaggccaacttccctgcagctgaggtaccttggaaggcttcctggaagagaaggcattggtgctgggctgcaaggatggagaaggctcttctggggaaggaatcctggatagggagtggggtgtacctctagaacttcagaggccataggcaggaacatcctgtccctacaacctggcaggctggaccaagagcccaagtcatctagactcctgtgtttcctccccaaaaaggaggcatgaagcaggcatagaggtatcagtttagtgctgtccccaggtagcgggaggaggggccgccagcccagcaaacctctggactaaactaaatcaattggtggcagaatagcaagggtccaatttcatccctggagcttgaggaacaggtcagctaacgacagctccgtggggggaagggagagaaagagacaatggagggacaaaaggaggttgagaatcgtgccctgcctggccagacccggctggttacataaccctgcctcaggacaaagccagggagggcctgggctagggagtcccagaatgcagaaagggtttcccctacctcccctgcccacccctgctctctaagctggtcctgcagctcctagaaagcccagcacagagtgcggagccaggggtggagactaagaccccaggatcagacacttacaagatcactcagcaaattcatagcagagctagaactaccaacagcaaacttttaccaaatgattactttgtaccaagcacgaggtaagtcctttacaaacattaacttacctaaaagtctaactataacaccatgagataaatactgttattgccattttactgaggaagcacagacaaagtaacttacccaatgtcacacagctcctaagtggaggtgccagctcagaagccaacagcccgtctccaagaccacaccctgacccaggatgctacactgccaccaggctactttctatttgcaccacgctgccaccatttctcaagcccgcagtgcacacggccccgtcagcactccacagggacacccagccttctgatgatctgatgaaaccaacaaactctttcttcagaaaaagaaaacacagaaatgcctacaactcactgcacctttgggggctcatggacccctgcactggtgggaatggacaggtcacgatcacaggatactcaagagacaggaggtagcagagggagccgactccctcaggtcccctgggcctcctcatatcagctttcatccacaggcgtgggcatggatcggtgctcagggcctcgtcatcccttcggggccgggagaacagaatgaatcacggcacacaatggcctgcgcctctgtatccactgggtgtgactcacagctcccagctgctgggcagacggtgcacagctgggcctggcatctggatgagggtggcattaccaggtgtaccatctcagccttctccccaccagtgggctcatcttgcccaagaccagacctggccttatcctatccccagcagcaatgagcattttgaagggaacccctcatcagtgaccgcccagcccccatgccagccaggtcccaggaggtggtaagtcaagatggacagcctcttgcaacacataggaagatccaagacctcggctgcctcactgtgtgacctcaagcaggccccccacctctcagcctccatttcaccaactataaagtgaggagactacttgatcgagtccttcccagctccaaagccctgaatctataaaaacagcacctaatggccaggcgtggtagctcatgcctgcaatcccagcactttgggaggccaaagcaggcagatcacctgaggtcaggagttcgagaccagcctggtcaatatggtgaaaccccgtctctactaaaaatacaaaaaaaatttagctgggtatggtggcacacaccagtaatcccagctattcgggaggccgaggcaggagaatcgcttgaacccgggagatggaggctgcagtgagccaagatcgcgccactgcactccagcctgggcaacagagcagactctgtctcaaaaaaatataaaaatttaaaaaaacaaaaaaacagcatctgacaagcttcacagagtgctgggatcctgccttcagaaagttacacaaacatccttcagagaaacaaaagtcaaacttaaagcctgtattttttttttctaaggatatcaagaagccctttttaacttccctcatcccacctccattgttccaaatatcctctcagggcccagaaaatacatttggtttccgtctggggtttgggcttcttggtgctcttcctcttggaagttgccccaccccttcttggcagtgtcttcacaaggcaccttcatctctacccccagcactgctctgggccaccctgagggcgacagctactccgcctgccaaagaaggggtggggtagggacaggttttgggaaacaaaccccttcctggttggaactgaaacaattctggattctggcctcaacagtaattctgaccccctgtgtggccgtgggtgagtccctgctccactaggcctcaatcccctaaatgtgaagtgaaggggttcctgtgtcagacaaagactgcccacccttgggctcctgggcagcagcttggggacaccgaggcacgaaaagacagcagagtggacagtgggctctgatcttgaatctcacatcccctcttgttagaaccaaaggagatctactctttttgctgtttgagacagggtctcactatgttgtccaggctggtcttgaactcctgggcttaagcaaccctcctacctcagcctcccgagtagctgggatttctggcacatgccaccatgcccagttagagatccactttcatctctctgatttgttcttttgccctagcagtggaaccttgaactcactactgaatctctgagcctcagacagcccatccacaaaacaggagaacaacaatgtctgcagtggaagccccagcttggaggctggagccctaaccaccccaacacaatcccatccaccttcctccaaagcataattcactcatttgacaaaatatatatttggggacatctttagaaaatcaccgtaagttgtgcctatgatacaaacactccatgacaatcccctactgctctccttccaatgagatcatgcctttaagcactctatatatctccacagaattcttagatctatccttttatagctgtgtggcctcagtattttcatctattaagtggggacagtaatagtgatgatactgcctacctataggattgtcctggggattgct

SEQ ID NO: 318231 - DNA, 4001 bp, Homo sapiens
gtcacacagctgggcagaggtggagctaggatgcccctcccagcccaccccacagcccctgttcgttacccttctgcagtcctactttccacaccactcccaagccaggtctgcagcccaggagagaggcttcctggaggtgaccaggcccagggctgctgacccagcttctctagctgagcttcagcctcctgggaaagcctgcactgcagagaggtgcaccatggaacccagcaaggcaggacttcagccagagggtcctcacgcccccatcagacaccccaatataagaaagggggatggcggctcggggcagtggcccctgcctgtaatcccagcactttgggaggctgaggcgggtagatcacaaggtcctgagatcgagaccatcctggctaacacggtgaaaccccatctctactaacaatacaaaattagccaggtgtgtggcacatgcctgtaatcccagcaactccagaggctgaggcaggagaatcgcttgaacctgggaggcggagattacagtgagccgagatggcgccattgcactctagcctgagcgaaactccatctcaaaaaaaataaagaaaggggggccacctcctgccccaggcagaggcctcatgctaaggaagaggcaggagcgagggtcagaagcaggagatctcagctagcagggcaccgcaaaggacaatggtgagcacctcgcctcacggcctggcatgtgccaggcgctctaccaagcacttcccaaccctcacttcatttatttgtcatttatgcccagtgaagtaaaaacaattttatcacaccctgagcttctcccctatctgcctcccctgcagaggagctgggaaatgtgggtcaccactagcccccaccctcccgcatgcccgactccaggcctcagatacaccctgagagattccaaggcacaggcagactcaggggcctccatctcaaggatgcagaagccaaaatccatgcgggcctggaaaccacaacagcctcccagtccttccctcccagtcatccccttcctctcatcaggggatgagaggtcattgtcccctgaatgagccaagcttccccagcttgtaaggtcaggcagaatgctggcaggaagacagaggcagggggtgccacagcctccattgccgcctgtgagtctctgggcaagtcccttcccttctctgagcctcagtttctgcaactgcagtgaggggtatggactagaggagaagtctgtgaccttctgggggttatagaaccctttgagaatctaatgatggctattagcagattctctccccagacacacaaattcagagtggttgtgactggcccccatcaaaagccaagttaagaacatggaaattctctaggggcccctctggctttgacaagccatggctctcacagtctagacaggaccaaagccacaaacacaacatctgagagccctgggatctcaccatttcagcttcccccgtggccctgaaataaatctttaaactcttggacctgctggcttcaggtggatttgtggacatgcctagctgtctggagaagccacaggagaaactgagcccttccttcccatccctcagcctcctcctccttctcctccatcaggaatctgccaggtcagcctagacctctccctggggcagttccgggagctgcttctgatctggaatgaaggcaggacccagtgccaggctcaagtgccagcctgtacccccagatccctcctggggacacacacacacacacacacacacacacactcagatggacctggaaggactggacagggcagggggccagggacagtggtcagagtggacaggagccagcgagacaatgaccagacccagacccaccggagctccaggcagtggcgtgaggttcctcttcacttcgccacgccctctcgaatgtcctctccttaacacggctgcacctaatcccagggccaggaaaaatggcattactgttggcccagtcccctccccaggagaaagggaaggcagaagcaagggagggaggtggccctagagcaccctgcgccaccaaccacgttcctagaaacctccacgccccttcatgccacctcccttgtcaaggcctccagcccctacctccttaacctcagaaagaggatgtcctcctccgattctgccccgtgcccagggaaccactggcacctcgcctgcctcacccaagccctgcctggaggagccttccacgggaaaggaaaaagcatgtccctgaccctcatgctagtgggtcttctgaccctctcaagagaggtagcagccaacagcaggaggagcactcactggcaataaggataactgggtcctggttccagccctggcccttccccctccagacctcagtttccccacctgtcctgagaagaagaggaaggactggtatgcccagctggagggaaaagtgtctatgatgctggcttttggcccctggccccacccagctcagctgccaggcccttccctgtgccccaccctgcagagaaggaagaaaggtgaccggcaaaggtgtggagggtgtaagaatccatgctggagcctcaaagtgctagagctgaaaagggtcttacaaagacgagacccagagaagagaagcaacttggccacggtcacacagaacactggaaaagggccaggctggccagggcttgcttcttgacagcaaatgcttaaaagcacccagctgaaaaggtatttgccttcttagaggatgccaaggagagcacaaggcaacctgacaacagtagaactgcaggctctgagagctgcagttaaaaaaaaaaaaaaggtatgtttatacgtggggcttaaggatggaggttgggctggctttccaggctcctcatgtcacaccacgtgggtggccaagggtcctgccagccacagggaaatcctaggagccccttccagggattagcagctttggccacctctcaagaagtcacctaaggcccagcaggcaggcccagcagtggtgacagaaagaatggctcagatggacactccaagactagcccactctggaagatgccagagccttggagagactgaaaatcccccaagccccgtggccagtgaggacggaagccaggtgggctagggataacacagaggaagggaaaagctttgagccatctggagccacagaagccccctaatctcctagaggcctggtgggtacaacacagggcctgctgagaccaaggaggcttcaccgagggcccacatgaaagcagccagtccctgtagacttgctggggcttgtcatcacgacaaaagctggccaccaacacgccttggggtgttaagggactcaaagtacttacatggaggcgcagctggcagggggagggggcagaaggtggggagaggtgggggcaagtgggcccggctttctctaggacacagacaacagctagagaacagaaacgtggagcaaaaagcactgggtgacctacttcacagaggctccttttaaagaggaataggaggcctcagcgagactctaaaaagtacctcgcaggggtccagaacagttcatggggccaggagaccagggttccagtcctagatcaggaactcacccaggactaggctcaggtgaggcccgcgaggagccttttagaaggtgctcactgccaggtgcagtggctcacgcctgtcatcccaacactttgggagctcaaggcaggttgacccaggagtttgagaccaggagttcaacaccagcctgggcaacatggcaaaaccccttctctacaaaaaaaaattacaaaaattagacagcgtagtggcgtgtgcctatagtcagttatatgggagggctgaggtgcgaggatcacctgagcccaggaggttgaggctacagtaagcccagattgcaccactgcactccaacctgtgcgacacagctagaccctctctcaaaaacaaaggttctta

SEQ ID NO: 318232 - DNA, 4001 bp, Homo sapiens
attaaagagatatgatcaaaatacatttggtatgcctagaattaatacaataggtctcaaacacatctaggaagcccaagtccaaatagaattttggctgattctggatggccgcaatgggttgtttcagggaagctttcgggggcactgtaggcatttattattaactacggtgagcaatgtattgcatgggtccagcctcagctgggagcccattctctctctttttttttttttttttttgagacggagtctcgctctgtcacccaggctggagtgtggtggcacgatctccactcactgcaacctccacctcctgggttcaagcaattctcctgcctcagcctcctgagtagctgggattacaggtgcccgccaccacacccggctaatttttgtatgtttagtagagacggggttttaccatgttggccaggctggtcttgaactcctgacctcaggtgatccacctgcttcagcctcccaaagtgctgggattacaggcgtgaaccaccgcacccagctgggtacccattctctaggctcccataggctatctaacataatacccagcacaatacactaaagttactcgtgtctatctcctcctgtagtctactggcttttggaaggagaagcttttttccttctccaattattagtgcatgtctaatgtctactgtgtctcacagatatctactctgagaaccaatctgcttaaggtggtcactctcctccacctcctcccgtcattcccagggcaccatatagttaaaagctgtgattaaaatcctgttattcagtatgtataaacatttattgcatacctacaatgtgttaggcaacatgataggaaaatttcattttgcaatacattgccatgccagtcttagaggggtaagtgcattctaggaaggggaataaatgtaaaggctcaatcctgttaaactctagctgcatctaaagttgcagctagagtttaacaatagtgcaaaacaaagttttgattccgttttctaatctctacagtgagaaaagaagaacacgcttcctcctaactaatgaagattaaatgagttaggcagggaagcactcagcacagggcccagctctatgtgcaaaattactgagattctcacacactacctggactgacactggctacacgttatttggagaaactatattgactaacttctctcctgtctgaagcccattcttaactacaaaaacgtcagctcctggtccctacgcaggattcggtcagcctgcatacttatgttgcccggaatacaacgcatcatataaccctgcgaatataaatttcttcatggaaacaagatcaacagcaaggctaaagtccgagttctagtttctccacgggtttctgcacgaccttgggcggtcccttctcttctcaaacccttgttcccctaccggagccccagacccctggcgtcccgcactcaccgtagcgggcccagagcttgggctgcacatcggagcattcgcggattaggatgggtaggtcgggattcgccttcttcagctccacgtagcgtttctcaatgaagtccctgcggggccggagagagcgccgcgcgtgctgtgggcgggggcttccctcaacttcagggaggtcgaggtcgtgaccctggcgtcccgaagcccgcccgcctcaccacgccgcgcctcacctgacgccctggctgccgggcgagcgctgacataagtggatgcgaatctcacgcaggcccagctttgccccgactcctcgacttgctgcggccgccgccatccttgttaatatcgaagtcgccaattccaggtcttcaggccaagtgctccggtctgaccaaccgcggaccctaaagcctagcccataggctgcatgaggcaggggcggggtaaagcttggccaatgatataaaagtattgtaggaccgctgcgaggtcaatttctttgcgctcggggttggtcggagggaaaaacaggaagcggaaaggctgcgaacgcaaagcagtgtgggttgattctgaggtgcactgtgggaaagagcttgtcgctgcggtgttgctgttggagactcgattgttggtgacagcgaaagaacgataacaaaatgccggagcgagatagtaaggctcaggccatccgttatttcttccccatggcacttggggcacttggcgcattattgtagcttctgagcttaagccgggtgtgtgtgtgtgtgtgtgtgtgtgtgtgtgtgtgtgtatgtatgtatgtgtgacgcttgagcccggagaagccacagggtcctaagtgaggccgacagctccaaactccgtccccagtcctcactcctactccaagtgatgatgggcggcttttgtgcgtggatcgctttcccccagtcctgtccccatacttaatcctgggttgcgcgtatttatcttttacgtagtattttagacgtgatcttccggaagtcttctctgatcctccagcgcaggattagggtcctctgctttgtgctcccacagcttcttgtagtttcctatttcagcacttattacattgtgttgacactgtcgctgttctaacttttgttctgtattgttcactactatatctcaaatttttgcataggatctgacacgtaagagactgattaaattaacgtcaattttttttgtcaggtgagccgttctccaaccctttggcccccgatggccacgatgtggatgatcctcactccttccaccagtgagtattttgtgctaggaccatggaaatgagttgggcaatgaatagaaaagtggtggtgatggtgaaagaattctgaatgtcttgtcatcaaggatggtaaaaaattatacccgctggccctttatctctgtgagccttaactggatcaggccaagtgcataagggtattagaagggaaattcctgcaggaaaggtgttaagtttttttttttttttatacgtgttgtgtaattacacattatataggaattacttcttccaatagcaaattaaaacataggaaataagggtaaaatcatctttttattttttttgagactgagtttcgctcttgttgctcaggctggaatgcagtggtgcgatctcggctcaccacaacctccgcctcccgggttcaagcaattctcctgcctcagccttccgagtagctgggattacaggcatgttccactacgcccggctaattttgtatttttagtagagatggggtttctccatgttgatcaggctggtcttgaaatcccgacttcaggtgatccacccgcctctgcctcccaaagtggtgggagtacaggcgtgagccaccgtgcctggcccccgataaaatcatctttgataacatccccaattccagtccatttctttttttttttcttttcttttcttttctttctttttttttttttttgagacggagtctcactgttacccaggctggagtgcagtgatgcaatcttggctcactgcaacctctgcctcctgagttcaagcggttctcctgcctcagcctcccaagtagctgggactacaggcatgtgccaccatgcacgactgatttttttttttgtatttttagtagagacagggtttcactgtgttcgtcaggctggtcttgaactcctggcctgaagtgatccacccgcctcagcctcctaaagtgctggcattacaggcgtgagccaccgtgcccagcctcagtccttttcttagaagtaaccacagttaccttttttggcatatcttttcctcccgttgcccaggctggagttcaatggcattatttctgctcacagcaacctttgcctcctgggctcaagcaattcttctgcctcagtttccccagtagctgggattacaggcatgccccaccatgcttggctaatttttgtattagtagagacagggtttcgctatgttggccaggctggtcttgaactcctgacctcaaatgatctgcccgtctcgg

SEQ ID NO: 318233 - DNA, 4001 bp, Homo sapiens
tacccaagagatatgaaaacttacgttcacacaaatcctgtatgggaatgtttgtagagcttttgtcacaatcacagaaactggaaacatcctaatgtccttcagcttgtgaacagataaactggcaaacccatacaatggaatactactgagcaataaaaaggaacaactactgacacatggatgaatctcagctacattatgctatgtgaagcaagccagactcaaaagtctaaatcctgtataattccatttatatgatattctagaaaagacaaaactataggcccataaaacacatcagtagttgccaaagggtgtgggaatgaactactaaggagttggaggaaattctgatggtgatggaattattctattacttgaatccagtgaggttactctactcatttgtcaaaaacaataaaactgtacaccataaagggtgaatgttactgtatgtaaattatatttcaatttaaaaaaactcagtctgacagtttgcatatttttaattttactgacaacttatggaaaagaaacatctctctgcttgcaacctgtcaagaaatacttaacaccatgctatgttctttgcaggcttttttctttttttgtgagacatattccctgcctgacagaggagctcattagggaaacaagtctaaatattaaaataagttacagaaaaaggccaggcaaaaataaattaattgagtgataaatcacagaatacattttatatgtgtgggaaatgaatggcacataatcttggaaaggtcttagtgcttctcaacattgctgatcttatattatctctaactttcaagtgaggatgttgagacttggagaggacaagtactttttccgtgattcccgagctatcaggtgtcaaagctgagattctaacccacgcctcttcgcccaaaacctgacattttctgcatgcggcgatggaacaacacagaagaggttacgacggcggctacacagtgtgatttcaatggacagcaacgcctccttactccccaaacaacccgctcaactacttggcacgaatcctacacagtaacaccatgattattgccacgtttcttaaattgagctcaacggggtcttggaatgtcaactcccgagaaaggaatcagcgagccttgtggggatatggacctacttctgacaagtcttggtagtaaggaaggcgcatggggccagcgccggagccagggtgccaccgaaaagggtaaacaccaagaaagaagacagccgaggcgctgaagatactcctcttcaattacaccactcagctctgggtcacaaggcggggaacagcgtacgaaaaacccctcccctggcccttctagcccctttggtgaaagatttccgtggacttttccctgcctccgtcgccagtccagggctaaaactgaggctcctctacaggcgtggctgggaggaaagtggtggtgcgccttaacagcgcaagcagcccggggcacgccgggggaaggcgctgggtagtagggaccgcggacgcacgaggccgggccaaggcgcccagagccgggccgggtagggctccgatgccagagtgaaggggtcgacaggggagaacgaactcgggaaattctctccggtgacaccctaagtgtcgcatgatgcgttagttgactaggggctctcacttttccctcctttactgacctcgcaatcactgaccacgcaatcgctgcccacgccgccacctcacctctccagttcttgtactgcgggatgtagtagtatttgttcccgaattggtccgtgcccacgtgctccttcacttcccttgacagcgatctccacaaggcgcggaacaaatcctgagaccaacccatgccgtccacccagtttccagcgctgccagcagcgggacccgcagtaggggtaatgctccagccgccgacccagcccaccgaggcggagaagtcaggtcggcctccatcctggagcccttctagtaacggcgctcaccattggccggatatatcaccgactgaccaatgggagactctgctgttccagtcccgcccctgagctctgtcatggcgacgtccagtgctccagccggtgtgaggacacgatatgctggggtttttgtccgcacgccaaacgggtttggaggaccctcttcgccttcggagagcagagtcaacacggaggtaaagaaaaccttactttttggctaacaggccagttagaatctggaccaatgactgtaagctttgccccacactttcccgtctcatcgctctcctgccaccaaactattatttgccctctaatgctgtgtggcttgctaaaataggatcccttttatttactggtaacaacttgcaggcggggggcggcgggggtggggggggttccccgggggtggggggggggttcccccgcgggctcaggtgaagacactataaacctaaataagaatacttcgttgtactgtattccttctctcttaagttactccaaagaataactgccctccacggactcgttcattcattcagtctgcatatttagtgaattcctacagtgtgccaggcagcctattaaaggcagaggacacaggccaggaattgaacaaagttcagaatgactagagcggagaattggggtagggaccattgacaagagatgaagtagacagaaactagatgaggaagagccttgtgtacttgagtagaggtgtgaagatgagaataaggtaacagctattgcattttgttttctgcttggagaatgggttgcaactgagaacaagagtgggagccaagttaggtaactgttgtgattacacttgtccgggagagagttgttggaagcctgggccacagagttgccaagtagaataaagatagtggagagatttgaacaacgtctgagaaatagaatcaacaggccatggaaattgagtggatacgtgaatgacaaaaagagaagaatgaataatgattcccagatctatgccttgtataagaagttgaatgttggtaatatactctgagagagggttttccaaagggaagaagcaagttgtacttttaattttgcccacattaattgaggaacctgtgaagatatttacttggagaacacagttgcttatgagttctgcgttctggagaaatttaaatattagtttccaacattttatccattacgttttcaatgttgtgaaatatctctgagagttcctttaatgtgttttttttgccagtgtcacttcctctgacacatcatcagcctttcatcacaatcacttttcctcatttatgtctataagttcaccttcactgatttcctcagtctgcatatctagaatgtctcaaatggcggcagtgtcattgttgccacaatcagcatgttcccacaggcagcttttttttcatttgctccatttatgtttaatgcaagtttcacttctagtattatcactcttctttagtgcactttcattcttttggccaatttcctcttttaatctgtaaaattccatgtgggtttatctcaagggcacagaaatattaataacaaacctccatgctttgcagcctgtgtgtgaactgaataacagatgcacagtgaccaatcacccatagactttgaaagaagtaaaattgcaaattggtcaattttgattcatatgttatttatgtaatgatttgtgaactgaaaagctagtagcaaacttttatgctatttctcacggttaataaactgtggtaactgaaattcatatcagactgtgccaagtgaggattgcttatacgtttaagacaaataaagtatttaaaaattaaaaaaatattttttttttgaggcagggtcttgctctgtcacccaggctggaatgcagtggtgcagttacagctcactgcagcctcgactttccaggctcaaatgatcctcccatctcatcctcctaagtagctgggaccacagacatgtgcccacacacc

SEQ ID NO: 318234 - DNA, 4001 bp, Homo sapiens
cagaaaacaaataaatgtgttaatttgtatttaaaaaacgtcttccctggcattaagattttttttcaagattaaatgatttattttcaaatctcttacatttgcaggcaaaaactcttaagtttggatatgtagtaacaattatcatcagagtttcaaaaatctaatctcaacttcaattactataattgctgacaaaatggctttgacttaaaattacagccatgttttgattagccataaaccagtggtcccttcaaacttgttttcagttctggggctaccatgagtacattattatctgggaatgacaattaatccctataatctgtacgggaggaagggctaatcttggtcaccgctatattaactctaagttaaccagtgaagtattttaccttagaaaaatacttaacccagcctgaccaacatggtgaaaccccgcctctactaaaaatacaaaaattagccaggtgtggtggtgcgcgcctgtaatcccagctagtcaggaggctgcggcaggagaactgcttgaacccgggaggcggaggttgcagtgaaccaagatcacgccattgcactacagcctgggcgtcagagtgagaatgtatctcaaaaaaaaaaagagaaagaaaaaggaaaaatactttccatatatggaacacttaattacaaacatcatttgcctttccccaatcttagcacccttacttttgagtgactctattctatgtatttagtaatcgtttaactaatgctttcaagccttttcataagccacggaccctacgggacactctcttctttcccacccaacacccactatatttaaaccttaataaaactcatccttaaaaattcttccgaattaactcatcctaattctctgcattccatttatatttaacactaaatcaattagcattctactagaccttcctttcaacttttaaccacttgcatccacctcctacccccttcaaatctctccatccagtctttccaatctttgttctaatatgtgtgtgtatgtacgtatagcattagtactataatttaaaaaactccaggaaattctgaaaaatagaaaatggaaggttaatacagccaaaaaaaaaaaaatcatcacaaaaatgcttcaaggaaaaacagtaacaactcaatcaactgacaactgaatctgacaatactttggaaaagtactactttaggttctcaaggacgcaaagagccctcaacaactcaattcaatccctgaattattgtgaggctttaacaaaatccctagaaaacctccaggcattaccaccagccttttaaaaattaccttccaatattactagcagtgatatttttactaacactgaattccaaacaagttttcctcccaagcagactgatgaataaacaatcttcctatgcagaaaccaaattaaaaccacttaaaaccatggaagggatacagtgatttaacccttctgtaaggactggagtggtgggcaaacaggtgacaaatggaagggatgcagaaagtggaaacagaaatcagtgagactcctccccttctctgagggctaaggttcagcttgcagctccggaggcaaaacctccacggaccctctccctcagcgacaagccgaatacgaaagcttccagaaaaccacaggtcctcctccccggcctcgcactcacgccctcactcgcctggccaacgcccattgatagcagacagtccctagtccgcccgacttctcccgagaaaagggtcaacagaggacgccttccccgaggcctcctccggaactcagccagcagagactccgcaaaaatggagggacccaagaagcttgaagaaaagtgtgaaaattctattacctggtcggaaccctggaaacggaaagggcagctacagccactgcccttctccgccacaacgtctgcctcagtaccactgacattgacaccgccgccatcttgctgcaggcaaacgccaggatgaaaggacggatcaccgcaagggactaacttccttcgttctcaagccagtgcaatcgcaatgttgcgaaattctttgggattttattttctttttaatactggggcttaaaaaaagaggggaaacgcttagtttaaataagtaagaagaaaaatgtgcgggaagaaatgcagaagtgcattaactgtaaatattaccaccataaagtgtaatctttactgcttgttaggactggtgttttacaatgataacgaaaagaccaaaatatacttgcatatttaaacacctgcaactcgtaatttattgaagaaattaggatatttggggctgaacccactggaaaagctggagagctctttgggtccttgagaacctgcagtagtacttttccaaagtattgccagattcactttgcaagccctcaggacagggctgtattcagtttgatattctgtagtagtaatgttcgtattttccaaacgaaaaatctggatacgtgatctggcaaaggattattttttgacatgtagatttatatgaagaatcaatagaacataatatttgatgtcactgtttccccagtaaatcctgaatgtgtgtgtgttcataatccatagacatgaagaatgatattaatgctccatgcatataaaacaaaaattatcttccaatacaagtgttggaaacatgtttgtattgtggacttccgaccttaaagaataatgactaactgaattatataaaataaaaagcaggttagttttgggttttgttttttaagaaatttgtttaaagagttagtactttcctgcttttaaaattaagcacatgaaaacataaccttcattaaataaataggaacaataggaggatggggaatgacatagtttggcattatggaccgttaaaggaaaacccagtacataagggaaagggagaaagaaagagaaaaagtcatactcagggaaagaaatgcacaagatgaaggaaggcaagggagagatgcctcagagaaaattttctttcaaacttttcattttgaaatagttatagattcacatgaagttgcaaagatagtacagatgtcttgtgtacctgtttcccccagtgattacatctcgtataactctagtacagtatcaaagccaggaaactggcattgatataaagtatttgtgtagtcctatgtcattctactacatattttgtgtaaccaccaccatgatcaagatacagaactattccaccctcacaaagatctccctagtgctaacctttttggtaacacctgccctcctaaccctagtgatctctgtttctgtttttataattttgacattttgagatgttatatgaatggactcatgcagtacatgaccttctaagattggcttctttcacttggcataatgcacttgagacccatccaagttgttgtgtttatcaatagttcattccttttttattgctgagtaatattccatgacatggatgtaccacaatttgtttaaccattcacctattgcagaacattttgattgtttcccatttggggccattacaaataaaactgctgcaaacaattgaatacaggtttttatgtggacaaaaatcttcatttctctgagataaatgcccaggagtgcaattgccaggtcatgtgatacatgtatgtgtcattttttaaagaaattaaaaactgttttccagagtaactgtaacattttacatttcctccagcaatgtatgagagatccagtttctccatatcctcaccagcattttctattattgctatttttgttttagctgagctaaagtaaataataaatgtgcagtaatacctcatcacagttttacatttattcccctggtggctaataatgttgaatatcttttcatgtttttatctgccatctgtatattccattcagttaaatgtccttatgtcttttgcccattttctaattagcattatttggttttttacctgtacattttgaga

SEQ ID NO: 318235 - DNA, 4001 bp, Homo sapiens
catcaggcctcaggatctttctcaacccaacactcaagtggcattgccaaataatcaaccactataaaacaaacttttctgacacccacccatcaaaccacacaacagtgaaccagctgaattttgagaatgtgaatttatagtcaattcatgatcatgtgagcttttctggaatgccctgtagctctggaatagacgtacaaaaactacacactgggaatggataacgtaaccaagattgaaggagaagggaaaatacatgatttagggatagctacggtgttaacaagaagaacaccaggctaaccaaagtgggaaaaagaatgaataaggtggctgtgaaggacacttcacagcatccttcaggaagcaaattcaggaatcatggaggcatgcctgatctaattacgaattcaggagctcattgacatgagtgatagagaaggagtcaggtaaaaaaaaaaaataggctgatttaggcagaaggattctaatttcaacattctttctccagtggtcactcacaggcacctgaactgatcttcccttacaatgcatagagctaacagacccactaagggaagaaaaactcatgtgccattttcagcttgtcagtgtaagtccctgtaaaaaacacacactaatttatttggtgaaaactataaaaaacacacctccaggtggttaaaagaataatttttttaaagttgatatgatttacttaaatctgagagtctcaggagaataagggacaagaattttaaaaaagatcacttccatttatatgcaaaccagaactacggctacaatgttatgtatttcagggggaaacaagtcagaaatagacacaattaagattttaagaaaggaagaaccccatccagaactgttagggtgcttgcaatatggggaaaatttatttaaatcttatatattaatttttatttcttgttggttacataaaagttttaggaaagcttacctctcttcactagattttttactcacctctttctgacgacctacaaaccgaattctcctgtagtctttatcatcataaacctggaaaaaaacaaaaagaccatgtgtgacttttacggcctaattctgaaagtcacttcatatcaatcataaatattacaggaaagtgtttttcttaacttttaggccattgatgaaaagtcaaacaagtgcacagtactcggtgtaatcaggggcatttttagcgagatacctgggatgaaaacgggtggtcacctggatcagagagcagcacagagacatagcccgggaaggtggagctaaggaggagagacaaatcctgaccgaggagaaccgcccccaaccttctttggcatatggcctgagagctttactatccccccattaaatctactagggcacattccagtatacacaggtacctttgttcttcattttggcttagggcttttttgtgccttggactacaaccgacttctcaggttactaaaatttattattgaatattacacaaattctaaacgttctgacccaaataatcggctgccacaaatcgcctatgggcagccagtccacagcaagtgctgcccgctggggagacttcccgttccagagcccgcaggccctggaaggacgagacccaccgctacaggctgccaccaccgtcccgactcgcgggcgtcctccccggcgcgtgagcgacagcacaaccttaccacgacctgcgctgccggcgcagaaccagggccgcggatgcccggcgagcccactgccaccagtcgcccgaggtgcggctggaggaaggtgcatcctgtacccagcggccgttacctggccagtgtgcgtgaccttctccccggtcggcgagacccgcaccccgaaacacctggcgcccaggggcaggctccgcgccgcctcgccacaccggttcagcagccggcagaaggtcatcgccgccgccattttgcgccgctggcctttgacccggcgcaacgtcccgcttagcgctaacgcatgcgcacggcttctggcggcgccaaacacccggtatttatttcgccctgggggcggggagcgcgggtcggggcagagggtgcgccggagctgctctctgattcaggtggtcacccgttttcatcccaggtatctcgctaaaaatgcccctgattacaccgagtactgtgcgcttgtttgacttttcatcaatggcctaaaagttaagcggccccgttgcgccggcaggtgcagcctcatgcagttgcagccgcaggctagagctagggccctgatgaggcaggcaatggtgtgcgaaaccttcagcgattaggagtacccagtggttcttatttagcggacaggcaggggaggatgtaaactgaaaatacattgtttatattcttatggtaaccgataatcatgagacatttaaatatcaaaattattgggtgaaggagtcaactgcttagcagacgagactggaagtgcattctcctcgttcaaggcaagcgttcctgtgtgtggttacggggagccgcagaggaaacgtatattggggatttctgcaacaaagcctagtacaccgactgattttacagcatgcaaatacagcctctaaaaaggcccgttttgcttagagttgacttgggtataaatcccagcttaagctccagcatccagcttttcttttgctgtggtcagagcctgaggaccacgtgactccaagaacaaaacactagagatggatgagtggcggggaagatgataaagaggaggaaaggcatgagaaacaagaatgcacatgaaaacctccggtcccaaagatgtcccagcaaacgtggtggtcagaggcagatttgtcctggagctgataaactccagcggcccgcccggtgttcgccgggtcaggtggaaaaagtgggcgctgcgatgaagcgttggggcctgcagggagcgcggagtggacgcagccacgtctgcaactcacccggacacacacaaaaaggaaggcgaatggagttacgggtagatacctgaaaaggcagggataagcgagctaagggtagaatctaggtggcaagtatatgggtgttcaccgtacagttctttccctttttctctatgtccgaagtttttcataatgttggggaaaacagccgtaaccagttgaaactactgcccgtctccactcgtttcccggagcctgtttacatttctcctgtccacttaaaaacatgtcctctttctcagtttgttttgacattggtatttgccagttttttctaaggcctaagtggttgtaatttctttttcgttgcggatatccattttcgttcctggtttttgcattttttttcccgagagcgctccaaacagcacgacgatcccggtggcccgcagagtgcgcgcagtcggggagtgatacgtcgcactccagcgcctgcgcactcgctgctgcgtctctgcgccccgcactggacgtgggcacgccacgtgacccccccccccgccgccatcttccttcctggcagcagcgtccgcgtgccagtgcgcagacgcaggggtcggcgccgggtgagagcgtgcggccgggtaagggagccgtcttctcaggtcaggggtcccgggtgtcttgagagtgggggctgcgagagggtggggccggccaccttgggaccctcgggcgtgtctccccgagtgggctgcggtcagaggagcgtgggccggggcctggcggtctcagagggccagggttggggggtgcgggtccgaccgtgggcgcccgacctggcgacaggagggggtgtccagcgaccccggggcgggagaactggcggctcccgaacgcgacctcacagcccgcgcgcagggccggctccggtgccgcagtgtcctccgggccctgcaggcccagctcttcccagccggggccgctgaaccctaagggccggggcgcgtggggaagcaggggcgggcgaccggggtgccagagttccgtgctc

SEQ ID NO: 318236 - DNA, 4001 bp, Homo sapiens
cgatgtgactcaggaattccggttctgaccccttcctcaaactcagtgcaagcttcaatccccagagaagagtctgaattccccatacttagacactgcagtgggtaaccaaccttaactgccggctcccagactagggtggcccagtccacagagagagagttgagagggatggagaatacataaatctctagctatatttagcctgcctggcgtgtgtctgtccctttacgcaccccagggctgacccacaggtggcagaatggctttttactagaatagtataaacatttttaaattaagaaaccaaggaaaggggcctgtgccgaggtgcctcatcccagtgtctatgtggcgagaatatctgctgccctatttgccaacatccccagatatctcctgacccgcgggtgggttctcccccaacctggcaatagccctgtccacaggaggtagaggccaccctccagtaagcagacctgggttctaatcccacctctgccactgactagctggtgactctgctgatgattacagctctctgggaatttgaacgtttgagtgcagttgctcagaggcttgtaaagtaggagttggctcctcttccataagctgaccctgggaatcctgggctcagcactgtccacttcaacccgctccaggggaaattattctttaagagcatgtaatgcctagaagggagagctatatgggagtgttatagcagagatggggtgatatgtccctcttccagaacctcacactaaattaacctcacagctgacttgcttccccattgagccgagcctttgtgctttagacacacacacactcctctcaccttttgcccaaaggatgctacaaaggcccagccttaagacaaaatacttctaaatacttgggcgtgtgaggggagggagggcagagagacacaggtcccactccagattctcccactactagctgtgtgaccttgggtgagtcatttcacctcttctgacactcaatttttttatttgtaaaactgggatacacatctttatcgcgaagcttctttgcataccgagctggggtatgcaaagtgctgggcactgaacctccacgggcacgcgcgggcgcgggaccgctgatctgttcccacaattaccatgtattttccagtaaggcctcctcctaccccgttaacctgctccggatcccctcactccggtcccagaaattctggggcgattttaactagggggcgatgcgatctgcagcagcgactccgagggggcgaaggagtccccagtggagcggacaccagaggggggcgcaaccggggtgcgcgtgggaacgtggccaaagcacggcagcatgtgccgcgggggcgctgggaggctggaaactggggtgcccctgagagcacccctcactctcggcagctgcagtcttggcaccacgggtggcttctgaccgtcggaagccctggcgagcccggctccagtcacccccacccaggtcgccttgagtttgctcatcagcgccctcgggctggaacaaaggcgagggggcgcgcggcatcgccccagcggccctttttgcgcatctggccaaagccgggagaatgaggactggggtccccaaggtaaccaggacgcggtacccgccctcccggggcgcaaagcccagccgcggggcgcgcgccgagctgaggtccgggaggtaccggagactccagcccgctgcgagccgagggctccaagggccgtggggtagctctccagagtcacccagcgggtcccccggaggagagaagcccggcgcccgcctcccgggcagggctccccggcgtacctggcagggtccggtgcaccgtgttgcccatcgctgcgtcgggcgcggcgttggcggcggcgcgctctgggcgcgcggaggctaattacgcggcgggccagggaccaggaccggggtcgacgctccggggcatcgcagctgcacgggcgagccggcgggcggcagctggggcgggagccgggagggaggcggcggcggcgcctgcgggaggaggaggcggagccaccggcccgggcccgccggctccgcccccgcctcccaccgcctccaacagtgcaggggcggggccgcggccgccgcatcttttgaaagtttgcaccaggcggcgggagaagcacagccaagcctcccgccctcgccgctcccgcgcccgggccgggaaggcgcgcagggcagctgggtgccctcgggtgccaggatcggcagtctgctggcctgtcacccatttgttctaacactttgagaaggcccactgtgtgccaggccctcttccaggcgcggggccccagccggccgagtcctagccccggcagacctctttggagagtgcttcggccccgggggaacttacacagaggcagacgggcccctgggaccatgtaaagggcttggagacagtacacccagggttcccgggtttgggtggagtcttttctatcccctaggccaggtaccgaggaatagaagaaacccagtgtccaaagattgggaagagggaacccacattcattaatttattcgctcattcactaaaatatttattgagcacagtctatgcaccaggcactgtgctgggccgggtagatacagacaaggtccccactgccctggagatggcatgctgaagatagaaataacaagcaattacgatcacattatataataatcaaagccaggaagaaaataaaacagatcccagtagagtgaggagatgacattgtttgggggcatagggagaatctggggtgggggcacataagctccatctgatggactagaaggcgtcggccatgagaagagataggtagagtgttcctggcagaggcagtaacaggcattcctcattcaggcacctggaccacactcagtgggaagtgcagctgtgcccttctcgagctccatttcacaggctggaacgctgaggcccaggaagtgcaatgacttccccaagaagacccgattccaaatgagctgtttttttcaattctatttttcatgctcttgtatcccttgagactttatgaaatatgtattattacttccatttcacagatagggaaattgaggctctgagagtggaagagaggtgcccaagatcttccaatggtacagggcaaagctagcctgaagctatgcgaataaaagcggggtattcaggagacagccttctgcatctccggtgccttctgcttacagtacatgacccatcccagagggttctagggtctttaaggccagctccaagcttccacttccgggaaaccttgattccccactcccccctgacgtcatatgtctgaacataagattgccttgcatttgagttactaatttctcatattacaggtgctcgcccagtgacttaatttttaaccccaaagttctgtttgagaaaggtccgttagcgtgatcctttttttttttctttttttttttgagacagagtctcactctgtcacccaggctggagtggaatggcacaatcttggctcactgcaacctctgcctaccaagttcaagcaattctcctgcctcagcctcttgagtagctgggattacaggcacccactaccacgccccgctaatttttgtatttttagtagagatgggatttcatcatgttggccaggctggtctcaaacttctgacctcaagcggttcccccacctcagcctcccaaagtgctgggattacaggcctaagccacctcacctggctgatcctcctttaatctatgtgacattgggttgcatatggaggtcagcaatattataaagggaattgagggaattttcctcagataaggcaatgcaaacaaatatgactttgtgacggcaagggtgagaggttgtgaacaggccttttaaaggccactttcagagtacctcagtaagtggccatgttgtgcagatcacaaatactcacctgcagcaaatgaatcccta

SEQ ID NO: 318237 - DNA, 4001 bp, Homo sapiens
caaaagaaagactctcccactgcccctacctcaacaggtagctgcggatccggggctaattccctactaaaaagtcttaattggcttatggggagcctgaaagatctcccttgtgtttacaaggtgaaaggaatgatagatcccaaatgccctagtctgtctttatccatttcttggtggaaatcaggtgcgttttattttttaattgtttttgaaacaggaacagaggctttggaggtgagtgggatagtgtttcactttagtggttgagccagcagggaaaagcaagaaaagccccagagacactaatattaggcaagaaacttggcgacttatttttagtttttatttacatgaagcgtctgcagtacaaaaatgtaaactttgatagctcataatagaataaactctttatgtacaaaaatacattttcatatgaatgaagcatcttgaataaattaaagtactctccagccctgtgcctgaatagctaagcaagagtctccagttcttcctagagcgagtctgcagtggtgggggtcgggatccataatgcatgaagcccactccttgtctctgctttttaagccttttcattgtattgtcagccggctcaaaccgaattttcatgctcgtttttcttcattagagttctacaaattgtaaaattgacttttcacctcgtcttcaggggctgatctgtcccttttctaaatcacactgaagtggtggctggggtcagttctgagccagtcacaaaggaggttttgtggagttcagaaagtgcaaaaggaaaggccgtctaggggcgggcaggaggggcgctgggctgagggccggagaaacagaccaagagacatccgccgcgagggtgcggcgacctaacaagcggctcaggtatccccgactgctttaaagctcccgcttcctccctccgcctggagagggggtcccgaggcggcagctggggccccatctattgcctgctgactaggggagggggaaagtaacagtgtctacaaagggcctagtggtaaggaatgaaacagggcgttgtgtggagcaagtctttgggcaggcttgggaaggagaaaacagggtcgccggggcggtaggtgaagtcttcggaggcggctgggctactggggtcagagagcggggaggcggcggcggcacctgagccccaggactccgcgtcgctggcggggcttgggggaccgggcaggcaggggacgcactgcggcggcaggaggcgctcccgggcaccgcctccgggcagcccttgatccgccaggcgcagtgtctcggccagagcccagatgtagttgtaggcgaagcgcagcgtctcgattttggtgagcttggtgtcgtcggggaacgagggcagcacgctgcgcagtgcgtccagggccgcgttcaagttgtgcatgcggttgcgctcgcgatcgttggccttgacgcgccggctcctgcgcagcgagtgcagcagcgcctcggagcggacccgcgtccggccgcggcgccgccgcctctcctgctcgtcgtcctgtgcccctggaacctcagacgcccgggagatattgggcgcgcccctgcgggccggcgcgggcggccccgaagcggaggctgcctgttggagtctggcacagtcttcctcgtcggtgaggaagccggataggtcactgccgctgctgctggcgcagtcgaggtcggagatgcaggtctcaaggcgggctggcatcgttgcgctgtgcaggaccgacggacagatagaaaggcgctcagagcgctgcagcccggactgagggcagagccgccagggcgcacttacgttcccaacagcctggggttgttactctgtgccagttgcgggtgcgagagcctggaagggtgcaggggcgcacggagaacttggcctggcctcctcgcctcgcctgcaggggccacgcgcccggccggtctcctgagtgatgtcgccggcgatcagatcagctcgtgtgagcaccgagtgtggcacacgactggcctcaggaccccttaagtacccggcgcaacaatgggcgcccccctcccttgccacctccgcccccgcggcagcccgggtgaatggagcgaggcggcaggtcatccccgtgcagcgcccgggtatttgcataatttatgctcgcgggaggccgccatcgcccctcccccaacccggagtgtgcccgtaattaccgccggccaatcggcggcgtcgcgcggccccgggagtcggctcgggctaagctggccagggcgtctccaggcagtgaaacagaggcggggtcggcgggcgattagcggccgaggcacgctcctcttggggcgggctgggcgcccctcgctggggtgggacggggaggcggggcgcgagcgcgaaagtgtgagccgcccagtgagttgcggaaacctggagggtacttggagtttgggttcgcatcccctctccagctgcttagtggtcgcgtgactttggacgagtaatttaacttccctgagcattgctttccccacctgtaagatgagacaaaagtttaccctgtggaggatgatcagatataatgtttgtggaacactaaatgtgcagcatccgctgaacagggtgaaaatcattttcaaatagactggagagtggccatgccagaggcacagggcgcagggcaaggataagtgtcgctgctccgttcaggctgatgaagaaacgggaaagaatctgaccttcatctggggagtgcgaagaggagagtggaaaagaggatcgggtgatttcccaggttgccttgagtcttggtctcacccttcccttctttcccttcccttctccaccctcctccgcacctctgcccacaagtcacctcaagattcttaataagaattaataatatgagaatttatataaataataatatgagaatataattattaatatgagaatttccttttctttggcgttcctgaaaccttgcctgccccatgcccggagaaatccgttgcacaccgtctcttggagccctgcttgcagcctctgtggccctcttcagggtgagccagccaggggatccagctcccctggcccgagagagagctggcccctggagggcagcaggtgacagtggaacccctttcctccaaaccccctcccgccttcggtgtcttaaactcgcctattccagcaggtcttccctctgcatgtcaggagttacttttctcttgtcacctacactcacccaggagccacaggggcccagacatcacccaactttgtacttggaggataaatagtaaggaacagcactcgattataggatgagggtattaaaaacaaaatgagcagctttcagcaaagtgcctgccccccacctgatatccaagtggtagcctcaggccggatgcctggcctgctgccatgggagcctagctgactctttgggttggggggggattggcccctttgagaaagggggctgtgtagtggcagttcccacctcgactcactgaccagcgcttgccttctggctcaggggactctgcccagctgtccccttccccgactgcaccctgcaggtacccctgatctcagtggaaggctaggacacagtcatatataagggctcgagatttattagaagtcacagaaagtggcttcgaccagctcactcaggaaagggcagttgttggatggatacgggggcttctcaagaactcaagggcttcgaggacttgtgtaaaccagcaggagcccaagggtcctctctctgccccccacctctgtttctctccctgtgtcagcttcctttctttggactgccacaacaaaattccacaaactagggggtttaaggcaacagaagttcattctcttacagttcaagaggccagaagtctgtaagcaagtttttggcagggatggctccttttcggaggctctgagagaaaatctgtgacatgcctctcttgcagcttctagtggtggctcctgg

SEQ ID NO: 318238 - DNA, 4001 bp, Homo sapiens
ccactgttcacatctcaagattgggccctctgtccctccagctgggcatgtcagaacctagaagtcgtcaatacctccccattctccacatctgaaagtcctttcaaatctgtcccctttaactctgtctccaccatcacctctccaggactacagtagtctactacctgaactttcccaaacctactcgtacctctctaatcctttcttcaattgtcagaaaaatcttagggtgtaaaaaataataaaaattatgtcacttcctggctttaacccctaatagcctccaaagtgctgagtataaaaactaaatttactgtgtcctacaaggccccctaagaaggtagcacttctgctcaccagaccctctcctgcccagaggcccactctttcttctggcagaatcctcccacccaccccccaattaatccctgtgtcttaagacctcagctcaaatgtgactgctgagggaaacttccccagatgcgccctccccagctaggttagatgccgttgagcatcaagtctgcccaacattattgatctcttgagcacctacagtttcacttcttgggataaagcaaggaggccctgttctgaaggagcttaccatctggcctgagagggtgataaagggaagaaaaatgtaaacaaggttcaaactttgataaatgccattaagaaaagtggggtgatgaagttatcattgcactctgttattttccttcatggctatctatcacaacgtgtaattagttgtgtgtgtgtcattatctgatgaatgaatgtcactgtttcccccataacacagtgcctgaaaaagagtacattcaattgttaaggctgccaggcgcggtggctcatgcctgtaatcccaacgcttcgggaggctgaggcaggaggattccttgagcccaggagttcaagaccagcccgggcaacatggcgagactcctctgtctctgcaaaacaacaataacaacagccaggcgtggcgcaagccggtggtctcagctattcgggaggctgaggtgggaggatcgcttgagcccagggggacgaggctgcagcgagctgtgatcgcaccaccgcactccaacctgggtgagagctagacccatctcaaaaacaaacaaaaacgttaacgttcagttccttaaatacagagccggagaggggtcatccctaggactgagattcagggctgagaggattagggcgggggccggaggtaatctgaggcaaggagcggagcccggggaggagggtccctgaattaatgaaggtgggtttactctaagggactttgcttacacaattcgcttcactttggaattcactttgagctggtatacgtggtgtaccggtattgtcgtaccggtattgtaccaaagggactttaccgactgcttgattggcttctgtatatggggctaggtcagagttaacctttttactgcgcgcctactaagtagagatttctccgttaacgtttagaaatgcaaaatccagaggaaggaaggttcttaccctttttctcctttgttgacaaatttctgaacctctttcaccccgcgccgaatctgcttctgcttcaccgctgcaacgacagaagagtcggtcgggggcctcgctcagccacccgcgcacccatcccacccgcgcacccatcccggccacgccgccgtccgcctcacctttcttgatgcatttgtagagcttccgcgtgaggcggcgagaagccaggggctgcgcgatggggttctggttgaccagcagctcctggtaggtgcgctccccggaacacgcctccgcctgagcctcgggcccgtcgggatctgcctttattttggtcatcgcagcggccgctgaaacctagtcccagggaggcgagcccacgcggtccacagctttaggcatcacttccaggtcatcagctgcgcgagaagccgccgtacaacacggccaatcaggaaaggaagtctccgactcagcccaatcgttgacgcccagcttcgtaactacggagagcggagaggggcggagtcatggtccttaaggcggggccatccccggaccaagggactgggcggaaccgattagggcggagcggagggaatgtgaggcaaggggcggagccctgggaatcggggccggagagggcggggctctgggtgctggaaaggctgcctcgttttttttcttttttgaggcagagtttcgctcttattgcccaggctggggtacagtggcgcaatctcgactcactgcaacctccgcctcccgggttcaagcgattctcctacttcagcctcccgagtagctgggattgcaggcatgcgccaccacgcccagataattttgtatttttactagagacaggggttctccatgttggtcaggctggtcttgaactcctgacctcaggcgatccgcccgcctcggcctcccaaagtgctgggattacaggcgtgagccaccgcgcccggcctaaggctgcctcctttcttgcataatttttctttgttttctgacccctggacccggctgcgcaggtgtgaaagatacagagcaagggatgaccccactgacctgcgtctgcaccgcttttccacagatagcgtgtggctcactctcatcccgcagggttccgtttcagtgtttcccatgggagaggtttccctggtgattttatctaaaattgccgtcccctctctctccaaaccagcatcccttcacccgctattttcccgcagttcttaccattgcctgacgctacacatgcagagggcctagccgagaagccagccggggctgagggaaggacggctccagcgaagccgggaacagcggagggaaggctttggggactgagctccctgccgtgcagggtgagagctatgaggagctaccctttggacgggtctgtagaaggtaaagggacagagctgccagggcgtggggggcggtggcaggccgagatccagtggatcttggtatctctgattagcctcttccactatattttggaactctggatggatattaattagataatcgctgcaaattactaatttgtaatactaattacctttgatcctgatgtggcaggcctgccatttttgtgttgctggaacaggccagtaagtagaaacttagaagtgttccggtagttgtgggtgggaacacaggtcagttaaaccaacttaaaaattggcctttcccgggtgtggtgactcgtgcctgtggttccagctacccgggaggctgagagggggctcgcttgagcccagaagttagaggcttcagtgagccatgactgcacctgtgaatagccactgcactccagtctgggccacccaggaaaatcttgtctctaaaacaaaacaacaacaacaaaaaccttgtaactctgaactaaagtgcaataaattttgttttgcattaaataaaaacaaataggctgggcgcggtgcctgtaatcccagcactttgggaggccgaggcgggcagatcatgaggtcaggagatcgagaccatcctggctaacacggtgaaacccccgtctctactaaaaatcactctgtccagcagagtgatggagaatttcactcctgagaacccagttcaaacaaattcaaacaaatgggctcgcttgactgacctcactcagagcctcggttgtgaagtcccttcagctcttacatggaaggaaaaagaaagttaacatttatgtggcgagcatattatatacaatatctcattcagtgctcaccaaaaaatacctctatggtaaaggtaaagactttaccatccttttaccaggaatatataactttatattcacaatttactgacacacataaagatgaatagtttggtacagctcacacaaagctggatttgaacccaggtccacttgtctccaagcccagactttacccatacctgtgatttgacatttgacttcagctcaaaaggatacgtaaatagtgaaagtg

SEQ ID NO: 318239 - DNA, 4001 bp, Homo sapiens
ctggagggcagtgtttactctcatttgtctgagcggaaagctgtgttgcatggactgcaaactctgaaaaaataaaataaaaaaaacaacaacatgccttgggattttagtactttaagggaaaaagtaagtacattttcataaactcaattattaccatggtgacaacgagggtacaagagaaggtcctctggagaacagttcctgcttctaactagacagcctctcaatagagcagggcgacttcttcagtaaccatgacaaccagaattagaagtgctgttgcaacactaacagaaaccatcttttgaagcggttctgtgaatcacattgaatactgatgatgcaagctagtgtgatacatacttttcaaacattaaaaaaaatcttattaccataaacaaatattcaccttagatttccatttgaaatcttgacttggaatcactttttttcatctggtttcgtttgtttcccttttggattcccgcggcctcaattgcaaacgcgatttgtgtaatttccaaacttgtcagaactgcacgggtaagagcttagaatgtgattcattcgctcttattttgaaacgggatgaggaatggggtgggggagggggggtagacagagagccctcttgtctactgtactcaggaggacgaaaacaggggagggaaggggaaaagagaggagaaagggagaaagggagggagggaggaggagaagagaaggggagaggaggaggaggaaaggagggagggagaagagggaaaaggagggaaggagggaaggaaaaaacagaaaggaaagaagtgctatagcagaatctttgctgcccatgttatctattgccttgacttctccatctgccaagatgtgtcaagcacgcagaagctggctggaatcgatattttaaagacccggttgcgatcttttcctggtcgtatcaaggagtcctggagcttctaatattcctggagggatatccaggaagaggaaaagaggctcttccttacttcgtgcggtcttccaaaagaagcacctttcgctggggagagtcgcggcgtggggtgcaatggaaggttttgttctcctgggccacatgcgttagatgtcagttctctccaccagcagcaccggccggcgcgcgtggggagatcacgccggtcttctgcccttgtaacaaacgctccagatttggtctggtgccttagggctctggtccagcgcacccgctgtgcgcaacgctaggcgctaagctgcgctcctcggctcacgtgtggacgcgcacgcagacacgagtgtccacaccatacagagacatgggtgcacacacgcgcgcacatagacatgggcgccgcacatgacacgggcaccacacatgacacgggcacacacgcgcgagcacgctctcgccctggctctaatgccccctcctctcgcttgcggatcggcctgggcaggtgtgggggtacgccccagaaagcgcctaaccttcttctgaccccacttcgcagacaccccgtggcagggcttcctttcttccttgggtcgcggggaggagaggcgcctcctcctcagccacccaggtctgcagcctagcagaggaagggtggcggggtgggggtgctggcggcgagtcccccagcccctcgcttaccttcgtggcgaggccagctcttgggcttcgctgcacggcgccaggctaggcgcgctgggttgttgcctctggagcaggagcggtcggtgtgtggatgtcccgaggtgagggcgccgctgtcgcgcttgaggctcccggagctgtcaggggcggccgacctgaccggcagcggcccagggcaaaccccgccctccggcctaggccggctccgcagcggggaccgagacgccccacagcgtttcctgaaggaccaatccggagcgaggggctggcgtggggaaggagggacggggggcctgtagtgcacccggacgccggcctggaccttgtaagctggtttctatggcagccaggagggaggggcgagagggaggggacgcgcggcgcagggacacccagtgcagtcgctcggggaggggggtgattgggcctgacgcaaagaggaccccttctagagtctggatgggagcagctacacggccgaaagcgggctgacacagctcccaccgacgtacgcctcgtgccgagcggttccagcgcttcagcaagggtttccatgtccttgggaaaccgtgacccagtaatcctcccaacagaaagggggtttccagcaaaccaccgtgacagctcctccgggtgagtcgggcagggtttaggttctgcagaaagaagtgctaatgtcaccctctgtctggattcctggcatacatcggttcccctggtgccactttgtcactggctccctaatctcctgctagggagatactctcggctgtgaccctcagatgccaaagattatttttctagtttataaactagaaataccgtcactggattgaacgtagagttggaaatgggattcgcaaaatactaaataaaacataccggttatttactgaagtttaagcccttccttttacagagagagaaaaaaaaaactgagttcagaggggtcagttaacttagcaagggtcacacaactgattaatggcagagccaggactagacaccctaagtcatagttctgcgagcattctttctacttcctcctgctctccatcctgtattgattgccagagcaatatttacaagagcaaaactgttaagtagcaacataacccatgtctacaattcttttatggtagaaactagggaaccccaaaattccttttttgctatttgccaggcattgtaataaactcttttacaaagagtaactgattaaatcctcatgataatctatgggttaggtactgttactgtcatccttgttttgatagatgaagaaactgaagcccagagaggttacaggatttgatcgagatcacacaactgttgaatgctggctctgggactctaacccagtttgtttgactccagagttggtgttcttcattactttgtctctgctgcctgtttgtgtgatgattaaaggggtcaggaacgggaagggcaagaaataaaaaccttggacagctccgtgcactgacggttgagattggaaagaaaattgaaagaacctgaaacaactgcttccttggcttctgagagtggtcatctatttatgtagaacaagggttctctcgagaaaatttgtttttaaagagacatcccctcctcaaaagacaagaggtttgttgttttttttttttaagagtaatctttaaaatagtacatgccatcagtctattttctttctaatgcaataaaatgcagggagaaactctacatatttttaaagatataaaagacccttgaattcaaataaacagaataaaatttcatagagaaattgcctagaaaccaagagcctcaaacacccaatctgacagaggctctctgtgacatagatcctcaccatcacaccccaaagagcatgcacaaggcagaggtgatgataggttctagtagcttaaaaggttactgaacactttaggctaataccatcacattgggagttaagatttcaatatatgaattgggagatacaaaaatttagtccataacagaacccttcccaacttttatctttctttcaggaatctctattttatactatgtgtgtcagaccttctcattctatttcatgtcttttctcagattctctagatttttaacattttgtgctacattctaggtaatttcttcagatctaccttctgttcatgaattttctcttgcactaacctgcacactgactttatgataatgcaaatataattaaatcaagaggtttgagagtgccgatttcagtatctttcacagcaggggtgaattgatagcttaaaattgaatcacttatttacaacaactagtattattaaaatcccttttttcttaactt

SEQ ID NO: 318240 - DNA, 4001 bp, Homo sapiens
aactcccaggcagtgcctggaagggccccaaagtccatggtcaagcaactctggctctggcacatctgcagggcagagtggcatcttggtggaacagactaaaggcaatgttgacctttcttccacgacacagacccatgaataacagagcttgaagagcccttagaaagcagtctaaattcttattttttctggggaaactgaggccctgagaaagggaagagcttgcttaagtcaccccaacatctggtgaaagatctggatccagcacccactggggcacatccatgtgtcttttgcagtgtgatatctctctttccaaaactcgtgtcacaatcaagggaagatgagacaagaggcatctcagtccctaatcagacttgttctgcactgctcattcctgtttctccagctcaggcttccttgcccaagagctgaatctggggagttccctgagcccaggaaatgagccagaacctgggagaacatgggctaggggaggtgactcctgagaggaagaccaaactcatccccacgcccttcccctgctccctgaaggtgcacctctagcagatggagccaacgaaccctctgtggatggacttggctgtcacagtaaagcccgcaacacccaagggctgagcatcctccattgagtcaagttctcccactgcagtgaaaagtaaaagacagagggctgatggccaaagtaatccaattctgagcatgggccagatgattcctgttatctcttccagaatatgctaggactggggaacacattctggcctagagaaaaggtgaggctgaaaatgcctgccttgttcaggaaaccaaagtcagacacctaacaggctggctttgaaagcttcactgtagaagggaagaggttagagaaacagggacatgccacagcctgcagttccaagacaaggtaggaaagtggagccacaccaaggaaggagttgaggttttactgtccaccagccttggatctatattccatttcctcactgtattaccttgagcaaattattagctgctcagagcctcagtttctggatctttagagtggggatagcaagatagtaaaataataatacctacctaccttctagagttgttttaaggattcagtgagataatgcgggtaaagggcctagtccactacctgctttatggtcagaacgcaataggaagtcaggggtctttctttaccccttcctgtggttctttttcttttccaaagacaagaccgtcctgtgatggtcctcccattgacccagagagaaagcccaaactgcgcaggtactaaaacctgaagcaactacacattaaaaacacagaatcctccccccgcccccaccacctctcagggtgtctgctgtcgtcaaaatgcctgccccccactaaccccccatctcaacccaggggacatactttccttccctgactcctctcagccatcccagctgcgaagatgaaagtgaagtctcagccagaacccagatcttcaaagctgggtgggagccacctcgtgctggccctgcccctccccagctttggcccccctgggaggagaggatgcgagggagagcggtggcaaggaggggagggcgcgaagcgcggagcccgcctggtccccagccctgccgtacgcaccgttctcgcagctggtgttgctgacccgcagctccatggggcccggggcacacgaaccgacgcgcgggcggacggcgcccgggctccccagctccggagcaggtggccgcgacttgtcccccgcgtggctcgcgcgcgagaagccgccggggtccggacccaggggtggggagagtgacgcgtcccagagtgggagagtccccggggaggagtcacccggcatcttgggcaattccgggggcagggggcccagggctggggccgcccgcagaggggcgcatgccttcctggggtgaggacgctgccaggctcccagctctggagtcaccgccccgtgctaggggcaagaggtgaggaggcgggttccccggcaccgctcctccgatgcctgcaccggcacccagctccatccccagggaaagagtacaggggacctagatggctggagaaggggcaactttcctgccgaggtggaagtggcaacataggggttggaagtgggtactgctgccaattgggaacctgggttccttcttttccttccttctcgccctcctaccctccccctctccttcctcccctccacctttcctcccttccttccatttcaccctcctgcccttcctccctgccttctgccctgcgacctcctttccttgccttacccgttcattgattcaacccaggtctgatctgtgctggtaggtaacaggtacatagtgagttaatgctcaatatatatttatgtctaatgaatagataataggagcttggtaaattaaatgaaagaaggaaatgaagtgattggagaccaaaatgagtcagactattccctgtcccccaagtaccttatattttaatgggggaaacaaaatgtgatcatctcttagagaccaatgtttttgaaattaccactttaaaattatttatacacacacacacatacacacgttgtgatggaaagcatatttgttactatgggtaacagtaaaaagcaagttagaaaaccactgacctggagcataaaaataggtatgtagagtttgctataggccaggcagagttctaagtgctgaaaaattccagttcatttaatcttcatgaccgccttataatgtacagacttttattatttaccaaaaggaaactgaggcacaaagtgctcaagtaacttgctggggatctcagctgagaagcagaaaagccaggatcaaactcgtgctgtcagtggtcacattaagccgcctggcattttacactgaaataaactgctcctgggcagtgagggtgtggggctactgagaaagcagtgattggttctgccagtggtgctcaccggcttcctggaggaggcagcttttaagaattgttatgtatggagtcgtcagcatgggccagacactgtgctaacccctttccaggcactgtctcatcgaagcctcctaggagacagatatccttactctttccatgctacagataagaggaaactgttatttttaaaaattttatcatgagataattttagacttatagaagagttacgaaaatagtatagagagttcccatatacctgtcaccagcttcccttaatgttaacatcttgtataggaatagaaaaaactgtcctttaaatactctgagacacttgctcccaaggttgcacagctagtgaacgagggtgccaggtgtaaaccgagctgctctgaccccaagcctgtcctcctacctacgaccctccactgtctacttgcggacctctagctgggcctctaaggatgggttctcccagcatggggcttcctctaatttgctggatgactttaaacaagttgcttactctacataaggatcaatttctttgtcaaatgcaacagccccttctccaaggggtcgggatcgggttggggaagggagaggttaaaagagaaagggaaatgtgagacacagcaaatgtaacaagccacgtttgctcattttacttgctgcataatttcacaagcccttgattctgtaatgatgtgcacctctctggaaaaatgctttgaaaacaaagcaggatacagcacaaggcccccacaacttttgcctgagacactatatttcttaaaagataaatgaccctagaccttgcctattcctacacataggataatgtttgacaaggttagtgactatgcctctatcatctataaccagatatactcttgcacccagactttcatgtgattctgctttactgtaacttctgagcaagtttgatgtaatgtttgagcacatactgcacttctgctacgtgtatatcagctatgagctaaaacactgtttcagagcagtgg

SEQ ID NO: 318241 - DNA, 4001 bp, Homo sapiens
agtacgtgacagctatattaacttcattcttttaaacatttatccgtacgtttgcaggaaatgtgaaacaatttattgtaatcaggacgctaaactcaaaaataacctccacaaaataacttattctacagtgacaataatttaatgacacaaaaaatatgaaccaatgtaacaaacactagtaaaacaagggatttcgctgagcagtgctgcttcattttaaccaatgaaagttttccttcagcgaatatgaaacaaaatatcaaaacgtgtaacccaggtacacttttctagcaatttgcctgactgaggaattttaaattggtgtttcccccttataccaacctacattatgaacgcctccataaacaagctcgaaacacttaacttactcatgaactagaacttgtcaagttagaactgatatttttctccagcatttacagatacatttaacctattaaaatgacacctctctcattacacagtcaaacatcatggcacaaacagccaatgacaatcctgggacctcaagaagaactgccctgacataaaaggatggcaccttctacaattttttaacctcccaaggattttaagtataacttaatttcttttttggaaaaagaaaagaaaagtggttttacccgtatctcagcacaattctcagaacacttaaaattctttgtatgctcctacacgttttggtcaggaagtacctgagtgttttacgtatagtcgcttaaaactgcccttacataacgcatacaaatagaaagtggcagagtaaacctgtcaagtactttatacttgtctttgaataaaaagtccatgtgcaacaacacactgtcaaaacaacaagataaaagctcttggggagggggagatgtgcagtgtctaccacagtatgtttttctgtattaaatattcatgtggacgatttaattctttaaaaaagaaaatgagtctttatgaactttccaacgtccaaacaagttttagaaagagaaagaattaccactggatccgcgtctgagtatttacgtttgtctcactaactgaaactacttcctcccttcatggggtcacagggggaagaagggaggttgtttgtttcactgggacgttccccactcccggaccgggaaagttgtaaatatggggacgatcagggcacatttgctgttagttgtattgtttccgcctccccactagctacggctccactcccgggcgaggcctgtcaccgaccagcagtcgctccgctcagcccggagctctcctaatccccgagctcaagtagattccgctggcccgcggcctgcactctccgccgggcctacgcctccccggccgcccagcaggagcccagtccccgccaccggagccggccgggagagggtacaaaaccaccgctacccaaggcggctgccaccagagaggagcgaactctagactcgcctgtggaagagacctggggccgctaaggaaacggcggggaggggagcgaggaggagagacgctgaggacctggcgccggcgccgccgccgccgccgccgaaataaagagcaggaatttacctgggcgaatcggcgtctgaatccaaggggaggccgaggccgctgtggcgagagactataatccgggccgggagggggggtggctacggctcctcttccgtctcctcagtgcggggaacatgtagagccggggggagaccagccgagaagacaaatcgttgcttcttcttcctcctcctcctccttctcccacatagaaacactcacaaacacccgaccacgggcccgagctaccgggggggcatcgccgcgggcccgggaaccaattctcctgtcggcgggggcgtccctccctgcggcttggtggtgtcgggtgagtcggtaccgacggagggaggggggggagggcggggggaaggagccctgtgtgtgtctctctctcgttccgtctctccctctcagaacaaaatgccgaccggaagtgcagctgcaggaatgactccctccgccggcgccaaacactaacaaccaccccctcttccccactccacttccgccaccgccgcagccgccgctgccgccacttgggctcgcgtcctcggccgcgccgcgcggcacccgggcccagcagccgggaggcggcagctctcctctacgcccgtcccctcagggcggctgtggatgttgccagtattgtcgatgcttcagagcgacgtttgccctgcgacacaggcgggccggctctcctctgtctttattttcctggaggccgacaggagcggggcccgagttcggtggtggtcgtgagcgtggggggcactcaggcccggacgggctctcaggtcgccgacggcggcggctggaggccgcgctggctgtcccaggtcgtcgttagctttagggagccgatctccgggcggccccacagaggacgcccgcgattcgatggcgatgatgcccgttttaaatggtgtccctgcagccgggtggatggatggatcgtacaccttgccttttgagagccgggaccttacgcccgactgcgtgttatttctgcgaataagaacgcaacctttggaggtgaagacgactgtcggctggattgaattggaatcgtgtttgtgatgatgcgtttatttctggaaatacgcggtctccgctgcttttgctttttgtcggcagaggtttgggttcttctctaacggtcaggataaaggcctgtaggcgacgctgcgcgagcgagaagctcgcccgcggctgcccgggcgcccccctctaggtgtgggtggagccgagcgcgcggggagaaccgccggccccgactcagccaccggtgactgcgggcgacccgcgggcctgcggccagctgatttcaaacatcgttttcctctttaggttcggaaaactgaggcgctggacaaggctggaatacaatatgtgattatacgtacagtactatggttgttgtagtttttaaattgtaaaacaagaagtaaccattgttccaccgttctctattaagtttgtgtaaattaaaaaggggctattttcggtaaaaagtgcagtaggtaagcggaattttactcaaccgggacgaaattcgtgttatatgaattgtattgtgtatttgtgtgtgtaccagtgcgctaaaagtaagtaggaaaacttgcttagattattccttttgcctcaggccactcagggggccaagatcctgtcactccttttctctaggccctgcgaatggcttcccgtcttgaggggagtgagccaaagccttgactgcggcagaagtccccgcgcgccgttgagggtgggggcgggcctgccctggcatccttgcgagtaggactcttccctgagcgtcgtccacagggcttgctccttcaccttcaggattttgctcgtgtcactcggtgcttccgcggctacttttaaactgaaagttccctagcccccttctcattttatcctttggacagtctacatatccatacttgtttatcttcttatctctccttccccagtgcaatgtaagctctaagaggacaagaggttgtgtttttctgcactggtgttacggcccccgcctagaatgccacacagtagatgcgtagtatgtggttaaggaatgaatgcgattataagggccttgatgctcccccatttctgtctttaatatgtacttatatgctacagagagctttataaaagatttaaaacacgtttattacagaattctataaaaatatattgcttctaaacattggaaagccctccacaacaccagaaacccacaaatgagggataaaatttgtttttaggcttctgtaaatgagcatgcccgaggacagtgcatcaaatgatcatatccatactgggccgattatgtttgctcttctgagtctcaaactgcattcttcatcttgtcgtcctctgtctttcaaaatacattaaaagtgagaatttggttggctcag

SEQ ID NO: 318242 - DNA, 4001 bp, Homo sapiens
ccatggccctgggagctgcacttcatggtgagggcgctggctcagggattttaaggttcatggtgcagcgcctcccagggagaaggctccaggccagtgggccaatggacaggggccggccaaagccctgaccacgagagaggtgaacgcccgcccaccccaggtgctcacatcactgactaatcataccaggagcacctggctgctaagtggcaccatccactcaccagcaagcccctgtgcaaatgtaactggcagagagagccagattggggcggggacagctccctggatgacctcaccctggtctccctgtcccggatagaggctcacaggaccacccaacttactgtaccttacagcgtgcttcccaccatcacaggcgttagatggtcactctcaggaagcaccaatcctaactctattgcatgttaatttccaagcagacctaagccccttctcaagacagagctgcagaaaatgtctccaaacacacccagaactttttttaatcaactgccagaacaatgtctttccaaaaaggaaactgattgcgtgacccggcatgttctgtgtctggggacctctggggacagtgggggaggaagcaaggggcaagtgtgggcctggccacctggtggggctgtctgcaccgatacagttcacactgacactgatgaccatcaaatgttagctttctcacgctcagcaaacatgcaggtctaatttaccccaggcccttccagggccccagacctggacagttctctgctcctggacatagcaccttcctcacccaccctcagggccgcctggctcttgagccagccttgcagtctctgcagccttgccacagctgtgcagatgtccctctgtctcctgagcctctagcaggcctgtggtcacccctcccagagatgggaggcaccgaggcctctgactctggccatgtttgctgattgagcactgaggctatgaccagtgatgccccaggtctgtagctcccacccctcctccaactcctccagctcatccagccggggtactgcattcccgctccccgggacccccagcccgggacgtctaggtccagcccctcccactcgcccagctcctccagcccgaaacatggagcccccacacggctcccagcctaggacaaggaattccgattcccctacccgccactcagcatgggacactagcaagggctcgccccacgggagccccagacgtcgtggaggctggggagagactggctctcctggcccccggtcactcgtgcggccatggcggcccacgtctcgcctgtccgcgggcgggcaccaggaacagctctgacaccgctccccgcccccgggcgggtgcgcagcgcgaccccagcctccgccccgccgcctacctgcttgtcccgcgcgcgccgctccgcttcctccgcgcctttgcggccgctcgcgtacgcggacgccacgaagctgtcccctgcggtccgggggcggacgcgcgggaaacccgcaccgaggagggaaagagacgcgccgtgagccccgcgggcgctgcgccttcgctgtgtccccatcgcctggagaccgcgcaggggcaggcgtgggggtcccgcgcgctcctggagacccgcggccccgtccccccactgctggctccagggcaggacgcgcgcgggctcctagctctgagggtcccgggccgggtcgccgccccccgccccgcccgtcggctcgcccgctcaccttccgggctctctctccgcttgcgggcggcggcggctgcggcacggcgggacgcggggagaggaaaacgacagtgagaggcggccccacgcccgcccgcccgccctcccgccctaccggcccgcggctcaccgtgcttcgactgcagtttccccatcgccgccgccacgccccgccgggccccgcgctcaggtgcagggctgagttctgaagccggggccgggagcccgcgggggccgcatgggccgggagcaagctagggtgccggtaggaggtgagggaagatggctccacgccgcgcgggggccgggggagccagggggcgccaggtacggccgcggggcggaggtggggggccaccgggcgcagggcgcggggacagcggcggcagcgacggcggcccggctccctctgagcgcgtgcgcccgcgccggggctttaaccgcggcccccgcagcgcccccggcggccgctgcccgcagcgcatcggcctcgacccccgttcccagcctggagccccaccagcgatgaggacccggcccggccacctgtgggggcggtcaggtgctgcagcggagcctggcgggagtcagctccgacccctcaccaggccgtcctgggtcaagggatccccaattccagaggagcctgagggcacctccctttgaaagggaggacccgcctcccttggctgctggagagggggtgggggtgtgggcagcccaaaggggggtggtatccggcaggactagatccccgccctctcctggcgctccaaattgatgaagaaccagcgttggccccccccggccccggctggaagggccctgcaccccctcactttgtccttggtttgagcagggtctcctccgacctgtgccttgagggtgttggagcctcccaggagccccaagcctggccacctgcgctgcctcctccacgtgtccaactcagtggcttcagctgctacctccctggcctcatctcaagctcctccagctggctctggagacccgtccctcagtacccttcactggaccccctctctgcctcctaccctgctgggtacctcagggctctcttccttatttaccttcagaggaaccttcttccctcacttcctcctggaaccctaacttgctcctgtttctgggacatttctcccttccctacccatgactctcctccctgccacgccctgttgcattgatacattgtatctccccagcctttcaagagctagctcagcattttccccacgggctgttgccacgcccacgtctccaacctcagtgggtgaccccaccttctgccagggcagctcccgtccctggagttggagctccgaggctggcggtgcgggacccctcacctgcccagctccggccctgccaggcctccgctaagctggcccaggtcccacccggtctctctgttcccactcccctggctggagccctgtctcacagctgagcagcgcagctccgcggctgcccagtgctgacttgcacctctggagctgacgtccagccaagccctttcactccaattactgcctcccattctcagaccatcctcggggcagatgccgccatcacacgattttacagaggcctaggctgctcagtggcaaaacggaaagttaaaccagaggcccgccccccaccccagcagcctcccctgctggctgtccgcagatacatgagctgtgggcgagcacatgaacaagggcacacggaccctcctgggagtagtcttgcctgcgagccattcccaccatcctctgaagaaccctagtggaggggccacttcctgcaggcagacagctctggcacctggtagcagggttgcacccggccaggccgtgcctgcgatgggctcagagcgcccttgtgtatagcgtccaggcgtccagattcagggccagggccaccctcccaggctctttcggcccctcctctctcccttgcgctaccccaagtggactttaactcccaatttggaaggtaacaatgccatcttctgtggtctcagggtcctagtgagtgtgtgaggatgatagtgttacatgttatgcaaagtagcacagcctgaggattgcagcccttcccgtgcctctaaatcctgcccttacatgaggaccgatgagccaccctgggtgaagatctgctggtgggctcgtgtcccctgtgtggctgggagccttgcctcacacatgcatgggccctcctcccaagaccccgagaaggtccc

SEQ ID NO: 318243 - DNA, 4001 bp, Homo sapiens
tcctgcctggagcgcccagctggctgcggctcactctgccaagtgcactgggagccaccgacacgtctcactcagcatttgtagaaagtcaggctggctcaaggcgctggagaacaaaacgggaggtctctgccctcggggcagttcacaccctggtgagggagacagacggtgacttaaaatttcaggctgcaaaaaaaaaaaaaataaataaaaaaataaaaaaataaaaataaaaccaggtgatgctctggggtgaactgaattagggctagtttggtttgagaagttaaatgaacagaggccgaggcctcactgctagggacggtcttatctcaaaattaaggaatcaagaaacagaaggccagggagtgttggtttggtgatcggaggctccagcctggccgcagcagggtttgcgcagtgtccaagaagctgcgggtgggcaggcggcctcggaacctgccttgctggcttcctcgaattggtagcgatcagttctagccgccgtgcccgcccgaatttgttcccaggcctctgctcctcaacaaacctatgaattctctcccggctggcagcggcccttcgcccagcgcttcgcccagcgcctgcggcctcccgggaatcgcccgggctcctgccttgggctggggggtctcccagaaggcccctttctgcagcggggccggcctccctccccgatcctgggatggcctgcgggatgatcccgcactcatctcgtccactcccttgtgcccgcggtagcgcagcatttcctaacttttccacgagggaacctctccgccctggccgcgccggcaagttgtgctgaaaaaataaagtgaagtcagattcctgagggtccgcagtatcccattttaaaatcaaggccctcgatcccagactccactttcctggcgcaaagaaagaaaggcaccagaaacccgggtcgtgggtgggctgcagaaagaaggtccaggaccctcctccgattgtacgcaaaagctgtctggtgagcaacatttcaatttctgtttagcggttctcatcagatctttaaaaagattcgtaaatccaaaggagatttaaaaacagagattatctgcttgtctctctgttctgtctaccataaaccgatttctcaacttcctaccagacccaggagcagagccgaagccgcccggggctttgttaggccggggggaaacgttttttggtctcttgcttctgatcctttcaatccggcatttcctctgaacctccgattggacgcggggcgcgggagcctggcgacaacaccaggcatcttacattctgaaccccccgccgcagcccagccctcggcccaagggcgcgtgtctcctcctcctggccctgagtttcttggggacgaaagcgacccaggaggggagaagggggcctgtgtttcctcctcacctttcttttcggctctagggtccttggctgggtcggggtcgctgtaggcacgtggatagaaggcgggggcggcgggaaaggcagacgcacacttggccggtgaaggcgcgcggcccagctctgcgcgcagctctgggaggcccggcgcagccgcctcgggcccagcgtaggcctctggcttgaaggcggccagcatgcaggaggagggcgccagggtcgcctccaggcgggcagagagctctccggcggcagccaggctgcgctgctgctgttccaggtttaggatgtctttgactgagaagggcgtgggcgtgagagcagggctggggaacatggtggcagcgccagtctcacagcgccaggtgggcggcagaaagcggcgctgcccacggcccctggcagcttccctgcatggtgccgccgcccgcccgcgcacccgtcggccagctctggatgtgtccgggcagcaggtagcgctgagcacaaggggcaggagaggcgggaccaggccagaggagggggactcagcctgccattgggccaggggcctcgatgacaggagcgatgagcagtttcgtgtcacctaatatagtcatacggcaaaaaaaaaaaaaaaaaaaaaaaaaaaaaaaaaaaaaaaaagccctgcccagcttttttaaaggggccacgacgcatttggaagggtctccttttgctcctgcagcctgcgtttgctccctaatgtgagcctgaaaagcctaccagaggcatgcagagtcaggcctctgggcagggctggatgggtgtgggtttgaagaaatattcctcagcacccaaaccagcatgggagagagaaggatggggtgggaagcggtggggaggagagtgatttgaggaaggctttattactgaaggtggtgggatgagggagagtctgaataggaagagaagcctggaggacagggctggctttggggatagcagcagggcgagattctggacaattcgggggtttggtttggcttggcctacagggtcagtcatgccgcaggctctgggtgcttctgggcgagtcaacgaaagtaagggcaaggtgagtgatggccaggtggggtaggagttgctgcctcctacagtagtgttatgcacagcacaactccagggggcatcagtcactgccagtaccctcccagggaaatgcctctccccttaataatgaaataaatcaggaatcccagctggtaagctcagcttcccaggagacacctgtcttgtggagtgccccagctaccagccaccttgtttcccctgtttggaggccatcgatcccacctccctccttcccgtgccctccctgcctggcagcaaggccctcaggcttctgccaacctcgaggtttcagggtcctagcccaggtttagctctcagggaggcggggctcctctgagcccagctaggccaggatttctctgaggcctctgggccggacttccagtggggcacccctgcggctcggtcaggcgcgtgggggaagggcagggcaagtggggtgatcatgatcatttttagcccagggtcagtagagtagggcacagaagtcagacaaatctgccagagtttcaggagcgccagctacatggccagatcctgcccgggtggcctcatttctctgggtccccgcactccttgggaggtctgatgaaagcttggggtcttctccattccccagaacactgcagagaggagttttattttgcttacaattcaggagtccgggcaggcagagcgggcccaggttaaggacgccttctagagctggggatgacaggatttgtcagtggaaaagcgttggcttctcacggccctagctggtacagggaaccgcgggcgggaagctgggcgggacgcgtggacttgctgagaatggggatgtggagggcttggctctttgcggagtgcgggttggcaagaggcgcttggagtagaataaaggcggcgcagggccaaaaactacctaaagacacagctcccgcaggcgcgcccaaggtgcggaggaaacgctccatgtatggggacaaaatagtgtctgtccagaacgtacatcttgggtgctcaaacccgacagtgtgccgtctgagacgccgacgcaagtgaagtcaagcattggcctgatgttgggacttttcctgtccctcatcaaagccacactcccaggacctggggcctccatgctggggagagaggtgagccccgcagggcagcccaggaggcgcgcaacgccctgaccccggcttctaggcgccagccgtcagtaacaggcctgggctgccacgccgaaatcacgcctcgagtttctgagccagggactactgggggtctggaattgttagtctagtctgtggaggatgccttttcttaaatgtggggcgttcaaggcccaggaaacctcgtccccccacctcttcacctcccaacccaaattctccttggacggagctgcatgtcagcggccttgcggcccttcctcgcctggacttttggccacgttaccgttatggctgtaaattaacctagcttggggg

SEQ ID NO: 318244 - DNA, 4001 bp, Homo sapiens
ggacagtggtgttggctgtacctctcaattgtacacttaaaaattatcaaaatggtaaattttgttatatcttaccacaattttaaaaaaaagggaaaaaaccccacaatgttaatcttctcactgattggggggcgggggggttggtttggaaaatagttatttttcattaaaatcactatttatgcacctagcctatttattagttttgtaaattaacaactactttaatttttttccagctttaatgtctaatatggtaaatatagacagatataccacacaaacagaagctcttaggtccacggtaatttttgaaaggtaaaggggtcctgagaataaaaagtttgagaattgttcttttttttttttttttttttttgagacggagtcttgctctgtcgcccaggctagagtacagtggtgcgatctcggctcactgcaagcttcgcctcccgggttcatgccattctcctgcctcagcctcccgagtagctgggactacaggcgcccgccaccacgcccggctaattttttgtattttttagtagagacggggtttcaccgtgttagccaggatggtctcgatctcctgacctcgtgatccacccgcctcggcctcccaaagtgctgggattacaggcatgagccacagcgcccggccgagaattgctcttatatgaagatttattccctcctctcacccctgcattatgtgaagtcttcatttcttggtataacttcatttgacagctatatcgattgcagcctggagactagcaaaaaacgacaggctgaaatatggtcaccaatcaccacattaactctttgtaattaaccactgtcgcctgcctgctccctaactctacggactgagcaacacaaagctccatccacacagacgagtggcaatgtgcaaaagggaactgtagaaagcttaaatgctgacatgttacaaagtagttttgttgatagctagcaagaagcacacattttctttattctgttgaatcttcatttggatttacagttctgggcagatttggaaacggggatggtggcggcattgtttccgaaaaccagcgcatccgtgcaaagaatttaattccctcaccatcttgctactggtctgttgcagtggggtgtggttagagggctaggaagcaatccaaaacagcagctcaggctgcccaaagccgtgtccaagcgatcattttctccattttgggccaagtcaatttgcaccggcaagaggcagaatgtttgttttatggggaggaggaaaataaaaaaggaagtcagagagcatggacggaaacaagcaacaccaccaaagaggtttcatctcgggtggatgttaaacgattggaatgctaataatgggcgcgaggagcaaacacaattgttctgagtccacagctgcggcacttttaatgacaggtctgtagttctgcattgggattgaacgtgaaatgattttcttatccaaactatttgcattcattttgggccgcgtctgtgaccagcctcgctgactgcggctgaggcagtcccaaacaaagaggaatggacgtcctcccgagggagcggaggcgggaaaggtggccccaggtggccgcgccaggtgtcccccaggggtccaccttgcaagccgcggggagggtgcgtcccgggagcgtcggagaggcgcggtcgggaaggggtgggtccgggctccaggcaccacacggcgaaagaccccgccctgcccacggccaaggttaacccgcgcgctggaggtacctgcggaggcttcgcacagccaaaaggcaccgggcgatcatgggagcgctgagaggctggcggcggcgggcgcgtggtccttcggcgtggggcggcgaggcgggcggcagcgcctgggcgcccgggagtctcgagccggcctagccgcagaggccacagtggctgcctggccagcgccctcccacgtgcggcagctccacgccggcgcctaccagccccgccccgcgccgtgccccgccccagctcgcgtgtctggccccgccccagccctcgcgtccggccccgccccaggggcggtgctggccagaccctgccgcctgagagagagcacagcctggtgggttctggggtctacggcctaggggccggggaagtttgcgccgccgcgaccagtgctgcgatcccgagccgggctccagccccgaggaccaggggtcgggcgggcctgcctacggaaccccgcgggccagcagcagtcgtctcgcgtcctcctgcttggtaaggggcttctgtctggcaagggtgcgcctcccgccgctccggaccggggcccgcaccggcacccgctgcacaccgggcagggccgaggcgaggccgggtacctgagggaggacggaagggagggggagctcgatgcgctctggggagaggaagggggagaagcctatttccctcttctcaccccttttccccccattctgtttttaccttctgccctggggccttatttagtgcttatgaccccgtggcctagaggctgacatcgcctttaaaataactacacaaataataaacattatagcggcgggtaccacaccctggctttgaattagggaacctggggagcagatggatgatgcgatttggtggaaatcagccatgaatgccgcctggccctgcgccactgtttggatgcgatagtattccatgtgaatgaacatgaccgggagcttccagcttgtccacgagagcacagcctctgcagggagcgccggtcggcttgtagtatccatcgacttgggcagcgatttcctgacatgtctgctgattaaatagaaatgccatttttattaagaacgacactcaccacttgaataacctttcgcgaatgtgtttcctcatcaaataactctcaacctacaaaagtgggtagagtgtacattattaatactttttttagatcccatgaaaaagaggaagatgcttggtatacatcagcttttagtcagcagtatgaaatgcctcttaacttagtactgaggcctttaggggatttctgtatggtgagatatgcagtgacagtctaagcttatgctgtacatgttttgaagacatttttacttattccaagatttaacatactcgtataccactgggtattaatgaaaatatgtaataaattaccttcacaatactttgtgctctcctgactctttacaaagagaaaagatgaaaggtcatacagttttgtgttttgtttttacctttaatacactttataacccatatcatctttgtaatttatgactttcctgactgattctttaaaataacttagttcagtgttttcatttttcttatcaaggaaaagtgtttaagcttctaaaatgtcatctatcaagcacctggtttatgcagttattcgtttcttacgggaacaaagtcagatggacacttacacctcggatgaacaagaaagtttggaaggtatgcatctgctctttgtgttcatttatattataattataaacgaagactaaaatagctgtaagcccaacttgatgatctattgtaacataatcagaattttttttgatctttcaagaggagaggcctgactataaggttatcgtatttccattttctgaagcttgttttgtttgttttaacaacaaattaagaggactattgttcatttattgaacaaatactatatgtcagaagtatgctgttcatattataggcaattttttcttcacagcaactgttatgttagtattatccccatttaacaagtgagaaaataaaaccagggccaggcttggtggctcatgcctgtaatcccagcactttgggaggccgaggcaggtaggtcatttgaggtcaggagttcaagaccaggctgggcaacatggcaaaaccctgtctctactaaaaatacaaaaagtagccaggtgtggtggcacttgcctgtagtcccagctactcaggaggctgag

SEQ ID NO: 318245 - DNA, 4001 bp, Homo sapiens
agtagctgggactacaggtgcacgccaccacgcccagctaatttttgtatttttcatagagatggggtttcaccacattggccaggctggtctcaaactcctgaccttatgatccacccatctcggcctcccaaagtgctgggattacaggcgtgagccaccgtacccgccattttctctttatttttaaaaatactgactgaataagcaatatgacactgtataaatgggagaaaataaaaaattggaagttcgaatgagaatactgtaaaagaggcggggtgcagtggctcacacctgtaatcccagcactttgggaggccgaggcgggtggatcacgaggtcaggagttcaagaccaccctggccaacatggtaaaaccccgtctctactaaaaatacaaacattagctggacatggtggtgcatgcctgtaatcccagctactcaggaggctgaggcaggagaattgcttgaaccgggacctggaaggcagaggttgcagtgagccgagatcgtaccactgcactccagtctgggctacagagggagactctgtctcaaaaaaaagaaaaaaaaactataaaagaggaagattaaaaatattcaattctatttgatttatccttaacaatgctatttatattcactttcaaacccctagaatgacaatgtttactaattgcagaacataaggcttaaaacattaaatgttatgccataactgaaaaaagtaccaatagcctaaaattccatcaatagaagatcaagtaaataaattgtagttctaatacacagggaaatattacacagaaattaggaagagtgagatcaattcagatgcaatgatctggaatcctatctgagggactctgtaaaggggtcaagggaaagggactgttctgttttatggggggaaaatgtttataaatgcatagaaaactcctggaagaacagaaagtgttaagtggttgcctctctctggagcctgggacttggggtaaaagaggacaggtgaaggaaaagtccattttatttctcattttacatccttttaaaaactatcacatataacttttatacttagaagaataaacttaaatttaatgctgaacactaagggtttaaatgggtaggcacatttacataagcattttttttttaagggcagagaggaaaaaagcatgaatcatcatacccagaagttacctgaacaatggtgaatccggatctaagaataatatcttgtatctcctcctctttgtcaacaatatctggtttgataatggccagagttttttctacatatatctgaggtggaggcattgatatctccattatggcttttcagggcacaaattaagagtttcttaacaggtatcaactgcaatgacatgcatttccccccacccccatcgcaaattcaatgtaattatgattaagaatagcaatagtaggtacttgattttattaactgatgaaggtagaaactgccatgtttttctatatacagggtctcaataataggattcctactatgtccaaatcgagccccggcttttcgtatacgatgtcaccaaggcaggaaggactatgggctcacataaccagaggccaaggggcgacccgaaggcctggaaccagcaacagccccaggcagcagagggcggtggggcgggtggtgggggctcgagggggcggtagagcgggtggtgggggctcgaggggacggtggctggtgggcaaccacacaccattacagcggcgggtgagcggcctcggccagctgcctctgtgaagcgaccctgtcccgcagggacctctctgtgcatagggtcaggctaattgaaaagcagggcctctaggtccgcggggactttccgggttgcacctgcaaattctgaatttgaccctctctaagtactcacctcagcggccgtcctcatatggtacaacttgttgctaggagacctgaagccccagcgtggggacggtggctgcagagagccaatcccagcaaggaaccttgcagcttctggccagttcgttttaaccaaagggagccagccagtcacttttattctccttgtgaatcttagagcactagatgttttctgacattttactcataatttatcttatttcatccttcttcccgtttgaaggatgcttcaattatccctactctataaatgataagaacccctcccccaaccattcctttccaggcggtatatgtaaatgacccgtgtcagataccttcgtttcaccagatgatgctgtgccctctatgcccagcttatctagtcattaaaaagcaatattcctattgtgtaaatacatttatttatagagtaaaaggcttagaaaagatctaatggaattgtctttaaatcaagccgatggaacaaagatgtgggcaacatttatggcataaatccaaacctcagcttcccctttttttctttatattatgtccacatgcatctttgactcgttggttgtgagttaaggtattattcttgttggaaaagaaaatgaggacatggcaaagaagtaccaggatcctctctaggtcagagttccgggagagattcaaactctagaaaaagtcaggatagcagctccaggttagaaaacaggttttccatcatccactgggttagctggttctccttccagactacttgagccttttcttttgtctaaccagatattcagtacctaaagggttaaggaacacatagcaagctattatgaaccttaaacactaaagtattgcaagtttatttttttggcaaatagactcaactatacttttttctttaaagtatgatgctacccagaaaagaaacccacaaatgtcttctagctactatatcttatcccctaaagatgggaaagtgtgaacgtacattaataacaacagatgaagcaaccaaaaaatacacagtgactccagcctctttggagtttagcccttgacttgaggctctggaagcgggaattcccattacttgtctatcctcagctctcttgagagctcttcactgctgcctgcattcctagactacttcactatcagagctggacttactgaggctcagggttttccaaaccagcaggcacattatcaatccttcagggccttaatcacctttaaaaataaactctgagaacacagtcacctcgaaatcacctttattctcataggcgttctgaaatcaagattccagaggctacaggtatctgcatacagtacctgaatctgctccaggacttcttgccgcatctccacagccatatggtatacatgatgatcagagtcattgtacattacagcattttggaacatcagcatcaggtctcgcaggaattgggccatggtgcgaatccgacccttagagagatttctcttcaggctagttaagtccatgggtctgcaggtggccaagaaaaaacaaagaaaatcaaaccttcatgtggaacatatgataacctaacacgttctcttgaagaactaaccagttcttaatgaaaacagtagcaaagataacaaccctcatcagataataaaatagcaacagcagttaatatttgcctgtttacaatgggccaaacactgtatttctatactaactcacttaatcctctcaataaacctgtaaggtaggtatcattaatatctcattttttttttttttgagtcggagtttcactcttgttgcccaggccggagtgcaatggagcaatctcagctcactgcaacttccaccttccaggttcaagcaattcccctgtctcagcctccagaatagctgggattacaggcgtgcgccatcatgcccagctaatttttgtatttttagtagagatagggtttcaccatgttggtcaggctagtctcgaactcctagcctcaggggatccaccttccttggcctcccaaagtactgggattacaagtgtgagccaccgcccccggccttattatctccattt

SEQ ID NO: 318246 - DNA, 4001 bp, Homo sapiens
tgtcagctgtagatctgggagtctaaatggtctcgtaactgtttactacacaagctataatacctcccttaagtgggtgtaaaattgtcattgtgaagaacttttctcttcatgaatttgggtgcagaatataccagagaggaattatatagactaattcctacccttattaaaaatagtttctctcagctaatttagacaccccccttctgaaaaagaaatcagtttaccaccataaacataggaaaagaacctctaattatatatgttgcaaaataagtgatatctttttcttaatttcagataagctcttattcacattttttcactctatctcatgtgctgtttacttccttatctctcaatctgcacctgctcaaaagaagctcaagttatctcagtcatgtcattaatatatatgattatatattatatataactatatattatatatatgactatatattatatatgtaactatacatataatatatatagttttattttgttttgtttcaacctcattttaatgaaagggtcggagcaaccacagtaaatgtctgattttaaaactgaatacctatcttggactacaaaataggcagggatagtttgtgttatactcagaccaagttggtgtacaggaaaatctcaatgcaggcagtggccaggggctggaaagtgacaacaggatgtggagaagtctctcaaagtgtggccacctcaccccagatcacctgatgtgcttatttaaaatgaggctccacctcagaccttctgaatcccattttcctgggggtgaggtatgcatattgctcccaaagtaagttttctgcatgattcttaggaacatttagatacgagaaccccaagaatagagggaagaaaaatagaagacgagctaaaggaaatgataaatagttgtggttaccattcatctcatttgaggcaagtccttttaagtctcaatttcccatctgagctcattctattttccctctgttcccttccatttctgaatttccccaattctaagtttttctctgaactttgagcctgtgaaaaaagaagggatgctgcctcaggccaccccagcctagatactcactctgagtgccatgaggtagtagaggacactgatgacagtcatggggaggaggtagaataggaaggaggtgacctggatgatgaaattgtagatccacatgggcttgatgaccgtacaggtggccgaacctgggaccagggacccattggggaagtagtggaacttgatgccatggatgctggtgttgggcagggagaagagcacggagaagccccagacgatgccgaggatcctgagggcccggcgccgggtgctctgcagtttggcgcggaacgggtgtaggatggccacgtagcgctccacgctgacggtggtgatgctgaggatggaggcgaagcacacggtctcaaagagggccgtcttgaagtagcagcccacgggcccgaacaagaaagggtagttgcgccacatctcatagacctccaggggcattccaaggagcaggaccaggaggtcagagaccgccaggctgaagaggtagtagttggtgggcgtcttcatagcctggtgctgcagaatcaccaggcacaccaggacattgccaatgacccccaccacaaaaattggcacatacaccacagacacggggaggaagaagtggctgcgccgaggtccgcagaggaaggccagatactcctcggtgctgttcaggtgtttctggaatggatcttctagtttctgctggtagatccaggaagcattctgaagtttttccatccctgacattaaaatccaaggcctgagcctcccctggtacgaggctctgtttcaagctgagccaggaaaaaaaaaaaaaaaagaaaaaaggaaaacaaaaaagagaaagcagtcacgaaagtcacaggcttcgtaaggaaggctgggagagagtgagtgtttcaccctccaggttaggctgcctggaccgccgatcccttttgaagagccccggagacacaagcccctccccttgacaggctgagggccaatgagagtgtgttaggctgcactggaggagaggggtgctggcttcgagtcaggaagcaggggaggaggcagagacctctccctgaatgggaaggagctgggaaggcagagctgacacaaaagaagccactcgaacttcatggatgggcactttgagcaatgcaggttgcaaagttgtgggaatctgggtagacatagaaattaaagttgcagggccatgggcaaaagaataccaatctccactaacccttgtcagccgtacagcatgatgaaaataggagatcaatagatttctcaagttatcttgttccactggaaattcagggttctctggggattaatgtgataacatgattaatgtgactttttggttttaactgcatcaacgatagaatccgaagcctgaaagggcgcatgcacagtgcctagccctgactgctaactgactcttcagtctcagcagagctttgctgtaagcaaaaggcaaatggacttcagaattaggaacactcatagaaatttaggaaagttggcacagttacccaaactcttagaggcttatttccttatctgcatcattaattcgattgcgttccacaataacttcttgaggattcactatttgccagggaatgttctaagctttgtagaaacactagtgtacaagcaagacaaggtctctgccctagtggagcttttcttgcagtagggaattctgaaaacacacaagcaaatgaataaattaataatataatttcagatagtaattgataaataattatttatcaaggatggtgaaagaaaacttatctcaggagatgtcactttagctgaggtctgaatgatgaagtcagtcatgaaagagctaagggaagtgtattactcagcaaaagtaatagcaagtgcaaaggtcctgaggcagaaacaagctggataggttttaaaaatatcaggaagaccagaataactggaatttaataagtggtcagcaaagtatgaatgcttagattgaagtggctggcaggtacaggttcatgtaaactcttataggccatggaagagagtttagctctgattcaaatggcagggagaagtctttaaaagattttgcactggagaattaacgagggagaaattttaacagaaggtaggtaagaggctagtaagacatagtagtggcttggattctatgagcagtggagttgagagatttctttggatttaggaatatttttgcaggagataataccttttatggtcattgagaagactaaattaaattatatataacgaagcaacttatacttaagagatgctcactaaatgttaattttttccctttatttgttaaatcagattatgacgttaaaaattagagagggaaagtgacttgtccaagaataagtcatctctcaagttaagatagtttacgctgctgtaacaaatgattgacatatcttggtggttttaaacaatacagatttatttctcttgtacttcaaatgtattgagggtctgtctcatgctatgctcactcataaacctaggctgatgcagtggtcactctctggaattttgattatcattgtgatagaggaaaagagagctctggatggtcttaagtaggtaattataggctctagcccaaaagtaagtaactcattgccagtttttctcacagctcattgaccaaggttaatcatatgtacccattcgactacagcagggtcaggaagtgctgtcttagcatgtgcacagaagatggaaaagtaggaaaaattgatcaataacattaataataattacagacatgtaataggtattgcagagccagaattagggccctctagttaaaggcaagttttgatgttaaaatcactatttacaaactttaacgtatttttctaatgaaataggaaaagtttaa

SEQ ID NO: 318247 - DNA, 4001 bp, Homo sapiens
ataaaataacagcacctacctctcagggttgttgccaggactgagaatatccttatcagctgttatattcactttggtattactctcccccagtgctttgcacaacacagaggaagtcagtatttttgactgaatgaatagggctaggtgaccttaagcctaagtacctattgagcacattttccaaggattttcggaaaatttcctttgaaaaggaaatgtttgtgtagccttgtggaaaactgattctatcaccaaggtaagcagcctaagcgcacctgctggaaagaaggcaatcctaaactgtctgttaataaaaagtcaaggtttacaaataaaaggggtgcaatgaagaaaaggggcacactttaaataagaagagtaggtaggcacctaagccccacgcgcttctccgaataagtctgtcctacaagactcctgacaaacagaccacctaaggactggccggcgccacagggtgaataaaggacaccggcaaccataaacaagtcacgcttttaaaagcgagacataccagcaaggacacaataccctactgagccagcttcggctggcaggcgccgtgacctcacccaaagccactggtgtcacggctactgccaccggtgccgtcccttgctcggcaactaactgccacccgctggcatctgcacgagaccgctatttataacctccctaggaagccgattggccacggctgcaaatagtcattccggctgttgagtttgaactagctctgcccaggtcgccctctccgctgtctcttcctcctcaccagcctaggccccagaaacttgtacccaccaccgccagaccgccccaactcacactcacaatttgtgctcgcaatctcctatgtccccagccggacaccctctccgaactccctcaagggtcaagcatacctcaagggcatccagctgccacctctctggatgaaccgcccatcgaaagtcctctatgacctccctctccaccacccccgatcttgagggccgaaatgaccccgtacgactctcgctgtcccccaaagctgcaaatatctgcacctgcacagctgccgcctcattccctgccctcttcggggacccagttcccaaatccaccagcccactcccttcgacatcgccccagcaggagacgagaaagggacaccaagaggcacggtgcttcttccccacctaagcctgcggcctgcggacaccccaatgcaccctgcgcccgggacaccgccgaccccgccccgctttgctctttgacaggtctctctcccggcgagggccgtggtcttcaggaaaggcccgagcccctttcccagctgcgccctaggcgcgcgccccggctgcccgcacccgccagtgccgtcgcgctcacctgggccgggaggctgacagccttgggctgtgccctgagggccgcgagaggacgtcgcgctggcagacccgggcttgggccccgcggcgctgcgcctccaacccggaagaacagccccaactccgcggcggcgggcggccacgtgactgcagctccgctcccacctcggcccgcgccccttccccgccccagctttcttcccgccaggccccctccacccgatcgccgcgcgctctccgaaccaaaaggcgacctcacgaaatgcccctttgagctcaaaggctagttacccccaggggcccttccactctcggggacaggcgaaacctctttgtctctgcctcggcctgcggcccccagcccagcctccgcgctttccctccgccagtccttgtcaatcaaacctggtgccaaacgcggcagctgaagttttcagggacacatttgcttctccccttgaagaaccagttacaaagcgtgatgtcctctctggggtcccatcagaacaaagaaacaggtaatataactccactccgggtacctgcctttcctccagctcgctaggaaaaatcagaacttctgtaacagagaggacccaagggaaaggggcaggcggagaggggttggtgaagggcgggaatggggggcgttgattttccattctggcaggagaggtggagttaaattcctcagaaacgatgtccaggcttgaaaagtaacacacatctgcgtgcttgtcttccaacatcagagccagcctagaggaagctggctagtgtcactgctagtacgaatatccccgaggctggaaagcatctgggtggaggttgtgagctttccagaccaggcctcggctgtttttctaaaactattaaccgtaatgacctagtcgttcttttcacacagttctgttacttattctgcaggtgtattctgactaaaagtgggaggaataaaaaatagagtgtaaaatggttcacttgcccaaaacttaatcatcatgaagtgtcagtaacgtcatttatttctattaattgaaattttgatacaagaaaaataattatgaatctaaaaggtataagcagaacaggtattccataactttaaaaagaaatgagccgcagggaaacccttagtttgagaacttgtcttgtgattaacctacacagaaggtcattcaactaatggattcccactgcagtccaaactcacagacaggaaatgacacagccccatgttttaaaataataatgagccgtggtaagtgtgaccatagggacggtttccagatactgaaggtacaatgaagtgagattagtaatgatcccacttagtaaggattttaaactaagttattgatttaaaactttttgtaggggtcaggagttgctgctttgtcttttagggattaataattcgtggttcccaactggggacaatttagttccgagggatatttggcaatgtctagagacattttggttgtcacaattggagaggggacctatctaatgggttggggccagggatattactgaacacctcacactacacagcccctcacgacgaagcattatccagccccaaatgtcaatagtgctgaggctgaaaaatcctggcttaaattaatgctcagtacattatttaattttgacttgcttataaatttatatcacatgaaaacaaactcaaagataacatactgtttttcacttttgaaaatcatgaatgttaggcatatgataattttaataacaagcatatgattattttattccgcttacttgtacaacataatttgggtgccatttcttcaggagaaaacatttgtcatttggaatgctctgtttcagtccttaagcttctacgtataattacagcatattattcataaacggagtccccaatgaaaataggattaagttccaaaagtttgcttttaagttagttgcttctaagtcttagacactgtcttgaataaaatttttgtagagatttgatattccctattaagttttaagggcctttcccactctgacttctactctttcctccctgactaatttgacctgcaaactctcatcttaaaatagtacctctcacatatgtgtaagttttcattacagattgttctattattgaataatttttaaaatattttaaaattaaaataaacatcaaaatttaaaccatttgaagtttaggagtttttgtagtcacaaatgcttaaaaatagtttttaataattagagttctaatctatcagaagcaaaaaggatgaaacatttacaagactataatataacatttggatctgctttaaagcctaaaaaccagagaggtgcccagtagccaaaaatcaaaacataggctgaacctgagaagacatgtaatcaaaaactgacctctagtgatggcttgttaccaaaacccaccatctaggtaaaatcaggctacagaaaaggtagctttaatgtcttttcattgtggttattatgttacatggttattggcaatttattgtctcagcttcccttttataaataattattagtaaagtgaacagccccagagagatgggattcttagatttcagtgtgtctaac

SEQ ID NO: 318248 - DNA, 4001 bp, Homo sapiens
taaagagggaggataccacagatatttaagagagtcagctctggatctgcggattggaagccccactctgcaacttattggctgtgtgaccttgggaagtcacttaacttccctgtacttaatttcctcatctttaaaatggggaataatagcacccacccagggtggtggctcacgcctataatgccatctctttgggaggctagtggggaggactgcttgaggccaagaattcaagactagcctggccaacacagtgagacccccattgctaaaaaaaaaaaattaattagcagggcatggtggtgcaagcctgaagtcccagctacttgggagtctgaggtgggagaatcacttgagcccaggagttccaggctgcagtaagccgtgattgtgccactgtactccagcttggacaacagagcgagacttgaaaaaataaaataacagcacctacctctcagggttgttgccaggactgagaatatccttatcagctgttatattcactttggtattactctcccccagtgctttgcacaacacagaggaagtcagtatttttgactgaatgaatagggctaggtgaccttaagcctaagtacctattgagcacattttccaaggattttcggaaaatttcctttgaaaaggaaatgtttgtgtagccttgtggaaaactgattctatcaccaaggtaagcagcctaagcgcacctgctggaaagaaggcaatcctaaactgtctgttaataaaaagtcaaggtttacaaataaaaggggtgcaatgaagaaaaggggcacactttaaataagaagagtaggtaggcacctaagccccacgcgcttctccgaataagtctgtcctacaagactcctgacaaacagaccacctaaggactggccggcgccacagggtgaataaaggacaccggcaaccataaacaagtcacgcttttaaaagcgagacataccagcaaggacacaataccctactgagccagcttcggctggcaggcgccgtgacctcacccaaagccactggtgtcacggctactgccaccggtgccgtcccttgctcggcaactaactgccacccgctggcatctgcacgagaccgctatttataacctccctaggaagccgattggccacggctgcaaatagtcattccggctgttgagtttgaactagctctgcccaggtcgccctctccgctgtctcttcctcctcaccagcctaggccccagaaacttgtacccaccaccgccagaccgccccaactcacactcacaatttgtgctcgcaatctcctatgtccccagccggacaccctctccgaactccctcaagggtcaagcatacctcaagggcatccagctgccacctctctggatgaaccgcccatcgaaagtcctctatgacctccctctccaccacccccgatcttgagggccgaaatgaccccgtacgactctcgctgtcccccaaagctgcaaatatctgcacctgcacagctgccgcctcattccctgccctcttcggggacccagttcccaaatccaccagcccactcccttcgacatcgccccagcaggagacgagaaagggacaccaagaggcacggtgcttcttccccacctaagcctgcggcctgcggacaccccaatgcaccctgcgcccgggacaccgccgaccccgccccgctttgctctttgacaggtctctctcccggcgagggccgtggtcttcaggaaaggcccgagcccctttcccagctgcgccctaggcgcgcgccccggctgcccgcacccgccagtgccgtcgcgctcacctgggccgggaggctgacagccttgggctgtgccctgagggccgcgagaggacgtcgcgctggcagacccgggcttgggccccgcggcgctgcgcctccaacccggaagaacagccccaactccgcggcggcgggcggccacgtgactgcagctccgctcccacctcggcccgcgccccttccccgccccagctttcttcccgccaggccccctccacccgatcgccgcgcgctctccgaaccaaaaggcgacctcacgaaatgcccctttgagctcaaaggctagttacccccaggggcccttccactctcggggacaggcgaaacctctttgtctctgcctcggcctgcggcccccagcccagcctccgcgctttccctccgccagtccttgtcaatcaaacctggtgccaaacgcggcagctgaagttttcagggacacatttgcttctccccttgaagaaccagttacaaagcgtgatgtcctctctggggtcccatcagaacaaagaaacaggtaatataactccactccgggtacctgcctttcctccagctcgctaggaaaaatcagaacttctgtaacagagaggacccaagggaaaggggcaggcggagaggggttggtgaagggcgggaatggggggcgttgattttccattctggcaggagaggtggagttaaattcctcagaaacgatgtccaggcttgaaaagtaacacacatctgcgtgcttgtcttccaacatcagagccagcctagaggaagctggctagtgtcactgctagtacgaatatccccgaggctggaaagcatctgggtggaggttgtgagctttccagaccaggcctcggctgtttttctaaaactattaaccgtaatgacctagtcgttcttttcacacagttctgttacttattctgcaggtgtattctgactaaaagtgggaggaataaaaaatagagtgtaaaatggttcacttgcccaaaacttaatcatcatgaagtgtcagtaacgtcatttatttctattaattgaaattttgatacaagaaaaataattatgaatctaaaaggtataagcagaacaggtattccataactttaaaaagaaatgagccgcagggaaacccttagtttgagaacttgtcttgtgattaacctacacagaaggtcattcaactaatggattcccactgcagtccaaactcacagacaggaaatgacacagccccatgttttaaaataataatgagccgtggtaagtgtgaccatagggacggtttccagatactgaaggtacaatgaagtgagattagtaatgatcccacttagtaaggattttaaactaagttattgatttaaaactttttgtaggggtcaggagttgctgctttgtcttttagggattaataattcgtggttcccaactggggacaatttagttccgagggatatttggcaatgtctagagacattttggttgtcacaattggagaggggacctatctaatgggttggggccagggatattactgaacacctcacactacacagcccctcacgacgaagcattatccagccccaaatgtcaatagtgctgaggctgaaaaatcctggcttaaattaatgctcagtacattatttaattttgacttgcttataaatttatatcacatgaaaacaaactcaaagataacatactgtttttcacttttgaaaatcatgaatgttaggcatatgataattttaataacaagcatatgattattttattccgcttacttgtacaacataatttgggtgccatttcttcaggagaaaacatttgtcatttggaatgctctgtttcagtccttaagcttctacgtataattacagcatattattcataaacggagtccccaatgaaaataggattaagttccaaaagtttgcttttaagttagttgcttctaagtcttagacactgtcttgaataaaatttttgtagagatttgatattccctattaagttttaagggcctttcccactctgacttctactctttcctccctgactaatttgacctgcaaactctcatcttaaaatagtacctctcacatatgtgtaagttttcattacagattgttctattattgaataatttttaaaatattttaaaatta

SEQ ID NO: 318249 - DNA, 4001 bp, Homo sapiens
tgaggacatcttagggcccttcccagcttcccacagtgcaggacagtgacctaaaggaatatatggaccacacccaccattcagcacatagggcttccgtacaagctctttaggcctctcctctatgtccacctccatggccttcacctgcagagaacagagcccttgagaccagaaggatctttgatgagggaaagttatagactcctgcttatcccaacacaactactaacccataagaatccctgcccacggttaggtagaagtaggtaacaatgagaactaatgccctggaggctttttctctctctctctctttttttttttctttttctttttgagacagagtctcattctgttgcccaggttcaaatgcagtggcacaatcttggttgactgcaacctccccccgggttcaagtgatctcctgcctcagcctctcaagtagctgggattacaatcatgcgccaccatgcccagctaaattttgtgtttttagtagagatggggttttgccatgttggccaggccggtctcaaactcctggcctcaagtaatccgtctgtgccttttacccccaacacaatcttggtgacaaggactttgtgttttgttctctattaaatccccagggtgcttaggatgtgacatgttctcaataagtagttaacctaatgaatgggcttcgcgaatgaatttgttccattgccttaggcaagtttctttttattctttcatgccagaggaaaatggcactaccatttcttgaataaatgtgaggctacagccacacagttagatagtccctaaggcaaggagtgttatacccattttatagataggcaggcagagaaagatgaattgcttgcttttcttttgggaacctggattcttttaatagttgttgaagcctccagggggccaggcggatcacttgaggcccagcctggccaacatagcgaaaccctgcctctactaaaaccacaaaaatcagccgggtatggtggcacacgcttataatcccagctatttgggacgctgaggtgggatatagcttgaacccgggaaggagactgcagtcagggaagcctagggaagcctcagaccaaggatgattgaataacaaagaaaaggtgtaagtaaagatctccaactcttagggagtactaattaggaaagttaagggtagaaaaagataaattaaggaaaataccgttgagatgctaatgggttaatttcagagaaaaaagactgagtagagggggtatggggaatgtgtgctggggagggagtgtgacgaaggtcgtaaagagacccttgctcaacgtcagttgagcgttctgactgtggggaggtcgaaaactcggaagggcctgagggaaggaatgggcagtaccacgttctgacacctaggtcagtatggcgggggaagagtaaagaagacaaggaccgagaccctgccatgtcagtacctttctcttacggaggggcaccgccctgttggggtccacagccaaccccatctcggccaggttctgccgtaccgatttagcgtggtcccaggcatgtcggatgtgggagctaccggcaaagagagacatcgcggatccgtcatctcgcggaccgtcccggccgaggcccacggccacccggaaccccagccccctcaccattcgatccgcggcgctgccttccgtcgagcattccggttcagacgctttcggttgacactgtaaccaaacttctgcctccgggttttgcccttggccttgggcatcgcgctgaccaccgcaccagcagctcaaacacgctgcctctgtctctcagacctcgtgtaacaaactccttccggaaggcgtgcacaaggctttgcgggcatttggggaaatgtagtccttttgtagcactaccgtgctgagcactacgactcccaggatgcaacgagcatttgcgcctgcgtacaaggctcaatttattcgtttccccgcccctttcatgaccttcaccgggaggctgaggtcggagtcccgattttctcctgctgctgtggcccggacatggcgactcccggccctgtgattccggaggtcccctttgaaccatcgaagcctccagtcattgaggggctgagccccactgtttacaggaatccagagagtttcaaggaaaagttcgttcgcaagacccgcgagaacccggtggtacccataggtaagtgggtgcggtaggaactgcacaaggagaggacagtgatgtcggagggaaggaagtagagaaggaccagagcgctagcggggagcggaaggagagcggactagagaagagacgagggggcggggcggtgaggggcgaaactgattggagcgggagcagcgggtttagggggcgggatttggggcctaagattgggaggactctgtaactaggaagacctcgactcgacctaccctcgccgccctccctccgctgtgatccagagatcttggctttggggaagcgagacccaaagcggggaatgacctgcggggcccgacctgctgtttcccagttgctttgtcccctcctcaggttgcctggccacggcggccgccctcacctacggcctctactccttccaccggggcaacagccagcgctctcagctcatgatgcgcacccggatcgccgcccagggtttcacggtcgcagccatcttgctgggtctggctgtcactgctatgaagtctcgaccctaagcccagggtctggccttgaaagctccgcagaaatgattccaaaacccagggagcaaccactggccctaccgtgggacttactccctcctctcctttgagaggcccatgtgtcgctggggaggaagtgaccctttgtgtaactgtaaccgaaagttttttcaaaaatcctagatgctgttgtttgaatgttacatacttctatttgtgccacatctcccctccactcccctgcttaataaactctaaaaatccacttgtatttaattcagtatcatccccatggtttttggtctttgattttggaggaaacggactttggagtggtgcttagaaatcgtgtagtctagtgattcccgaactttcctagtaacagccacccagggcactttgaaagcagagatttggccaggcgcagtggctcacacctgtaatcccagcactctgggaggccgaagcgagcggatcacctgaggtcaagagttcaagaccagcctgaccaacatggagaaaccccatctctactaaaaatacaaaattagctgggcgtggtgttgcgtgcctgtaatcccagctactcgcgaggctgaggcaggagaatcacttgaacccgggaggcggaggttgtggtgagctgagatcgcgccattgcacttcagcctgggcaacaagagcaaaactccatctcaaaaaaaaaaaaaaaaaaaaagaatctcaaggtcactccttgagattctagttcagtgggcctagagtaatgccatttgaaaaatactggtctagccagcagtttttcagactttcagtaggacaaccttccttcagatgaggcctcccatagtcgggtcagaggcagagggttctgccctccactccgcataacctcctcaccctgctcccacctccctagagtctatggggctccactgatctagaccatctagttctttttttgagacgagtctcactgtgtcagccaggctggagtgcagtggcagaatctcggctcactgcaacctccgcctcccgggctcaagcaattttcctgcctcagcctcccgagtagctgggattacaggtgtgtgccaccacgcccggctaatttttgtatttcgtatttttagtagaatactaaaacaacatggtttcaccatgttggccaggctggtcttgaactcctgacctcaggtaatcccccaacctcggcctcccaaagtgctgggattacagacgtgagccaccacgcccagcctagaccatctggttctt

SEQ ID NO: 318250 - DNA, 4001 bp, Homo sapiens
aacagctgatttacctacctaaattcccaaatggcaatttcgaaatgagaacggttacaaacatgaatagcttactattacaaaagaaaaatgacaaaagtaaaagaaccgaagtttgctacagggatcaacactccactctttaaagcaacagaaagtgacatacgcctcaaactatattcagaaattatgtttaagacaaggagggttctttccgatagttatcaaaaagtactgatataaatttaccagaattctcagctatccaaaataactaggaattaaagccttaatgttttgaatacatatgtctactctcactccatgaatgggcaaaattcttcaaaacactgtcagaataaaaattttaaatgattccatttaactatcatctaaccgttaccaatacatatacatgcttaaatgtgaacagacgtttaattaacaaatctcagcacggataatgaacaagataaaattcacggtaggatttgcatttacttcaaagtctgaatagtacaaagattaggcttctgcaattaatcctactgagatcaaaaacccaagtgggactctcctttttggggcaggactaccgcaagtcgaggggggtggtgctcccaaaattctgcgaatagtcttaggtcttgatctgactcaaaccgaacactctacgtgtttcttgtatttagaaaagcagtttggtcaatgccgcacaaatggcggcatgcgaggacgtccccctaaaacgaagcctcattaatattcacgaagcagcagctacggagtcaagcgtcttggtttagatttagtctcttattgcctttactaagtacaaccttcgttaagtgagtttatctctgggcaccagtatcctcatctgcaaagtggggctagctccacctaccgcagtgagacagaaaaggggctcaaaaaaatgagagctgccatcacagtacatgctgtaagcactgaacaaagacctccagaaccctagtgctaccagcctcttaacatttcccacttcaacagagccacagcatccctggctcacgagtggcaacacgccggtgagtcccggatgtagcgcccacacccccctccctcccccaaccacgtggcaaccacgtgctcccagcggttgcggcctcctcacgccgcgccgcgcctccccacccccagtaactggccgaagcacgcgaggtaagtctacgtccggcagctccaggctctgaggccagaataacgccaggctgtgcatctacccgctccaacaagcaggcccatgcttcccggtgaacccagcctccaggaccaccaacccggggcctggcatcagaagcctatgaaccaccgccgttagaaaataaaccacgcctggagctccgccacgtatccccggcaaaggccgaacttccaggcggccggttccactttacctcaggccccgggcctcggaccgctcacgccccagacgcttcaggccgctcgtctcctcccccttcacgccaccggctccccccgcggctccaatccctccaggtccagggctcaggcagctcttcccacccgctcaggcctcccgtcggtctggcggtctccaccagacccggttgcagccggattcccgcccctcacccccaccctcaccgccaccaggccccgctcggcctcgctccagctccccccagcagttaccgaaaagatagttctggggcctcagggggctcatgtccatgtccatcgaatcttccatcgggtggcggcacgcacttaggtaggagagaaggcggacggagataaaagaacgctgctccagagaacaaccgcgcaggacggaatcacaccagggaaaggacgcaggctccccgcgcttatatatagaccctgaagatctcgcgagcgcttcccaagtcccgcctccgcgcgcgtgctccgaagccctcccacccccgtaccgtagccgtcctgcgcaagcgcttttcaaccccactcctttctacctcgcccccacctccttccaggtactccgcgggctcccaccgagcacgcgcactcgtacactggccccacccctccgctgctgtcgcctgtgcgcacgcgtgctttccagtcgtaacgcgcactccccacctccaacccttccacgtcctctcccgctcaagcgcgccggcctcccgccaagagtctgcgcagcccaccctgcaaaatggcgtcggcagcccttagctgtgtaagatatggcgggttagccggctgcgaatgagccagagagcacctcgattcacctttccccatcccctagtgccctgcaagcctccaaacaggcgtaatcacttcaggaattttttacttgcctgaaggcttcggatcgcagttaatcgttaccccaaagttcaggtgccagagagagtgaattgcggcttattctttgttaggaaggaaagatgtagttaccggccagacttacggaactttgtttttcagctctgtccttcctgagaaaacatctccaaagtccttatctttacgtaacttgggggccaaaaggggactgaatcagtctccaaattagcaaggacatcgccctaagagagctcggagggtgggccgactctgacttcttgccgctcttaatctttaacattcctcctgaaagaaagcgggtgacttgtaagaactacagaagccttaattcgaatatttgggagcgagcatgggaattaacgttttaagctacaccttgacaaactccgaggcaccccagcaccccgcgggcattggggcgttctgaagacccgtaatcttttttttttaagcctcaacatatcaaacaaatttaagaagtgaggaatacaaatgatagcctcagaaaggaagacacccccaccccaaggcattatttcttacaggaaaattatagagacgatttcagtgtctatcaagagaggaatgaacagttaaattataacatgtccatattatgggttagttgtggacacatactaacgcataatatggacatgttataatttaactgttcctttctgagagctcctgtgtcacataaagctttgagtcacttaaatttgttatgcctttttttgtgtgtgtgtggagacagagtctcgctgtgttgtccaggctggagtgcagtggcgtgatctccgctggatgcaacctccgcctcccgggctcccgagtagcgaggactacaggtgcatgccaccacgcccgactaatttttgtattttaggagggatggggtttcgctgtgttctccaggctgggctcaaactcctgacctcgggtgatccgcctgtctctgccttccaaagtgctgggatttcaggcgtgagccaccgcacccagccagcattttttttttttttaaacggggtctcgctctcttgcccaggctgcagtgcagtggcaagatctctgactcacgagttctgcctcttgagttccagcaattctcgtgcctcagcctcccaagtagctgggattacaggtgcctgccaccgcgtccagctaattgttgtatatttagtagaaacagggtttcgccatgttggcctcccaaagtgctgggattacaggcgtgagtcaccacacccggccactgttttattttttattttaattttttttttttttgaaaccgaagtcccgctctgtcatacaggctggagtgcagtgttatgatcttggctcactgtgacctttgcctcctgggttcaagtgattgtcctgcctcagcctcccaagtagctgggattacaggcgccccccaccacgcctagctaatttttgtatttttagtagagatggggtttcaccatgttggccaggctggactcgaactcctgacctgaagtgatccacccgcctcagcctctcaaagtgctggacttacatgcgtgagccatggcgcccggccttatctgagactttaaaaaaaaacaatccagcaaaaggggaggagaaaggagagtggg

SEQ ID NO: 318251 - DNA, 4001 bp, Homo sapiens
ttccaacacccaaagacccatggagaaaacttgggggacaggtggaaagaaggttcagcgctcgtttcttcaaaaggcactcccgcaaagcttagctctgggcgcattagaaactgcgttgcagaacactctgggagaagtgagtgtcgccagaattcagacacacaggggcatttttggtggaaaccacagaagctcgtttataaggggctggaagggaaatgaaaggaatgagaagagtgagtcaacaagcctttaaaagaaacctggggtctgtggaaacaacagtcagagaaaccccaagagcgggcgagctaagtggcgacgcctcgctgcgaggcgtccgcggacgcttccgcactaagtgggggcgcacgctggcaaaggactggggaacaagttctttccgcctcggatgcttcagaccctggatggagccaggcactgggagtgcgccccctaatcaccagcccggcgctggcaaagtggaaactgggaagaaaaaacatcgaagtgtttgacagcacctgttggacctgggcacgcaggagctacagacgccctctcctccaaccccttcacctccctgggaccctctacgtacaccgcgatgggcggtcgtcaaaggttgtcgcagccacacggcgcatacctgaacgagtgcccgcgcgcacccgacctcagcgccgcagtggggagtggggtctgcagagtggacgagtgtgcagggagagccgcggagagcggttgggttagggcccggggcccgggacgcgcccctgctcacctctctcactggcctggatattgcgcacgatgtcttccagatccaagtctttggtctcgtcgaaactgtagatggacgtgtgcaaaccctcctcctggaagacctcgtggaccccctcgagggtgaagtagcagttccgctccagcttgtcgtcgctgtagaccagtgcagcgcggctccagtggtggtggcggaacagggcgagcatcatctcgcccatcttggcgtaggcgggcgccacgcgcgtgaggtgcgagtactcagagtccttgtgctggaagccagcggccagcgccccagccgacagcatgggcaggtcccagtgcgatgcaagccgggccactggcgctgctgcatactcgcacactggccccaggataaggtctggcttggcgccccgcgccgccgccacgcggtccaccaagctgaagagcgcacggttcccacagtctgaatcctcgtaagccacctggaagcgagtgcccggcggcagaagccgcctcccagtcccgttgccctccacgctgcgcagagcatactcgatggccggccgcacccgggtgagtgaaaacaagtacgagtcatcctggggcagtaacaccagcacctcgatcttctgtggcggcagcgcctctctctcctggcgtccgccgcctatgcccgcgccaccgccgccgccgccaacgccaccgccaccggtgccgccggccagcaacgcccagccgagtagtacgcacggggagaaagtgagcaccagcagagacggcatcgtgccgcaagaaagagcttgccctcgccgccgccgactcgccctctgccccccacccacccttcctctttcctccccactcttctctccaaggtccctgcgcccccttgggcgctttaacaaaatagaatacccccttcactaatgcgccaaaagatagagaggaagcgtccttctctgcaatgtcactagtttttcttaaaaaaaaaagaaaaagaaaaagaaaaagttcaccgggtgtaaacctgtgcgtctgtaatatacatatatatatacttgtatatattcgccctccgtttatacatatactattttgcttagaggtggcttcttatttgggcgttgctaaggttgcttttgaaagcgtttttgtagaagaaaaaaaaagttagacttgtccaagtgtttgtaattgacggtgcatctccctcgcatttgatctcattgattcgcgccggttcctggatccatagcccgcgtttaaatagcgtggcagcggctgagcgtgttaccacacatggcgcgccgaggccgggcttgtgtttccagcgggtggggtgggtgggggtggggagatgtgggggctgggctgggggagtctctcattaacattcttacatcagggctcctccctgcaccccttcactacccatcgcgcccctgtccctaaccaccactccccgcaggccctctgccttttccttaaagctgaaatcgcccacgtctgcaccggcaagagcccccaccacgccgcgtgcctgtgcgatcaccgcctctccctttccacgctctccagctcctggcttcaaaaaaggaaacgtgctttaaagtagagaaatgcgcgcgcgcacgcacacatacacacacacacacacacacacatatacacacacacaccgtgcaaaaaaaaaaaaaaaccaggactgggggaaagggatggttctagaaattgtggtttcggtgcaaaaatccttaggtgccgcttgctctcacctttctcgttctggccacattccctcctgaagcaccgacgcggggcgagcacctgaccttcctggtccctcggcgcaaggtcagggaacaaggaccaaggtcccagtgcagatggctccatcgcggacctggtgtgcccggctggcccgggcgtcacctacaccccgccttcctcagccccgcgccagccccctccccctgggccacgcaggtttgcgctggaatcgcagcggtgccgaggtcacagtgtcccagctcacggaccctctgtcagcgcactgagagcaggaaagtgaaacttgttgctcccaaaggcgagggaatggttcaacttctggaggtgtcacaaagcttggaaagcatccccaaagcgtcctcggggctttgtttgctaaaccaggtacctaaataaagggactgtctttcccaaaacgttcccggtaggtcccccgggtacgacacacgctcccctccaacctgagtgctcaaagatccaaccgctccttctctggagcgctcgaggcactgtgctggggttccgcgactccaagaaaggtcctgcctcggagacccagtcctcccactggccatagccacagcagcggtggagaccggagggaagcggctctggagaagtccgtgaccagaggagcatcgcgggagtccgccgcgcggcggggcgggtcaaaatggaactggaccttctgtgcctactgcagccaagtcatttgcaatgtgaacgggctacactgggcgggagaattctgacaattaagtcccgcacatttaaatacattgaaaatgtgttaaaatggtctttcatttgactaggcgtccgtgtccacaaatttcttttagtctcagaccgacgccctctttcggcagaaacttgcacccgactcaacccgggtgccgcagtcccagacgctgcgttttttactccgaggcctttaacgcgctctggttctcacttgcgacggtgaaaaggcaaactggggtttctggggatatggcaacttctggcgtcagcgctcgcctcccttaacagcactctccttatcgctctttctggaaccgtcaatgtgattatgggtaatgtttcagcttctgggtcatttatattcagattatgcactgtgatcccgaaatcttcactgttaagtaggagcttctaattcctgcgagaatttccatttatttaattagagccactaaccaggagcaaaagagacatctgtataaaatttaattccacaaacagggtaatccacacacactggaaattgagatttagtgctccacagcaattaaatctttcctgaatttgcagaagggcaggcgtttatggcagcacagattaaaaaaaaaaaaaaagaaaaagaacaacaacaaaacaagaactaaatcatgaattccaagggtcttaatggatttcgaaactggttgccaggc

SEQ ID NO: 318252 - DNA, 4001 bp, Homo sapiens
ggagtggggtctgcagagtggacgagtgtgcagggagagccgcggagagcggttgggttagggcccggggcccgggacgcgcccctgctcacctctctcactggcctggatattgcgcacgatgtcttccagatccaagtctttggtctcgtcgaaactgtagatggacgtgtgcaaaccctcctcctggaagacctcgtggaccccctcgagggtgaagtagcagttccgctccagcttgtcgtcgctgtagaccagtgcagcgcggctccagtggtggtggcggaacagggcgagcatcatctcgcccatcttggcgtaggcgggcgccacgcgcgtgaggtgcgagtactcagagtccttgtgctggaagccagcggccagcgccccagccgacagcatgggcaggtcccagtgcgatgcaagccgggccactggcgctgctgcatactcgcacactggccccaggataaggtctggcttggcgccccgcgccgccgccacgcggtccaccaagctgaagagcgcacggttcccacagtctgaatcctcgtaagccacctggaagcgagtgcccggcggcagaagccgcctcccagtcccgttgccctccacgctgcgcagagcatactcgatggccggccgcacccgggtgagtgaaaacaagtacgagtcatcctggggcagtaacaccagcacctcgatcttctgtggcggcagcgcctctctctcctggcgtccgccgcctatgcccgcgccaccgccgccgccgccaacgccaccgccaccggtgccgccggccagcaacgcccagccgagtagtacgcacggggagaaagtgagcaccagcagagacggcatcgtgccgcaagaaagagcttgccctcgccgccgccgactcgccctctgccccccacccacccttcctctttcctccccactcttctctccaaggtccctgcgcccccttgggcgctttaacaaaatagaatacccccttcactaatgcgccaaaagatagagaggaagcgtccttctctgcaatgtcactagtttttcttaaaaaaaaaagaaaaagaaaaagaaaaagttcaccgggtgtaaacctgtgcgtctgtaatatacatatatatatacttgtatatattcgccctccgtttatacatatactattttgcttagaggtggcttcttatttgggcgttgctaaggttgcttttgaaagcgtttttgtagaagaaaaaaaaagttagacttgtccaagtgtttgtaattgacggtgcatctccctcgcatttgatctcattgattcgcgccggttcctggatccatagcccgcgtttaaatagcgtggcagcggctgagcgtgttaccacacatggcgcgccgaggccgggcttgtgtttccagcgggtggggtgggtgggggtggggagatgtgggggctgggctgggggagtctctcattaacattcttacatcagggctcctccctgcaccccttcactacccatcgcgcccctgtccctaaccaccactccccgcaggccctctgccttttccttaaagctgaaatcgcccacgtctgcaccggcaagagcccccaccacgccgcgtgcctgtgcgatcaccgcctctccctttccacgctctccagctcctggcttcaaaaaaggaaacgtgctttaaagtagagaaatgcgcgcgcgcacgcacacatacacacacacacacacacacacatatacacacacacaccgtgcaaaaaaaaaaaaaaaccaggactgggggaaagggatggttctagaaattgtggtttcggtgcaaaaatccttaggtgccgcttgctctcacctttctcgttctggccacattccctcctgaagcaccgacgcggggcgagcacctgaccttcctggtccctcggcgcaaggtcagggaacaaggaccaaggtcccagtgcagatggctccatcgcggacctggtgtgcccggctggcccgggcgtcacctacaccccgccttcctcagccccgcgccagccccctccccctgggccacgcaggtttgcgctggaatcgcagcggtgccgaggtcacagtgtcccagctcacggaccctctgtcagcgcactgagagcaggaaagtgaaacttgttgctcccaaaggcgagggaatggttcaacttctggaggtgtcacaaagcttggaaagcatccccaaagcgtcctcggggctttgtttgctaaaccaggtacctaaataaagggactgtctttcccaaaacgttcccggtaggtcccccgggtacgacacacgctcccctccaacctgagtgctcaaagatccaaccgctccttctctggagcgctcgaggcactgtgctggggttccgcgactccaagaaaggtcctgcctcggagacccagtcctcccactggccatagccacagcagcggtggagaccggagggaagcggctctggagaagtccgtgaccagaggagcatcgcgggagtccgccgcgcggcggggcgggtcaaaatggaactggaccttctgtgcctactgcagccaagtcatttgcaatgtgaacgggctacactgggcgggagaattctgacaattaagtcccgcacatttaaatacattgaaaatgtgttaaaatggtctttcatttgactaggcgtccgtgtccacaaatttcttttagtctcagaccgacgccctctttcggcagaaacttgcacccgactcaacccgggtgccgcagtcccagacgctgcgttttttactccgaggcctttaacgcgctctggttctcacttgcgacggtgaaaaggcaaactggggtttctggggatatggcaacttctggcgtcagcgctcgcctcccttaacagcactctccttatcgctctttctggaaccgtcaatgtgattatgggtaatgtttcagcttctgggtcatttatattcagattatgcactgtgatcccgaaatcttcactgttaagtaggagcttctaattcctgcgagaatttccatttatttaattagagccactaaccaggagcaaaagagacatctgtataaaatttaattccacaaacagggtaatccacacacactggaaattgagatttagtgctccacagcaattaaatctttcctgaatttgcagaagggcaggcgtttatggcagcacagattaaaaaaaaaaaaaaagaaaaagaacaacaacaaaacaagaactaaatcatgaattccaagggtcttaatggatttcgaaactggttgccaggcactgtgctggggttccgagactccaagaaaggtcctgcctcggagacccagtcctaccactggccacagtggtaggaaccagtgtttcctattactctgcggtatgccctgtgtctgcggaacaccagccaatggcgatatgattctgccgcgtgtggtgtgggtttatgcggagagtctggggtttcagtggcaccggtgtgaacgcctgtcccatcccagatgctacctagcctcgcctgcagttcaacagcagggcagtgcgcttaagtaagggtgagtgcccgtagcctctccgcagcttttggacaagagctctcgacttgcagtttgtcacactcaagagcagcaacaagaccaagctgcggaagggaagagaccccaaaccaagcagcggaacgaattaaaaaaaaaaaaaaagccagtgttatgcttttgctgaagctcaaaacaccccttaagaattccagtgagcaacaattagggtttttaaaaaaccttttcaaatgaaaagagtcacaagattatgggaagacccaccaagtaatgtaagtgtatggatttcaaagttacgggtttgtttactttccatcaagttagaatttttgcaaccaactgaaagtttgtgtaaataagtagttctaaatcttcaggccagaagacttaagtcacccagcctgacaccccttactctc

SEQ ID NO: 318253 - DNA, 4001 bp, Homo sapiens
ccctcgcaggtgaattggccgtagtgcttgccgctcgacttgtccccgcacaccacgcactcgatgtgctgctggctctggcccgaaccgggcgggccctggcccttgtcccccgccgtgccgggggtggcgggcgctccgggctggcccggggtctgcggcgtgtgcggcgcgcccgagcccgcctgctgctgctgctcgccggcgccgccgccgccgccgcgggccgcctgcgctgcggggttggggccgccggggttgcccccggccacgtcgtcctgcggatctcgccagctgctaactaccattgccatatctttgggcccggggagcgctggggggagccgagctgctcgccgagggccgcggggcgcgcgggcgcgctgggaggggaaggggaaggggaaggggggagggggagggggcggggggcccgccgggcgccccggggtcgcaggagccgagcccgagccggacaccggccgctgcctccgccgccgccgccgctgccgccgctactgcctcggccgccccgctgctgctgcgcgcccgcccgccctgctggcgttttgttgtggttcctgctgttttctttctctctttttgcagcccccccaggctctcaggctccccccccaacacccctgctcccctcgcccgctccccccgcgctccgttcctgggggggccgcgctctccttcccccctccccaccccccggcgagcaagctcccttctctcgcttttttcttcttccccaagttgcaaaatcagaaatggcacaggcggcagccgggagcggcgcggggcgcagcgccgggggcggcgggcatgggccacggcgcgcgcacacactcgccctccgcctcgcccgcacccccgcgcacacacacactcgcacacacagtcgctcacccgcgccgggcgcccgcccgccggccgctcgggctacgcgcagcgcgcgggctgagccgacatagaggaagccggcgagggcggaggcggcggcggcggcggaggaggaggaggtcgcggctgcaggcgccgctggagctgccgccggagctgctgcggcgagcgccgctggaggagccgggacccgggccggagtccgagcaggagtcggggccgcagccggagcgcgagcggaggccggggccgcccgcggcgccgccgctgtcccggcgggagccctcgccgggctcgggagtgcggggagcgcggtgagccgagcagggcgctgggcgaggctgccgccggcgatcagggcgcgcgggtgtcggggggccaggtccagggccggacgcagccagccattcaggaaggcagcgctggagagcgggaggcagccggcgaggaagatcacacactttgctctttttgttgtgccggtggcgccgggctctcgctgccttcttctttcgggaggtgacggaagggggagaaaaatacgggataattcacgccggcgacgaaatcacagcgaaatagaaaaaataaaaatcagaagaaaataattgccaaaaaaaggaaaaaggaaaagcgagagagacatccaaagtaggtcgaataaataatcctcttcttttcctctttcttgctccttcttctgcttcttctgctataacacacagagctagttaaaaaaaccctggagatcgcccaaaaatgttctttttttagtattttaaataagtgctcttcagccggcaaccaacaccctccctccaaaaaaaatcatatatgtataaaataacgataagaagaatacgaagggggtgcctcctcctcctcctcctccttttttttttctttaagtttagccctctctcttctgcaggaatggagtaaaagagacaaggaggagggagaaaaaggagagaaaggagaagaagaaggggaaaacaactagtagaatatgtaagaaaagagaaagagaagagaggttcagagaagagaggagagagagaggagaggagggagagaggggggagaaagaggagagagagagaggagagagagagagagagagaagagaagaagagagagagagagagagagagagacccaaaaattgaatgcgtttaaacgggaggactcgcagagcaatgtttccgaaagggggatctgcgcgaatgtctgtatatagtgaactttgacactactattgaaactgacacgtttctatggagatcgctgccttatatggagctcgtgtcaaggagccaagagaagggctgctggcaactgataatcaaaggcgactgactggtcagagccctgaatcggggggagagaaaatgggaggctaaggttagccaagcctcctgcacgccattggttggagagcccctcccccctcctcttttgctttctttctcccccccccgcttagctacctacagactgggatggtgtggggaggaggagagaaagtgagggaggggggtgtgtttctgacaagcgcaatttacattgagatcgccctgcgctgctatttactctgagacctgattagtatgggtcgtctatggtcacacacacacacacatacacacacacacacttacgctcacaccccagagggggaagggatgacgagggggagaacgcctagcgatgggcaaaaggagaattagagggaaattattttgatttcttctgaaaagtttttaaaattagattttatgagcgtgaagagagtgtcattgaaaatgtttggaaaaatttttaatgggaatgaaacccccaccattttaatgatttgtgaaatatactggatttggattgttttcttctctcacatataagcacaatccaagtctggattctgctcattttatatcctttttagaaacaagtagaaacagggtaggatctccctattttttaatccaaagtataccttggtttaaaaggtttaatgatgacaaagcacactcctggaatttgcagctattgccacaaattcgatcggaatcaagggttcctatttatcccaaagatgattttaaaaataaactttccaatcaatccaatttttccttcttctttttttttttttttatcacctggctgttccaaactccaacaatgcttcaatcattattaataaaacagtagtaagtccccatattgttgcagggtggggggagattagtgtggccaagtcagtcccgggaaaagagcaaacaaacgagaagatggagagggggggaggcggagagggagagagaaaagggggaggaggagagagagagacagagagagaggagaggaaaggaaagagaggagagaggagagcgcgcgagatattgagagagagagagagagaagagaggagaggggagagagagagagaggagagagagagagacccagagagagaggagagagagagagacccagagagagagagagagagagagacccagagagagagagagagaccgagagagagaggagagaggagagagagagagaggagagagagagagagaggagagagagagagagagagacgagagggagagggagagggagagggagagggagagggagagggagagggagagaggagagggagagggagagggagagggggagagagagagagagagagagagagagagagagagagagagagagagagagagagagagagagagaccgagaccccgattcctgaatcctgaaggtgattggtcgcgggaggaggggcaggcgggaggagcgggtcccgcggcggggcttgcaggaatcgctggctccggctgccacctagcggacgggagccgctcccgggcggcacacagccgagtccctcctcccctccccgcaggcagcctgtgccttttctccaaacgaagacagcactttgaaaattctttcaatggatttttttttccttgaaagatcgtactgggggaaaatgatacttctattagttacatattctccaatcgcatactcgcacccccctcgttttgagatcgctcccc

SEQ ID NO: 318254 - DNA, 4001 bp, Homo sapiens
tttacattgcttgagatcctcaatatgaaatgctattacatctctaagttctttcctttccaaacaaatatcgaagtactgaaaaatggaaaaacacagaaccgtaaaatcacattcatataaattcaggtacaactgtatccagtaaaatgttcaaaataattttctctgccttcacctatccaaaccttcacctatcccaattctcagcctattctcaagagagtaagactgttagtatatcgttaatcagggtgttttaagagatgggctaagacggagaagcgcatttgggacactatagtcaaatcccgtccaataaaaggtaacttttcctatgcgatgacgttaggcagcataaatgtcactggccctcactgaaaagtgaatatgaaggtagagagaggggtgtggacttgccactacaaatcttgagggtaaactgcttatctccccacctctctgccccgtttatctgaggcgataacgatctctaaacacgaggtatcgaatggagcccaatgaatttccatgccgcttttttgacagctgccttcaaacccgaaaccaaaacaatatttcctaaaacgaaaacgctccctcaagcgacattatcccccagtttaagttgcaaataacccagccacattaattggccctaatgaaccatgccagagggtcttaagtggtattacaaggttgcaattatcaagtctgcaaccccaaacgtcaaactagcacttgtaaaaatcgcagcacaaaaccattacggttacagggggtctttttctaaaaggggccacttagaaacctcaggcgcgaattaacaacaaacgctaaagagcaagcccttgcggggcgggggtggagaagagaaaaaagtgcgaggttaaaagagaagtacgtccagacctgttgagttctctctccgacacgcccacttctaacagataacgccggccccggccgcagtctccaagttgcgggctgtcagccccccgcgtgtgcaccctcacgcgccccgcacgccctcctcaagccaggcgccgccggggcctccccggagcccgggctcgcgctcgggcgcgccggggtggcgtgcaaatattcgggcgagtaaaattcagacgcggcttagcgttcaccacgaaaacgggtgtcgggcgacccccttggagggaaaggggacactagggggagaaaagaggccaggattcccgcgaggaatgagaggctcgaagcccccggcagttcgacagggctccgctcgccgtccgaggtcaggttcctccccctcggcccggccaggggacgcctgcggagggagaggaagaggccagcgctgtcacccgcgcgctgccctttcgtcaccgtcgcccggcccttgccagccccccacccccactccccgaggctaataaaagtttgtaggctcccgcggcggcccccgagttgtctccggtcccagcggcacctcgggggagcgagcgcgccccggccccctcccgcctcgcttcttacctctggcagaggagccgctcgcccgccaccgtccgcagttcccgccgcagccgagataaacaacttagcttgtgaacgcagaaggagcaggagggaaatatattttttttttctaaaaaaaggaagtaaacagccgcccctttctccatgggtggggggagagcccctatttaagaaagtctcccattgcccagctgacaagccagccctccgccccgcgccgggctccgcgggtcgaggttccgggcgcgcgtgccccgtcccggtcccagctgcttcggccgctccggctgcggcgtctccttccacccacagaatccgtccccgacgggcaggcggtgactcgggctcccgtcacagacacgagctcgcaaaatggaggaggcggcggcggagggaagagagcgcggacacgcgaaagggcagcccggcctgggcgagcgagcgggaccgagcggggagcgggtggaggcggcgccacggcgcgcacacactcgcacacacgcgctcccactccacccccggccgctccccgcccgaggggccgcgcggcggccgcggggaacgatgcaacctgttggtgacgcttggcaactgcaggggcgcccgcggtccctgcccccacgccctccgcgcgggccccgccaccccggccccgacggcgcctgcacgcccgcgtcccctggcgtggccgccccgcccggtgcgccgcgcttcgccccccgcccccaactccccaggaaaaagggtggcggcggcagcggcgggggccgacctggtctctctggggcggcgttaagagggccaccgagtttctccagtttcttttctcgctacctccttcccgcccccgcccagctccgcggctccagacccactcgggagctcgctctgccccttggcggcaagcgccgccagtgcccctgcgggtgacagcgggcgggccacaagagccggggcgcctcccgcggctgagctgcgtgagtggcccgcgccgccgccgccgggccgagttgcgtgaagtgtgtcacttcgaaaggggctacggggttgcacggaaacggtgccgcagcgtctcggccgcgctcggggccgggcggcctgacacgccctctggggaggcttcagggaagggacgggatagcgggggtcggcgcatacgtactttgggcccggggggagtcgcgtgccggcaggtcccccaccaccgcatcatctgggcggccgggtcttcagctgccgccgccgcgctctcgcactgggagagaagttgcaaagcagaacccaccctcccccgcgccccgaccgtcccccaccctcttccccgagtctgcgaggcggcggcggcggcagaaggaggcgccgcctgccaagttcaacccccacccctcccgcccaatgtgctcacactcgaaggaagttgcacgccaaatgcaaaacctccagcgagctggatttctttgcactttttttttattattatgattaaggaaagcagggggcggcaggcttaaaagcaagttgcaggcgaaatagtaagttgctggcgaaatatagccccccttccgaaactcctgacctcttcttccaccccggccagggcccgcgtccaagttcccggtgcaggccccacccccgaatcttgacatttgctgccctcgactctgtgcgttgctcaccctatcacgttcataggacccctgcccctacaaataaaacaaaatacaggcagctttaaaatgccagcgttcaactccctacagatgttcctgttaggagcttccccctcagtccaaggggaagggaactcgtggtccgtcctgagaaaggagagggccgtggggcgaggggtgcccgtgcgggaagcccccgccccagctcccttccccagctcgccgcgtcgggaaggcttggacgatgccgggaccgagcctcctaccttgtgcggcacagattatgatttttgtgactctgggaaaggttgtgctgtgtgggtttagggtttggggaggtaacttttgcgcccccacaggtgacatcgcttgccagctcctgacacgggcgggggctgccgcagctccacctaatcctgctcgggcgctcggccacagccactctctcacctcccgccgcgctcagactgacggcggctccccctgctctgacatcttgaagacgattggggaagcgcgtcccggaagccgcccgccgccatcttggtagggtacagtgtcgccagcccgtccccgcggccaccatcttggcaaaggttcgcgatcgcgggtagcctaagccgtccttccttggttctcaagggtaaacggttccctgtgcattgtctgatgtgaaaggaaagaagtaggctttcagcaagcctcttgtccggagacgatctacgggggccgcctccagaggattctggagccgccatcttggcaaaggaagagatactcgccacctcggaaaagaagagggaacca

SEQ ID NO: 318255 - DNA, 4001 bp, Homo sapiens
agacaaggttgtttaccttggctgttattggcaccttggaataatattaagctgtaaggggcttaagatcagctaaattacctgatctgtaagcctctctctttttctcatcccccatgtccaatcctccagcaactcctgcaggcttaacattcaaaataaacactttccaccattccactgctcccctccatctgaggccttacctctctcatgtagatggttatggcagcttcctgactgctctccttccttccacacttgcccatctacagttaattcttcacacaccagccagagggatcctgttcaaacctaaggcaggtcagggcggtcctttgcttggaaccttcagcagttcctccctgcaggcagagtcaaagcccagtctgcacctggctcctggctgccttgatggcctcagctccagttctctttgctccagtcagactgtctttccttttcctcaaacttgccacacaccttcctacctcagggcctttctactggctatttccgccctgccccttgagtcttccagatattcacataactggcctctttactttattcagacccctgatcaaatgtcatctcctcagagaagcccctccgccactatcactcttctagcctctcattgtgttttagctctccttatagcactttttacctaacacattatatatattttaaaacgcgttgtctcgttctcctttctagttggaagctccatgtcagttttgttttgttccctgctgtatcttcattgcctacaatagcacttggcacatacttgctgaataaatgaaactgagaaactcagagcaaactatttctttttagataaagcccacaaaaatgttttcttcctgttcagtttaaactatccagcacacaacatcagccttgtgattgtctttttttctgatgctctgacctctgagtgacctttaacaagtaactttgttagaactcactttacccagctatagaatgggaataaaaatataacctaccttccttctcagacactttaatgaagcaaagtcttctttgttctttgaggaaaggagccaggcagatgaaaattcctgttattaaggtacaactaaagcccgaggagggtaggagctgcattttgttcctccccattctcgcacagagaaggcactcattaagtgcttatcaaagttaatatctgtggcacacaaactgcacctgcctctgcagcagtcgtcacagaagctggcccctttcctgggctaactgctctgagagcaccagaatgaaatctgacttagatatgacgcagattccttttttcagaagaagccagctacacaactcttgatgaacaaatagctaccaacgatgagcacaaaccagagaatttcagaagtgaagaaaatttcagatcagaagatcctgtctctcgggtataacttttttttttttggagagaaatacagtgactctcctaattatggtgaatttcctagttcagctcagagccactgattcagcagatattcccccaggcagatcctaatggaaaccaacatgtgaggtctgatgctgggaattttatcatgctcaacaaggatttgaaaactaaatgaatgcgtgcatattcacactaagcaattttcctccctgccttcaccactttcccttttttcttctcttaccctctttctgtttctattccttccccactcatgccccagtgcttccgttggacacatgcgcattttacggtcctgcagggcttgaaagatttctgaccttctaaggtccagtgatttggtatcagaagatctaagttttctccttctctctgccatttaaagaagcgtgttgcaatttccccagcagaagtgaaagtgattcgcctctactcaaatgtctgcataggcacaagaatgagggcgagagggagcaagagaagaggaagaggtaccttttgaatggggtgaaagcaaacccttacataacctgaccacacaataggaggaaatgaaaacttgggttcaagggcaattttgtcattggttattagtctgtgtcatcaagcaggtgccagaaaaacaaattttattttgattttaggcattcattttaacaactggattttcctaatttctcattcccaaggaggatctatgcaagaatgcacaatttatagttaatttggagatgaataaaatattaacataccttttgttccccctaaaacataatacctaaattagtgtgatgccttggttaccatcctacatatgtatttggattgtaaatgagctcagttttaagcacatttgtaacagtggaacaagtgaggcttgtattacatggccaaattgatattaatgatggtggcctcgagaacggattccatcccaagacatctgatctgcagacagttgagcattcacagcagttttgactttattgacttcattggccccagtcagaaggttttcatctagtgcattcagttaccctgatttctaattacaatagaatctttcaaatagatttgtttccagagagcttgcttgagatagattaaatggcagaagttgcaaaggatgtcattgttttacataaaagatctgtggaaattacgcctagaaacttgttgcctttttattttaaaagctgctatatacaaaataacagtcagggtcaaatagttaccactgtgacaacaatcatttatggtacgtttgcaattgttctaaaaagttaatatggaaaagttaccagaattaagtggtgatgttttacttaagaagtagaaaagatttacaattcattatggatgtaaaaagaaatggactctaagaaacttgttactgtagttgttgaaagaatattgtcaaagtgtttatccatattaagtggctccatagaacgtagttcctttagattttagtgttagcttctataaaactgctggtttgttttaatcttttggaaaccataggtgtttttttttaataccagtgatcatattttcctttgtgcttttgttggtaggaagctcagagcccaatttacaatctctaatgactcctattgaactttatatttgcacttcttttagtttcttttttttagggtgggaatagggttttattaatttttccctggatttatttgcttcacaatatttctcttcactttgattcaactgtttcttttctctttttctatgatatatgttcttaaaagctggcatgaagtgaaatggagcatatctggtctcaaagtgacaaatttaacacatccaaaatcatcaccctagtgtgactatttatcccatcttactatcgttttagaacaatgcatttagaatgctgtcctccttcttgaagttttaaaaatcatttaattcttctctgaattagtgtacactaacgtttacatcttaatcttttatattttgtttgtttttatcctttgcttcaaaagaaattaatgtgcactgtgaccttagtttccattagtcatcaacttggggactaacatgactgcctcactgtcagtgagtatctttttctgatagttccaggaggggtgattaatctcacctgattcatcatgttcttttactctgtctgcccagtgactatggccttgcatttccttgcatttatttctttaccatctaattcaacttaattatttattgtttgaccattttgcattctctttcttcctgtctcttgcacagaactcgccattccttctctgtttccattcagcctcctttgctggttcctcatctcccctacatcataatgctggagtgccttagggctaagtccttgggtctcttctcttacctgcaaatactcttaccttggttggtttgtttaacccaatggctttaaatcaaatttctacactgaagaccgaaatttatgtcagcaacttggatgtctcttccgaactccagactcacatacgcaacagcctactcatcatgtcca

SEQ ID NO: 318256 - DNA, 4001 bp, Homo sapiens
aaaaggggccacttagaaacctcaggcgcgaattaacaacaaacgctaaagagcaagcccttgcggggcgggggtggagaagagaaaaaagtgcgaggttaaaagagaagtacgtccagacctgttgagttctctctccgacacgcccacttctaacagataacgccggccccggccgcagtctccaagttgcgggctgtcagccccccgcgtgtgcaccctcacgcgccccgcacgccctcctcaagccaggcgccgccggggcctccccggagcccgggctcgcgctcgggcgcgccggggtggcgtgcaaatattcgggcgagtaaaattcagacgcggcttagcgttcaccacgaaaacgggtgtcgggcgacccccttggagggaaaggggacactagggggagaaaagaggccaggattcccgcgaggaatgagaggctcgaagcccccggcagttcgacagggctccgctcgccgtccgaggtcaggttcctccccctcggcccggccaggggacgcctgcggagggagaggaagaggccagcgctgtcacccgcgcgctgccctttcgtcaccgtcgcccggcccttgccagccccccacccccactccccgaggctaataaaagtttgtaggctcccgcggcggcccccgagttgtctccggtcccagcggcacctcgggggagcgagcgcgccccggccccctcccgcctcgcttcttacctctggcagaggagccgctcgcccgccaccgtccgcagttcccgccgcagccgagataaacaacttagcttgtgaacgcagaaggagcaggagggaaatatattttttttttctaaaaaaaggaagtaaacagccgcccctttctccatgggtggggggagagcccctatttaagaaagtctcccattgcccagctgacaagccagccctccgccccgcgccgggctccgcgggtcgaggttccgggcgcgcgtgccccgtcccggtcccagctgcttcggccgctccggctgcggcgtctccttccacccacagaatccgtccccgacgggcaggcggtgactcgggctcccgtcacagacacgagctcgcaaaatggaggaggcggcggcggagggaagagagcgcggacacgcgaaagggcagcccggcctgggcgagcgagcgggaccgagcggggagcgggtggaggcggcgccacggcgcgcacacactcgcacacacgcgctcccactccacccccggccgctccccgcccgaggggccgcgcggcggccgcggggaacgatgcaacctgttggtgacgcttggcaactgcaggggcgcccgcggtccctgcccccacgccctccgcgcgggccccgccaccccggccccgacggcgcctgcacgcccgcgtcccctggcgtggccgccccgcccggtgcgccgcgcttcgccccccgcccccaactccccaggaaaaagggtggcggcggcagcggcgggggccgacctggtctctctggggcggcgttaagagggccaccgagtttctccagtttcttttctcgctacctccttcccgcccccgcccagctccgcggctccagacccactcgggagctcgctctgccccttggcggcaagcgccgccagtgcccctgcgggtgacagcgggcgggccacaagagccggggcgcctcccgcggctgagctgcgtgagtggcccgcgccgccgccgccgggccgagttgcgtgaagtgtgtcacttcgaaaggggctacggggttgcacggaaacggtgccgcagcgtctcggccgcgctcggggccgggcggcctgacacgccctctggggaggcttcagggaagggacgggatagcgggggtcggcgcatacgtactttgggcccggggggagtcgcgtgccggcaggtcccccaccaccgcatcatctgggcggccgggtcttcagctgccgccgccgcgctctcgcactgggagagaagttgcaaagcagaacccaccctcccccgcgccccgaccgtcccccaccctcttccccgagtctgcgaggcggcggcggcggcagaaggaggcgccgcctgccaagttcaacccccacccctcccgcccaatgtgctcacactcgaaggaagttgcacgccaaatgcaaaacctccagcgagctggatttctttgcactttttttttattattatgattaaggaaagcagggggcggcaggcttaaaagcaagttgcaggcgaaatagtaagttgctggcgaaatatagccccccttccgaaactcctgacctcttcttccaccccggccagggcccgcgtccaagttcccggtgcaggccccacccccgaatcttgacatttgctgccctcgactctgtgcgttgctcaccctatcacgttcataggacccctgcccctacaaataaaacaaaatacaggcagctttaaaatgccagcgttcaactccctacagatgttcctgttaggagcttccccctcagtccaaggggaagggaactcgtggtccgtcctgagaaaggagagggccgtggggcgaggggtgcccgtgcgggaagcccccgccccagctcccttccccagctcgccgcgtcgggaaggcttggacgatgccgggaccgagcctcctaccttgtgcggcacagattatgatttttgtgactctgggaaaggttgtgctgtgtgggtttagggtttggggaggtaacttttgcgcccccacaggtgacatcgcttgccagctcctgacacgggcgggggctgccgcagctccacctaatcctgctcgggcgctcggccacagccactctctcacctcccgccgcgctcagactgacggcggctccccctgctctgacatcttgaagacgattggggaagcgcgtcccggaagccgcccgccgccatcttggtagggtacagtgtcgccagcccgtccccgcggccaccatcttggcaaaggttcgcgatcgcgggtagcctaagccgtccttccttggttctcaagggtaaacggttccctgtgcattgtctgatgtgaaaggaaagaagtaggctttcagcaagcctcttgtccggagacgatctacgggggccgcctccagaggattctggagccgccatcttggcaaaggaagagatactcgccacctcggaaaagaagagggaaccaaccgtatgccaacgtagaaccctcagccagaagaatttttatgaagggcgctgagcaactccatgttaacaaaacccccttctggacccagaaggcagactccgcttctcctgtcccttggcacaagtcaactagaaggaggcccttgctttggatgctcatctgtgaggctatgagaacactgcttgacctagttgcccgtttttccaatttctgagcctcaagcactagaatgagatgtctttcgttaatttggcccctaaactaccaacagtttcatgggaaacaaatcaagacccaaccctacaataatgttttacacgttttaaaagtgagttaaatagcccatgctaataattatccttgtacactgcttaaaatgattaagaattctatttatatatacatgtatgtatacatatgtatacacatatatattatatacatatatatgtatataattaaggggacaatacagttgtctaatagaacacatctccccatgccattagcctgtctcactgctgaatctctgctctaagaatccacctcatcgctcatacatgctcaaatccttagtggtaggtactctgcttaaataatttatgatttcacaagagttcccaattattctcccttcatttttttttctctgcagatcttaatggggaagaatacgtagttttaaatatgccattgaaaacgtttttaattgagcaaaaaaaaaaaaaaacttatcctaatttctctcttcagcaatctaaatgtgcctgttaattttttaatttgat

SEQ ID NO: 318257 - DNA, 4001 bp, Homo sapiens
gagaacaaagaccacgtgagttccaagaatggagggaatgctgagggctgaggtggttggccagaggtgtacaatggtagagggacttgggatggatgctaagtaaggattgcacttccacagggaatgaagtgatggcagttacaatgcagagatgcagaggaaggcacacaaatggggtttaggaaataggctgaaaagcctgaattaatggaaaggctttcacggggcaatggtgggaatgactgcaccagttcaggaatcacttggttgcatgtgatggaaacccaacttgaactagcttaacaaacacgagcaaatcaggatagcagtttgtcttacacaattcagaacagaaatctggcagtgaacctggaaacatttggaacaagggactctgtctgtcatcctgctcctctgggttcgtgtttcatcttctcttcggctctgcagacaagacacatggtagaaaacgtgagcactgacccccctgagtgccacaactcacagctccagcaattcagagaggaggagaatgggcattgttctcatttctaaaatgagaaggacactgactggccagggtataggatcagtttatttccatgaagactcttttgagaagcccagagattaactcaagggatgtagggtactttagaaaggggtgtggttctaaaaaaggtgtttgacaaagaaaatggttatactaaaaatgcatacatattacatagaaaaacagtatccataaacatagatattcattaaaattttcaaatgccatattttccatttcttaacctcctcaatttgaaattacaaatgcttaaaacctgacatcaaaatgtcaacctgaaatagaattgattcattcctgttattcttccccaaaaatagttaatttcacctgcaattattagaacaaaatgctgaagtagatttatcttaaggactcactgatgctttgtattctttgtcagtgtctcactatatccacatttcttcctcctgcttgtttttctttattgaactaaaccagcatatctaattcttttacaaattaatctgctcttcttgttagagtgaaacctttttataatgataattgaaagaaacccccaaagtatagattaactatgttgtatcaggattttattgtgcatattgttttgagatctaacattttatcagtttcttataataaaccatattataaggagtaattactgccttcattcagaaaagattatacaatagcttttgacttaaataggagctctgcatatttcaatgctgtagtgaaaaactataggtagaagcatgatagaaaaactaatatttgttctatggcatctctgacattttaagaggtataggttctacagccaacattccccttaaaacaattttgatgtttgtttcctggaacattcctctttgccatatccaatcccttcatcccaggtctgttacaccatgtaccccaaaagctgaggctcagcctccttggaagcaggaacctcctctgactcatgtggcactgtatcccagtaccttcagcagtgctgaggccagagaagacaataagcaaatattgaataaatgaacgaattacataaaatatttgtattcataaacagagtcaaaacatccttcaagcaaaatgaacaaggttaaaatggagaggtcagtgaggcagagacaaacatcctataattgttttcttcctttaaaaatgtcccctcatatgcatacacagtaagttattcttcacataccaaagcagaataattccaaactcctttcattccagtcctgttactgcttgaggataaagttcagtctttaaaggacaaagaagcttcttgccgggagttggccagacagctcaggacacagctctgcagcccattctgattgtccaatgtttcttttgataaatagcatgattgcactgcctggaaaagtaattccttctagatgctggcaacagtcattctgaaccataaaaactgtacaaggaaatgatgagagtgtcagcaaactcaatcagtaggatgagatcagcttttattgggctccttggataaccagacagctcatagcatgctccatgaatcaaatctgcccaagccccaacatctagtttcatacagcacaccacatgtccttctgctaccccaagacattggcctaattcgcagaaatgaagagcatatggtgggagggagggaaagggcagactctagaagtttgaggtatgtatggggcaatccagggggagatatgcattagtagatataaaaggctagagatcagtgatgacctaaatcatagctaacatgtattaaacacttgctaggcactgtgctaagagcttagcctatgtgactttacttagcccttgcaacaattctttgatatgctctgctttattcttcattttacacacaaggaaaaagagcctaagtgagattaagcaacttgttcataactaataaatgatagcattagaacctgagccactgtctttctgaatccagagtctgtacccttaatccccacatacactgtcctatagaaaaaagttctaagctgaatctcctttttccctacctcccatcacagccagccttcttatggccattgtttctctactttgaattcagtttaatcagtctccaatgacagccgtcacttcccatcctcatcactccactgaacctgctatgagtgtaccagttaggatgtttaggaatgcaactagcagaatacccaaacagagagaagcctatataaaagggttgttttatttttttctcccagaataggaaagcccaaagctgaacaggcctatgagttgttcagtagctcaataatgttatcgaggacccaggctgtttctttcaccctaccctcttgtacacattggcttcatcctccagcctgttgcccagtgattgcaagacagctgcactccctcaactgtacccaaactgaggaaagaaggaaggaataggaaaataccactgcttttgcacttttttcattatatcaggcaagaaatcagtcatattttacctatgtctcactggaagtgtgttttagggctgtctgtagctgaaagggatgctaggaaagaaacgtgtctggcatttttatagtctcagttgtgggaggcaggttcaaggatccagcaacattaaagaagaggaagggctcttgctctttagaagcttttgtttcctcttgagtaagcaaagagaagtgtctgccacctccctgctaattcagaggactacatatggtagagatttctcgtgttcaccagcatctgtgtccttttcttcttcatgggttctacgttcctcagccctttggaatctagaacaacagaatgtgatcaagcggcaggatcacataggttgaaagagttaaaaatggaggtaccttcttcataacttctcctttatccaaatgcaaaagattccgtggaggattagggagtcatagagcttcaaactggaagtaagctggatcgctggatgacagcatggagcacagccccaaatctactctgctgtgtaacatggaaaaggaatatattatgttaagccactcagatgtgagggtagtttgttaccgcagttaacctgacttgactaaacagaacatacattttttggaaatgagaaatatcctatacgttcaacaagcaaaaaagcctatcccctactgcttcattaatttgcaatgtctttcaggtctctgtaggtatctcaaccctagaataatataaagtgtggaagaagaaaaataggttataacaatggcaattcaagtaaaattggttggggaagccaagaattgtagaaagaggatgcaagtcccattactgggtatattcccaaaggattataaatcatgttgctataaagacacatgcacacgtatgtttattgtggcactattcacaatagcaaagacttggaaccaaccca

SEQ ID NO: 318258 - DNA, 4001 bp, Homo sapiens
agccttccaccgtgtagtgtaatgcctcagagtggatatttttggaaatggcactgcattacataaccttccgtgtttaaaaaaaaaaaaaaaaccctacacggcggggggggtggggggagtcaggaatatacaccattctgtccttctccctaaaccaaataaacattaatgtacatactgctgcagtgatttaccctcaacctttatattatcagaagaccgctcttttgttaacacagttatgacaaaaattaagatgaatggagaaactaaaagttctcaaaaagggtatcattcgctcttagagttttcctataatgttattatagatacacataaatgcacatcagattattataatcaccaagaaaaaaacagtcatttatttttaaggccctccccgccaaagttcaactgctttataagaaaatgcagaaaaaagtgctgcaagatcgaatgcctaagaagaccctcggaagcagcagcattgaaagagtaatcaagtgtaagggcggagggacacaaattcattttataaaaagggaggaaaagcttgcatgcaccaaagtgcatttaatgcaaagaaacacaacagtttctaacaaggctttaggagcaagaagaacaaaattaaccacaccaacaagcacaaaaccccaccccttcccaaaagaattcatttctccctccgaacttgtgcattttagaaaaaacccaagttaaattccagcctgaatgcagcacaaccaaaatgccagaatttctccaaggtacacgcttcagctctttaaaatttagagggaagaagcatgaactctgcagggttgaagggtccagctaagagcaacggcaaggaatcgacacaaaagagaaaccagcgctcccagccggggataggaatggcatatacttacagacaaaagccccgctccctgttcactctctctcctctctacacctgaaacacaaatgtggttgaaaaagggcaacatgctagaaagacagattggggggggaggggggattgggggagggagggggaggggaaaggggtggaggaagaggagggaggagggggaagggaaacaaaacccaaaccggcttcacttccaagaagtgcagccttggaaaaaggaggaggagatcatctccctgcctcgcgctctctctccaagagtgtgtgtgtctctctctttctctaagagtctctctctctccctttccctctctctcccgctagggtgctagtgaacaatgagctaattctgatggagctggcgcggagccagcgccccagccttgctgccactgtgcagccgcctaggagccagactgcttactcggcaggaatcggcggctctgggccccgtcggcgagcggccaacaggcgcgcgcgccccgacaccccgcacccgcgccccgggcgccccgctcgccgcgccgtccccactgcaccgcgcggcgccccggggagacaaagcggacccgcagctctgcgccccggccccgccccgggagcacggcgcgcgcaaatccccggccttcctccccgcccccggccagcctctccgcctcgacgtgcggttgcttttcagacaaataaggaggtggaggaggcggtttgggggcgcgccaagcgtgaaggcggccagggtgctgcacagcccggcggcccgccagggccgtggggagaggcggcgcggcccgtactgtaataataaacctgcagcagagggcatctgaggaaaagaggacggcgacgggcggcagccgccttccttttatgtgcctgtcctgagcgaagcagaaaatggtgcctgcggcggcgcggagccgcgctcagacacacaaagagtccgcgaaggatgcatttgcacacggcctcgggtcggaccctgcccctcagctgggtacgcgcgccccactcccttccgcggggaagcccggggcggggagcgcccctgaaggccgggcccagaggtcctgtggctgcgcgtgcacacacacacgtgcacacagtcacacgcgcacaaccagccagagctgcggcctggcgtgatcggcccaagacatactcccctggtgcttccttctccttccctatacgctcccccactgcctgcccgtctgaaattgtactttttaaaatcgaggattgctttaaaaaataaagtgctttgccatttctgatttttgtaaactcgtcgttcttatttaaaatctatcttttcatagtaatgtaatagctcaaaattttgcaacaaactcaaataaactggttctgttgccaataaagcaggatatcattttatggtaactctcagatgtcacaggagaagattatttcctaattaaattgcctttccaagaaaaaaagatataaaggatcatagtgtcttctaaatttgccatccactttttcccctaatcactgaaagcaatgttttccattgtaacaaagaaaataaggcaaatttacaaaactcaatttttaaacgtgtttacagaatgtctgatgttttagatttaacatactgggtacagcaatagcaaaccttaaaaagcaatactttacactcacaattctaaaagaatgcactgagttctctgtatgcttgttgctgggactataggtcacctttaaaactacaaagccattgccacaacaaatgcctgttagactgcactgggtatgatgtttaaggagcccactgaaagcttctctgaattaatctaaaacatcacagtaattttcctgcaaaaataagatgatttggcagccatagctaggaacaaagggaagaaatataaaactcaacaaattcccttgaccctttcaggccagtttaccagccagggaagtactggaaggaaggtgtaaggcataggctgggtggtgggagaggggagacgcctgggggctgatctgcaagtctggaaccccaacacgctgctcaagggcacctcaacattgagatctttggcattcacctcagggtcaggctgggaaaggaccccaagggcgcaccatcaaatcagactaccaaaaatctatcccagtgatatttgttcaaaagctgcttctacaaggaaacatacatataaacacatacatacacagggactttaacgtttatgtaaaacttccctaagatgttctttcacagagaagtgttaatttttctttctttctttctttctttttttttttttaagaaatggagacttaccatgttaccatgttgcccggtctcaaactcctggattcaggcaatcctcactacggcctcccaaagtgctgggattacaggcacaagccacctctcttggccaatttttcttcattgtaatgatagacattcaggtgacagatttttaagtattaagaacactgggtcagattcatagcttatttatctgttgtgttccagaaaacggttatcatccaactatccaagaaacattcttgagtctcctctaggtgaagggggctgtgctaatcacttaaggatatatgagaaactcatgccatgtcacctcactcaaactgtagctatagctgtctcacagtcctcctagctgccatgttctgccctcttccatctatcctgtaggtgttacagtagacccactcttctaaaatttctttttaatcatggtatcccctgctccattacgggataaaggccatattttgccacagtgtgactatagtctgactttctaaccttatcatctctctctcaatcatagaatatcagtccttcacttcactctgattgatcatttagggcacataattatccctaagccattaccagtcaggaagcaaagtcacgcaaagattgacttcagctaagatgtctcaacccttcagttatattgacatttgggacaagataattttttgacggggtgaggatggagggtgaggctgtcctgtgcatagtataatgtttaacaacatctctggcctctacccatcagatgcctgtagg

SEQ ID NO: 318259 - DNA, 4001 bp, Homo sapiens
caaaaggtttagcaacttaaaagtagaaccaagtgataaaaatagattgttttctggctgctctttgttcccagacatactactggcagtatatttgcaatcaagacgacagaataggaatcagccttccaccgtgtagtgtaatgcctcagagtggatatttttggaaatggcactgcattacataaccttccgtgtttaaaaaaaaaaaaaaaaccctacacggcggggggggtggggggagtcaggaatatacaccattctgtccttctccctaaaccaaataaacattaatgtacatactgctgcagtgatttaccctcaacctttatattatcagaagaccgctcttttgttaacacagttatgacaaaaattaagatgaatggagaaactaaaagttctcaaaaagggtatcattcgctcttagagttttcctataatgttattatagatacacataaatgcacatcagattattataatcaccaagaaaaaaacagtcatttatttttaaggccctccccgccaaagttcaactgctttataagaaaatgcagaaaaaagtgctgcaagatcgaatgcctaagaagaccctcggaagcagcagcattgaaagagtaatcaagtgtaagggcggagggacacaaattcattttataaaaagggaggaaaagcttgcatgcaccaaagtgcatttaatgcaaagaaacacaacagtttctaacaaggctttaggagcaagaagaacaaaattaaccacaccaacaagcacaaaaccccaccccttcccaaaagaattcatttctccctccgaacttgtgcattttagaaaaaacccaagttaaattccagcctgaatgcagcacaaccaaaatgccagaatttctccaaggtacacgcttcagctctttaaaatttagagggaagaagcatgaactctgcagggttgaagggtccagctaagagcaacggcaaggaatcgacacaaaagagaaaccagcgctcccagccggggataggaatggcatatacttacagacaaaagccccgctccctgttcactctctctcctctctacacctgaaacacaaatgtggttgaaaaagggcaacatgctagaaagacagattggggggggaggggggattgggggagggagggggaggggaaaggggtggaggaagaggagggaggagggggaagggaaacaaaacccaaaccggcttcacttccaagaagtgcagccttggaaaaaggaggaggagatcatctccctgcctcgcgctctctctccaagagtgtgtgtgtctctctctttctctaagagtctctctctctccctttccctctctctcccgctagggtgctagtgaacaatgagctaattctgatggagctggcgcggagccagcgccccagccttgctgccactgtgcagccgcctaggagccagactgcttactcggcaggaatcggcggctctgggccccgtcggcgagcggccaacaggcgcgcgcgccccgacaccccgcacccgcgccccgggcgccccgctcgccgcgccgtccccactgcaccgcgcggcgccccggggagacaaagcggacccgcagctctgcgccccggccccgccccgggagcacggcgcgcgcaaatccccggccttcctccccgcccccggccagcctctccgcctcgacgtgcggttgcttttcagacaaataaggaggtggaggaggcggtttgggggcgcgccaagcgtgaaggcggccagggtgctgcacagcccggcggcccgccagggccgtggggagaggcggcgcggcccgtactgtaataataaacctgcagcagagggcatctgaggaaaagaggacggcgacgggcggcagccgccttccttttatgtgcctgtcctgagcgaagcagaaaatggtgcctgcggcggcgcggagccgcgctcagacacacaaagagtccgcgaaggatgcatttgcacacggcctcgggtcggaccctgcccctcagctgggtacgcgcgccccactcccttccgcggggaagcccggggcggggagcgcccctgaaggccgggcccagaggtcctgtggctgcgcgtgcacacacacacgtgcacacagtcacacgcgcacaaccagccagagctgcggcctggcgtgatcggcccaagacatactcccctggtgcttccttctccttccctatacgctcccccactgcctgcccgtctgaaattgtactttttaaaatcgaggattgctttaaaaaataaagtgctttgccatttctgatttttgtaaactcgtcgttcttatttaaaatctatcttttcatagtaatgtaatagctcaaaattttgcaacaaactcaaataaactggttctgttgccaataaagcaggatatcattttatggtaactctcagatgtcacaggagaagattatttcctaattaaattgcctttccaagaaaaaaagatataaaggatcatagtgtcttctaaatttgccatccactttttcccctaatcactgaaagcaatgttttccattgtaacaaagaaaataaggcaaatttacaaaactcaatttttaaacgtgtttacagaatgtctgatgttttagatttaacatactgggtacagcaatagcaaaccttaaaaagcaatactttacactcacaattctaaaagaatgcactgagttctctgtatgcttgttgctgggactataggtcacctttaaaactacaaagccattgccacaacaaatgcctgttagactgcactgggtatgatgtttaaggagcccactgaaagcttctctgaattaatctaaaacatcacagtaattttcctgcaaaaataagatgatttggcagccatagctaggaacaaagggaagaaatataaaactcaacaaattcccttgaccctttcaggccagtttaccagccagggaagtactggaaggaaggtgtaaggcataggctgggtggtgggagaggggagacgcctgggggctgatctgcaagtctggaaccccaacacgctgctcaagggcacctcaacattgagatctttggcattcacctcagggtcaggctgggaaaggaccccaagggcgcaccatcaaatcagactaccaaaaatctatcccagtgatatttgttcaaaagctgcttctacaaggaaacatacatataaacacatacatacacagggactttaacgtttatgtaaaacttccctaagatgttctttcacagagaagtgttaatttttctttctttctttctttctttttttttttttaagaaatggagacttaccatgttaccatgttgcccggtctcaaactcctggattcaggcaatcctcactacggcctcccaaagtgctgggattacaggcacaagccacctctcttggccaatttttcttcattgtaatgatagacattcaggtgacagatttttaagtattaagaacactgggtcagattcatagcttatttatctgttgtgttccagaaaacggttatcatccaactatccaagaaacattcttgagtctcctctaggtgaagggggctgtgctaatcacttaaggatatatgagaaactcatgccatgtcacctcactcaaactgtagctatagctgtctcacagtcctcctagctgccatgttctgccctcttccatctatcctgtaggtgttacagtagacccactcttctaaaatttctttttaatcatggtatcccctgctccattacgggataaaggccatattttgccacagtgtgactatagtctgactttctaaccttatcatctctctctcaatcatagaatatcagtccttcacttcactctgattgatcatttagggcacataattatccctaagccattaccagtcaggaagcaaagtcacgcaaagattgacttcagctaagatgtctcaacccttca

SEQ ID NO: 318260 - DNA, 4001 bp, Homo sapiens
ggttgatatttatatgtaacagactggtaagaagtactgagaatctcctctgatgaccaagtcttaccattttgagaatcttagtcttgggcttctattctccctctcttcagtccagggagaccaacctgcaaaatatgtttaaatacagtagacacatcgcctcaccacaggtcagcaaacgaaaaatgcctctttagaggttacagacgaataaccattttctgtggttaagataagttacatgcaaattattgttaactactgggatttctgaaagagctttccaagtggcctataggcttaactaagggacaaaggaatccctggtacttggctttgcagagtcctgggctattcttagtgtttggttcatctttaaattgcatgagttcaaaaggtttagcaacttaaaagtagaaccaagtgataaaaatagattgttttctggctgctctttgttcccagacatactactggcagtatatttgcaatcaagacgacagaataggaatcagccttccaccgtgtagtgtaatgcctcagagtggatatttttggaaatggcactgcattacataaccttccgtgtttaaaaaaaaaaaaaaaaccctacacggcggggggggtggggggagtcaggaatatacaccattctgtccttctccctaaaccaaataaacattaatgtacatactgctgcagtgatttaccctcaacctttatattatcagaagaccgctcttttgttaacacagttatgacaaaaattaagatgaatggagaaactaaaagttctcaaaaagggtatcattcgctcttagagttttcctataatgttattatagatacacataaatgcacatcagattattataatcaccaagaaaaaaacagtcatttatttttaaggccctccccgccaaagttcaactgctttataagaaaatgcagaaaaaagtgctgcaagatcgaatgcctaagaagaccctcggaagcagcagcattgaaagagtaatcaagtgtaagggcggagggacacaaattcattttataaaaagggaggaaaagcttgcatgcaccaaagtgcatttaatgcaaagaaacacaacagtttctaacaaggctttaggagcaagaagaacaaaattaaccacaccaacaagcacaaaaccccaccccttcccaaaagaattcatttctccctccgaacttgtgcattttagaaaaaacccaagttaaattccagcctgaatgcagcacaaccaaaatgccagaatttctccaaggtacacgcttcagctctttaaaatttagagggaagaagcatgaactctgcagggttgaagggtccagctaagagcaacggcaaggaatcgacacaaaagagaaaccagcgctcccagccggggataggaatggcatatacttacagacaaaagccccgctccctgttcactctctctcctctctacacctgaaacacaaatgtggttgaaaaagggcaacatgctagaaagacagattggggggggaggggggattgggggagggagggggaggggaaaggggtggaggaagaggagggaggagggggaagggaaacaaaacccaaaccggcttcacttccaagaagtgcagccttggaaaaaggaggaggagatcatctccctgcctcgcgctctctctccaagagtgtgtgtgtctctctctttctctaagagtctctctctctccctttccctctctctcccgctagggtgctagtgaacaatgagctaattctgatggagctggcgcggagccagcgccccagccttgctgccactgtgcagccgcctaggagccagactgcttactcggcaggaatcggcggctctgggccccgtcggcgagcggccaacaggcgcgcgcgccccgacaccccgcacccgcgccccgggcgccccgctcgccgcgccgtccccactgcaccgcgcggcgccccggggagacaaagcggacccgcagctctgcgccccggccccgccccgggagcacggcgcgcgcaaatccccggccttcctccccgcccccggccagcctctccgcctcgacgtgcggttgcttttcagacaaataaggaggtggaggaggcggtttgggggcgcgccaagcgtgaaggcggccagggtgctgcacagcccggcggcccgccagggccgtggggagaggcggcgcggcccgtactgtaataataaacctgcagcagagggcatctgaggaaaagaggacggcgacgggcggcagccgccttccttttatgtgcctgtcctgagcgaagcagaaaatggtgcctgcggcggcgcggagccgcgctcagacacacaaagagtccgcgaaggatgcatttgcacacggcctcgggtcggaccctgcccctcagctgggtacgcgcgccccactcccttccgcggggaagcccggggcggggagcgcccctgaaggccgggcccagaggtcctgtggctgcgcgtgcacacacacacgtgcacacagtcacacgcgcacaaccagccagagctgcggcctggcgtgatcggcccaagacatactcccctggtgcttccttctccttccctatacgctcccccactgcctgcccgtctgaaattgtactttttaaaatcgaggattgctttaaaaaataaagtgctttgccatttctgatttttgtaaactcgtcgttcttatttaaaatctatcttttcatagtaatgtaatagctcaaaattttgcaacaaactcaaataaactggttctgttgccaataaagcaggatatcattttatggtaactctcagatgtcacaggagaagattatttcctaattaaattgcctttccaagaaaaaaagatataaaggatcatagtgtcttctaaatttgccatccactttttcccctaatcactgaaagcaatgttttccattgtaacaaagaaaataaggcaaatttacaaaactcaatttttaaacgtgtttacagaatgtctgatgttttagatttaacatactgggtacagcaatagcaaaccttaaaaagcaatactttacactcacaattctaaaagaatgcactgagttctctgtatgcttgttgctgggactataggtcacctttaaaactacaaagccattgccacaacaaatgcctgttagactgcactgggtatgatgtttaaggagcccactgaaagcttctctgaattaatctaaaacatcacagtaattttcctgcaaaaataagatgatttggcagccatagctaggaacaaagggaagaaatataaaactcaacaaattcccttgaccctttcaggccagtttaccagccagggaagtactggaaggaaggtgtaaggcataggctgggtggtgggagaggggagacgcctgggggctgatctgcaagtctggaaccccaacacgctgctcaagggcacctcaacattgagatctttggcattcacctcagggtcaggctgggaaaggaccccaagggcgcaccatcaaatcagactaccaaaaatctatcccagtgatatttgttcaaaagctgcttctacaaggaaacatacatataaacacatacatacacagggactttaacgtttatgtaaaacttccctaagatgttctttcacagagaagtgttaatttttctttctttctttctttctttttttttttttaagaaatggagacttaccatgttaccatgttgcccggtctcaaactcctggattcaggcaatcctcactacggcctcccaaagtgctgggattacaggcacaagccacctctcttggccaatttttcttcattgtaatgatagacattcaggtgacagatttttaagtattaagaacactgggtcagattcatagcttatttatctgttgtgttccagaaaacggttatcatccaactatccaagaaacattcttgagtctcctctagg

SEQ ID NO: 318261 - DNA, 4001 bp, Homo sapiens
aaaataattgcaagtcaaagaactaatttgccacatccaattcacataaattgctgtactgcaacgctcccaggaactggagatagaaccttttaaaggtcagatggggtgtagaacaatgaagggttgaggcggatgaagatgggtggttgatatttatatgtaacagactggtaagaagtactgagaatctcctctgatgaccaagtcttaccattttgagaatcttagtcttgggcttctattctccctctcttcagtccagggagaccaacctgcaaaatatgtttaaatacagtagacacatcgcctcaccacaggtcagcaaacgaaaaatgcctctttagaggttacagacgaataaccattttctgtggttaagataagttacatgcaaattattgttaactactgggatttctgaaagagctttccaagtggcctataggcttaactaagggacaaaggaatccctggtacttggctttgcagagtcctgggctattcttagtgtttggttcatctttaaattgcatgagttcaaaaggtttagcaacttaaaagtagaaccaagtgataaaaatagattgttttctggctgctctttgttcccagacatactactggcagtatatttgcaatcaagacgacagaataggaatcagccttccaccgtgtagtgtaatgcctcagagtggatatttttggaaatggcactgcattacataaccttccgtgtttaaaaaaaaaaaaaaaaccctacacggcggggggggtggggggagtcaggaatatacaccattctgtccttctccctaaaccaaataaacattaatgtacatactgctgcagtgatttaccctcaacctttatattatcagaagaccgctcttttgttaacacagttatgacaaaaattaagatgaatggagaaactaaaagttctcaaaaagggtatcattcgctcttagagttttcctataatgttattatagatacacataaatgcacatcagattattataatcaccaagaaaaaaacagtcatttatttttaaggccctccccgccaaagttcaactgctttataagaaaatgcagaaaaaagtgctgcaagatcgaatgcctaagaagaccctcggaagcagcagcattgaaagagtaatcaagtgtaagggcggagggacacaaattcattttataaaaagggaggaaaagcttgcatgcaccaaagtgcatttaatgcaaagaaacacaacagtttctaacaaggctttaggagcaagaagaacaaaattaaccacaccaacaagcacaaaaccccaccccttcccaaaagaattcatttctccctccgaacttgtgcattttagaaaaaacccaagttaaattccagcctgaatgcagcacaaccaaaatgccagaatttctccaaggtacacgcttcagctctttaaaatttagagggaagaagcatgaactctgcagggttgaagggtccagctaagagcaacggcaaggaatcgacacaaaagagaaaccagcgctcccagccggggataggaatggcatatacttacagacaaaagccccgctccctgttcactctctctcctctctacacctgaaacacaaatgtggttgaaaaagggcaacatgctagaaagacagattggggggggaggggggattgggggagggagggggaggggaaaggggtggaggaagaggagggaggagggggaagggaaacaaaacccaaaccggcttcacttccaagaagtgcagccttggaaaaaggaggaggagatcatctccctgcctcgcgctctctctccaagagtgtgtgtgtctctctctttctctaagagtctctctctctccctttccctctctctcccgctagggtgctagtgaacaatgagctaattctgatggagctggcgcggagccagcgccccagccttgctgccactgtgcagccgcctaggagccagactgcttactcggcaggaatcggcggctctgggccccgtcggcgagcggccaacaggcgcgcgcgccccgacaccccgcacccgcgccccgggcgccccgctcgccgcgccgtccccactgcaccgcgcggcgccccggggagacaaagcggacccgcagctctgcgccccggccccgccccgggagcacggcgcgcgcaaatccccggccttcctccccgcccccggccagcctctccgcctcgacgtgcggttgcttttcagacaaataaggaggtggaggaggcggtttgggggcgcgccaagcgtgaaggcggccagggtgctgcacagcccggcggcccgccagggccgtggggagaggcggcgcggcccgtactgtaataataaacctgcagcagagggcatctgaggaaaagaggacggcgacgggcggcagccgccttccttttatgtgcctgtcctgagcgaagcagaaaatggtgcctgcggcggcgcggagccgcgctcagacacacaaagagtccgcgaaggatgcatttgcacacggcctcgggtcggaccctgcccctcagctgggtacgcgcgccccactcccttccgcggggaagcccggggcggggagcgcccctgaaggccgggcccagaggtcctgtggctgcgcgtgcacacacacacgtgcacacagtcacacgcgcacaaccagccagagctgcggcctggcgtgatcggcccaagacatactcccctggtgcttccttctccttccctatacgctcccccactgcctgcccgtctgaaattgtactttttaaaatcgaggattgctttaaaaaataaagtgctttgccatttctgatttttgtaaactcgtcgttcttatttaaaatctatcttttcatagtaatgtaatagctcaaaattttgcaacaaactcaaataaactggttctgttgccaataaagcaggatatcattttatggtaactctcagatgtcacaggagaagattatttcctaattaaattgcctttccaagaaaaaaagatataaaggatcatagtgtcttctaaatttgccatccactttttcccctaatcactgaaagcaatgttttccattgtaacaaagaaaataaggcaaatttacaaaactcaatttttaaacgtgtttacagaatgtctgatgttttagatttaacatactgggtacagcaatagcaaaccttaaaaagcaatactttacactcacaattctaaaagaatgcactgagttctctgtatgcttgttgctgggactataggtcacctttaaaactacaaagccattgccacaacaaatgcctgttagactgcactgggtatgatgtttaaggagcccactgaaagcttctctgaattaatctaaaacatcacagtaattttcctgcaaaaataagatgatttggcagccatagctaggaacaaagggaagaaatataaaactcaacaaattcccttgaccctttcaggccagtttaccagccagggaagtactggaaggaaggtgtaaggcataggctgggtggtgggagaggggagacgcctgggggctgatctgcaagtctggaaccccaacacgctgctcaagggcacctcaacattgagatctttggcattcacctcagggtcaggctgggaaaggaccccaagggcgcaccatcaaatcagactaccaaaaatctatcccagtgatatttgttcaaaagctgcttctacaaggaaacatacatataaacacatacatacacagggactttaacgtttatgtaaaacttccctaagatgttctttcacagagaagtgttaatttttctttctttctttctttctttttttttttttaagaaatggagacttaccatgttaccatgttgcccggtctcaaactcctggattcaggcaatcctcactacggcctcccaaagtgctgggattacaggcacaagccacctctcttggccaat

SEQ ID NO: 318262 - DNA, 4001 bp, Homo sapiens
agacccaaggctttgtttgagccctactgctgtcaccacctccatgcgtgtcacaacacatcactcttcttaaagaaccgaatagtttctgttgttcaaattaaataaatcctcacttctgaaagaggaattttagttttctattcaaaataattgcaagtcaaagaactaatttgccacatccaattcacataaattgctgtactgcaacgctcccaggaactggagatagaaccttttaaaggtcagatggggtgtagaacaatgaagggttgaggcggatgaagatgggtggttgatatttatatgtaacagactggtaagaagtactgagaatctcctctgatgaccaagtcttaccattttgagaatcttagtcttgggcttctattctccctctcttcagtccagggagaccaacctgcaaaatatgtttaaatacagtagacacatcgcctcaccacaggtcagcaaacgaaaaatgcctctttagaggttacagacgaataaccattttctgtggttaagataagttacatgcaaattattgttaactactgggatttctgaaagagctttccaagtggcctataggcttaactaagggacaaaggaatccctggtacttggctttgcagagtcctgggctattcttagtgtttggttcatctttaaattgcatgagttcaaaaggtttagcaacttaaaagtagaaccaagtgataaaaatagattgttttctggctgctctttgttcccagacatactactggcagtatatttgcaatcaagacgacagaataggaatcagccttccaccgtgtagtgtaatgcctcagagtggatatttttggaaatggcactgcattacataaccttccgtgtttaaaaaaaaaaaaaaaaccctacacggcggggggggtggggggagtcaggaatatacaccattctgtccttctccctaaaccaaataaacattaatgtacatactgctgcagtgatttaccctcaacctttatattatcagaagaccgctcttttgttaacacagttatgacaaaaattaagatgaatggagaaactaaaagttctcaaaaagggtatcattcgctcttagagttttcctataatgttattatagatacacataaatgcacatcagattattataatcaccaagaaaaaaacagtcatttatttttaaggccctccccgccaaagttcaactgctttataagaaaatgcagaaaaaagtgctgcaagatcgaatgcctaagaagaccctcggaagcagcagcattgaaagagtaatcaagtgtaagggcggagggacacaaattcattttataaaaagggaggaaaagcttgcatgcaccaaagtgcatttaatgcaaagaaacacaacagtttctaacaaggctttaggagcaagaagaacaaaattaaccacaccaacaagcacaaaaccccaccccttcccaaaagaattcatttctccctccgaacttgtgcattttagaaaaaacccaagttaaattccagcctgaatgcagcacaaccaaaatgccagaatttctccaaggtacacgcttcagctctttaaaatttagagggaagaagcatgaactctgcagggttgaagggtccagctaagagcaacggcaaggaatcgacacaaaagagaaaccagcgctcccagccggggataggaatggcatatacttacagacaaaagccccgctccctgttcactctctctcctctctacacctgaaacacaaatgtggttgaaaaagggcaacatgctagaaagacagattggggggggaggggggattgggggagggagggggaggggaaaggggtggaggaagaggagggaggagggggaagggaaacaaaacccaaaccggcttcacttccaagaagtgcagccttggaaaaaggaggaggagatcatctccctgcctcgcgctctctctccaagagtgtgtgtgtctctctctttctctaagagtctctctctctccctttccctctctctcccgctagggtgctagtgaacaatgagctaattctgatggagctggcgcggagccagcgccccagccttgctgccactgtgcagccgcctaggagccagactgcttactcggcaggaatcggcggctctgggccccgtcggcgagcggccaacaggcgcgcgcgccccgacaccccgcacccgcgccccgggcgccccgctcgccgcgccgtccccactgcaccgcgcggcgccccggggagacaaagcggacccgcagctctgcgccccggccccgccccgggagcacggcgcgcgcaaatccccggccttcctccccgcccccggccagcctctccgcctcgacgtgcggttgcttttcagacaaataaggaggtggaggaggcggtttgggggcgcgccaagcgtgaaggcggccagggtgctgcacagcccggcggcccgccagggccgtggggagaggcggcgcggcccgtactgtaataataaacctgcagcagagggcatctgaggaaaagaggacggcgacgggcggcagccgccttccttttatgtgcctgtcctgagcgaagcagaaaatggtgcctgcggcggcgcggagccgcgctcagacacacaaagagtccgcgaaggatgcatttgcacacggcctcgggtcggaccctgcccctcagctgggtacgcgcgccccactcccttccgcggggaagcccggggcggggagcgcccctgaaggccgggcccagaggtcctgtggctgcgcgtgcacacacacacgtgcacacagtcacacgcgcacaaccagccagagctgcggcctggcgtgatcggcccaagacatactcccctggtgcttccttctccttccctatacgctcccccactgcctgcccgtctgaaattgtactttttaaaatcgaggattgctttaaaaaataaagtgctttgccatttctgatttttgtaaactcgtcgttcttatttaaaatctatcttttcatagtaatgtaatagctcaaaattttgcaacaaactcaaataaactggttctgttgccaataaagcaggatatcattttatggtaactctcagatgtcacaggagaagattatttcctaattaaattgcctttccaagaaaaaaagatataaaggatcatagtgtcttctaaatttgccatccactttttcccctaatcactgaaagcaatgttttccattgtaacaaagaaaataaggcaaatttacaaaactcaatttttaaacgtgtttacagaatgtctgatgttttagatttaacatactgggtacagcaatagcaaaccttaaaaagcaatactttacactcacaattctaaaagaatgcactgagttctctgtatgcttgttgctgggactataggtcacctttaaaactacaaagccattgccacaacaaatgcctgttagactgcactgggtatgatgtttaaggagcccactgaaagcttctctgaattaatctaaaacatcacagtaattttcctgcaaaaataagatgatttggcagccatagctaggaacaaagggaagaaatataaaactcaacaaattcccttgaccctttcaggccagtttaccagccagggaagtactggaaggaaggtgtaaggcataggctgggtggtgggagaggggagacgcctgggggctgatctgcaagtctggaaccccaacacgctgctcaagggcacctcaacattgagatctttggcattcacctcagggtcaggctgggaaaggaccccaagggcgcaccatcaaatcagactaccaaaaatctatcccagtgatatttgttcaaaagctgcttctacaaggaaacatacatataaacacatacatacacagggactttaacgtttatgtaaaacttccctaagatgttctttcacagagaagtgttaatttttctttct

SEQ ID NO: 318263 - DNA, 4001 bp, Homo sapiens
taagacccaaggctttgtttgagccctactgctgtcaccacctccatgcgtgtcacaacacatcactcttcttaaagaaccgaatagtttctgttgttcaaattaaataaatcctcacttctgaaagaggaattttagttttctattcaaaataattgcaagtcaaagaactaatttgccacatccaattcacataaattgctgtactgcaacgctcccaggaactggagatagaaccttttaaaggtcagatggggtgtagaacaatgaagggttgaggcggatgaagatgggtggttgatatttatatgtaacagactggtaagaagtactgagaatctcctctgatgaccaagtcttaccattttgagaatcttagtcttgggcttctattctccctctcttcagtccagggagaccaacctgcaaaatatgtttaaatacagtagacacatcgcctcaccacaggtcagcaaacgaaaaatgcctctttagaggttacagacgaataaccattttctgtggttaagataagttacatgcaaattattgttaactactgggatttctgaaagagctttccaagtggcctataggcttaactaagggacaaaggaatccctggtacttggctttgcagagtcctgggctattcttagtgtttggttcatctttaaattgcatgagttcaaaaggtttagcaacttaaaagtagaaccaagtgataaaaatagattgttttctggctgctctttgttcccagacatactactggcagtatatttgcaatcaagacgacagaataggaatcagccttccaccgtgtagtgtaatgcctcagagtggatatttttggaaatggcactgcattacataaccttccgtgtttaaaaaaaaaaaaaaaaccctacacggcggggggggtggggggagtcaggaatatacaccattctgtccttctccctaaaccaaataaacattaatgtacatactgctgcagtgatttaccctcaacctttatattatcagaagaccgctcttttgttaacacagttatgacaaaaattaagatgaatggagaaactaaaagttctcaaaaagggtatcattcgctcttagagttttcctataatgttattatagatacacataaatgcacatcagattattataatcaccaagaaaaaaacagtcatttatttttaaggccctccccgccaaagttcaactgctttataagaaaatgcagaaaaaagtgctgcaagatcgaatgcctaagaagaccctcggaagcagcagcattgaaagagtaatcaagtgtaagggcggagggacacaaattcattttataaaaagggaggaaaagcttgcatgcaccaaagtgcatttaatgcaaagaaacacaacagtttctaacaaggctttaggagcaagaagaacaaaattaaccacaccaacaagcacaaaaccccaccccttcccaaaagaattcatttctccctccgaacttgtgcattttagaaaaaacccaagttaaattccagcctgaatgcagcacaaccaaaatgccagaatttctccaaggtacacgcttcagctctttaaaatttagagggaagaagcatgaactctgcagggttgaagggtccagctaagagcaacggcaaggaatcgacacaaaagagaaaccagcgctcccagccggggataggaatggcatatacttacagacaaaagccccgctccctgttcactctctctcctctctacacctgaaacacaaatgtggttgaaaaagggcaacatgctagaaagacagattggggggggaggggggattgggggagggagggggaggggaaaggggtggaggaagaggagggaggagggggaagggaaacaaaacccaaaccggcttcacttccaagaagtgcagccttggaaaaaggaggaggagatcatctccctgcctcgcgctctctctccaagagtgtgtgtgtctctctctttctctaagagtctctctctctccctttccctctctctcccgctagggtgctagtgaacaatgagctaattctgatggagctggcgcggagccagcgccccagccttgctgccactgtgcagccgcctaggagccagactgcttactcggcaggaatcggcggctctgggccccgtcggcgagcggccaacaggcgcgcgcgccccgacaccccgcacccgcgccccgggcgccccgctcgccgcgccgtccccactgcaccgcgcggcgccccggggagacaaagcggacccgcagctctgcgccccggccccgccccgggagcacggcgcgcgcaaatccccggccttcctccccgcccccggccagcctctccgcctcgacgtgcggttgcttttcagacaaataaggaggtggaggaggcggtttgggggcgcgccaagcgtgaaggcggccagggtgctgcacagcccggcggcccgccagggccgtggggagaggcggcgcggcccgtactgtaataataaacctgcagcagagggcatctgaggaaaagaggacggcgacgggcggcagccgccttccttttatgtgcctgtcctgagcgaagcagaaaatggtgcctgcggcggcgcggagccgcgctcagacacacaaagagtccgcgaaggatgcatttgcacacggcctcgggtcggaccctgcccctcagctgggtacgcgcgccccactcccttccgcggggaagcccggggcggggagcgcccctgaaggccgggcccagaggtcctgtggctgcgcgtgcacacacacacgtgcacacagtcacacgcgcacaaccagccagagctgcggcctggcgtgatcggcccaagacatactcccctggtgcttccttctccttccctatacgctcccccactgcctgcccgtctgaaattgtactttttaaaatcgaggattgctttaaaaaataaagtgctttgccatttctgatttttgtaaactcgtcgttcttatttaaaatctatcttttcatagtaatgtaatagctcaaaattttgcaacaaactcaaataaactggttctgttgccaataaagcaggatatcattttatggtaactctcagatgtcacaggagaagattatttcctaattaaattgcctttccaagaaaaaaagatataaaggatcatagtgtcttctaaatttgccatccactttttcccctaatcactgaaagcaatgttttccattgtaacaaagaaaataaggcaaatttacaaaactcaatttttaaacgtgtttacagaatgtctgatgttttagatttaacatactgggtacagcaatagcaaaccttaaaaagcaatactttacactcacaattctaaaagaatgcactgagttctctgtatgcttgttgctgggactataggtcacctttaaaactacaaagccattgccacaacaaatgcctgttagactgcactgggtatgatgtttaaggagcccactgaaagcttctctgaattaatctaaaacatcacagtaattttcctgcaaaaataagatgatttggcagccatagctaggaacaaagggaagaaatataaaactcaacaaattcccttgaccctttcaggccagtttaccagccagggaagtactggaaggaaggtgtaaggcataggctgggtggtgggagaggggagacgcctgggggctgatctgcaagtctggaaccccaacacgctgctcaagggcacctcaacattgagatctttggcattcacctcagggtcaggctgggaaaggaccccaagggcgcaccatcaaatcagactaccaaaaatctatcccagtgatatttgttcaaaagctgcttctacaaggaaacatacatataaacacatacatacacagggactttaacgtttatgtaaaacttccctaagatgttctttcacagagaagtgttaatttttcttt

SEQ ID NO: 318264 - DNA, 4001 bp, Homo sapiens
caggcatgcttaccttctacaaagctcattctacttactactacagaaacatggtatcttactctttgagcttgatctatagagttagttttggtagggtccatagtcatatttatgtttaaactggtcacctgacatattgcaacatacatgaaacctctgtgatctatttatggtcacagaaagtaggtaacgttctgagataaagagcttggaggcaaggtgatgtggccagtcacagtaaaaaataagtaaacacaaatactttacagcagttgattttattaccatcctattattctatgacaacagctaattaagaatttaatatgaagttgggaaccatttgcacaaaatccattgattagcttaattttatgttcacttcttttgtctttctacctcaagttccttaatttgatcattttcaaacaaggtccatgtggtgctttgacacccacttgttgaaatgacaagtgacgcatacataaaaaataaaacacttgttaataaaaatcaaactgaactcatttaactgcctgattcatttttctccttggaagcttatacttgggttgttctcaaagaaaacatcaaagatatcagattaaattttgattcattaaattccaccctcgtttcaaagaaaaaaactaaaactaaatttggaaatcacacattctaagtgacaaagaggtgttttaaagagtataaacatctgcagtaggacacgctgtacttcactaaaaagttttatgatatttctattattttttttagttcatcttatttccaaagaggaaatttttcatagatgattaatatacttattcagctgcttttaatgtgtattccttctgtttccttaatcagtaatcaaacattaaactgcattctctgtggatcataagctttgtcagaaatagttatacttttatttagaggttaacatgcttgacttctaaaattgagtacatgtctctcacaaatgaaattataaatcgagaaaaataacagtaattatatttaaatagatggggcacattaatataaaaattcatgcttttcatctatattgctttaaaggatagcatatacagtagctgtttgatcagctggacagactcctcagttttgggtaacttcggcctagctctaagacccaaggctttgtttgagccctactgctgtcaccacctccatgcgtgtcacaacacatcactcttcttaaagaaccgaatagtttctgttgttcaaattaaataaatcctcacttctgaaagaggaattttagttttctattcaaaataattgcaagtcaaagaactaatttgccacatccaattcacataaattgctgtactgcaacgctcccaggaactggagatagaaccttttaaaggtcagatggggtgtagaacaatgaagggttgaggcggatgaagatgggtggttgatatttatatgtaacagactggtaagaagtactgagaatctcctctgatgaccaagtcttaccattttgagaatcttagtcttgggcttctattctccctctcttcagtccagggagaccaacctgcaaaatatgtttaaatacagtagacacatcgcctcaccacaggtcagcaaacgaaaaatgcctctttagaggttacagacgaataaccattttctgtggttaagataagttacatgcaaattattgttaactactgggatttctgaaagagctttccaagtggcctataggcttaactaagggacaaaggaatccctggtacttggctttgcagagtcctgggctattcttagtgtttggttcatctttaaattgcatgagttcaaaaggtttagcaacttaaaagtagaaccaagtgataaaaatagattgttttctggctgctctttgttcccagacatactactggcagtatatttgcaatcaagacgacagaataggaatcagccttccaccgtgtagtgtaatgcctcagagtggatatttttggaaatggcactgcattacataaccttccgtgtttaaaaaaaaaaaaaaaaccctacacggcggggggggtggggggagtcaggaatatacaccattctgtccttctccctaaaccaaataaacattaatgtacatactgctgcagtgatttaccctcaacctttatattatcagaagaccgctcttttgttaacacagttatgacaaaaattaagatgaatggagaaactaaaagttctcaaaaagggtatcattcgctcttagagttttcctataatgttattatagatacacataaatgcacatcagattattataatcaccaagaaaaaaacagtcatttatttttaaggccctccccgccaaagttcaactgctttataagaaaatgcagaaaaaagtgctgcaagatcgaatgcctaagaagaccctcggaagcagcagcattgaaagagtaatcaagtgtaagggcggagggacacaaattcattttataaaaagggaggaaaagcttgcatgcaccaaagtgcatttaatgcaaagaaacacaacagtttctaacaaggctttaggagcaagaagaacaaaattaaccacaccaacaagcacaaaaccccaccccttcccaaaagaattcatttctccctccgaacttgtgcattttagaaaaaacccaagttaaattccagcctgaatgcagcacaaccaaaatgccagaatttctccaaggtacacgcttcagctctttaaaatttagagggaagaagcatgaactctgcagggttgaagggtccagctaagagcaacggcaaggaatcgacacaaaagagaaaccagcgctcccagccggggataggaatggcatatacttacagacaaaagccccgctccctgttcactctctctcctctctacacctgaaacacaaatgtggttgaaaaagggcaacatgctagaaagacagattggggggggaggggggattgggggagggagggggaggggaaaggggtggaggaagaggagggaggagggggaagggaaacaaaacccaaaccggcttcacttccaagaagtgcagccttggaaaaaggaggaggagatcatctccctgcctcgcgctctctctccaagagtgtgtgtgtctctctctttctctaagagtctctctctctccctttccctctctctcccgctagggtgctagtgaacaatgagctaattctgatggagctggcgcggagccagcgccccagccttgctgccactgtgcagccgcctaggagccagactgcttactcggcaggaatcggcggctctgggccccgtcggcgagcggccaacaggcgcgcgcgccccgacaccccgcacccgcgccccgggcgccccgctcgccgcgccgtccccactgcaccgcgcggcgccccggggagacaaagcggacccgcagctctgcgccccggccccgccccgggagcacggcgcgcgcaaatccccggccttcctccccgcccccggccagcctctccgcctcgacgtgcggttgcttttcagacaaataaggaggtggaggaggcggtttgggggcgcgccaagcgtgaaggcggccagggtgctgcacagcccggcggcccgccagggccgtggggagaggcggcgcggcccgtactgtaataataaacctgcagcagagggcatctgaggaaaagaggacggcgacgggcggcagccgccttccttttatgtgcctgtcctgagcgaagcagaaaatggtgcctgcggcggcgcggagccgcgctcagacacacaaagagtccgcgaaggatgcatttgcacacggcctcgggtcggaccctgcccctcagctgggtacgcgcgccccactcccttccgcggggaagcccggggcggggagcgcccctgaaggccgggcccagaggtcctgtggctgcgcgtgcacacacacacgtgcacacagtcacacgcgcac

SEQ ID NO: 318265 - DNA, 4001 bp, Homo sapiens
taaatcgagaaaaataacagtaattatatttaaatagatggggcacattaatataaaaattcatgcttttcatctatattgctttaaaggatagcatatacagtagctgtttgatcagctggacagactcctcagttttgggtaacttcggcctagctctaagacccaaggctttgtttgagccctactgctgtcaccacctccatgcgtgtcacaacacatcactcttcttaaagaaccgaatagtttctgttgttcaaattaaataaatcctcacttctgaaagaggaattttagttttctattcaaaataattgcaagtcaaagaactaatttgccacatccaattcacataaattgctgtactgcaacgctcccaggaactggagatagaaccttttaaaggtcagatggggtgtagaacaatgaagggttgaggcggatgaagatgggtggttgatatttatatgtaacagactggtaagaagtactgagaatctcctctgatgaccaagtcttaccattttgagaatcttagtcttgggcttctattctccctctcttcagtccagggagaccaacctgcaaaatatgtttaaatacagtagacacatcgcctcaccacaggtcagcaaacgaaaaatgcctctttagaggttacagacgaataaccattttctgtggttaagataagttacatgcaaattattgttaactactgggatttctgaaagagctttccaagtggcctataggcttaactaagggacaaaggaatccctggtacttggctttgcagagtcctgggctattcttagtgtttggttcatctttaaattgcatgagttcaaaaggtttagcaacttaaaagtagaaccaagtgataaaaatagattgttttctggctgctctttgttcccagacatactactggcagtatatttgcaatcaagacgacagaataggaatcagccttccaccgtgtagtgtaatgcctcagagtggatatttttggaaatggcactgcattacataaccttccgtgtttaaaaaaaaaaaaaaaaccctacacggcggggggggtggggggagtcaggaatatacaccattctgtccttctccctaaaccaaataaacattaatgtacatactgctgcagtgatttaccctcaacctttatattatcagaagaccgctcttttgttaacacagttatgacaaaaattaagatgaatggagaaactaaaagttctcaaaaagggtatcattcgctcttagagttttcctataatgttattatagatacacataaatgcacatcagattattataatcaccaagaaaaaaacagtcatttatttttaaggccctccccgccaaagttcaactgctttataagaaaatgcagaaaaaagtgctgcaagatcgaatgcctaagaagaccctcggaagcagcagcattgaaagagtaatcaagtgtaagggcggagggacacaaattcattttataaaaagggaggaaaagcttgcatgcaccaaagtgcatttaatgcaaagaaacacaacagtttctaacaaggctttaggagcaagaagaacaaaattaaccacaccaacaagcacaaaaccccaccccttcccaaaagaattcatttctccctccgaacttgtgcattttagaaaaaacccaagttaaattccagcctgaatgcagcacaaccaaaatgccagaatttctccaaggtacacgcttcagctctttaaaatttagagggaagaagcatgaactctgcagggttgaagggtccagctaagagcaacggcaaggaatcgacacaaaagagaaaccagcgctcccagccggggataggaatggcatatacttacagacaaaagccccgctccctgttcactctctctcctctctacacctgaaacacaaatgtggttgaaaaagggcaacatgctagaaagacagattggggggggaggggggattgggggagggagggggaggggaaaggggtggaggaagaggagggaggagggggaagggaaacaaaacccaaaccggcttcacttccaagaagtgcagccttggaaaaaggaggaggagatcatctccctgcctcgcgctctctctccaagagtgtgtgtgtctctctctttctctaagagtctctctctctccctttccctctctctcccgctagggtgctagtgaacaatgagctaattctgatggagctggcgcggagccagcgccccagccttgctgccactgtgcagccgcctaggagccagactgcttactcggcaggaatcggcggctctgggccccgtcggcgagcggccaacaggcgcgcgcgccccgacaccccgcacccgcgccccgggcgccccgctcgccgcgccgtccccactgcaccgcgcggcgccccggggagacaaagcggacccgcagctctgcgccccggccccgccccgggagcacggcgcgcgcaaatccccggccttcctccccgcccccggccagcctctccgcctcgacgtgcggttgcttttcagacaaataaggaggtggaggaggcggtttgggggcgcgccaagcgtgaaggcggccagggtgctgcacagcccggcggcccgccagggccgtggggagaggcggcgcggcccgtactgtaataataaacctgcagcagagggcatctgaggaaaagaggacggcgacgggcggcagccgccttccttttatgtgcctgtcctgagcgaagcagaaaatggtgcctgcggcggcgcggagccgcgctcagacacacaaagagtccgcgaaggatgcatttgcacacggcctcgggtcggaccctgcccctcagctgggtacgcgcgccccactcccttccgcggggaagcccggggcggggagcgcccctgaaggccgggcccagaggtcctgtggctgcgcgtgcacacacacacgtgcacacagtcacacgcgcacaaccagccagagctgcggcctggcgtgatcggcccaagacatactcccctggtgcttccttctccttccctatacgctcccccactgcctgcccgtctgaaattgtactttttaaaatcgaggattgctttaaaaaataaagtgctttgccatttctgatttttgtaaactcgtcgttcttatttaaaatctatcttttcatagtaatgtaatagctcaaaattttgcaacaaactcaaataaactggttctgttgccaataaagcaggatatcattttatggtaactctcagatgtcacaggagaagattatttcctaattaaattgcctttccaagaaaaaaagatataaaggatcatagtgtcttctaaatttgccatccactttttcccctaatcactgaaagcaatgttttccattgtaacaaagaaaataaggcaaatttacaaaactcaatttttaaacgtgtttacagaatgtctgatgttttagatttaacatactgggtacagcaatagcaaaccttaaaaagcaatactttacactcacaattctaaaagaatgcactgagttctctgtatgcttgttgctgggactataggtcacctttaaaactacaaagccattgccacaacaaatgcctgttagactgcactgggtatgatgtttaaggagcccactgaaagcttctctgaattaatctaaaacatcacagtaattttcctgcaaaaataagatgatttggcagccatagctaggaacaaagggaagaaatataaaactcaacaaattcccttgaccctttcaggccagtttaccagccagggaagtactggaaggaaggtgtaaggcataggctgggtggtgggagaggggagacgcctgggggctgatctgcaagtctggaaccccaacacgctgctcaagggcacctcaacattgagatctttggcattcacctcagggtcaggctgggaaaggaccccaagggcgcac

SEQ ID NO: 318266 - DNA, 4001 bp, Homo sapiens
ctcaatttgaataagcacgagacaggcttacaccaaatactccagtgtgggacaatttgatttgaaatatcttactaagaagtaagtactggattcagggacaagaagaaaaagctcttagactgacatttctttgacttttgacatgggagacttccattcccagctgcagagatctacagatttcagtgttttgtttctaatcacctgcattcctgtgcagcatccaacatcatgaagatgagagatgcagtcaaatacatccggcgagtaagacgttagagctgaacttaaagcattcagcagaagttactctctttcatcatcatcacaatcaacagaccttgtaattcccccagaaacagctaaaaaaaaaaaaaaaaaaaggtgtctgcttgctagtcttaagagaaggatgtgctacctgcttagcaaagacaggcaatcacgatgaagaaaaaaactggagccacatggaggacggaaaacagtagcagaaaaagtccaactctgcctgcgccagcggtgtggatgagcagagcaacgagcccaggagaggaaggagggggcgggggcgaccattccctaggagaacttgtaagcggaggccttcacagcctgggagtctgcccagctgctcccgcagaccctgccagcctgggcacggcaggcccgcggcagcagggcaggcaaggcctccgagggtcactcctgactcactgagcctcaggccagcaccgccaggacctctccgtttttccttccgctactgggctatgatggcagctttccagccccacatgccatacatcagccgcagatccccgctggcacaggccagcgcctccctccgccccccacccctggcacactttgagcctgatccttcttctctccaaccccaaccccctcacccacccgtgccaggcgccctgcccaggggcggccccacccccccagcgcccggacgctgccaggcccgggcacctgcagcacctccccgccccacccccattctccaccacctcgcccctcccccctttctccagcaaagggagggggcgactcaccgcagtcagtgcacaggatcttgcccacctctttcttgagatttttgccgttggtatcgaggggggcaaaggccgtcttaaagactaagggctgttccgtgggctccaggaaaaagatgtagcgctggttcctttcgagcggcacacaggagcccacgctgatcacctgctcgcgctgcagccccccgctccggagcggccacttgtccagcacctttaccaacgccacccgacccgaggcgggcggctctcgggtgctgttggagctggagccgccggctgggaccagcccctgtaccttgccctccaccaccacgggtgccttgtacgcctggtcctgcactgacttgaggctgggcgagtagcaggcgagcgacacaccgaagagcagcatggagaagccgggggccgggtcgcgcctcatgccgccggcggctgcggctcgcgaacgggcggcggctctccgggctgcggggctgcggggctgcggctgttgctgcggccgcggctctgggggcgcagcgggacgagagatgctgctgttgttgctgctgctcctgctgctgctgccgctctcgctgctgctgctgctgctgctgctgctcctctcgctgctgctgctgctgctgtcgctgtagctgctgcaccgacccttctccagtggcggcggcggcagcgctgagcagcaaacctgccgcatctggccaggccatttggggggctccgccgctcagccgccgccgccttgggaggggaaacagagcccgctggaaaaccggaaacagcgtaacgttagcgcctcttagccctccaccggcagcccggggaggtggcccagctagggcagggggcaggcggcaagcgggccgcgatgcgcagcgcggcgcagcgcagcgctcccaccctgtgcgccaggacctggaggaggatgcggaggatgggacgcccgcccacttgctctctcgcgccccctctgcccccggaccgagtagggagcgcggcttctgcaggggaagcttgggactgcactgctttagtgcccgccttcagcccgcaggggcgcgggaggaatcgtgccaccctttgctcccgggatttatcggcatgacagtgggggtggtgcgtgaggagaaggcgaagaagagataacgggctcctggcaccatcctatgaacgtggtaatgggacgcagggcgtgccccctgcctttggccagcagctgtaggagccagagaggttgccatggccagggtggccggccagcctctcgcctcttgggctgtcctctttcctaggaggaccctggagcccagcccctaaatgataccacgtgctcggtcctgccaccgcctggtgaacgctggatattcgacttgaggtgggggagaatcccagccccgtcattttggaaagagttgggccacaaggtgtcttgtcttagcattgaggacacccaagcagaggtggtagctgagaaagggcccagtccccaacactctgggctttcttcagcggccacgtggggatctggctgagcactgtacaacctcatcttttaaaaatctgatctctaagaaaggtggggggcttcttgggagccaacagagagccagagcctgtcagggccagaggctgctccataaaaaaggttttttttgttttgttttgttttgtttccaaggctgatgcttgcaagaggcagaagagtttgctgcactggagccagcatctgatttaaaacacacacacacacacacacacacacacacaggtccataatccattagcctatcaatgagggtccagggagttttcaacacccagcttttaaccttgaaggatgtggagctcaggaatgccagtgagctcttggggaattttataccgcactgggctccacaggaaactggtccaaggatgagtgacttaggctaggactgctattctggaaaggaagtagagagagctacacctttcctcctagctaagagacatcttaaactcaatacatccaaagccaacatcattatttcttccacttcactccaaatcccctataattattaatgccactgttttattcttttagactacatcaatccattacaataagtcccttcatctcatcttttattcttcctcatccaattaatcaccaaggcctttgggtctctcttttaaaataatctccaatttatctacttccactccaactctgctgcaaataccttaagtccaagccctcatcatctctcacctggacaacttctaagccttctaactggtctccactcctttcacctcatcacctatctccagtcctaccaatgccagagtgatccttctaaaaataaaatgtaagtacaatttggccatgctactgctctcagaagttaagttcaaactcctcagcaaggctcttcatgggctccctttgcctagccagcttcatatcctgagagccaaccccccactctagcaatcctcagcacttcatgctctttcttggtgtgcttctgcacatgatgtctcttgtgtccagaaagcctcacctccaccttgaccacatggaaaacttattttcccaaggcccagctcagcattataccgcatcccccttcctacatatccacctctactcccaccaacacatacatgatggaattaatcccttcctcctctgtattgccatgagcttcacacatagtattactgttgggatactggcccataccgtatttcaagcagccatttaatgggtctgcatctcccatcaggccaggcacgttaatgtcagggactatatatatcctattcatctttggattcctattacctccaacacaatgcctggcataaaataaggattagcaaatctccagtgaaagaaggagagaaggaagaaaataactgaaaatcggcacgcttaaa

SEQ ID NO: 318267 - DNA, 4001 bp, Homo sapiens
catggtaatccaaacggtatccatagcgtttacggtgtaattcaatatattcattctgtggctataatgatggaagaaatattattttaattttttaaagtactgacaattattctaaaatgctttcttttacacagcacaaagaccctgtttcatccaaatgttcacttacttaaatgattcttgcaccattaagtttattcacatgatgtaagttaaattttggtcttgaatgatatgaggcatcagggcttacatctctaataatctcattagggaatggtccaaaatctactggaccacaaaagggatgaactgattacagtatcttttttccttgacataatttgcttttttaataacaccttcatttcacatttaaaaaatttaagtcagttttattgaagcataatttacacacagtaaaacctgtcctttttaggtatacagttctaagtttttcctaactacacagttctgtaaccaccacaatcaaaatacaaagaatttccatttccccctaaaattccctatgtaacttttaagtcaatcctctttcccaaccctcagtttgatacctatccctacagttttgcctttcccagaatgaaacagggatcaacagtagtacatagccttttgaatctggtttcttgcttttgggattcacccaatttgctgcaggtataggaacttcaatcctttttattgttgagtagtatgctattgtatggatacaccactgtttacccgctgaccagatgataggtatcagggttgttcccagttttgggtgattacgaataaatctgcaataaacaactgcatgcaagtcttcatgtggacgtgtgtttactgccagaccgttttccaaaagtgcattatttttcttttcaccagcaatgtatgggatgctttttgcattttagacacgttttaaacacgcggccaggcgtgagtctattcgtattttaaggctgcaaaaataaaaatgatacaaagccaagtccagcacagagagcaatgttaagtaacaaccaacaaggtgtgctgctaccaactgctatcacataaactttgcagcaatcacatgaagggtgtatggaatgccattttgcaaagaaacgcagattatagagacgtaacacaaagagaaaggacctggcagttagatctgggccgttaagcccggcttcgcaattcattagctgtctggtctttggcaaggacgccttcagtttcctcagcagtaaaatgaagggggcgggactgacatctaagactgtacaagggacaaccatattcccattaggctctggggctgataaccacgcttgtggtgaaatcaggaatttttaggactcttagcggtggatcaaaaagaaaaaagaaaacaggacagagtaaaatcttgctccaaagcttgtgttctggcaaataccgtctgtgtctcgaatgtgaagttgtttccactcctcagagcccaccccacgggtctaccatccttttctcttggcagttctcatttccgcctaccaccgctcaccccctaccccagcgccccagagtcctcaggtcccactaactcagacgctgtgtgtcgcgagcgtccgaggcatcctccttaccatggtgacggccgcagagccgccaggagcagccgctggagtgcgaaaacgctctcaattttcgggtctcaaagacccacaagcccacaccacgcaggccgggacaggaaagagtcaccctttaaaacggccgagtgaagagcaagaaccacgcagcggttccgagcctctgttttccgcttttagctaggaggacggaagttgctggcaggcggcatttggccggtacaccgccggaagtgtggaggtgtggctgcccgaggcggtagagcggagaaagcctattttcttttcgtttagatacattgccttttgcctaggctggcgtcgagacttgaggccgttgcagactttggcgcggctcgcgcctcctgcttcaagagcccagcggtgagagctggcctgcggcacgcggcctaatgccaggtgagtactgctccgagctgtgagacatcgcgcgcctgtgaccctgtcacagcgctgggtaccgctgacctttcaggctgcgacggacacagccagccacggaagaggacaacagggcctccggactcccctcggtgttcgctcagtatggaagtttttctctatcattcggcgaagtcgactcatctttgttccggtcactctgtgtaatgtgtgcatgattgtgaaggatactgaggaatgaaaacttagtgtacagaaaaatggaactactggggctttgcagctgttagaaaagaagaagataacattctggttttttggaggtacaggactgattccagaaatttctgaggcattttggtgcaccgaatcaaatgctgagtggacttgtatttagtggccccctagtgtcaagaagtaattaactaccagaaagtacgtctacttaaatacactatcaggtttacccttttactgcacagttgcagaagttcccttaattacttcacagcttgcagcgtgattcagttgatgaacaaaaagaactgtaccaaaagaatactttcattaattcttagtgcttgtatttgaggcagtattttgtttttgtttttgtttttatgggtattttgagacggcatctcgcccagtcgcccaggctggagtgcaggggcacgagctcggctcaccgcagcctcgacctcccgggatcaagcgatcctccgacctcagcctcaaaagtagcgagctacaggctcgcgccacgaagcctggctgatttttgtagtttttgtagagatgaggtttcaccgtgttgcccaggctggtctcgaactcccgggtacgagcgatccacccgcctcggcctcccaaagtgttgggattacaggcttgagccacagcgcccggctttgaggcagtttttgttttgttttgagacggagtttcaatcttgtcgcacaggctggagtgcaaatgcgccatctcgtctcactgcaacctctgcctcccgggttcaagcgattctccaggttcagcctcccaagtagctggaattataggcgctcgccaccacacccagctaatatttttgtatttttagtagagatggggtttcaccatgttggtcgggctggtttcgaactcctgacttcaggtgatccacctgcctcggcctcccaaagtgctggaattacaggcgtgagccaccgagccccgcctttgaagcagttttttaaggctccattttctaaggtgatctcatcattctctttaaaaccagaaatagtaactagcatttgtatattttaggtacagtacgttatataatctctttgcctttaatgcgcccctccccgccgtccctcaatcccccgaatttcctccctcatctacttcaggtctttgcttaaatgtcactgtttgaatgaggccttccttgatctctttacttacagttctaactgtcccaattcctccttcctgcttcattcttctctacagcaccctatcatcatgggagagactatgtattgtattcgttacttttgtttgttgtctgtatcccctgactacggtagaggcagtatgagggcagagattgttgtcttttgttcactgcattaacgctgatatctagaaagcagtgggtaggcagacacacagtaaattcttgttgaataaatgggaacgaataggcttgggcgggggagggctgggttgtgcaaattatctttttattgacaaccactgagttaaagaagaggaaaatgtctattacagtcacaactgtggagagactatgaggccctgaactttggcgttaccaatgaaaagggaatggattcaaggccaggcatggtggctcacgcctgtaatcccagcactttgggaggccgaggtgggtagatcacttgaggtcaggagttcacgaccagtctggct

SEQ ID NO: 318268 - DNA, 4001 bp, Homo sapiens
ttcatttctttgcttatttttctgtgtttcagtctgaggagctaatggcaagaatggcgatttgactgcaccgtgtctactctctggtgtgctgtcttgttcacttcccatggccacttttacaccattctctgatttagtctcataattgcaggtggcattggtctgagtttcctcaaagatctcctctatactctcatcctctgtgactggctgttctgggtccatttcagaatctacatctgcatcgtccacacaagtaaaattctcaaagtgcagaaagccattcttgatagtctttgttacttttacctggagttcaggggagttattacaagagggttcctgtttcatagcaagtgctgtaggaccaccaggactcaaggaagtgcaaacaattggcgtctgagctcttgaatcacttttttcagggtcttgaaaggattctgatccatcagcagacccatttaaatactctacattgatcatggaggccaaatcctgtagtctccgcagtggaatgtaacaagatggagaatcttgtccataagcattttgggatgttccactgacagtcgataactgcatagtacacccattaagtggctcagaaaaattggattgaccattaccgaaagggctgtccttgtcttcaggggcatctaaattcactggattggaaaagggcagcagacaatttcttctgggtagttcacaggtctgatccatcctgggccggcatcaacctggaatccaaaagcacagcaattaatctgagttaataggccatctgactcgactctttaaaatggcagccacttcaaggcctagtggcctctatgcctttctgctgcacttccatgggcagaaaaagttcccccgactggagatgaaaaaatggcctcgatgagcctctgaaaactccattttcccgaagctgggccgatcctgctacatagaaacagcccgtctctttttcctcctctgtagactggtggacacttgggatgaactaaaattaaaacccctctgcccgtcaaaattcccaattctcaaacaggactagtcctccccctccctcgccaggggtcgagcagctggatctctcaaaagcaaaaggctgcggggtccgaggggggctcctggaccctgcacaaaaaggtaccccccccttcctggctcgctagggcgcagcggtcacaatagcgctgcaccctgcgcccagccagcgccggagcctttgcagcggcggtgcgcaggccgcaggcgagccggccgaggcggctgcaccccagagctcgccttcctgaatgcaggcctgctggatccgcagctgcagggcgaagaggcctggacccggcagagggagaaaccgaggcggccagcgaagcccagtcagggtagcagcagctgctacagctcgaaaaacatggctgctgccgacgccgccgccgcctgcccgggccgcgctccttcccgcagccgcggcagcacctcccagccgagccgatcgctctcatcaatattcagcagcaagcaaagtttgctgcgggagggcagccggccccgcgccccgcagcctgctacctgaggggaggcggaggccgaggtgttcgcaggcggccggcggggcacgggccgcgccgggaggaagttcgcggcagcccggccagctaggcctgagcccggctggtagtgatggaggagggggagggggaggaggccggcggctgcagcgccgccggccaccaaccccgcatcgcgcctggccctcccccgagcccctcaccttacggccaccaccatcttccccgcccggccaccctcctccctcccttctcctcgcgcctgcccgccgcccaccccagcgcactagttaccgtgccccgcgccccctcccgggccagctggggggagggggtgaccctcattacactggggtgcgagcggagcggtggggagagagcggggccgctcgccgcacccccctccccccgcgtctctcttcaggggagaaggcagcgagcgcgacctgccccggcctattccgccgccgcctcctcctcctcacacccccaccgcgcgcgcccccgcggccgcgcgtgcgaccgagcgcctcgcgccggcccgcgtgcggctgggccccgagtgcgcgcgcaccccttcccccaccgagcgcgcgcgttcccttctctcactcttcggggttcagggcgggtgaagtcgggcttgtgagagcgccgcccaatcagcggagctgccgctgccgccccctcccctccccctgcgcgcccgctcgcggccggggcctacgggccggcccggctgcccgggcggggcctgaggcgggctccccaggggcctcgcgcgcctccttggagtgtcggggcctgcgggcgtcgtgggtggcattccgatcccctcacctacctcggggcacggcgctggcctcgggccgcacacggctcccgcaccctacgcgtctcgaaccccaacccaggcggcacctggcgcggctgaggcctgtccgatcgtcccgccagccctgctcgggcccgcgtcagtcccggcctccatcttaggttacagcccaggctccccatccactgggcacctgccctcagcccgctgggttcggcccgaggccaaggcaacccccctcctgccgcagggctcacctgggggcttgggctggggtcttcgaggcctcaggccccgagcagacgcggccgcaggcgaaccccctacccggccgcaccccaaacccacaccaccaccaccaccaccaccacagaccaagctgagcaggaaacaaaatggaggcagcagctcgggtctgcctccctgagccaagcctgtgcagccccagggctccctcctgtctcaggctcgacgcccgcgaggcagaggctggatcgtcccgggtgccgcgggcagccgccctacagcagcgcagacgggccggggactcggccctgcggtgcccacagcccctcacccaccaccccttcccttccccctccccccatccctctccctccccttgccgggccgtgcggggtgagcggctctggggagccgggtcgggttacccgccccggcactgctcgcccggccgtggcctccgcgggggaacgaagccaggcgaccccagcgctgagcccacccccggcaccgagccgggctgcagcctgacagcgcgtccgcacctcggcctgcagccgtgcggcccccgcccagggaggccgagtccccagcccgggcccagccgggacgaagctccctcaccacccccgagcccaggggtcctcgcagcctcgggcggggcgaggggaacgccgggggagggggtcctctagtccctgcaccgcctcccgcgcctagtcaaggtctgggcctggcacgggggctcgggcagcgggcgccggccggcgtgggtatgtgcgtgcgcgccgggctgggggccgggacgggacgggccgcgcctcgcaccgcggacgctgcagttctcggcacccaggcagatggccctctcgtgccaccgccgcccagagcgggccgcctgctccgcagcccggttccccggggagtgcgcgcctcgcccctgagggccgggcatctggaccccagcggagctgcgccgggacacgggaccgcccggctggccgggacaagcccgctggcgcagccctcggcctggggcctcacggcctgcatcctgcaccgggcccgcagcaccgaatctagcacgaccgcgtggcgtccaatcccccaagacagcggaagggcgggacagggagcccaagctgggcctgaacttgcgactccagcccctcgggcccttcccccagcccggactccgtcgccccctgggcttgatccccaccaagaagctcacctcaggagttacctggtccctagggcgctaagcgccttctcgctgttcagagaaagccggatccggccgccataaaaattccgcctcctccagaaagccttct

SEQ ID NO: 318269 - DNA, 4001 bp, Homo sapiens
ccaaaagcacagcaattaatctgagttaataggccatctgactcgactctttaaaatggcagccacttcaaggcctagtggcctctatgcctttctgctgcacttccatgggcagaaaaagttcccccgactggagatgaaaaaatggcctcgatgagcctctgaaaactccattttcccgaagctgggccgatcctgctacatagaaacagcccgtctctttttcctcctctgtagactggtggacacttgggatgaactaaaattaaaacccctctgcccgtcaaaattcccaattctcaaacaggactagtcctccccctccctcgccaggggtcgagcagctggatctctcaaaagcaaaaggctgcggggtccgaggggggctcctggaccctgcacaaaaaggtaccccccccttcctggctcgctagggcgcagcggtcacaatagcgctgcaccctgcgcccagccagcgccggagcctttgcagcggcggtgcgcaggccgcaggcgagccggccgaggcggctgcaccccagagctcgccttcctgaatgcaggcctgctggatccgcagctgcagggcgaagaggcctggacccggcagagggagaaaccgaggcggccagcgaagcccagtcagggtagcagcagctgctacagctcgaaaaacatggctgctgccgacgccgccgccgcctgcccgggccgcgctccttcccgcagccgcggcagcacctcccagccgagccgatcgctctcatcaatattcagcagcaagcaaagtttgctgcgggagggcagccggccccgcgccccgcagcctgctacctgaggggaggcggaggccgaggtgttcgcaggcggccggcggggcacgggccgcgccgggaggaagttcgcggcagcccggccagctaggcctgagcccggctggtagtgatggaggagggggagggggaggaggccggcggctgcagcgccgccggccaccaaccccgcatcgcgcctggccctcccccgagcccctcaccttacggccaccaccatcttccccgcccggccaccctcctccctcccttctcctcgcgcctgcccgccgcccaccccagcgcactagttaccgtgccccgcgccccctcccgggccagctggggggagggggtgaccctcattacactggggtgcgagcggagcggtggggagagagcggggccgctcgccgcacccccctccccccgcgtctctcttcaggggagaaggcagcgagcgcgacctgccccggcctattccgccgccgcctcctcctcctcacacccccaccgcgcgcgcccccgcggccgcgcgtgcgaccgagcgcctcgcgccggcccgcgtgcggctgggccccgagtgcgcgcgcaccccttcccccaccgagcgcgcgcgttcccttctctcactcttcggggttcagggcgggtgaagtcgggcttgtgagagcgccgcccaatcagcggagctgccgctgccgccccctcccctccccctgcgcgcccgctcgcggccggggcctacgggccggcccggctgcccgggcggggcctgaggcgggctccccaggggcctcgcgcgcctccttggagtgtcggggcctgcgggcgtcgtgggtggcattccgatcccctcacctacctcggggcacggcgctggcctcgggccgcacacggctcccgcaccctacgcgtctcgaaccccaacccaggcggcacctggcgcggctgaggcctgtccgatcgtcccgccagccctgctcgggcccgcgtcagtcccggcctccatcttaggttacagcccaggctccccatccactgggcacctgccctcagcccgctgggttcggcccgaggccaaggcaacccccctcctgccgcagggctcacctgggggcttgggctggggtcttcgaggcctcaggccccgagcagacgcggccgcaggcgaaccccctacccggccgcaccccaaacccacaccaccaccaccaccaccaccacagaccaagctgagcaggaaacaaaatggaggcagcagctcgggtctgcctccctgagccaagcctgtgcagccccagggctccctcctgtctcaggctcgacgcccgcgaggcagaggctggatcgtcccgggtgccgcgggcagccgccctacagcagcgcagacgggccggggactcggccctgcggtgcccacagcccctcacccaccaccccttcccttccccctccccccatccctctccctccccttgccgggccgtgcggggtgagcggctctggggagccgggtcgggttacccgccccggcactgctcgcccggccgtggcctccgcgggggaacgaagccaggcgaccccagcgctgagcccacccccggcaccgagccgggctgcagcctgacagcgcgtccgcacctcggcctgcagccgtgcggcccccgcccagggaggccgagtccccagcccgggcccagccgggacgaagctccctcaccacccccgagcccaggggtcctcgcagcctcgggcggggcgaggggaacgccgggggagggggtcctctagtccctgcaccgcctcccgcgcctagtcaaggtctgggcctggcacgggggctcgggcagcgggcgccggccggcgtgggtatgtgcgtgcgcgccgggctgggggccgggacgggacgggccgcgcctcgcaccgcggacgctgcagttctcggcacccaggcagatggccctctcgtgccaccgccgcccagagcgggccgcctgctccgcagcccggttccccggggagtgcgcgcctcgcccctgagggccgggcatctggaccccagcggagctgcgccgggacacgggaccgcccggctggccgggacaagcccgctggcgcagccctcggcctggggcctcacggcctgcatcctgcaccgggcccgcagcaccgaatctagcacgaccgcgtggcgtccaatcccccaagacagcggaagggcgggacagggagcccaagctgggcctgaacttgcgactccagcccctcgggcccttcccccagcccggactccgtcgccccctgggcttgatccccaccaagaagctcacctcaggagttacctggtccctagggcgctaagcgccttctcgctgttcagagaaagccggatccggccgccataaaaattccgcctcctccagaaagccttctgtgattagatttggagttaactccatctcaagctgagggcaccgccctcgagggccacgtgactactattcttcccatggcttagtaaatgtgcatagttattgccccagtggactgtttactcactgccttctgttaactttgagcccacctgggagaaaggccatttttggcgttgccctgtgtgacattagtgctggccagctaaactccatccttcccctgccttcagccagcgactggcccagcaggcgtggagctcgagatgctcttacccttttgctctccaaggcccacagtccagtgatggaggctcccaagtcaacaggcccttagcacatgtctgcaagtgccggatgcagaccctgccaagacagcaagtgggctttgttagagggaaagtgcccactggaacgggactgatgagagggctgtgacctcagggaggctccttctgttgaagagtctgaggtaccctgaagattctcaggtgcaaagtcaggttggtagttgtctatgtgttgggaccaaccagagaaaagtcgagtctatacctacaagggccagctctttgttctgctagggtcactcaccctgctaatcccatctgggcaattcgactcaacaggcaagctctgactggttccttcttcacacctaataatttgagccaatcattttgactgacagttactcctctgccaattgccccaattcatcaatgctcctcccagtcctttactttgccactaa

SEQ ID NO: 318270 - DNA, 4001 bp, Homo sapiens
tcccagagtagtagcacgcttgggtgctgagactcggaaatgctacattggctggtgcagtctgtactgcgaagtaccaggagacaacctgacagcagacagtggtaacctgtctgtaatggaaaacactaagagactacctaccaggagactgttgtcaagctaagtctgtcctttttctgaaggcaaagcagccactctgcaacagttttgatgtgagaaaacaagggctgtaaaagggagctggcggaagtggtgacataaaggaagaggctggatgtactaggaagagctggctgaaatcagtgactcataaagctgcaaatcgcaaatcgcatgaaaacttgcgtagcaatataatgttgataaaagcaccaggtactagaacattaggatgtttgcaaagtatacccaagctctttaacagcaaatgcagtaccaagaaatataattcaagtgatagagattaatatcccaaataaatattcggcatgaagcactgtggtacctaccaactcagtggctgtggaacttcaactttctgaccgtccacctccaggtcctccaattccttaaaatatttgttctttaagcaatggagaatctcttttgcgtggctattgaaaaataaggaagtttcaaactgatctaaaaaactaagttaatacattgtatcttcttaaatttaagactgcaagtgttttaaaactaaaaccaacttttgcatggagagtaaacattctttagtcactacttttacactgtatgccttcaaaatttaagcaatccacactgtttgagccctaagagcaacactgcattccttctctcctaagcatatcctaccgttaagttttacttgcgactcatttagaaagatgtaactacaaagatggagggggggcgcggaggaggggagaaccaaggggttttatgcattctctataaattctcttacgttccaaaaggtaagaccctcagcttccctcctggaagattccccaggagccgaatcttcctcagatctcattttcatttcgtcttctaaccttgcgcctgcaatacctccgtgaccatttcattggaccctgtgctccccacctcaatgcttcctgaatccaaaccgctgaaacgccacggttctctggcactgtaacacttgtcgaagaaaacaccgtcgcctttaacctccagcatcctggccccaactcccaaaaaatcaggcactgcctccctaccttttgtaaccagtaattcttaaagtggccgggagcggctccctgagagcgtccatgaactggccccactcgccctcgggcacgatcttgagctcctggtagtagtgctcgaacagcttgttctccttgacgatctcggggtagcctccttcccagccctgaggaaggaaagagacgtctaccccgaggcccaaggagccgccccctcgccgccgcctcgcaggcctcggggtccgggaagcccaggaggagcccctggcccgcccgccgggtcccggctcctaccgcctcgccgcgctttccaccaccctcggcgccatcctccgcgtcctccggccgctgctgttgctggagccgccgaccccgcgaccgccgccccatagcccacgcggccgcgcacgcagcacgcagaaaccggcccgccacggccagaactctagccctacacctcccgggacttccggccggaaaccaaggccccacgtgtccgggcctggtcctttcggggacctttggggaccgtccaggaataagcccaaagcgcacaacccgtctttcagaaaagcggcgtgacagggaaaacagcgaacagctctaaggggaaaaaaatgctccaggaagcagccacaaaggcgtctccgcgcgaagcgcccaggtttcccacgcgggctcaaggagctccgcggacagcctgaagccgcgcgtgcgcagagcggcgcggggttactgcggccccggcgtgggtggggcgcttgcaggtccctccccgcgcaagtgctcgccccgcccccggggccgcacccacagccccggctaccccggagaagcctgacttgagaaccctttctgcagagtcccggcagtgcgggactccggtagccgcccctccggtagccgcccctcctgcccccgcgccgccgccctatatgttgcccgccgcggcctctggggcatggagcacgctgcccagccctggcgatggcaacggcgacgggggtggcggaggagcgcctgctggccgcgctcgcctacctgcagtgcgccgtgggctgcgcggtcttcgcgcgcaatcgtcagacgaactcagtgtacggccgccacgcgctgcccagccacaggctccgagtgccggcgcgggccgcctgggtggtgcaggagctgccctcgctggccctgccgctctaccagtacgccagcgagtccgccccgcgtctccgcagcgcgcccaactgcatcctcctggccatgttcctcgtccactacgggcatcggtaacgtccccggcccccggccccctaccctactcccggcccggcgtcctctccgaccctcccctcactgcccggtgccctctccccgaagcctcccccacccagatgccctctccctgccagatcccccggggcgtcccccatctgcacgggtgcccttccccgagtcccccggccccgggagtttggaaaccagaagggattcgtctggaaagggcgggaaacaaaggactggaagggagtgatggaaaaaaacatgatgaaactgatctggaaagagccactcagtggtcctaggtttggtttccttagccgggcgcggtggcgcctgtctgtgatcccagttactcgggagtctgagatggaagaatcgcttgaacccgagaggcggaggttacagtgagccgagatctcgccactgccctccagcctgggtgacagagcgagactctgtctcaaaattaaatatataaaaataaagagttaaaaagtaaaaatgtaaaataaaaatgaagactagattttgttcccttagatcacgactgtgggggcgggggggagggggttggcctagagtctaatgctgatggtcggtcttgagggccactggtttctactcctttctgccggttccccttttggtatctttggtgatggtggagctgttttctcccagccaagtgatcagctgcaactggaaacctgctgtcctaaaactgcctagcagtttctccttataggcttgatcactttcagagactttcatgtccaccttatgcaagggaccccaggattgtgggggtggaaagccagcaaccttaaaccttaaacaaacgaagtcttaaagatgacttctaaatctttcaaggtttttgtttttttgaatatttgaaaactggctgtgtctgaaatcttcaagccttctaataagttggggttctctccaggtcgtatcttttggcttttacacagccaaagcaaacgacaggtcgaaagttcaaaattaaattttaaacgttttcattcaggctctggaaagcttcacagttaaaaaggatgtctctacacccaaggaagttgaactcactggctgtgtgactatgggcagtttacccaacctttctgatttggggtcccaccttaaaacactcacttcccagagagacaggaagaactcagtgtgtgtttataagcctctcttctttctcctggtgtcatgcattccagcgaagagaaagtacacagctccactacttggaaccagtgttgtacccagcacagtttttggtacctgagttccctgaaaaccagcaccttaccctgtaactggtgcagtctgtgtcctcagtgtgctttgatgacttgcactttaaacaagggcaagtcaacattcatcagaggcttagtgagtactgtgtgcctgaaactctttaccattgctttattttttttttggaatgggatcaaccattgctacaatttgaatattagt

SEQ ID NO: 318271 - DNA, 4001 bp, Homo sapiens
acgcccggctaatttttgtatttttagtagagatggggtttccccgtgttagccaggctggtctcgaactcctgaccttgtgatccgcccgcctaggccttccaaagtgccaggattacaggcatgagctaccgcacccggcaaaatgttgtttttaaagtaaacttttaaaaacgttttaatctttttgttgggcaatcggcattaaaaaaactttacgtattccagatttgatagattagttgtgactaactgttcacaaactcatgttttttaaaaaaataaacaaaatataaatttaaaagagactgcaccaggcccagtagctcaggcctgtaatcccaggactttggaggccaacgtggattgcttgaccccatgggtttgaggctgctgtgagctacaatctcacccctgcaccccagcatgggagacagggaccctgtctcaataaatatatatttttttttaaagagagaatgcctaaactcaaatccattttaatttgttgccaaatttaagttatagaaagtgaaattaaatgtcactaggaaaagcccacattttaaaatatgtcaaaattagtgagaaaaaaatcccactggtctatacgtacatcagaaatcccaaattcagcagctactgctaaattccgaaagttactggatttactaatttataatcgtaatctaaaaccattgttgaggaaactatgaattgtacaattcagaaaagtaactgagatccaagctgacataatgtctttcacacgaatcttgaggcactcaaagcacctccatatactgtaatatatataatagctaatagctaacatatagtatgaacttattacataccagtgaatactccaagctcttcatacacgtgaataccatgttaagctcaaaacaatcccatgagaagggtactataactaccttatcttgtggataaggaagatatagagacactgaacaatctctcgcccaagtttacaaaactaggaaacaagtagtctcccttcaccatattacactgccatcaaacatcttgggcatctaacctgagaactaaatctaatttcaacctgttagtttaattatacacttaacaaagaaaaagcgggtccagatccaaagagcattggtgaaaagaaataaaaggagtactacttattttatgcacacacctcttcaccacctgcttgaccactccacaaacatgcaggattttcaagcttttagatgagaaaactaatcacctgacatcatctctaaattctctgcccgttattctatccctattttctttgttgtcctttcctatatttatctatttatgaattacgcttccgtacaggagcttaacctctccactgcaggtacgttatctgttgtcttcctgcctgtcttcagtgcacggaagaaatatttgttcctttagcaacctagttaatctgttcccagctgaagcccgtcagagaagcagaagcagcagtcttagtttgaaaactaaacacgaaaataggctcctcaaatttccacaactcagcacctgccctgaagaggcgggggctctgaccagacccaaacctggtcagtgttatcctctttctctttctgccagccacaggagccgtcgggacacccaacagtcgttcagggaaacggggctgggggcgtctgggaagaggaaactgaacacaagccccgagctgccgctaccttgaggatctcgcggccgcccaccgacagcgccacatgccggctctggaggccgcactggatatcctgggcgcgcgtgcctggcggcacctgaacttcaatgaacacctcctccaaggtctggtaccactggccccacggggtcccgcacggtaccaccccactccgctcctcaaacggggccgacataatccagtccctcccggccgcggccgcaccaggcggagccgagcgcacgcgcggaatcccacgcttaggctacgcctcggcctctccgctcgggtcactgcgcatgcgcaggaacgcaagctagcgctttggtgtgcgtgttcgtttttccctttgaatggccgtttacggcaccggcaggccccggatgaaagaactgaaatccagaaaagttcacatgcaacgaacaatgggacagaattggaaccagtgaagccggaactcactacaccgtcccctaagtgacgccaaaatgcactttctaacgtctccggagggaagtgcgcttgcgcaaatgctaggttacacttgagtaactccgggaatgactgggtgggtggggcggggaacagtaacggtctcctattggatggcagcctaaactcgcaggccagctaattggacgcaatcagaacccagcattctttcttcgtgttcctgtgcgggattggtgtgcccaggggtttggctttccaattggctaacgccggggtgggtggggaatgtggggagatttgaatttgaaaccggtagggagtgataatccgcattcagttgtcgaggagtgccagtcaccttcagtttctggagctggccgtcaacatgtcctttcctaaggcgcccttgaaacgattcaatgacccttctggtgcgtaagggggaaagagctgggggacgggagacgccctaacgccctttgcctctttcagctcccttcttgggaggcaagcaggaggcgattttagggtcgggctggggctcattcagttgattgatttttctcaaatatgctctaagcatctgttacatgccaagcactaatcaggatgctaaggataccgcagtgaaacagtctccgccccgtggggcttacattcaggcggggaatactgtcaataaacagcggtaatggagaaactacagcagggcgaagggaatggacccgagacgttggtagctacttgattttcaagtccgagagggcctcactgataagaacactggagtattacttgtagtctgaacttgtgcatttcttttgtgtattccatttgggcataaaagaaggaagattagtaaaggcagtttatgggtgtaaaattagagcagcagcacttattgaaaacataaacaatgaagttatggctgatattgaccacttatacctcaagcaccgtactaaggctttacatcgattattagttatgttaatttcccaccaactctaaggggtaatcctattattattttattgataaaaagactgagacttaaatttgctcagtgctacattaccaaagtgaccggactggaatatgaacccagcccccatcgtgtgctcttaacaccgcaatgcacagcacagtaaccaggaagccttagctgtgtttggtaggcactcatcatttaagatgctgtatgcggccgggcgcggcggctcacgcctgtaatcccagcactttgggaggccgaggcaggtggatcacgaggtcaggagatcgagaccaccgtgaaaccccgtctgtactaaaaatacaaaaaaaattagccaggcgcggtggcgggcgcctgtagtcccagctgactacaggctgaggcaggagaatggcgtgaacccgggaggcggagcttgcgatgagccgagatcgcgccactgcactccagcctgggcgacagagcaagactctgtcttacagaaaaaaaaaaaatgctgtatgctgggactgtgctactagatcttgtttattccttccaaaagccaagtgaggaaggtactgatattgacctcattttacagatgagaaaacagaggttttgtatcttgcacaatcagtaagtggtagagctaaatattaaagctcatgatttattcactatcatacactatttcgtggttactcattacgtctctaagttttgtcagccaacgtgtgaatgaaaatacaactactcacaaaggaaggccaaatgagcaagtgaatcagcacaaacttattttcttagttaaaagactcaaggaccatatgatttcccgagtaatcaaaggac

SEQ ID NO: 318272 - DNA, 4001 bp, Homo sapiens
taccatctttgtcctactacactgagacaaatattgtcacaaatcagatgatcatatatttttggttctattattggacagttctgttggtcactttgttgtccttgaatcagagcagcttttaaaactcattaactttatctgctttgtcacctttttgtttcggtggggtaaaccctgaaataattgttccatacctcttaaatattgcctaatcatggactgcagatgatagagcacacactgagctttttttgtctttttttttttttggcggcgggggatggtgaaaatggttcatgattcaactgtctgtgaacttctcaaagtatttttttttaaggtataattcttctttctatgaaatgctattaagaaaagatttgggattctaacaacatttctatcattctaagcaataagatttttaagctaaaaagacagaaaggttatagcccatagtttttgatagctgctgtctcctgggttctgaaagggcgatctggctgatgaattgcatagcaggaatagtatgaacaaaatttagggaaaacaaggagtaaagattaattgtctcattttggagctgttcacctttcctatttgtgtctttctgctacttataaataggttaaaactgctcacagtcatggaaacacttggatgaaacctaacagtggaaatctgtttagaaattaaattaccagaagtaatatctacatgacagaataatttttgatttattctagaatttacttcgctgttcctttcatattgaaatttctacatacgttaaaaatactatgcataacaaaagctacaaattttcaggactttattttgaagcactgctgtacagctcctgtactgatctcccttccaaattgtctttctcttaagtttattttccaaaaacccatattatagttttttcagctaggtttagtttgaataatatttcactgtctcatgttctggggtcaccgtcactccctcacattctcacaggccgcgccaggtaactgcaaaattgtccttcaaaaatacagcgtcattcactacctccagggcaatgcttatgcatatgctattctgtggagatgggaagtggaaagtgtacacttttccctctagctttctcagcagaaaagccatctagaaatagtaccattattcattccagagaagcacataaagtctaacacccaattctactgtttgatttactttttcaattctcattgacaggttatagaaggtaaagatttgaaggcagaataaagtgctgcccttgttttccaagaagctcaaggactattccgagaaatcatttaaaagaatattagatgtaaagggacataaatttttaacaaaccaacatccacttttactgacatgtaacccggggcccatgacttccgcatgctcacacagaccgaatgggacaggacaggaccttaaatatcgctctgtcactgaaatcactgaccatcaattaacgaatttcatccactccctgggcactcaagaccaattaagtgccacccgtgcacggtctctgaaaatggtaaaatgccttaagatattttactttcttgccactactgtgagattccttctttcgaggtgaaatcacaccctaagtagcgcttccttttccccatctcagcttgggcaggaaactctacgacctcagtaccgccgcacctccgccctgtcgcgggagcccctgcaaatgcgtccgtggctcccgcgcctgcgcccaccaaaccactacgaggctccgccacacaactcagcagggccacgcagggcagcgcgggaaccaaagagcccagggaagtggtcaccgcccccagaggaggcaatgagacgactaactccccactgcttctactaacccaaaggtgaccacagtagaggcaaccaggatgcagtccaaagattgggatatcccactcgcttttcctggagccggatgcagtcttcccgacttccggtggagatccgggggtggggggggggcgggaggggggcccccgcggttttatgggagatgtagtttgaagcccacaggttgtgcgcaagggagaaggggtggagattgggggtggaagtgtttgggagccggcgcgggagagatcgcggtctaaaggattggagctgaatgaagggctgaaaatccttctcctgagactgtgatgtgtagatagaacgtggtgcaggcgatcggaaaactgtaggcctaaggaaacgattttaaattttccagcgtctcccacccaactcctagccctctctccaatacagtccaatgcaattgagtgctcaaagcattctttcctgttaaataatcctggactattgactagaccaagtcactcttaaacgagatattcggcctctgtaacaccttaatcattcaccccatgggaaaactggtatcatatactgacgcctaacttattcagtagtcctttaaaaagtatgtatcaagcgcgcaaaacacctccttgggttgtgaggtgtaaataggataatgtatccaaagctcttaggatgttgtgaagtgcagagtgggcacccacaacaaaattattgtcgttattttttatttcagttcctgtgcttttatgctccaaaacctacagaagttatgagtccgagattacaaaactaggtgttggcggtcttctaacttccagaccagggctttttcctttactaaactctctccttggtaatcagcaacagctacaggggtctcttacaattgatcactgtttcccacccagattttacccttggaagctccttctcactgtgaagctgtatgcaccagttgacattgatcatgagggcttctaacgccctgtgctgctgttttttttttttttttcttttttttagatgggttctcactctgtcacccaggctggagtgcagtagtgcgatcttggctcactgcaacctccgcctcccggggtttcaagtgattctcctgcctcagtctcccgagtagctgggattacaggtgtgcgccaccaggcccagctaatttttgtatttttagtagagacaggtttttgccatgttggccaggctggtctggaactcctgacctcaggtgatccatccgccttggcctcccaaagtgctgggattacaggcgcgagccactgcacccggccgccctatgcttctttatgtgactagttgttttcagcctttaatgatttcagtgaccagacaggtggtcagaaaggattagttacttcacttggagtacccaatctttgcattcaaacatatgttagattagtatagtgaaccctcgtgtattaatgatccagagtcaacaactattaatatatagttctcccagttgttaggattgttttgaagtaaattccagaccccatattgttttgatgacaaatatttaagagtaaactttttggaaatatgtattatatctaaaatataagggctttgaaaaacaacacaacttcaatatccctagtattacaaatttaacaataattctgtaataacataaaagaaacattcaatatcaaatttactcacttgcctcagaagttttatatgtttttcagttgattcatctgaacaaagtctccacatcacatttgatttttaaaaatctatggattccttcctcttcccctttttttctggcagtttatttactaaagagtaatgatcatttgttctgtagaattttccacattctgaattttgcagattttattcctgtgctgtcctttccccctgtatttcttgcaaactggtagttaactttatagaattactcagattaaagtttgattttttttcacaaaagactttataggtgttacagtttactttgtattgaattacttcaagaggcttacaacttctggttgtctctctttttttaatgttatacttgatcattgggttcagatgttgtcaacctgataacatgtatgataaat

SEQ ID NO: 318273 - DNA, 4001 bp, Homo sapiens
ctgtagtcccagctactggggagggcaaggcgggaggaccacttgagctcatgagttagaggctgcaatgagctgtgatcatgccactgcactccagcctggtaacagaactagaccttgactcaaaaaaaaagaacaagaaaaagaaagacaacaaagagaaactaaggactttcacagggagtctggaaaaagtttgtcaggcaaaaaaagaacattgcagaaacaataaaagtaagataaaatcctgaggaaatcctgaagatggggcttcttacggaaaatatgctaaattctctgtaatcagagcaacggatgaaaaattggatggaaaagaaggggaagagactgggtgaaagaggaaggtgtgtgtaaaggcatgagatatgtaagagaaggaccagaatgcatgcactgtttttatatcttgttttcacacctaaggaggccaaaatgagtaatgttgttcaagatgataattgctaataggccaatcaggtattataagacacgctcattggtaagtagctgtagggagcaaatactatctttgtttctatcatttctttgattacaaagctatcaatgatttttataaataatcagaagtgttctcggtttacactgcacaaattatcctatttagattactttggttcttgctcaccaacaatcttttctttcttacacttcgctggttttctccaaattccatctcacaaaggggtcactttttctagcaactgatgtaattccataagccgtggggagctggttataacttaaaactgttaaacaaattactttccagtcacctatattgtcaacacatattctgccttactctccctgtacataagcactgtgatttccctgttctctttctttattccactggtagttcttttaagatcctccagcatttcataacacacatctctacacataataaagcgtttcttggccgggtgcagtggcttgcgcctgtaatcccagcactttgggaggccgaggcgggcggatcacttgaggtcagagttcgtgaccagccaggccaatatggtgaaaccccgtctctacttaaaaaacacaaaaattagccgggcttggtggcaggcgcctgtaatctcagctacttgggagtctgaggcagaagaatcgcttgaacccaggaggcggaggttgcaatgagccgagatcgcgccattgcacttcagcctgggcgaagagggaaccgctccgtctcaataaataaacaaataaatataaagcaaagcgtatctttaagataacatgctaaatttccaaattaacttcgtttgctcttacgatctactcaaacactaacaggagaaatgaacaaatttgggacttggatctggagatgcttctcatatggccttagccataagcacttgagagcggcgagaagctcattaaggttgaggtctttgcctctttctgcttcaactgggagcttgctcttcactcttgccctctcaagtatctacaatgaagaaagtgaggaaaggaaaaaacctgaaaagaagctgcttgctgttctccaaaaatgcagccaacagtgccataaatctcagcatatcctcgccgggaccaacgctggggataagtagcaaattaggaagtcaggcgagagtcctttaggttgagaaagcagggtcactatcactcacttggggcagacaccataagcagctcggaaaggtccgggtacatgcggtcctcttgcaactgacggtcgatgagccgtccagcattttccagagcttcctgcagggctgcggcagatgtagaggccggcatcgccgcgcccaacaaagaagacggcatctcggaaatcgtagacaccagggtccagaaaaagtcaaaaaccaaggagaaacaagaaaagatccaagaagttagcttagatccgccgcctagggcgcgcgcgccaaacgagcgccttggcgcctcgacatgacgcacttccgcttcatccggtggggaactggaagacgccgttctggcctgggaagaggaagctgttgggagggggctagaggttgtgggtggagctaggaggctgctgatgctttcgagggggttgagggttttggggtgtggcagggtaaaattagggtaggttatttagggaagggagggagggaaaggaagggaaggataaaggggagggaacagggaaggagaggggcgggatggggttggatagggtgaggaggaaggagggaggagggatacggtaggtgggagctaggtcgtgtgtctggcctaggaggttggtcaggttccgttggtttaagcgcgtgctcgacctgagtcttggaacttcccgcgtcggtatccgctaactgcagctatatgagttcgcgcatgagcgcgcagtttggttctccaagtaactgcttttgtgagagtagttaagaattggtaggtcgctgtcacagagagggatataaaccagtatctcactatattcttcgcgggcttcagtgtaaattagaattcatcaggcttttccatttgcgtgtcgctgtcttttgactttgttgccccttagtataaaatacgtgtttaagaagaagctgagtgcaggtggaccgctgccgtgctttttatcgtggcagagatagcagacagttctaattcatctttccattcccagcgctagtataggaactcgtatgagataggaacccaagagttcatacaatcctaagaaactgaatacttgccttgtgcctggtgctgggactatcaaactaacacagtgtttcctgtccttaaggtgcttcaagcagagacaaagggcttcattataatttttctatttggataggtataaactatagcaggataggagaaagcagagaggtaaaagaggcttcatttactacagaaggcaacctgagtgggtaaatcaaagcactttttagaaagctgctcttatttagaatctcacctaagaaagcttccagttatgttcttcagaatttcacaaatcaataactgaattactctaaattggtcttttgctatttgaattacatttttactccctcaaagacttgactacatttctgaaaattgaaagttctttgatgttaccaatctacacttaaaatttgacatagccaatataccaagaaaaactggattttttatcattggtatatagataggcagttgggtctctagctgtgagtttactttatttggtagaccatagattgaaaagtggtggtctggcaccgagtttgtttttaatttgagacaaaatacacaaagttttcaactccataaattggaagattcaacaacgttgctgtgatattcctgcatagaagtaaagctccccaaagtgtaatctaactaacttaattcattggcatattgcctatgctttcccactacaactgctaaaccgagtaatttctacaaaagactgcaaagccttaaatacggactctggcactttacaggaaaagtttgctgacctcttccctagaacagataattatgaatttttttggtcttaggacccccttgatacccttaaaaattattcaggattccagagagtttttgtttcatgttggttacatctattaatatttgtgaataactcaaactgaaaattaaaatgtttaacattgtatttaaaagagtaacaaggccgagcacagtggctcacacctgtaatcccagcacccagcactttgggaggccaaggcaggtggatcacaagttcaggagttggagaccagcctggccaatatggtgaaaccccgtctatactaaaatacaaaaattagctgggcgtggtggcgtgcgcctgtagtctcaactgttcaggaggctgagccaggagaatcacttgaacctaggaggcagaggttgcagtgagtcgagatcgtgccactgcactccaccctgggcaacagagtaagactccgtttcaaaaaaaaaaaaaaaaagca

SEQ ID NO: 318274 - DNA, 4001 bp, Homo sapiens
agaaaatacagaatgcttttaccacagtgcctcacgtgcaggaggcactgctgcccactatttcccgaaatggcctggaaactgccaaaaggtggagaatcatgtcttaccgatctccctatcctctgctccgtcacctaacaaaggaggcccctaataactaaataaattgcaaaacgaccaaaaaaaaagtgttgctttgtttgaggaaatatctctgcctcccacacacacttaagatgtctattttaaagcaccactaagaaaatattcataaaggctgggtgtggtggcttacgcctgtaatcccagcactttgggaggccaaggcgggcgaatcacctgaggtcaggagttcgagaccagcctgaccaaatggcaaaaccctgtctctactaaaaatacaaaaattagctgtgcatactagtgggtgcctgtaatcccagctattcgggaggctgagcaggagaatcgcttgaacccgggaggcagaggttgcagtgagcccagatgatgccactgcactgggggacagagccagactccgtctcggaaaaacacacacacacacacacacaagcacctcatatgtacagtgcaaaagaactactgttactattgttacacttgggaacgcctagttttctatcacaccaagaatcaccaaaaaacaccataagtgccttcatgggaaacgtttctcttttccaggtatcccaataatacacctgttgcctaagggccacacactgactggcctggaaagccgccgcctcctcctcgagcagggtaattccccaagcgggcagtgtggccagcgagccccgggtccggcctaaggatgccgcggcttttccctcgggcccggtggcttcccgaggagcgcgaggggctcggcgccgctcccaacccctaggcgcagaggccatcttggccctcgacccctgctccccgcacgcttcctccgacgcaggcaacatggctggcgcgcggggccggcccagtcccggaggtccccaaactccgtggcccggctgggcgcgggtcccggcttccgtgcgcaccgaggcgctcccaggcagcgcgcgcccacgttcgccgggcaggcaccgcccggaggcagttccgcccccctgggggcagcccttttggtcacggatgagaatccgaagcgtgagcagcttccctcgaagtccagcctcactcgaaattaactccccgccccccagcttaaatcgacgcgggttcacacaactcgcaacaagtggattcgaagtagccagtgtggcccacaccgtgactcctggaatatttcacagattgaatccagcccccgtctccccgggatatccaaaggggtggggtgggagcggaaggaatgaaattccccccgggatctaagccgcccgggccgccgaacagccgcctcgctgcagcctcaggcttaggacccccaaggagctgggcgcaggatccctctccatgaaggccgcccccccaaactgcagccccagagcggatgcaggatcgtcgctgttcaggaatgtcgtgccccataaaagtgaaaagttgcccgcgccgctgaggcactgctagctttcagcgtttccgcggaataaagcttgatcggcggctccaagccacccctcgccccaggaggcagcctcccaagttggccggtgctgctctctccgcagacccgcgcctctctggttcccacgagtcccagctcggggacgaaactgccaccgaaaccagcgcggagcgtcctccccccggcacctcccctaacatagtcgccgcggtccccccacggggaccctcgggctcccgtgcgcccctgacgccgcgcccaacactcacccgctcgccgcaactgggcccgaccctccgggggccaacggtgccagggagcgcgctcacctggcgggcgcacctgacgccgcaccgaccgccagcgctcagccggggactgggctggggacgtctcctcccccttctccctctcctttccctcctccctacaaccggccctgcccccgggcatgcgcaccaacgtggaagggggtgcgggaagcctgcgggccagcgccgcgagtcccacctgctgcgtcctagaccggctcctcggcgctctggacctggctctcggttcctgccgcctccgccagaggaagcagggagggagaggtggacgcgggagtgtaggtgtggtgtgtcggcctcctccctcggtgaccaattcacctgaaactcggatgggagggggcgggaggacgcggtcctgcttcccacaccctgccagcgcgctgttaaaggaaccgcgcgacgttgcggcccgagaggcggggcgcagaggagaggcgcgggctcctagggggcagcacggatgggggtccctgaccaccccggggtgcgttcggtgctccgcctgcttcggatggaaccttggggtgtctgatggagagaggccgaacgaggtccagaggggactgtttcctccggaaagagggtccaggcactcagcactttgataggaaaggcacgtcctcacaggacacttttctgcttccagaatttgattaaactgttgctggaaaaaggcatctagatgtattgctccaacgaaagactcctgggaaaatttcaaaagtcgtgtgtaaacattggcgctgtttctgaatctctagattcagaataagagacaattacttagaggggttaaaatgagggtgaactactgtaggtgttagttgccatccagcaggctaaagtgcataatacagtttacacatcaccaccccagggtcctctcctgcccacccggtccgctcttgaggaccgggaaatttaaactattatggctctttggcctgagaaaaagcaccttatacgttgtttaccaacctgtagtgctttaagaacaacactacttaaaaagcaaaataaacttggtttactttttttttttttttaagaaaacgaaaaagcaccttagttccgggtgctgtattctatttcttgatctggattctgtttccaagggaaatttcatagtctgcacttaacactgtgtatatttttatgtatgttggttgtttttcaacatattttttaattgtactccaggatgtggcaattatagttcttggcatttaactatctgcattgaaagcgaacttttaggtttcttacatcctgcttgtctttgtgttccaatctggaatgtcagcattgctaataaatttctatccaatcccacccacttctctacctttaattaaatggttagagatgtgactctcccatacattagatcttaaggcacaattcatacttgaggaagtaaaagcactatataaatatgaggtatttcagatgatggcagctttaatgggtaattaatttaattggtatttttttcgtggaagtcattgctacaaatgctttaatatgactatgtagtttttgaatgatgcagtttaaattggtattgttaacactggggaagtcaggttaatccccttaatgttccctgtcagattactgaaatctccaaacattccatttggtttataattaaacaagggaacatttcctaatactctcagatttgtaaacacatgtctattattttataatgtattttgacatgttctgaagagatcttaggagtttttttccactttataaaagagagttcacataccataaaattcacccttttaaagggcacgtacaattcagtgggttttagtatactcaccagattgtacaaccatcaccaccatctaattccattttaatcgcccccaaaagaaaccccatgcccattaatagtcactccccatttcccctctcccctcatccctcggcaaccactaatgtactttctgtctctattaatttgcctattctggacattttatatgaatggataatacaatatgtgccctttgtgtctgtcttctttcacttagcataatattttaaaggttcat

SEQ ID NO: 318275 - DNA, 4001 bp, Homo sapiens
ccaccacacctggcttttgtaataccctttataataaaccagtaatggtaagtactgtttccctgagttctgcaagccactttagcaaattaattgcacccaaggagacaactgtgggaatcctgatttactgtaggtgggtcagaaacacaggccacaacctgagcttgtggctgctacgtgaagtgggggcagtcttgtgggaatgagccctgaacctgtgatctgatgctatctctgacagtgtcagaattgaactgataattagaggacacacagctattgtccactgtagaactgattacttggttgctggtggggaaatatccccacaaattctggtgatcagaggtcacagatgtgttgtgacagaacagcaggagaaactgtttgtttttgcctatatcacactccactacacttatcatggttaaagctgcaaactacttagaggaggaaatccctatcaatgtttgatagcaaatttggaattcaaaaattcactgataagtcttcacatgaccaaggagcccaaaacccctcaacactgcttgttttagatcatggcaggaatcactcttaaaactgacagtatggaaagtattatgctaagtgaaagaagccagttacaaaaggccacatattacgtgatttctccatttatacaaaatatgcagaatagacaaatctatagagacagaaagtagaccaatagttgcttagggctgatggaactgggaggtgactgccaatggataggtttctttggagagtaatgaaatgttctaaaattaattgtggtgatggttctacaactctgtgaatatactaaaaaccattaaactatccattctaaatgggtaaattgtaaagtatgttaattatatctcaataaagctgttatttttatttatttatttattttttgagacggagttttgctcttgtcacccagtctagagtgcaatggcgccatctcagctcacctcaacctccgcctcctgggttcaagcgattctcctgtctcagcctcccaaatagctgcaattataggcatgcatcaccatgcccggctaattttgtattttcagtagagatgggggtttctccacgttggtcaggatggtcttaaactcccgacctcaggtgatccacccgcctcggcctcccaaagtgctgggattacaggcatgagccaccaggcctggccttttttctttttttcagacggagtctcgctctgtctctaggctggagtgcagtggcgtgatctcggctcactgcaacctccacctcctgggttcaagtgaatctcctgcctcagcctcccaagtagctgggattacaggcaagtagctgggattagaggtgcgcgccaccacagccagctaatttttgtatttttagtagagacgggagttcaccatgttggccaggatggtctcgatctcttgaccttgtgatccgccagcctcggcctcccaaggtgctgggattacaggcgtgagccaccgcacccggcctaaagctgttatttttaaaaactgacaatatgttcccaatggccacctaaatgaggcatttaaatggaagcttcattatcatttgtacaaaacaaaaaggaacatacaaatataaaccttggcaatctcttgaaacaaacattaggaataggtgacagcagttgtcctagcagagacaaactgtcattctgaaagttgagagaaattcagttttcagtgcagaccctttgatacaatttaaatttacaagtacacatatcgttttatttttaaaagcaaacacttaaagtttcaaccatacttattgtttacatgtgatagactttttaaaagagaataactaaagaattatttacttacaattcatcaggcctgtaaggaggtggactttcaagaggcctggatgacatggctgattgtcaatggtcagctgatcttcaggatgagcaatgccctttagcttccaagataaaccaatctaagcaacaaaagtagagttatggcattactactaagctcacagtttctttcttttcttcatcccacccccaccccgagacagggtctcaccctgtcacccaggctggagtgcagtggtccaatcacagctcactgcagccttgatctaccaggctcaagtactcctcctacctcagcctcccaagtagctaggactacagacctgcaccaccatgcctggctaattcctgtattttttgtacaaaaatttgaaatatatataatttcatattacttttgaaagttcatattaaatgagaatgtataagaaagtgcacatatagccgcactagcacatactagctcctcaatgcaaagtaaccatctaatgggttaaatgcctttatcattaaaaatgataataaaatgcatctataaatggtggaattgtagatatttttcccttatctccttttccaagtcttcgaaactgagcacaatttttatacaaggggagaaaaaacaatatgcatggtattaattggtcattttctgaaattttgtcctaaaattcttcagcacaagttcctaaacatctgaggagaaatttcactcaacaagcatttattaagtgcctacactagaccaggagagcctgtgggagtgacgtatgacagccagcgctggggtcctggctcttccaggctggtgtggtgctgataacacaggtggctagcttatggaacagtgaagtgggagcatggtggaatggtgtcatcttttaaaataaggttacagtaagaatatagtggatggaggatgagtaagaaaagggagggctttgaaagtctagtgggagtgtctcacttccttcaggtaggaaacagggagccagttcgtgattctcggcaagggaggtgtaagtttgatttgaaccagatttgaaagacaaagtcaacagtaaaaaggagcacctacagtcagcagcagcaaacctaggtgtgaggcaacaatgaaggactagcttaggagacagaagataggaaggaaactaacattcatcagacacctaccgacgtgctgggtgctttacataaaacctcctttcatcctcaaaacgaccctccatggttgattagtcactttacagatgcaaagagggtcagaaagagatgtgaagtaatatgctcaaggttatatggatgtcagtgagtcactcagatgtaacttgaacccagatgatttcatgtgcttttcactatgctagtttgaaacaatgagttccatttgggaaacaccagtttttgtggggagtgcacatctggtgttagcatccatgaggaagtgaagatggaggtcatctgcctacgtccgtaggtggatccatgggcactgagagctctccaggaaaaagacaagtctcagcaagatgtggtaaacacacaaccccctaacctataaagcttgaggattattctagaaaacccagtgctggagacactggcaaggtacttcccacatcagctacagaacttcatgccactccttagctatgttgaaccaacaataaattctttccaggttataccagtgattagtagagtagggaactttgagatctactggaaggtaaattccatgtgagcaggaatttttgcatgttttgttcactgattaaatcaatgcctggcacatagtagacgtccagataatttgttgaatgtttacaggaaccagattggaccatggatatctctgcctgcaaaacctcttgtgctttcaagttgaaggtaacggaaaagtatcagagtaactttaaaaggtatgatccctgaatgacacttgagtaacatctataatgagtacattaaagtatctgattttttttccttttctaatacggtctgtacaatcatacattaatatattaacaacagtacatcaattcagactcttaaaacttttttttaaattaatggcaactcttttttttttttttgagccgagtctcgctctgtc

SEQ ID NO: 318276 - DNA, 4001 bp, Homo sapiens
tcgcttgaacccgggaggcagaggttgcagtgagcccagatgatgccactgcactgggggacagagccagactccgtctcggaaaaacacacacacacacacacacaagcacctcatatgtacagtgcaaaagaactactgttactattgttacacttgggaacgcctagttttctatcacaccaagaatcaccaaaaaacaccataagtgccttcatgggaaacgtttctcttttccaggtatcccaataatacacctgttgcctaagggccacacactgactggcctggaaagccgccgcctcctcctcgagcagggtaattccccaagcgggcagtgtggccagcgagccccgggtccggcctaaggatgccgcggcttttccctcgggcccggtggcttcccgaggagcgcgaggggctcggcgccgctcccaacccctaggcgcagaggccatcttggccctcgacccctgctccccgcacgcttcctccgacgcaggcaacatggctggcgcgcggggccggcccagtcccggaggtccccaaactccgtggcccggctgggcgcgggtcccggcttccgtgcgcaccgaggcgctcccaggcagcgcgcgcccacgttcgccgggcaggcaccgcccggaggcagttccgcccccctgggggcagcccttttggtcacggatgagaatccgaagcgtgagcagcttccctcgaagtccagcctcactcgaaattaactccccgccccccagcttaaatcgacgcgggttcacacaactcgcaacaagtggattcgaagtagccagtgtggcccacaccgtgactcctggaatatttcacagattgaatccagcccccgtctccccgggatatccaaaggggtggggtgggagcggaaggaatgaaattccccccgggatctaagccgcccgggccgccgaacagccgcctcgctgcagcctcaggcttaggacccccaaggagctgggcgcaggatccctctccatgaaggccgcccccccaaactgcagccccagagcggatgcaggatcgtcgctgttcaggaatgtcgtgccccataaaagtgaaaagttgcccgcgccgctgaggcactgctagctttcagcgtttccgcggaataaagcttgatcggcggctccaagccacccctcgccccaggaggcagcctcccaagttggccggtgctgctctctccgcagacccgcgcctctctggttcccacgagtcccagctcggggacgaaactgccaccgaaaccagcgcggagcgtcctccccccggcacctcccctaacatagtcgccgcggtccccccacggggaccctcgggctcccgtgcgcccctgacgccgcgcccaacactcacccgctcgccgcaactgggcccgaccctccgggggccaacggtgccagggagcgcgctcacctggcgggcgcacctgacgccgcaccgaccgccagcgctcagccggggactgggctggggacgtctcctcccccttctccctctcctttccctcctccctacaaccggccctgcccccgggcatgcgcaccaacgtggaagggggtgcgggaagcctgcgggccagcgccgcgagtcccacctgctgcgtcctagaccggctcctcggcgctctggacctggctctcggttcctgccgcctccgccagaggaagcagggagggagaggtggacgcgggagtgtaggtgtggtgtgtcggcctcctccctcggtgaccaattcacctgaaactcggatgggagggggcgggaggacgcggtcctgcttcccacaccctgccagcgcgctgttaaaggaaccgcgcgacgttgcggcccgagaggcggggcgcagaggagaggcgcgggctcctagggggcagcacggatgggggtccctgaccaccccggggtgcgttcggtgctccgcctgcttcggatggaaccttggggtgtctgatggagagaggccgaacgaggtccagaggggactgtttcctccggaaagagggtccaggcactcagcactttgataggaaaggcacgtcctcacaggacacttttctgcttccagaatttgattaaactgttgctggaaaaaggcatctagatgtattgctccaacgaaagactcctgggaaaatttcaaaagtcgtgtgtaaacattggcgctgtttctgaatctctagattcagaataagagacaattacttagaggggttaaaatgagggtgaactactgtaggtgttagttgccatccagcaggctaaagtgcataatacagtttacacatcaccaccccagggtcctctcctgcccacccggtccgctcttgaggaccgggaaatttaaactattatggctctttggcctgagaaaaagcaccttatacgttgtttaccaacctgtagtgctttaagaacaacactacttaaaaagcaaaataaacttggtttactttttttttttttttaagaaaacgaaaaagcaccttagttccgggtgctgtattctatttcttgatctggattctgtttccaagggaaatttcatagtctgcacttaacactgtgtatatttttatgtatgttggttgtttttcaacatattttttaattgtactccaggatgtggcaattatagttcttggcatttaactatctgcattgaaagcgaacttttaggtttcttacatcctgcttgtctttgtgttccaatctggaatgtcagcattgctaataaatttctatccaatcccacccacttctctacctttaattaaatggttagagatgtgactctcccatacattagatcttaaggcacaattcatacttgaggaagtaaaagcactatataaatatgaggtatttcagatgatggcagctttaatgggtaattaatttaattggtatttttttcgtggaagtcattgctacaaatgctttaatatgactatgtagtttttgaatgatgcagtttaaattggtattgttaacactggggaagtcaggttaatccccttaatgttccctgtcagattactgaaatctccaaacattccatttggtttataattaaacaagggaacatttcctaatactctcagatttgtaaacacatgtctattattttataatgtattttgacatgttctgaagagatcttaggagtttttttccactttataaaagagagttcacataccataaaattcacccttttaaagggcacgtacaattcagtgggttttagtatactcaccagattgtacaaccatcaccaccatctaattccattttaatcgcccccaaaagaaaccccatgcccattaatagtcactccccatttcccctctcccctcatccctcggcaaccactaatgtactttctgtctctattaatttgcctattctggacattttatatgaatggataatacaatatgtgccctttgtgtctgtcttctttcacttagcataatattttaaaggttcatccatgatgtagtatgtattggtacttcattcctttttataactgaataatattccattgtatcgatgtatcacatttcgtttaatcattcatctgttgatgaacatttgggttgtttctcctttggggatgttatgaataatgttactatgaacatttgtgtacaagtttttgtgtggacatatgttttcggttctcttggtaaattaggtttttaaattaaactttttatcattttaagataacttatgcatatcatgttatttttcttattcccaccctaaacctaaactcaaagacatgttgtgttgggtagaaggctttcatattctatttgctttcccaattcattccttcaactattttctgagtgcctaatctgtacacacacgagtgaacaaaactcaaaaatctctgtgaaacttactttctagttagttctgagttcatccatatggaataataggattca

SEQ ID NO: 318277 - DNA, 4001 bp, Homo sapiens
tgcacccgtgacgcggccctccggaggtcctgacgacacgtgcccaaggtggtcagggcacgcttggttttatacattttagggagacatgagacatcaatcaatgtatgtaagaaatacactggttccatccagaaaggcggggacagctcgaagcagggagggggcttccaggtcacaggtaggtgagagacaaatggttgcagtcttttgagtttccgatgagacattccaaaggagtcaatcagaagctgcatcgatctcagtgagcagagggctgactttgaaagaatgggaggcaggtttgccctgagcagttcccaccttgacttttccctttatcctcgtgattttgggggcccaagatatcctcctttcataacacacacaaaaaaacaagatattccccccacgaggataactactaaactgcagggatttatttttattacttaaaggaggttttataaagcctctaattgaacatagaaaaaggcaaagaactgtccaaaaagagttatagggactcaatttctgccatttagaaagtttccacttaagatatccacatttgttagtctaagtcatcaattaaataatttagaaagaatagaaaaggaacaggaacctagaacttagtaagcatccaataaaagacagctattaccaagaagaattaagaaatatagcactaaagggcagaaaaacacaaaaaataaaataaagaaaataaaaaatagagtaaatttagtccaaggatgtcataaacaatcaacaatgacaataatagcagccgttgcttcttcatggagctttagattgacacattgtgatctttacaaaatccctcagagcacgagtgtcctgattatctttttttcctttttttttggtacagaaatgttcataatggcttttctcatgatggccaaaacctataaaccatccaatgaccatcaacaggtgaatggaaacagacactcacaaaggttgagtgacttcccaatgtgacacaggcaagaaggggcacagcaggcaccagactctggggttcagtgctggctgccaatcctgcagcggtccagccccttcctcagtgcccccatcacctccccattcctcaagctgtaaatgagggggttcagcatgggagtaaggactgtgtagaagatagaggccaccttgtcatggctaggggcccggtagcgcctaggcctcaggtacatgaacatggctgccccatagaagagggtgacagctgttaggtgggaggagcaggtggccagggcttttttccaggcctgagcagagcgtattcggagcacagcccctaggatgcaagcataggaggccatgatgatggagaagggaaggagaagcatgaagacacagcaagcaaagaggagggtgtcaaaaagggaagtgtctgcacaggccagcttcaataaagcttgtacctcacagaaaaagtgatccacgctccttgagccacagtaaggtaagcccatggctgccaccatctgaatcactccatctattatcccaaaggcccaggagctcccagtaatctggagacagaccctctgattcatgaggatgggatagtgaagtgggtggctaacggccacgtagcggtcataagccatgagtcccagcaagagcccctcagatcccacaagagagacaaaaaagccaatttgtatgccacagcccacaaaggagatggacttcctgccagacaggaagttggctgccatctttggcacaatgttacagaccaacatgaggtccatgagggagagctggctgaggaagaagtacatgggggtgtgaagtccagcgtccaggtagatgaggaagatgaggaggacattcccacagagggccactgtgaagaccaccataactgcagagaagaggacaaggtcagtctggctgtgggaaaagatgcccaagaggaagaagccatctgtgtaggactggttcacccatcttcccatggcttagttgttcactgtcacctgagaacataagagaaattataagattgagtgacatgtctctattgtgctccaaattcttcagttcaacagcgtatgctctgagagatgcaggaggacactcgtattcctgtgacacaggtgacaggacctctgccagctctggaattggactacacatctgtatttgtgcatatccatacccagagagtggacataggatcatttcatgagacccaggactgttggacaattctcttttggccagcaaagcccaggctttccacatggcactgcctcttagctggggtcacatggatttggtcaactgtctctaacatgccttggtctatttcatgcctgagagatcattacatgtgttacaaaaaggaaagatcaagctgggcgcggtggctcacgcctgtaatcccagcactctgggatgctgaggcgggtggatcacctgaggttgggagttcaagaccagcctgaccaacatggagaaaccctgtctctactaaaagtacaaaattagccaggcgtggtggcgcatgactgtaatcccagctactcgggaggctgaggcaggagaatcgcttgaacccaggaggtggaggttgcagtgagccgagattgtgccattgcactccagcctgggcaacaagagcgaaactccatttcaattaaaaaaagaaaaaaaaggaaagatcatggcaacgtgagatgttctttagtctttactttgttcaggtcaaaaatcctgggaccattttcaacttctctatttctttaattccctaggtccaaaccatcagaaaagccccttggcccataccctcagtgtttctcagaatctaattcgcttttcccacctccaccaaaactaccctggtcccagccaccctcctttttctgatgggttattgtagcctcttccctggtctcccagcttctatccttgaactcttgagtctattgtcacagcatttgcagagagtctgctaagatgtaaagcatttgtgtaactttcctagtgaaagtaggtcaatgacatcccaaattactccaaataaagcccagttcttacagtggcaagcaaagccctacatcacacaccacacacacacacacacacacacacacacacacacacagagacacacagacagacactaatacacacatagacacacacacagacagacatatagacacacacacagacacatggaaatacacagacacacacatatacacatgaaaatacacatgcagaaacacatagatacacggagtcacacacacagccatataaacaaagacacacacacagatacacacccagagacatacagacatggaaagatatgcacagacacgcacagaaacacataagcacacatacatccatatacagaaacacagagacatacacacacacacacagagtcatacacaaatacagacatatacacagacacacatagacacagttacacacccagacacatggacacacggaaatacacacacaccccgcacgtccctctgaggtcccctcgggcccctcccttgctcgcagagcttccgggggtctcctgggcctggtgcccgcacctccatcctttgctggttttcctcggtggaatgctcttccccaggtccccctccctccctgcttcctgtctttcctcaaatgccagtcttcacagagaggtgttccgtggaagccggatgaaaacgctgaatgtctcgttctcccaggccccttcctgctgccgtttctccacggcactggtgccatctgacacccacaggctcccgtatttggaccgtccccgtctgtgagatccaccagaatgaaagcatgtttctgttcaccatgacgttggcagcccccagaatggtgcctggctcatagcgggacctcaacccagacatggtgactgaacaaaataatatgtgatggagtgacatgtggctgcaatttccattttctgc

SEQ ID NO: 318278 - DNA, 4001 bp, Homo sapiens
acgtggtgaggagacagcaggcttgggggatttccactgaatacacaagcaagcatgtctctaccctgtccctcattatctcaaagacaacttgtatgcttttaatacgtctttatgaagtttccagtgtgaggagtagacattctctaaagagaactataaaggcttattttctgtcatctgtaagttgttcatttaagaccctagggttgggctacaactgttgtgagacatcatataaacatcatgcaggtgggatctacgtctacacatagatcacagagcgaagtctcccacagagtaagcacagaataaaacattagcaaggagagttaggaggctcagctcaacgtcttcttctagtagaagtaattccaattttaaataatgagtgacagcaatcccaatgtcttatttctgcacagtgctgatttacaatgtcctatattcattttcaatgtatagtgtaaaataattagtacacaaaagattgggaggaaaagttgtttcttcatcagataaaaagtactgatgttggctgtgcgtggtggctcacgcctgtaatctcagcactctggaaggtggattgcttgagtccaggagttcgagaccagcctgggcaacatagtaaaacattgtctctacaacaatagtggatcccttactaaaaaattagtcaggtgtggggcacgcacctgtaatcccagctactcaggaggctgagttggagactcacctgagcccaggagatcaaggctgctataagccgagattgtgtcactgcactctagcctgggtgacagagtaagaactgaaagaaaaagaaagaaagagaaagaggaagagaaagaaagaacgaaagaaagaacaaaagaaagaaagaaagaaagaaagaaagaaagaactgatgtagtgtttaaaaagaccttccaagtctgagggtgtcacaatcatcataattcacgaggaaaccaagactgaaaatgagagaattattaacccgacatccctggagctaagagatggcagagccaggcactggatgccctgggttcagtgctggctgccgatcctgcagcggtccagccccttcctcagtgcccccatcacctccctgttcctcaagctgtaaatgagggggttgagcatgggagtaaggaccgtgtagaagatagaggccaccttgtcatggctgggggcccggtagtgcctaggcctcaggtagatgaacatggctgccccatagaagagggtgacagctgtcaggtgggaggagcaggtggccagggcctttttccaggcctgagcagagtgcatttgcagcacagtccctagaatgtgagcataggaggccacgatgatggagaatgggaagagaagcatgaagacacagcaagcaaatatcaccttctcaaacagggatgtgtctacacaggccagcttcaacaaggatagcatctcacagaagaaatggttcaccttcctcaagccacagtaggggaaattcattactaccaccatctggatcaagccatcgattatcccaaaggcccaggagctcccagtaatctggagacagaccctctgattcatgaggatgggatagtgaagtgggtggctaatggccacatagcggtcataagccatgagtcccagcaagagcccctcagatcccacaagacagacaaagaggccaatttgtatgccacagcccacaaaggagatggacttcctgccagacaggaagttggctgccatctttggcacattggtacagaccaacatgaggtccatgagggagagctggctgaggaagaagtacatgggggtgtgaaggtgagggtccatgtagatgaggaagatgaggaggacattcccacagagggccactgtgaagaccgccataaccacggagaagaggacaaggtcagcagtactgtgggagaagatgcctaagaggaagaagccatctgtgtaggactggttcacccacgtctccatggctcggttgttgctcctggtcacctgagaatatggacaagatgtgttacattgactgacatctctttatagacctctgctgctatgtcttcagtcagctgtgttgtgtgcaactcattagatctcaacaactgaagctttgggacataataggggacactccatatctccctaacacagcggtgggggccctcctggctcctagaattggactgtgtttatgtgctgtatgtatccttaccacaaagagaagaactgagttgtttcatgtgtcagagaccttcggacaacccccttcagcaggcaaagtcttggctgtaccatatgatacagagtcttttttttttttttttgagatggagtcttgctcagtcgcccaggctggagtgcagtggcgagatctctgctcactgcaacctccccctccagggttcacgccattctcctgcctcagcctcccgagtagctgggactacaggcgcccgccaccacgcccagctaatttttttgtatttttagtagagacggggtttcaccgtgttaggcaggatgctctcgatctcctgaccttgtgatccacccgcctcggcctcccaaagtgctgggattacaggtgtgagccaccgcgcccggccgataccgaatcttttacctgggatcacatggacttgggaaacaatgtttaacggggccgggaccatttcattcccaggagataattcatgtgtgctgtagaaaggaagggaagaaacaggagttgctcctcagtctggagtctctctctatgttctgagagttttctcatgcttaccactctattatgttcagactacagggaaaggatgttctcctgttgtgccccacgtgagaaaggaagagttgcgatggacggtgtcattgtcagtcataccgcgagtgacaggaagtcacagggccaatgaggtgaagcaatgacttggtgcccaagagtcttaagaacagtgaggtttcagttatgctggggcttagaaaataatcccttagtcagggcttcagtagaagaggctggcacatcagtataggtaatacctgcttcctaagttatctttagtagaaatcaaagtgccttctttatgagatccttgtaactgatatacttcactgggatttctgagtcatttcctcactgcttcatcaaagtttcaatggatttatttggagcctgctaataaagaggggtttcccttgatatttagccaagaattattttgtgtttttgtgtttttgagacagggtctccctctgtcacccaggctggggtgcagtggtgtgatctcggctcattgcaacctccgcctcctgggatcaagccatcctgtcacctcagcctcccataggtgcctgccaccatgccaggctaactttttttttctgtttttattagagatggggtgttgccatcttgcccgagctggtctcgagctcctgagcccaagcgatccgcctgacgtggcctcccaaagtgctgggattacaggtgtgagccaccatgtcctgccaaacaatttgtcctaaacaccttagtatcgagaggcaccagagacatgatatgattttacacggacaaagccaagtcaggaaatcacatcatgtatattaaaaaagacaaagcatccttgacggtagaatatctgaagccaaggcaaataacagaacagatcattataaacaacaagcggaaaacatcaccgtattccgactctgagtctgttatcactggcgtcacgctctcacccggctgagccttgtcttcgccctccaaggagttcccagttttccttaggccttttcatgttctatttctcatttgcctccttccgatttgtttgtccctttagccatccgggcctgcaccgtcaggcaccatcactgtaagtagcgcagcactgcagtgcttccccgcttttcctcccttaactttgtatgagtttcctactgctttgtaacaaatagctccaaca

SEQ ID NO: 318279 - DNA, 4001 bp, Homo sapiens
attcatatgttcatttcttctctattatcttctctcttgcatggaaaatatcttatccatggcaccaagctgcatgacagagactcctgttgtagctagtaagagtctatgctccctttactcaatgccaccctagtgattttgtctttttcttcaagtgtgtaaatgacatccaaacctgaaactctgcatgctccttgaagtacctctgtttatgatctccttatttgctccaaatatcggacatgaataacctctgttagagaccttagaaatgggttctgagatgtgagcgtctacggcagggtcgcagttacttagaatcgggggaactcattctgtctgcctctgggcacagtgcatctgcatggcaccacgttgggagtcattgaccttgggaaggtgttgtcattccctattaaatcttctatcactctcagtcttgcctagaacccatcccactctccataagtggacacaatacaccctcttctcaagctggttcctttggaaagttgtgataaaaaccagcacttactgatggctgcacagtgatcacagacactgagcaagaaagagtcccaagagatccctacttccagtttctaaacaaggaagggactaaaactctgaggacggccatgcgcggtggctcacacctgtaatcccagcactttgggaggctgaggcgagtggatcacctgaggtcaggagttcgagaccagcctggccaacatggtgaaactctgtctctactgaaaatacaaaaattagtagggcgtggtggtgggtgcctgtaatcccagctactcgggagactgaggcaggagaatcacttgaacccaggaatccaaggttgcagtgagccaagatcgtgccactgcactccagcctgggcaacaagagtgaaactctgttccccccgccaccaaaaaacaaaaacaaaaaccaattctgaggatgactgagggctttcctactgaccaactgccctccaaggaacagggaaagatctgtgattgaagagctattacagaaaattttactgctcattttttcacctcctaccctgagtccctgcccctccatagtactttccacagagcccccttcacgtccttgtttcttagtgtataaatgagaggattgagaatgggggtaattatagtataaaaaagggcaacaaattttccctcacgctcagaataattgtggatggattggagatatgtgtagatggctgagccataaaaaaggaaaactactaggaggtgggacccacaagtcccaaaagcctttctgcgcccagccgttgacttcaccctcagcactgcatgagcaatgtgcacataggagcctagaataagtgctgcaggaacagccacgactatgactcgggccacaaacatcttggcctctgttccttctgtgtccgcacaagccaacttcagaaatacaggcatctcacagaagaagtgattcagtcgatggccacagagaggcatggccattgcgagacctgtctggatcagagagttcacgaaacccgcaccccaggaggcgatagccagggtctggcagagatgggggtgcatgatggccatgtagtggagtggacgacagacagcagcatagcggtcaaaggccatcaccaccaggagcacacactctgtggagcccagggctaggtagatgaagagctgagccacacaccctccacgggtgatggtgcggtccaccccgcaaaggttgatcaggagctggggcacggtgctggtggtgaagcagaggtccaggagggacagatgagagagaaagaagtacataggtgtgtgcagccgaaggtctagccaggagagagcgatgatgatggtgttgccaaagagagttagggagtagaaaataaaaataaagacaaacaggatgggctccagttgcggccaatctgagaatcccaccaaaatgaagccatcttcaaaactggtgttgaaacttcccatggccttttgcctgtctgaacagcagaaggaagtgcaatgcctcctatactgagcacaagctacaacattatttcgcaggattccctgaatactaaatcatgcattttattacctattttgctctgcagtttgttgtgtctggtgttctttcccttctcttattcagagtggaaatcactggcttgggaatcatatggcctttgtttgaatcctagtcctgctgcctgtttgttccaggacttcacccaggtcagtcagtcctttagatccaacatttccttgcctaaaagtagagatgatgtatcacagcaatgagattaaggtcaaatgcaataatgtggaagctgcttttaaaagactcagatgtaacaggtagcattactattctatgttgctcccatttgctcctttgctggtctagcaggtggcctctttcagtagggttaccccccatgcctaaccaggctgggagccctgtttgacctctgggtgcccacctgcttttttcgactatggacagcccatacaatcccagaaaccccacgcacgaccagcaaatgactgagaagagtgtagatccctccttttggagaagaaaaaaaaatcaattagcaacaaatatatttcctatggtgtgtcatcatgcctgaaataccacacacacacgcacacacgcacatacacactcccttcaatggctaaatccattcctcagctgcccaagaagagttatttcctcctctctagcccaaccctctttgtacagtttctttctgcacttgtcacactcgctggaattctttttgtatgtctttgtccctctctgagctgtgagctccttagtggtagctaacataatgaacgtaaaataaatattagtgtctttcagtggggcacggtggttcacgtctgtaatcccagcactttgggaggtggaagtgggtggatcacccgaggtcaggagtttgagaccagcctggctaacatggagaaacactgtctctactaaaaatacaaaacaaaacaaaaaaatagccaggcttggtgatgggcacctgtaatcccagctgctcaggaggctgaggcaggagaattgcttgaacctgggagtcggaggttgcagtcagccaagattgtgccactgcactcaaaaaaagaaaaagaaaaaaaaaagtagtgtctttctttatgctacacacaaagtgctaaattaatattttcattcagggcacatagtagattttgaataaatttcattgagtgaaacatgaggttatcccttcaaatctcatcaaaatttatttcttctagaaaacctgagattaccaacatattttgataaactgtgaaagtgagatatgcataaaaatttgctctacgttaaagttcacatttcttatgacaaaacgtctaagtaggattataagaaagtatgtcagaaagcaaaaaagggaaaaggagcctagaatatgctctatatgaacaatttttgccaaattaactctgtcctctttttgttaagtttactggactgaagatcatcatcaatggatcaatgctagatcaatgctagatcaatgactcaagtaaggcatttggacaccacccttgatgcccttgtggaaaagatgaataaactgtggattaataatagcaaagaggtaattcatatgtagcttaaccgatacatcaaagccattttttgaatgaccaccatagcagaccacaatggctttcccattcatatcggtccctacagatcaactctattgctgaccagctgtgacatctattctgggaaattttgtttctgtgagtctcagtttacttacctataaaacagagaaaacaatttatttcaaaggatttggattgggattaaaggatgcgatacattccgtaagctacaaagaatatgttacatatacttttaacacttgtctgtctgtatcagtaatcttcaagttccatgcaactgagtctttcacttaccgttgtatc

SEQ ID NO: 318280 - DNA, 4001 bp, Homo sapiens
actattttctcttttacatgaagcatttcctacacacctcttaatcacggtagcattgacgtcattccaccagattctatctccagtgttaaaataatcaagaacccagaaatctccaccagggggcaaccaatgcgtatcaaagtttcccactttcctttagatttacttatgggtaacttatgggaaaaaatacttaagtacttccctttttaaagaaaaaaattatatgaattctacaaaattatggcagaaaatttaagaagagcagatgcttcccaactcattctaaagggccagcattaccctgattctgaaacgaaaaagctttacaaaatccaagatccattcctgactaaagataaaagaaattttcagcaaactgtgaatacagaaaactttctcagcctgttaaagagtacctatgaaaaaaattatagctaacattatacttaatgatgaaatatttaatatatttcataacaggaacaagtcaaagatgtctactctaactaattctactcagcattcaacaaaatgaatatagtgaattcatactagaattttaaaagcaaatgtctttattcactgacaacataatcatctataaagaaaatcctacataacctataaaaaactgatggaacttataagttttgcaagtttacaggatataatgtcaaacaaagatctattatgtgcccataagctaagaataaacaattgtaaattgaaataaaaatgtcacttaaaagggcatcagaaatataaaacttagagataaatataaagtacatatgcataaagtacctgttcaccaaaaactacaaaacattgctgaaagaaattaaatgggcataatatagatgtagagatgtgttgaatttatgactcattttgaacaaggaatatattcatcatatattcatcagataagaattatgttacaggtctaataacattcaaatcaatacataatgtctcatagttcctgaatctaaaatatcaaagaaagaaacataaagccatatcatgtttaatgagaagggcttattatatcatttatgagatcctcttgtaaatcactagctgtttgcatactctctttattgctgccttcatctccttattcctgaatgtatagacaactggattcagaaaaggagtgagaactgcatcaaaaatagccagaaacttgtccatctgtgaattagggtgtggccgtgtatacacaaacatgggtggaccaaagaacaaaaggaccactgtgctgtgagctgaaagagtggaaagggccttggatgaaccacctgaggaatgtttccaaacagtaaacaggatgaagacgtaggagattagaagtatgaagaaagtacccacacagataaacccactgttaacagtgaccatgaactgcaatctgtaggtgtcggtacaggctagtctgagaagccgaggaaggtcacagtagaagctgtccaacacattagggccacagaaggctaaattaacaagaaatgccagttggaacagggagtgactgacaccaagggtccaggcaacagccagaaatgaaaggcacattcttgggctcataatggtcagatagtggaggggcttacatagggccacatatctgtcaaaggccatggctatgagcagcaccatctccacaccaccaacgacgtggatgaagaagatttgagcgatgcagcctccaaaggagatgactttgcgctttctgaacaggtcataaatcatcttgggagaagtgacagagcaggctcctaagtcaatgaaggagagactggccagtagaaagtacatgggggagtgtaagtgagggtcagtggtcacagaaaacacaatgaggatgtttccagtaatgcttgccacatagagcacagaggaaaacactaggaggaggagctggatctcccatgaatgagtgagtcccagaaacaaaaactcagataccactgagtgattctctccatccattggtccagccaactgggctgtggctaaaattatgagaactaagaaaatggggaggaaattgtgattatgaagataataatatgtactaaaatcaatattgcaatgtcactatgaataaatagtatacagttattctgttcctcacatattaaaaacaaaaaatcaacataatattatcacaacatgtgagctgcaacctgatttaaacccatcatcaatactttcagtgtaatgtctgatctaaaattaacagattaggtaagaacaagattcctgactatccatgaaattcatcaggtgtttaaatgacctgtgatattaactattcctcatttccaacatattccatttgtacttatacatattcttataatttccttcccttcccagtttgcacccacaattctctgacagaaagtagacataagaggaaaacatgattaacagatggattatcactgcagtaagaggtgcctgggacggacttagttgaggtaggctgtggattgagagaatatagagactggggtatgtgaaatcggaaagcccacaactgtagcagactagagtaagtggactttcacaagaaatagaatcaccaccattatctaccacattttctcatgcttactgctatttaagtgcctcagtttctatacaatctttcacaattatgaagccctaaatggcttcccatcctgcaatgatttcataaggagcctatgccacctgtcatgtaaggctttttccatgcctaataaatatgttttggagggatttcaccagtgtttctgctaagatacatgcataaaatggacacagaggttgtgagaaatctctgcagtttctctttgtctatacacatgaaagtattgaagaccagcacttggattagttaagataatgttttaattcatcactgtctcctcctccccttggtaccagcttttatgttcattgcattccccacccttttaagtactcagtacctcctgcatggtaacctattctgatatttgatattatcatgcttaatttgactgaatccattcggatattttatctttaagaaatttgtagttttatacttttaatttatgataaaattagattaatatcaaacattaacaagtgacttttaggaaggtatatgagctttcttattgacttcaaactataaagtacaaactgtgacactagaaatttagtcctttaacacatattgtatttatatgtgaagtggagggtgagcagaaaacagtgttatatttctctgtgtccagatggatactcacctcaatcattttcctatagtagaaagtagttcctgaaaacacttaatagagattattttagaagttgctgaggtacaaataaaactgctatgctgacatcatacttttttgcaccaacaactccagttcttctgacacaaaggaccatcttcctagtgccataatttatcttagaccccaaaactcacagaggcacacatcatatctctaatacttgctcaccaccactggcatgagtctctctctatcctcttctacgtgaagtgattatactgtcacctctggagctaactgtccacagtctcaagatgcacactttttacaaccagaagcctatggactgggtgagggagcagaaacagccacaggtactgcccatcagggtaatgtaagtcagcatgcaaacaactgatcagatgaacatgaatagcaaggtgctgaggcactgggaagagggaccggaaaactctataattgttgaaaaagactcaagcccttgggaagggaaatgcctatggaattatataaagaccattttatccaagttggtcatcattcagatgaaaaccatgaggcccagaaaagtaaactgagtttccagaattcacacaattgatagaataggaaccagaattcaggcctcttgcttcctattccagaaagacaaattgcaataataatcaaataatatgagcaatcatccag

SEQ ID NO: 318281 - DNA, 4001 bp, Homo sapiens; identical to SEQ ID NO: 318280

SEQ ID NO: 318282 - DNA, 4001 bp, Homo sapiens; identical to SEQ ID NO: 318280

SEQ ID NO: 318283 - DNA, 4001 bp, Homo sapiens
tctcaaagccacctttgatacaaaaggcttagccacacctgctgggacaaacgggaactgggaccaagatgtaagtcacaaggaggcaatttacagcagagaactagctcttcctacaataaaatgtgaggtggtgagcttcctgccactggaggcactgaacaaatgctacggggaaaacaaactgagtatttcctgaagattctgaatagaaggctgtgtttggagtttgatgctttgaaagctcaagaaatgattctcagacacagcggagtttggggacatcaagggctctgagtgcattttaaagcagcccaggagagagacaaagcaagaccataatgaaacaccccacccagtcttagagtttgagctacagcacggtgatcatgagcagactccaaacccaaatcctgatactgtcacctgctagctgtgtaaccctagaaaagttacaaaacctctttgggcctcagtttcctcaataaaatataataaaaaactagtacccgcctcacccgtgaagcttaaatgagctagcatatgtcaagtgcttagaataggggctggttcacagtaagtatgaaccattattatttgcagacaaggaaactaagaggtgataagtagtttgacccatgttccaaagtcagttttaatcttgggaataaaacctaaaaatttctttctcctccatcagaattccttctagctcaaactaagtatcctacattcaattctatcttctctgccttcatagacccttccatttacttctcttgaatatcttgttcccaaagtgttttcaaggcaggtctgttaccaagccactccatcagcagcacctagcactgtgcctcccgcagcaaggcaggcaggatggatggacggatgcaggcatgcatgggtaggtggatgaagggcagatgaagaactatcgagaaaggaatcgcggtgtcaggggtaaagccctggcctgcgagagccgggctcggatttcagtgccctcacagctagccatatggccttggacaagttactgaacccctccgtgcctaggtttccagaatgtagagggccacttccactcaagtggctggagaagaaggtaagcgccccggacggacgctattgcagagtcgcccggggattcctctctccacctgtgcttgagctcctcccgcttctacgctagggaccaggtgggagagatacacggattcccagaaaaatggctctctcaggtgggagtcaagggttacgagaggagaggtaggggaagcaatgaactcctccacacgatgtgttgggagagaggaaagagggattcaagtgggaattttccactcaacaaacattccaccatcatttgagaaaaaggcgctgggatggtgaatttcaaacagtctgagaaatgggcgactcggcactgtgcggcctgtaaggaatgaatcatttagttttcacccaccaggtaggcaggccgggggcgaggaccctccgagcgccgtccgagcgcaggtggtagcccagccaagcaaacgctgggcagaggcggcaccgaggaggggaacgggctgctgcactcccggtcgcgtccagccgggatgggctgcgaagttgtcggattctttcccgcacagcacggggctcgcccgtcggaaaagccaccgagggcggcgcagcggcagggcgcgagcagagcggggacgggcgggtcgggggtactcacgccgcgggcgaagggctccacgagccgggccgagtcctcggcggcgcgtggggcgcgggtgcgggctccggggcggacgtgcagaggcggcccgggccggggctatgaatcagctgcggggcaagcgcggaggggcgggagttactggaaaaccgcgggggagggcagaggggtgaggtcttttgcaatttcccgtcttgctgcgcactcttggcactcctgggacccacaggaattccctcccttcagtcccggggggaggcggccgcgatcctgggggaggcgcagcctcacaacccggactttgcgggcgggcgggcactggtgagaagaggaagtgggagaggcctgggaaggaaacttggaaaccgaaaactcggcggccgaggctccgtgccccgcgcgcagcgctgctcctgccccggccaaggacgcacgggccagccggcggaaccagaggtaagccgagtgaccgatgaggcctggggctgtgtatcccacaggggcacttgtcatcccaacccagaggccaaacccgtgagatccccgtccgaaaatcttcaggcaagagaagtcctttaactaaattttggccgtgtttccatttggcgtccagagcaacgaaaacgtgtttgaaccgaatcaaacggtccccatttttcccctactcgcgttctatccagaaacgccctgtccgacaaagtttcttcggctacaacagtcccgaaacctttatttcccaatgctacgacatgctacacatggtttacttttccccttaaaaatgccatccaatcttcaacctttttttttttttttttttgagacggcatctcactgtgtcacccaggctggagtgcagtggcgcgatctcggctcactgtaagctccgcctcccgggttcacaccattctcctgcctcagcctccctagtagctgggactacagacgaccgccaccacgcctggctaatttttctatgtttagtagagacggggtttcaccgtgttagccaggatggtctcgatctcctgacctcgtgatccgcccgcctcagcctcccaaagtgctgggattacaggcgtcagccactgcgcccggccaaaaatgccatccaatctttaccgtgtctgggcctttgaaaggtgcatttcacctctcttagaggataacaggagccttccgaggcagcctcggaccgggagctcccatagcctcgcctgtctggatgcctgacaaatcagcaggcaaggggccttgctccagatcagctgagcctagtttggtttgagtttggggaccctggaaagtatcacaaaagcaaggttgtaggaggggggtgggggagggaaccaagagtgatcaacaagtatcgaccataaacatatcttagaatcctatattgaattgactggatgactcaaaataatgtcagaattattttaaaatgttacttttgtgtttgttcacatatctggctcctccccaatgtcatcccaaggaaagctgagagtccttttgtttttttatttttcctaaaacaaaggcctaaaggccctaatacacttaatacctaatggggccacaaagaccatgatgcatagtaaatatttgatgataataaaatgtatttttgtctcaataaatgtatggtcctttgccacacctctcattacttgaagagttttaaagagtccattagtttagccatctgcatggttatggaaactgccaagcccaagagttggaaagtctttatgattttatattttactgagaaaaaaaattattctttatagaaacagttaaaagggatctctcttctagcaaatgagatgtcaaataaaaatattcagcccagtatgaatttctaaaaagtgaggcttattttgggctcctattgcaattgaaggagactgaagtgtaaaaatttggtgcccacatataatttatctgtttttgcaccattctaatttcttaaatttatacgttattctagaatctagatgcagtagcaccatataaattcgcgattatacccttaacagtgggtgcactgggtccataaagtcagatccacccaaaacctccaaatatcagtttatttggaaataatgtttttgcagctttaatcaagttaacctgaggtcatataagattaatccagtgtctgctgtacttctgaaaaggggggaatttggacacagacacccagaaagaacactgtgtgaccactgagacagatcctgcttatgctgactcaagccaa

SEQ ID NO: 318284 - DNA, 4001 bp, Homo sapiens
agatccaggaacacctctgcatgtgttcctggtctgttcaggttaaagaaaagggtagagggggaaagaaccagtgtttatgtgttctccccaatgcggctcgggtccctgcggaagaaacacccaagaccagcctttttctctcaaagccacctttgatacaaaaggcttagccacacctgctgggacaaacgggaactgggaccaagatgtaagtcacaaggaggcaatttacagcagagaactagctcttcctacaataaaatgtgaggtggtgagcttcctgccactggaggcactgaacaaatgctacggggaaaacaaactgagtatttcctgaagattctgaatagaaggctgtgtttggagtttgatgctttgaaagctcaagaaatgattctcagacacagcggagtttggggacatcaagggctctgagtgcattttaaagcagcccaggagagagacaaagcaagaccataatgaaacaccccacccagtcttagagtttgagctacagcacggtgatcatgagcagactccaaacccaaatcctgatactgtcacctgctagctgtgtaaccctagaaaagttacaaaacctctttgggcctcagtttcctcaataaaatataataaaaaactagtacccgcctcacccgtgaagcttaaatgagctagcatatgtcaagtgcttagaataggggctggttcacagtaagtatgaaccattattatttgcagacaaggaaactaagaggtgataagtagtttgacccatgttccaaagtcagttttaatcttgggaataaaacctaaaaatttctttctcctccatcagaattccttctagctcaaactaagtatcctacattcaattctatcttctctgccttcatagacccttccatttacttctcttgaatatcttgttcccaaagtgttttcaaggcaggtctgttaccaagccactccatcagcagcacctagcactgtgcctcccgcagcaaggcaggcaggatggatggacggatgcaggcatgcatgggtaggtggatgaagggcagatgaagaactatcgagaaaggaatcgcggtgtcaggggtaaagccctggcctgcgagagccgggctcggatttcagtgccctcacagctagccatatggccttggacaagttactgaacccctccgtgcctaggtttccagaatgtagagggccacttccactcaagtggctggagaagaaggtaagcgccccggacggacgctattgcagagtcgcccggggattcctctctccacctgtgcttgagctcctcccgcttctacgctagggaccaggtgggagagatacacggattcccagaaaaatggctctctcaggtgggagtcaagggttacgagaggagaggtaggggaagcaatgaactcctccacacgatgtgttgggagagaggaaagagggattcaagtgggaattttccactcaacaaacattccaccatcatttgagaaaaaggcgctgggatggtgaatttcaaacagtctgagaaatgggcgactcggcactgtgcggcctgtaaggaatgaatcatttagttttcacccaccaggtaggcaggccgggggcgaggaccctccgagcgccgtccgagcgcaggtggtagcccagccaagcaaacgctgggcagaggcggcaccgaggaggggaacgggctgctgcactcccggtcgcgtccagccgggatgggctgcgaagttgtcggattctttcccgcacagcacggggctcgcccgtcggaaaagccaccgagggcggcgcagcggcagggcgcgagcagagcggggacgggcgggtcgggggtactcacgccgcgggcgaagggctccacgagccgggccgagtcctcggcggcgcgtggggcgcgggtgcgggctccggggcggacgtgcagaggcggcccgggccggggctatgaatcagctgcggggcaagcgcggaggggcgggagttactggaaaaccgcgggggagggcagaggggtgaggtcttttgcaatttcccgtcttgctgcgcactcttggcactcctgggacccacaggaattccctcccttcagtcccggggggaggcggccgcgatcctgggggaggcgcagcctcacaacccggactttgcgggcgggcgggcactggtgagaagaggaagtgggagaggcctgggaaggaaacttggaaaccgaaaactcggcggccgaggctccgtgccccgcgcgcagcgctgctcctgccccggccaaggacgcacgggccagccggcggaaccagaggtaagccgagtgaccgatgaggcctggggctgtgtatcccacaggggcacttgtcatcccaacccagaggccaaacccgtgagatccccgtccgaaaatcttcaggcaagagaagtcctttaactaaattttggccgtgtttccatttggcgtccagagcaacgaaaacgtgtttgaaccgaatcaaacggtccccatttttcccctactcgcgttctatccagaaacgccctgtccgacaaagtttcttcggctacaacagtcccgaaacctttatttcccaatgctacgacatgctacacatggtttacttttccccttaaaaatgccatccaatcttcaacctttttttttttttttttttgagacggcatctcactgtgtcacccaggctggagtgcagtggcgcgatctcggctcactgtaagctccgcctcccgggttcacaccattctcctgcctcagcctccctagtagctgggactacagacgaccgccaccacgcctggctaatttttctatgtttagtagagacggggtttcaccgtgttagccaggatggtctcgatctcctgacctcgtgatccgcccgcctcagcctcccaaagtgctgggattacaggcgtcagccactgcgcccggccaaaaatgccatccaatctttaccgtgtctgggcctttgaaaggtgcatttcacctctcttagaggataacaggagccttccgaggcagcctcggaccgggagctcccatagcctcgcctgtctggatgcctgacaaatcagcaggcaaggggccttgctccagatcagctgagcctagtttggtttgagtttggggaccctggaaagtatcacaaaagcaaggttgtaggaggggggtgggggagggaaccaagagtgatcaacaagtatcgaccataaacatatcttagaatcctatattgaattgactggatgactcaaaataatgtcagaattattttaaaatgttacttttgtgtttgttcacatatctggctcctccccaatgtcatcccaaggaaagctgagagtccttttgtttttttatttttcctaaaacaaaggcctaaaggccctaatacacttaatacctaatggggccacaaagaccatgatgcatagtaaatatttgatgataataaaatgtatttttgtctcaataaatgtatggtcctttgccacacctctcattacttgaagagttttaaagagtccattagtttagccatctgcatggttatggaaactgccaagcccaagagttggaaagtctttatgattttatattttactgagaaaaaaaattattctttatagaaacagttaaaagggatctctcttctagcaaatgagatgtcaaataaaaatattcagcccagtatgaatttctaaaaagtgaggcttattttgggctcctattgcaattgaaggagactgaagtgtaaaaatttggtgcccacatataatttatctgtttttgcaccattctaatttcttaaatttatacgttattctagaatctagatgcagtagcaccatataaattcgcgattatacccttaacagtgggtgcactgggtccataaagtcagatccacccaaaacctccaaatatcagtttatttggaaataatgtttttgcagct

SEQ ID NO: 318285 - DNA, 4001 bp, Homo sapiens
gaacgcacaggcagcctgaaagcagcccaggatctcgacaggggaagggaagaccctgctccctttgcccaaatcctcccgccctgtccttgccttctgtcccagatcccaagcccctcgtacctgcactcgggactcggtcagcccgatacgcagtgccagctcctcacgcataaagatgtcggggtagtgagtcttggcgaagctcctctccaactcgttgagctgtgcgggggtgaagcgcgtccggtggcgcttctgcttctgttggccctgctgctggccggcttggctggggttcgggccgccctggggcccgggctgcttgtccgggtctttggcgctcaccgccagcgaggccggagtagagcccactgtggtgatgtcctccccgggcagcagagtggctccctccactgggtcagagttgggcgccaggtcccccggatggcccccggggtcggagccccccacgcccagcctacacttcaccgcctcccggtggcccagaagctcggcggcatctttcatacctgaggaggcaaggggatcgcggtcactactttcttggcgatgccaggaggggctgtcttccccgcgcagccttccttcaacccgtcctcggccccctccgcacccgcgcttgtcctaaggaagaaactcccagggtattcagctgggttccccagaatttggacagccgggttggaataatatctcccggccccttgccctcgccgcagccggctcccgtagtaaacagcacaagctttcgtctctcccacaataaaacactcccagtcccggcaataaaacatgcctctgaatcccttccataaaccgtaccccaggcgccccaggaaatcgagagcaaatctttggacacaggggtgcggggggcagaaagaaaattaaacaattcctcggttgctgcggcacctgcgcttcggcagcctgacgaactgtacctccggccctcagccgattccctcttactttcggaagatgaataagcctccaagctttcaccccccgaaatcaacccaaatcagctccgcctccccctcaaatcagagaaagtgtttggaaaatggagtcacatccatcaccgaagattcccaatccggaaacccagagctcagcaacccagatagcattaaggaaactcgagtgaactctatggacaaccgtgaatcaaactttagagatttcaacttttctttccagagaaataaaaggcgcattcctcacagccattggcaacgctgagtcccttgcagaagagggggggatgactgtgaggttgaatttggcttctctccttctcaaccagcacacttagcaaatccgccttgatggcagcagcttctcctttatgccagattttttacaaattacaccacacttagaaaaggaggagagaagaagatggtggggagagagaaacggggggagggaaggagaaagaaatcccaaatcaaaacaaacaggagagggaaaaaagagagagaaacacctcctaacaaattatcacggggtatatcgcctttcgaaaaaaaaaaaaaggcgggggaggggggaagagaaaaataagaaaaacaaaaagtaacaacattccccaactcctttcttggatctacatattccatagatttttttttaaaggcgatgttaaatcaaattaaactttaatgcagcacaattacttttaaagaaattagtccatttaggtcgcattaaggtaaaataaggaacaaattgacaatttcctgccccggcttctcctggctgcccgggcgagaggcgcgcactcacctagcctggcgtccaggaggtcggcatgagacagcatcgcgcaccgctccagggcgaaagctgttcccccccaaattttagcggctttaagttatttaaaatagatataagctataagctatacgatatagatatatatagatcacctaaatgaaagaaaattcggtttgtggttaaaaagggggcttcttgcattataatgtcctttagagagacggggaggtgcttaacagttgaatgaacccgtgagcagctcggcgaggggaccaatcaggagggcagcctgcaaatgtcagcgcccggagagtcccccactccgcccgcccgctcgcctgcgcccgcctgaaggaggcggcggcggcagccctggcagctccagcccggagcaggagctaaagcagcctcagccgcctcggcctcgccctgagcttctgggcccggctccctctagttcttccctgcgattttctccaggctcccctttccttccccttggccggcgctgcgcgcttcgaaggcgtagctctgtgcctctgagctaacatcttcctagggcaggggcagagcaggggtcagagcgggccatgaccctggcgtgacctgagggtcgcccccacctgcgctctctgggcctgccgctcatattggcccgccagcccagggcgcgacgagggcacaccgcggccttcagacaacgcctggacttcgccgcggctcagtaggcctgcgcctagggtccaggcgccctggctgtgccctggggtctatacgagccccaaccccacagtgggcctagagcgcaaagaggagtcggcttccctggcaccgccagcgcccgctgtctgctttggggaccctcgcggagtgtgggttcgagcgctctgcactcttctcaccgggcttcttcccggctcctgctcttccgcttggcccacgcccgcatcctcgcccctaactcgctcttttggtcaaagtttctaagttcagctcggctcccaactccacttaaggctgtaaataaagttaaatgctctttattttcctcttgaatatgttaaactacttgaacaatttaaagtgctttgcacaagtgaagcgaaccatttctaatgttctgatttttcagagccagccaacaacaaagtttagattagtaatatatttctaaccagagtaattttcaagatcattaggcatttatgtaattagtgccaaatctataagcttttattacgattattagagtaaaatcagtataaatttgtactaatttactactgtttagacttggctgtcaagcctagaggttcttattgtaaatgataactgaggaaattaagtgcaaaattctgtaccatttctgatctgctcctaaacaatccgtttcaattgtatttgtagcagaacataatgcccttttaaagttatttgacttgtatttttatttgcaacacaagaaaaatgccctctacccagtcacaatgaaaactgatatttactactcccaacttgattaacattgatttttaattcgagagtgatgcaattaagattattcatttagtgcaaataaaccttccacaaaagggtggcccaatgaagtctgttttaaataatactgagcaaatggctttttttgttcgccgtccaattgacttagacaaaacattgaaaatgctggctgagagcagatgcgagaggaattgtgtgtgtgtgtgtgtgtgtgtgtgtgtgtgtgtgtgtcctcagctgtatgtgtgacagggaccgagcaaggagacaaaggaggcggcaaagcgaactctcgggcagttttgtttcctccttccctcctgcagcccgttcgcctcctctcctgcacacacacgtgcgcgcgcacacatatgcacacacgtgtgaatgcagggtattggccacaccagtttcttctgagctgcggagaccgcttcccgggaagctccgggccggactgggtttcagcggctgctgcagctgctaccaacgcggcctatgtgggactgggcgccggggtcgtggactcaggctcgcggcgtgtctgggagccgctagggtttttggcaagcggccgcagcccttctgagaaacgctttgcctgggaggagaattccgagacctaaagcaaacaaagtctccccaataaaagctttctttgcccccaaacaaaa

SEQ ID NO: 318286 - DNA, 4001 bp, Homo sapiens
taaggaaaaagcaaaattaagctgctaaaaaccacacacacaaaccgggacatctactgggaagcaaacttgggaagcaaaccaaggggggaaaaaaagtgaagttggctgtcactataaatcatgtctctctgcctggttttgctgaggaagcccagaagaggtagggggaggttcccattgatgcatcagggtctctccagccaagctacactttaaaaatctgtgaatgtgtaaaatgacaaacctaggctagttttttttttacattcctttcagctctaagtctatatagttctactagcagcagacagaagaggcacctgtgccacaaaaactcttcaagaaagagcactcttcctatcattgtctgttttcacaggtgttctgaatgagaatcatgtccaccagaaaacttgccaaataactacatatacttctgagaacatggtctggcttcaaagtttctgcattgctcaggaggcatgacacagctggggccgaggtgcatgcagcacgtgagacagggcattaaattaagcgcactgttctcaccaccagggtagaaggcaggcaaagcagcgattaggaaccagcacgggccgtggagcagggcttgggggcaagagaccctctatttaaccctctgcagagtctgaggttaagtctctgatatgatttggatatttctcccctccaatctcatgctaaaaggtaatcccgctgactttcaatcttattttccagtggccattaacccattaagtgtgaataacaccatcccaagggggctctcaacaaatgagaatgtctaagtactatgcaaatatgttattataacacaatatctacctaacaggcctccaaaggacccctttttaggaatttttttttcaaaagttctagcagtgctttttgcatttaaacacatcttaaatttaactttccagccagttaaaatatctgtcaaactggctgtctgtgtgctttcataatttcttaaattccaagggcatttataggtgcctaaaacttgaaagtgtagaaaagtttcactcgagtttctattctgcttccacgcgtacccccagacccttgcagaaattaggaactcttcccaaatcgtcgtcttcacagtacagtaagaaattgatctaaccagcactgactttccttttcaaaaggaaaagcgggaaggcatactagtcaggccgttaaagggtcagagagaatgggtcagattctctttgggtccaaagtctgtccaacaggtgggacgtcgcctccaagaacaagtcgcgcagcgccgttctccggcggctgcagcagggtcgacctcacttcctccctgtgccaggctgaaggaaagatctagcgggaaccagtaataaaatacatcacttctcgggtttgcttcccaagtttctggaactttctttaacttcagacatgcagatatcaaaaatgagacgagaggggagtcactgtgtgaccagaattgtgaggggccctggggttaaaaatctgcactcggacactgggaaaactgtctgccaattcctccttgtcgccaacggcctcactcagaattgaagacgcccaggaccctccgctgacgactccccaccccagcccggcttccggaggggaccgagcccgccgcccacggcccgcgccccgcgcccccgcggactcactgctcggccgggcactgcatctcgggccgcggctgcccgctggccgccgccttcccgccgtcccgcgccgtggccgccgcctcccgcgccggcgtctcggcgcagctcgcgcctggccacgcttcgggctggggcatagtcccccgactcatgcggtcgctcgcggccgaaggggttcagccggctccgaacgatccggagcccctcccgtcggggtgccaggcagtggccgcagcctctcagccgccggggcggtttccgagggcccgcagagcgcttccgcgcgcgtcaccgtggcccgccccacggcctctgaccctgcgcgaggaggtgcggccggaggctgaagggcccggacgcggcgcatgcgcatacacgtgtgcgggctgagtcgccggggcctggagggggaaccgcgcgctgcggctgctgcgcttgctccgtccccggacgccgctggcttgcttcccttgtcagctgtgtggggactggcagagggtgtgagagcgggaaacgaccggacgagcggcggggagcgtcctgggtgaggaggaggaagtctggtcttaggtgtgaaggatgctgacgcgttccggcgcgtcgcggtgccactctcggcttctgagcgttgccctacgccgcagcgggttttcctcagctgtgaagcgcggctgcgtcctgcccgggcttccccccgccgggacggttccaacgcccgagcccagcgggcttgggcctccgctgtcgggccaggctagttgctccggggctgggagttacggcaccggggttggggcggagaagacgaactagttcaactcgacccggttaagcaagcgcagcagtgtgtgttcttggatcatagtatttcatgtaaacattttgatttaagagaaacaaaagggaaaatattaaccgttttcaagcatccaaaggcgaaatgcttcatctctgggatggagtagaggagtagcctctgcggttgagttgcagtcgtgggtgcaagaagcagcgctgaagcagagtgcagccccggaatagggcgggatggaatggcctgggcagttcagaaacccgcgaggagtccagggcggaacaggtagggagcaggggattgtattgaaagatgaaactgaaagaggggtagtggagaccagatcatgaaaagccatattaggctaactgtggcgcttatgcttaatcctcattgacagatcttgagatcattttgaaaaatcactttgtcttcagtttggtaaaagtttggagaagggcaggacttggaagaccagcttagggagactaaatagtagtgacctccaagggagaaactggacagaaagaatatttatatttagtgccacagaactccgggggtattgttttctcctttaattttacttgaaaaagtaataaatgcacatactaaaaaattcagagtgtacaaaagaatatacaaagactattaaggtgtgggattgaggagggttgaacaggatcccccaaaattcacgtccacctagaccctcacgatattaacttacttggaaatagggtttttgcagatgtaattggttaagatgaggtcatactggtatagaatgagccctaaatcgaatggttggcgcccttagaaggggacacatagataaatgtgcacagagggaagaaggccatttggagatagaagcagggattggagtgatgcaactggaagccaagaaacgccgcagaatgccaggagccagcagaagctaagaaaaggcaaagaaggattattccaaagtgccttccgaagaaggttggccctgccaaaaacctgatttcagacttctagcccccaaaactgcaagagaataaattttgttgtttcaagacacacagtttgtggtcctttgtcatgaccaccccaggaaactcatatagggatcaaggtggaaaggttataaattccgtcaggccaaatttattgatatggacccaccagagattctggattcaatgttttatctcagaggcttagaaaaagctctaatgctatgtttaatcgctgagtatgtcttttccaattatgcatgtcaaactaggaaaataaccacaggatgggtttggggacccactgagcccaccgtgagaaggatctgagtgaaaactccattgatagtttaacctccatccacccagaagggcctatgctaaatgaagttgaagcgacagaactgcctaggtatctgtagagaaaggtatccacaggcttggggagattggaatattagagtggatttatcatttaagacctgctta

SEQ ID NO: 318287 - DNA, 4001 bp, Homo sapiens
tccagcctgggcgacagagcgagactccgtctcaaaaaaaaaaaaacaataagggcactaagagccacaagctaggggaatagtggaaggcaggagttagacctatgataatcaagcctgacagggctaagtttgaactctgtatgaacttttaatgagatatagcagaaccccttatttgcatctcgtccctctaagatgaggtttgctgagcttcggaaatggtttaatgatatactcaagatggaaaagacttgaagtgagtaaattacagttgggcaaatcagtaactgtcaaaagaaggaacgttcctgacctcggcccaagggtatcgctgtgctctggtttgtattagcttcagcaccgctgcaatctcactgaaggtcaagttcccttttaataatgctttatatatccaagtctatctgcagttataaaaatgcttcctaagaggcatttaagagtaaaatggtccagttctgaaccattccctagcacctaccgaaggagctcagtggctcctctgtgttctcagcggtcagggattggatgcaggaaagagcaatggggccaggcaggcacgcttcaggagtaagcaccgtgtgcatggcacgctgtcaagctcagacctattactgaataccaaggaagaggctcccgcgattgagacggcggggataaagccaccctcctggacctggcgctctggtcctgtaattcgctcctagggctccagacaggggtgggcttacaagcgaggacagtgcataaggcaaaaccacaagtcagtccacggtgggaatgcctccggataccactcggtggagagtcggcagtggggcacaaaaaggatttcaaagggctctgaaaaccgaaagcccctaacccggatacgaggggcctcgagagaaaggtttgtcctcccctgcagcccaggcgcgggccagggacacacctcggatggtttcccagcttggccggcaagacgccctggcgagcgctccagtctacggggcagcagagccaaatagggaggagaggatgggagcggcattccacacccgccgcacccggcatccagccccggtgaactcgagcagagccatggctaacccagcctcaggttctgggcctctagaggttcctctgcccagagatccaacatcgggggcgcaaacctacccgctgttgcctcactcctaaacctccatatactggcgccctcctccccccgttcagaccctcagagtccctatccaagggcgggtgccaggagggaagccgacgagcgccaaagggctcgggagcgctgccaggagtcctcccgccccttctcagcctctccgcgcgcttctttatcgcgtctcgctccatcagggaagcgactgcagaaccaagcaaaggcggtcatccgaggggccggcgaggccaggaacgcgtcgccgcgtgtccgtgaccagggcaccgcgccacggatgccagatcccaggctggagagagcgggtaggggcagagaagaaaacgcgggcaccactcagggtttggtccacgttcttcctgcccatggccttcctcttcccccgcactttaccttgtaccaggttgccccagatccgcgggcagaggcgcagagccgaagcccggaggagaggagtttgagagccgccatcttcgggcggtgaggcaggaggaggctgcgggttggagcgcgcgtttgagcgtcggtgcgcgactgcgaaggaaacccgggcgggctggaggctcgacagcgcgtcgatgacgtcctcccggcctttcgagccgcacgccaccggcgcgctgctggctgctgcttttaaaagaagtgaggctgggcggggccccggcggggagaagaggctctgtgcagccggggcggatcgcggggaagttcctctcagcgcctcaggtgtctgggcgtgtgcagctgtgttggcgcacacttgccgctacagcccttctgtcagccctttagcttcgatggggcgctggtggccgcctccccctaggttgtggatgagtcttggcctagggttcagggccctccggccgcgggaggatctcccgccaagcttgttgcttttccaagttagtgcctggcgtgtgtgtgggctgcataggggcacccctcgaggcccccttctcttctcccgcctggactgcgttcacgtttctaacatttctcagccccttctccccacatctggccttggcttacatagagtaagtttgctgtgagcacttgcctcgaactgtcggtcaagaggtgtgagcaacaaggcttgcagaggaacaagattaagactggacctctgtgacctgagtttagcacaccttttcttccccatcatccaagtttgcgaatttcgggctctttctcgcactggagtcccagcaaccccagagattactaaagatgcaaccataaaagcagtatattgctttaaccttaggcaagttagataacttccctaagcctcagtgtcctcatctgcaaattaggattgcttgtgatacaacgtcataacgtttctatgagttaattcatgcaaagtttatggccttattatgaggagtcaataaatgttaggcattattataagtttattccattgtagcagttcattgacatggcacgtacatattcgccaagccttgtcttttgaccaactccttgaggacatgagccacgactgatttctccagaactgtctttgcacttagcagagtggaaagaccaagtggaagctcaatagcattttatttgattaaggcctgaccaagttctgagaatgtgatgttagttttgaaccaaagcaaagcacacaaaaattaaatgagatcttagcttccttagcaaatacagtaaggtaatgaacagtgaagatgcagttcaaagtttgtccataaaatcatttgccctttcatggtattcttttaactctgaacttttttttttcctgtaaatattataattttagtcaaaatcagttaaggagtaagataccaagttagactattcaattacactggagaaattaacttattgctagttggtatttcaacacattttaagaagttggattggggggaaattcaagtactgtaactaaagtcccataactagtgataatttagcatatagcagctgttgtacctttaacttacacaatgtgaaaaaaactagcattccaattgagtctgcttttccacttttgcccattgcgattgggtctgcttttccacttttgcccttccacagggcacatgaaatggaaaaactgcattggcaactttgccggtggtcatatgactgactcttggctggtctcactttgttgctcttggctgaggaagacacattttaaatgttgcatgctatgtgactaagtctcctgagaaaatcaccctaattactgtatggtcaaaacacactgtactgtatttttgatgactgtgacttcattttatactttttaaataatgtgcaagtctcttcaacttgaataaattagattacaaattacaaaaaaagttcttatgtgctgatttcacttctagttacacaaaggcacttcaattttaattggtgtgcaaaattttacttcttttaaatatctgaacttttccgaactagtaaggatatttcccacttgctttgaaaggcagtttctggcaaatatgttatattctggaaacctttctttgtggaatcttacagtttaacttccacacttttaaaaactgggagaattggattcaaagcctttaaacaaaaggtctgattccagtcatgcaatgaggaaagatttttttgtttgtttttttgtatttttttttgtttttttgtattatgttatgatacgtatgtgtatgtgtgggtgtgggtgtacatacaccaagtcatgtgctacataacattttggtcaataatggacagcatatatgatggtggtcccataagattataataacatatttta

SEQ ID NO: 318288 - DNA, 4001 bp, Homo sapiens
tgggcttgcatgtacttgcatcacagcttttcctgccaacttccatctgcataatagtaaactcttgacagaccccaggagccagggacacacctcctagccctctgcacactatcagccagcgtggccacacatcagccaaggccttgcttccagtctcagaccctcccaaggatgtgggagggcagagtgaaaaagggaggccttcttaggaaatgaggagaccctagattccctcaaccgactcattcctcagagctgcacccacgtagtctcttcctttgatgagcactcacagccgggctcctcccctggcacatggccagctgccaatatgaagcagcaatctcagagtacgagctacccacaggcaagaatagtgcctcggccacctcctctctctcgtccctcattctagccccaggcacgctccagtcagaagccaaacaggcagaaggcactcaagggatgaactgagatcagctggggccagtctaaaccggtgactaagtaagcactgtctagagtaccccaatgcagagctttcgacaggatacaagggcctatcacatgccacagacaatgcctcagctaagctgtcaccaagtctgcctgctgagctctcagagaactagggtgatccagtatgacagcatctttgggatgaggcccccagccaactcactccatccttgctacgtggcttcattggctgggccacacagtggacactcggctgtgtaagaacaaggaggccctaaaagaaaagaattcaaagaccaaacattctgtgagtggggagaagcaaccagagagactgggcgctgaggcccagaaccacagtgagaggctgcaccttggacacctcaggggcagtttaagtacaagccaaaggaaatcctagttcatttaacagagactaaattatggaacctaatgtcagatgagacacaggctgagaacaagcagcagaccccaaaaacatcctataaattcttaggtggacaatggatctccacaaagtctgggacatttaagaatgccccaagctacaacgtaacggactccagcccttgctcctaggacaggatttcctacaagagggctggggctgtgaggccccaggtagtctattatcaagaagcacaaatctcgggtgtcactctacagcaaaagacaacagtcacagtcttgggagggatcccaatgctctcctgcaccatctctcttttttattttttttttaagatggagtctcgctctgtctcccaggctggagtgcagtggcacgatcttggctcactgcaacctctgcctcccaggttcaagcgattctcctgccttagcctcccgagtagctgggactacaggcgcgcgccaccatgcccggatagttttttgtattctcctgcaccatcttaaagtcaaatagaatacaaaggccagggacccacctgggctgtccagcaatacctgaggcaggaagtgccctgatccaggctcctgctgcgaaggtcaactgggcatcttacacatgcagggcacagtaccaggcacgttatctcactccagggtcttgtagacagcgtccgtggacagctatcccctacagtgttccttccccatcaccttgcttccactacaaggccataaggaatggcattggccaaggtctctgctcccactcacataggctgttcctctgtccacgatgcccttttgccagccttcctctgaccactccagctcatgggtcacctcctccgggaagtcctctggccggaggcagtcagtgctctaccaagtacccactgcccgcattcccttccagcacagcgctcaccacactgctctgggccaggaccttcccgctcttccaatccgcctgtcccactgggttagcaactgcttgcggtttctggcacacagaagggtcccgtttgttgaattagttaacgaattatcacgggtctccgcagctgccaaggaaaaacaacgctggttccacaaggatgtctgggggagaaaagactttctgatccaatggcccatctaatgggctccaagctggaccctgcccggacaagacctaggactcccagcccttgggagggtgcagaacgggcttagccaatatgaagaggcccctcagggccaggcggacgccgcgcccccgctcccaacagccggcagcccggggtcaggccgccacttcccgggagcctgacagggaagagcggccaagttcccagccccgcccgacagccgagggaactgcacgaagggcgccgctgacctcaccaccctgagctcgggaaggcttgcgggcggcggcacaagaacccagacgggtgcagaaacagggcggagggtgcagggtggcggcccggactgcgctgctggcggctagcggcgcgacccccggccccggatccggccccggcccctaactctcagccccgcgcgggcagaacgcaccgcctggcgaccccagcccgcgccccagcgctaaggttgatctggcggctgagcgggcggggcgctcacctggacactcgcagctcccggcgtttccagaacctcccgcggcgtcgcccggtcagctcggcgcctcctcccttggcgactccgcctcgggccgctgccggggctccgcccacttgagccgccgccacgtccccacctcacgctccacacgcctgcctgcgtcctggtccccagctccggtggctccgccggggttcgccgtcctctgcgacccctgggaacgcccaggctacccggcctcgcgggagccggagccggagccggagccggagctggccgcccgcgcccttcatgccgcccgcagcccaccgcacgtactccgcgcccgcctggctttggcgcccccacctgcgggccttggcccgccctcctgcccagcccctgggcgtctggagaggtcgccacgacccgatcccctcgccggggctgtagggagagcgtccctggaggctgacggatttccctgcctgcgctcatgcccattgcctggggggccctgccgggtacacgggccccttcttcccagcaccaccacaaggaggctgttacgggaggctggggtcaccccggctaggaactgggtatcaggagaggaggcagaacagtggagaagaccctgaggaagactagggacctggggcccaccccctggagaccgagattgggaggcccattcccagggccgagctctcagtgggtttcagagagtcccgggctctggtccaggcagtcctggtggcatgtgcaggggtgatggattgatgagaagggggcccatcaaaggctgggtgggggcggaggcgggggggcggtaacaacctggggcacactgggttgcccaaacccttctttatgccatgggccaaaaagagtggacacctggttcagccaatccagtctggaagggaataaggacagagatgcagcaaacctcagcctgagcgggaggaggccctggcggccaggcaggttcccacgcctgctctgtgaaccttcctctcatgaatgaggggaagcacggtctgagaatctcatcagggagcaagcccagagcgggagatgcccagcctccgcccaggcccagtgtggatattccctacggcacacgggccaggcaggcggcccagacctggggaaagcaggagcacgcacacggaaatacacataaaacatgggtgagccattgttcctgcctgcgtcagccaccggctcgagcccggctaaaactacacaaaccctcctgcatctgctacatccacagaagcttccttccatctcctcccccttctcaggagtttgccccatggaacatcccttttctctcctgaaggctcaactacccgctctcaactggatctttcccattggcctgtaaatgtgttcaagcctctactatgggaacaaaaccctcattcgaccccactgagtgtctctgttctcaaccgcagcggaat

SEQ ID NO: 318289 - DNA, 4001 bp, Homo sapiens
tctcagagaactagggtgatccagtatgacagcatctttgggatgaggcccccagccaactcactccatccttgctacgtggcttcattggctgggccacacagtggacactcggctgtgtaagaacaaggaggccctaaaagaaaagaattcaaagaccaaacattctgtgagtggggagaagcaaccagagagactgggcgctgaggcccagaaccacagtgagaggctgcaccttggacacctcaggggcagtttaagtacaagccaaaggaaatcctagttcatttaacagagactaaattatggaacctaatgtcagatgagacacaggctgagaacaagcagcagaccccaaaaacatcctataaattcttaggtggacaatggatctccacaaagtctgggacatttaagaatgccccaagctacaacgtaacggactccagcccttgctcctaggacaggatttcctacaagagggctggggctgtgaggccccaggtagtctattatcaagaagcacaaatctcgggtgtcactctacagcaaaagacaacagtcacagtcttgggagggatcccaatgctctcctgcaccatctctcttttttattttttttttaagatggagtctcgctctgtctcccaggctggagtgcagtggcacgatcttggctcactgcaacctctgcctcccaggttcaagcgattctcctgccttagcctcccgagtagctgggactacaggcgcgcgccaccatgcccggatagttttttgtattctcctgcaccatcttaaagtcaaatagaatacaaaggccagggacccacctgggctgtccagcaatacctgaggcaggaagtgccctgatccaggctcctgctgcgaaggtcaactgggcatcttacacatgcagggcacagtaccaggcacgttatctcactccagggtcttgtagacagcgtccgtggacagctatcccctacagtgttccttccccatcaccttgcttccactacaaggccataaggaatggcattggccaaggtctctgctcccactcacataggctgttcctctgtccacgatgcccttttgccagccttcctctgaccactccagctcatgggtcacctcctccgggaagtcctctggccggaggcagtcagtgctctaccaagtacccactgcccgcattcccttccagcacagcgctcaccacactgctctgggccaggaccttcccgctcttccaatccgcctgtcccactgggttagcaactgcttgcggtttctggcacacagaagggtcccgtttgttgaattagttaacgaattatcacgggtctccgcagctgccaaggaaaaacaacgctggttccacaaggatgtctgggggagaaaagactttctgatccaatggcccatctaatgggctccaagctggaccctgcccggacaagacctaggactcccagcccttgggagggtgcagaacgggcttagccaatatgaagaggcccctcagggccaggcggacgccgcgcccccgctcccaacagccggcagcccggggtcaggccgccacttcccgggagcctgacagggaagagcggccaagttcccagccccgcccgacagccgagggaactgcacgaagggcgccgctgacctcaccaccctgagctcgggaaggcttgcgggcggcggcacaagaacccagacgggtgcagaaacagggcggagggtgcagggtggcggcccggactgcgctgctggcggctagcggcgcgacccccggccccggatccggccccggcccctaactctcagccccgcgcgggcagaacgcaccgcctggcgaccccagcccgcgccccagcgctaaggttgatctggcggctgagcgggcggggcgctcacctggacactcgcagctcccggcgtttccagaacctcccgcggcgtcgcccggtcagctcggcgcctcctcccttggcgactccgcctcgggccgctgccggggctccgcccacttgagccgccgccacgtccccacctcacgctccacacgcctgcctgcgtcctggtccccagctccggtggctccgccggggttcgccgtcctctgcgacccctgggaacgcccaggctacccggcctcgcgggagccggagccggagccggagccggagctggccgcccgcgcccttcatgccgcccgcagcccaccgcacgtactccgcgcccgcctggctttggcgcccccacctgcgggccttggcccgccctcctgcccagcccctgggcgtctggagaggtcgccacgacccgatcccctcgccggggctgtagggagagcgtccctggaggctgacggatttccctgcctgcgctcatgcccattgcctggggggccctgccgggtacacgggccccttcttcccagcaccaccacaaggaggctgttacgggaggctggggtcaccccggctaggaactgggtatcaggagaggaggcagaacagtggagaagaccctgaggaagactagggacctggggcccaccccctggagaccgagattgggaggcccattcccagggccgagctctcagtgggtttcagagagtcccgggctctggtccaggcagtcctggtggcatgtgcaggggtgatggattgatgagaagggggcccatcaaaggctgggtgggggcggaggcgggggggcggtaacaacctggggcacactgggttgcccaaacccttctttatgccatgggccaaaaagagtggacacctggttcagccaatccagtctggaagggaataaggacagagatgcagcaaacctcagcctgagcgggaggaggccctggcggccaggcaggttcccacgcctgctctgtgaaccttcctctcatgaatgaggggaagcacggtctgagaatctcatcagggagcaagcccagagcgggagatgcccagcctccgcccaggcccagtgtggatattccctacggcacacgggccaggcaggcggcccagacctggggaaagcaggagcacgcacacggaaatacacataaaacatgggtgagccattgttcctgcctgcgtcagccaccggctcgagcccggctaaaactacacaaaccctcctgcatctgctacatccacagaagcttccttccatctcctcccccttctcaggagtttgccccatggaacatcccttttctctcctgaaggctcaactacccgctctcaactggatctttcccattggcctgtaaatgtgttcaagcctctactatgggaacaaaaccctcattcgaccccactgagtgtctctgttctcaaccgcagcggaatttcttgaaagagctgtctccccatcctcacatctctcccactcttcaggccctaaaggagctgtctctcccactcttcaggccctgcagtcagccttctagctccctaacagcaccaaaccaggtctcaataaactgtagcctccaatctccaatttcaacggctgttcttcagacctcatctgccagggccctgagcagtgtctgacacccagcgatgaccacagcccctctggaacactgatttcccttggtttcccctcatcctttctggccacctctgctcaagcttcttcagcatcctctccctattagtaaaggttgggggttcctcaaaactcaggtctaggctttccacttcacgcttctctttacacgcaggtgacacaaatttctctctttacccttatccttactgctgaaccccagattcatgtaactcactgttcagtgtacatccccacttgagtgtccacaggcacctcaatggcaacatgtccaacacagagttattgttctccccctacatcttccccctccacacatcctgtcttcactgctgtactgaaggagatacttcccatcagttacctaaccagaagcctgggagtcatacttggca

SEQ ID NO: 318290 - DNA, 4001 bp, Homo sapiens
gtgctatacttggacatcaagaacaactggaaggagacagagtgggttttcgggatgttgataatgttctatttcctgactgggatgctggttagttgagtgttcactttatgagactgagctaacacttaagtacactattctctgctatacttcaataaaactaagaagataggaaagacaggatttaagctaaagtatcatcaatcatttctccaatgattccctcccacttctctataattaatccctatgcatttactcatctgggtttatccagtacaacaaattcctttctacatattccaactgtgctttgtacggctatttaagaaaagtgactattttttaaagttgttatataagtgacaaagaaaaactgaaagtttaaacattctttatacctatgtaaatactttatcacaaccccgtaggacatttctgcatacaataattaggatcaaaactatgtctattttaacataatggaataatcactagaaacaagaacacagatgtgtatctcaagcttacattctaataccttgaatataactacaaaatgtatttctgaatcagctttgtttccttctgagttcaataattcaaaacattcacaataaaaaaatttttttacgtgtagtacagaaagcacaaacatactctgattaacaaagtaacaaccacattattccagtaaattaacccagagttgtaggaaaaagggtgtacttactgtgtaactggaagaataacctgaagggtaaaattcaggggcattcacagacagcttagacattaatacaggagctacaaccacctggggcttagccattgctgactccgagttctgctgtgggattttatcctgtgaactaggtggagctctcaggggcctcgtttgctctgcaaaagaaaaaaaaacggggcgtcagatgcattctttcctttgtacagcaacttgctatatactgaaaaaccatctgaaaagcgtctgtttttaagagttaaacaggaaccatcatgaaatttatggttatcgccggaatgtgtacagacagcctacaaaaaggaacaatagacttgctgtgactccgttatgggcatacctgcctctcaaatgagtgcttgcgagcttttttcctctctgtcgttttaaaggggtcggtggaaaagaggtggttactcgctagggtctcgctttagagggctgctgaggggaggcgatttttacttcctcccgggaccccgaactccgagaccgcgcacccggcccctccccccagccaggcgcacaaaggattccagcagacaccttccaaacccggttccgggcccgtccctacccggtcacgcggccctctcggggaatgctttcggggaaccgggggtggggaccgcagacagcgcgtcgggcctcggcacgcgtggagggccgtggggaagcgttcgccaaggaggactggggcccttagagctgctccgtacctgggagcgccccgggccgggaaggccgctgggggctggcggggacctcgcactgggcccctggcggcggggtcgtcctgggctggcgcagcggcggtggctgcaggaagcccggggctttgggttgcggcggctggtgccgcgcccgctcagcaggccccgctccgttcgggaaaccgccgccctcaggcccgccccctccgcggcccaggccccggctccggccccgaccagcacctggggcccgatcgaaaccgtccgacatgctcctcctcctccgcctcctcctccaggggccgctgccgctgcgctcgcgataggacgcggggggaaggcgccgcgggtcggctatagccgccgcgcctcactcgggcctcatggaggaggagggcggcgggccccggctcggctgctcggtgcttctggcggagcggacggcagcccgagcacccgccgctccagagcgcccgccccgctcggctaccctcggctttccagttctcccccaaaacccggctccccgccttcggcgcggcaggggcgcaggcgggtcacagcggccccctgcggcccggaggcccgggacgcgcccgcgaggatcctccagttcgcggctggccggccgccgggcccagcaggccgcccgccgagtggcgtcttggccacctgccggcccgcagccaggctcgggcaggggcatctcggttccggggccaggctgggggggatgagggatgaggggtgagggggacgcttaccacaggcaggcccgacctactcggtagttctcaggagagacgtgcgagaccgacagttgacgcccgggaaataaaaacacggggggagggggcgtggaccctgcgccagggttcgctggcgcacaggtgtgttcaatgactcggctccggccgagacccgcggactgctgaggagtggtccctgggagactgtcacctgctccgttagcatcgggggaagggagtagaaacggaatcaaaatatgtgtcccctctttaattcaccctaggtgtttaccacagtaggtcacacctacgtttaacaagcttcgttctcttcccgttaaccttcccctccagaaatttcaagaaaatgtgctacctttcagtgtaactctgccctctttttcatcttgcatcagtgctgtccaatgaaaatataatgcgagccacaaatgcaagccacttatgtaattttacattttggagaagccacattaaatgagtgaaaagaaacaggtgtggccaggcgcagtggctcacgcctgtaatcccagcactttgggaggccgaggggggcggatcacctgaggtcgggagttcgagaccagccagaccaacatggagaaaccccgtctctactaaaaatacaaagttagccgggcgtggtggcacatgcctgtaatcctagctattctggaggctgaggcaggagaatcgcttgaacgcaggaggcagaggttgcagtgagccgagatcgtaccgttgcactccagcctgggcaacaagagccaaactctgtctcaaaaaacaaaacaaaacaaaacaaaaaccaggtgaaattaatttaaatttatttaatccattatgttcaaaatggttttttaacatgcgatttaaaatattaaatattttctctgttttttagatactagttgaaatccagtgtatattttacacttatggcacatcttagtcgggattggcacatttcaagggctcaagagccacatgtggctagtggctactgcgttgcacagcacaattctagattttattaatatgtaaattgttgtttttgtcaggcctgacagtattaatgccaaataaaggatagatgaatataagtaacgacaaggaaggaaaaattgatttctttactgttggattgatccatctccataaattctgattttagccttttgttttaagcagggtttcatgtttttctatcttttcatcttaagaatcatttcaattagggacacaaactcttgttaaccgttttctcttctcattaataaagaaaacaatgtcttcccctaaacgaatgagaaaatggcttcaccgagggcaatcatgaataaatggttcatgctattgatgttaggcaaaataatgaagtcagggaaggaagccagcagtacgtgtggctcttcggtgtacggaaagtttaggattcagtctgccagagcttagttgggattccactcttgactattgctgtctgtgtgattttgagtaagtaaggggtttagcttctctgagcctcactttcctcatctgtaaaataataactgtgtggtaacactcagcatatattgcagagacaagattacaatttaaaaattacaattttaatattttcaaattcattattgtatgtggtcaccagtcacttcttgcctggacttttttatcatacaggaaagacccataaactatgctaaaaaactaacaatgagttatgttccactgaagtagatgccccaactc

SEQ ID NO: 318291 - DNA, 4001 bp, Homo sapiens
atttaagaaaagtgactattttttaaagttgttatataagtgacaaagaaaaactgaaagtttaaacattctttatacctatgtaaatactttatcacaaccccgtaggacatttctgcatacaataattaggatcaaaactatgtctattttaacataatggaataatcactagaaacaagaacacagatgtgtatctcaagcttacattctaataccttgaatataactacaaaatgtatttctgaatcagctttgtttccttctgagttcaataattcaaaacattcacaataaaaaaatttttttacgtgtagtacagaaagcacaaacatactctgattaacaaagtaacaaccacattattccagtaaattaacccagagttgtaggaaaaagggtgtacttactgtgtaactggaagaataacctgaagggtaaaattcaggggcattcacagacagcttagacattaatacaggagctacaaccacctggggcttagccattgctgactccgagttctgctgtgggattttatcctgtgaactaggtggagctctcaggggcctcgtttgctctgcaaaagaaaaaaaaacggggcgtcagatgcattctttcctttgtacagcaacttgctatatactgaaaaaccatctgaaaagcgtctgtttttaagagttaaacaggaaccatcatgaaatttatggttatcgccggaatgtgtacagacagcctacaaaaaggaacaatagacttgctgtgactccgttatgggcatacctgcctctcaaatgagtgcttgcgagcttttttcctctctgtcgttttaaaggggtcggtggaaaagaggtggttactcgctagggtctcgctttagagggctgctgaggggaggcgatttttacttcctcccgggaccccgaactccgagaccgcgcacccggcccctccccccagccaggcgcacaaaggattccagcagacaccttccaaacccggttccgggcccgtccctacccggtcacgcggccctctcggggaatgctttcggggaaccgggggtggggaccgcagacagcgcgtcgggcctcggcacgcgtggagggccgtggggaagcgttcgccaaggaggactggggcccttagagctgctccgtacctgggagcgccccgggccgggaaggccgctgggggctggcggggacctcgcactgggcccctggcggcggggtcgtcctgggctggcgcagcggcggtggctgcaggaagcccggggctttgggttgcggcggctggtgccgcgcccgctcagcaggccccgctccgttcgggaaaccgccgccctcaggcccgccccctccgcggcccaggccccggctccggccccgaccagcacctggggcccgatcgaaaccgtccgacatgctcctcctcctccgcctcctcctccaggggccgctgccgctgcgctcgcgataggacgcggggggaaggcgccgcgggtcggctatagccgccgcgcctcactcgggcctcatggaggaggagggcggcgggccccggctcggctgctcggtgcttctggcggagcggacggcagcccgagcacccgccgctccagagcgcccgccccgctcggctaccctcggctttccagttctcccccaaaacccggctccccgccttcggcgcggcaggggcgcaggcgggtcacagcggccccctgcggcccggaggcccgggacgcgcccgcgaggatcctccagttcgcggctggccggccgccgggcccagcaggccgcccgccgagtggcgtcttggccacctgccggcccgcagccaggctcgggcaggggcatctcggttccggggccaggctgggggggatgagggatgaggggtgagggggacgcttaccacaggcaggcccgacctactcggtagttctcaggagagacgtgcgagaccgacagttgacgcccgggaaataaaaacacggggggagggggcgtggaccctgcgccagggttcgctggcgcacaggtgtgttcaatgactcggctccggccgagacccgcggactgctgaggagtggtccctgggagactgtcacctgctccgttagcatcgggggaagggagtagaaacggaatcaaaatatgtgtcccctctttaattcaccctaggtgtttaccacagtaggtcacacctacgtttaacaagcttcgttctcttcccgttaaccttcccctccagaaatttcaagaaaatgtgctacctttcagtgtaactctgccctctttttcatcttgcatcagtgctgtccaatgaaaatataatgcgagccacaaatgcaagccacttatgtaattttacattttggagaagccacattaaatgagtgaaaagaaacaggtgtggccaggcgcagtggctcacgcctgtaatcccagcactttgggaggccgaggggggcggatcacctgaggtcgggagttcgagaccagccagaccaacatggagaaaccccgtctctactaaaaatacaaagttagccgggcgtggtggcacatgcctgtaatcctagctattctggaggctgaggcaggagaatcgcttgaacgcaggaggcagaggttgcagtgagccgagatcgtaccgttgcactccagcctgggcaacaagagccaaactctgtctcaaaaaacaaaacaaaacaaaacaaaaaccaggtgaaattaatttaaatttatttaatccattatgttcaaaatggttttttaacatgcgatttaaaatattaaatattttctctgttttttagatactagttgaaatccagtgtatattttacacttatggcacatcttagtcgggattggcacatttcaagggctcaagagccacatgtggctagtggctactgcgttgcacagcacaattctagattttattaatatgtaaattgttgtttttgtcaggcctgacagtattaatgccaaataaaggatagatgaatataagtaacgacaaggaaggaaaaattgatttctttactgttggattgatccatctccataaattctgattttagccttttgttttaagcagggtttcatgtttttctatcttttcatcttaagaatcatttcaattagggacacaaactcttgttaaccgttttctcttctcattaataaagaaaacaatgtcttcccctaaacgaatgagaaaatggcttcaccgagggcaatcatgaataaatggttcatgctattgatgttaggcaaaataatgaagtcagggaaggaagccagcagtacgtgtggctcttcggtgtacggaaagtttaggattcagtctgccagagcttagttgggattccactcttgactattgctgtctgtgtgattttgagtaagtaaggggtttagcttctctgagcctcactttcctcatctgtaaaataataactgtgtggtaacactcagcatatattgcagagacaagattacaatttaaaaattacaattttaatattttcaaattcattattgtatgtggtcaccagtcacttcttgcctggacttttttatcatacaggaaagacccataaactatgctaaaaaactaacaatgagttatgttccactgaagtagatgccccaactctgccccaagcttttgtttgcactcaccaccttttcatttccccttaaaacttttatgatgaacagcaccttttctaacaactgggactttcccatgtgaagataaggccattctgcatccatggtgatgtcacgacatcttcacaccctcttgttaggaaaattaggtaagatatcctttgccttctctgtatttgttactgtataacttttgccctattcttataatgtgtggatggtggacttggagataacacgaatggattttgcatcatgataataaaaatatctaatatttattatgcgtcagtcaccttttaagagctt

SEQ ID NO: 318292 - DNA, 4001 bp, Homo sapiens
cctatatcaaatgcaaactattcatgcacctgtgcaacaggtggtctagatcacaaaggcaatgacttggacaactttaatcttagaccacagtcagaagacgtaggttcaaatcccagctatgctacatagccaccttaaagtaccctagacctgtcactaaatcacacagcaccacataatggttaagagcatagaatctctggactatctggatttgaattccgactatcatagctctgtgacattgggaaagttacttcacgtctcatttgttatcttcattttacagtagggcctaccttctagctatgttgtggatcaaattagttaatatttgtaaaggcaatgagaacaatgcctggcattattgttatataaatatttgctaaataaaaataatctttcaggcttctatttctttaattcccaaatgggcaagataaaacttgctctgttgggaggccgacgggggcggatcacaaagtcaggagatcgagaccatcctggctaacacggtgaaaccctgtctctactaaaaatacaaaaaattagccggcgtggtggcaagcgcctgtagtcccagctactagggaggcggaggcaggagaatcgcttgaacccggggaggcggaggttgcagtgagccaattgcgccactgcactccagcactccagcctggcgacagagtgagactccatctcaaaaaaaaaaaaaaaaaaaaacttgctctgcccatttcacgtttcatgataatgaatgacaataggatgtaaattacaagaaaatgttttaaaagcacaaaaggttattagattacaagggggcagaggtcttgccttccacattctttaatctcccacagtatcaaccaaattgctgtgctaagtgttcaagtttttcactaaaactggagcatcacactctagagtcataaagtgataaacctgaataaagtgcagagtgcttatttaaggaaaagcctgctataaactcattctgaccaaaagagggtgaaattacctacctcaatttgagttcctaaggagcaacgtgcacagccttgaatcattagaggaaatctccattccctaacctccatcccttaaagaaacacaagtgggttctatagttcttgtcaagttacctatcctgtgattttgtgtgtgtgtgaaaaagttttattcaagttcacaactgacaagtagtataaacagactaattttccccaaatatcctgtctttcactaactggaaacagaatcacaaaagcaaatagtggagtctcattaaaaattattgtagagaacttttacttattgcaaacacaacctacgccagaagaaatttcaaaagcgacttaatgaaaatataaaccaacacctgatctaactgtgctaatgaaatctgtgaaaaaacaatgccaccacgtttcaacattagccagcacacccaacatgaacatctactttccgttgaaataaacgtcaaaggctgtcagctgctacaccttccaaggcaaattggaagccaaattctttctagagtttggggtttttatgagttgatacgggtgccaaatcagggaaaaaagaaacaaaaggaagcaggtaagaccccttttaggagtccctaaaaaatatcactgctggctgctgcaacaaatgttttgaagacctaagttcaccacaagccttatttatttctggtggcgatggtggggaaggaggagagtaagcacagaaaattattaaaaggtaagaggaccttaaagttcatctaactcaacgccctcctagggtaagggttcccagtaccccaaaggttcttttttccagggcatgagctgcaatacaaccaaaaataaggggtagcgatggcgaagaaacgggagaaagacgatcttctgatcaggcccgtcgacggttgcagcgttcccccaagacgccaagagcccgccagtccctccgcccctctctccccaaaccccagcctcggctgaggcgcgcacgcgcagcaagtaggggctgcgcgtggcgacgcgcaggcgtaaagtgggtagaaacaataagctttgttgccgaggcggtgggaggggggcaggggaaagggtacccggcggagggataaaggaccgggagaatgaggaacaggagaaagtgctatcccggcaaccctcgcgccactgaggacccggatagagagctgcgagatccaaatcattaataatgacaatgaaaaaaaagcgacggccatgtctcggagaagacagagacgaagtcggcccaagctcatccctcagacttggtggaaagaggcaatgaacaacggaggccgcaatggactcggtggccaaccacccagggaaccctttaggcccctctgccgtcgccgacttgctgtccctcgacctccgcacccctgtcgccactctgcccgagaggacccctcacccaatgcacagcagcggggacggcagccaacgaatcctgtcggcctccgcggatctccacaggcagcgccgctcccccgctcgacgtgcgcttcgcccgccgcctcccttctccagtccaaacaaacaccccagcccggaagtgacttcacttccgtcgccgccaaccccgccctcttgttctgtcagctctgccctccgaagccactagagagcgcgcgcgagaacgcgcgaccccgaagtctgtctccaaggctgcacacgtgtgcacgcgcagcagcctttccagcgcgcccctacggccggctgccgggtgtagcaggaacgctgtcgcacgttctctctggaaggcaggaatgggggcgtaccactgttcccacacccgcccatcttccgagaatgatgatatgcaatgagtgaggcagctggggactgaagagcaccctgacaagatacacaggcgtggactttcacagacatcacacacccccccaaaaacgtaatatttaggtaatgacatagcacacacatacccatacacaccccaagaatgatacacaatgtcacacaaacagcgacatgcaccgagtcacgtcaagatcctgacacagaaaaataataaactaagggaaatcacagaggcgtactaaatgatatgcaaacatccgcactcagacatgtgcaggcacaaaaacacactttttgaagctggatgcaaacgcaaaatacaaatacatgtgcaacttctttgtggctaaaggaggaaatgccctgtccacacaggatagaaaagtgtgacctccgggttcaagaattttgtagtccgtgatcctgggtgcactggccccatagttattcttacccatgcttccttcctgtcatcgttgacaagccccaagatatatttctagtgacactaagcaatgtaaagaagagagtatgtttttgtttttttgttttgttttgtttttttgaggcggagtctggctctcttgcccaggctggagtgcagtggcgccatctcggctcactgcaacctccgcctcccgggttcaagagattctcctgccacagcctcccaagtagctgggactacaggcgcacgccagcacacccggccaatttttgtacttttagtagagataggggtttcaccgtgttggccaggatggtctcgatctcctgacctcgtgatccacccgcctccgcctctcaaagtgctaggattacaggtgtgagccaccgcacccggccgagagtatgtgttttacaaatctggatgttcaaatgtgtagatactatctttgaaaaagggacacaaactaatttcttccctttggagagggcaaatgaccgactaggaaatgggtgcaaataactatccttttctcctgaaaaatttgaatcttttaaaaactatatgcttgtagtatttactaagacaaaaaattccctccatgggaaggcttgaatttagaaaccgggttgttcctcttcagagctatttcattcactgaatactcttctgggccagtccaaagccccaaa

SEQ ID NO: 318293 - DNA, 4001 bp, Homo sapiens
ggcaggagaatcgcttgaacccggggaggcggaggttgcagtgagccaattgcgccactgcactccagcactccagcctggcgacagagtgagactccatctcaaaaaaaaaaaaaaaaaaaaacttgctctgcccatttcacgtttcatgataatgaatgacaataggatgtaaattacaagaaaatgttttaaaagcacaaaaggttattagattacaagggggcagaggtcttgccttccacattctttaatctcccacagtatcaaccaaattgctgtgctaagtgttcaagtttttcactaaaactggagcatcacactctagagtcataaagtgataaacctgaataaagtgcagagtgcttatttaaggaaaagcctgctataaactcattctgaccaaaagagggtgaaattacctacctcaatttgagttcctaaggagcaacgtgcacagccttgaatcattagaggaaatctccattccctaacctccatcccttaaagaaacacaagtgggttctatagttcttgtcaagttacctatcctgtgattttgtgtgtgtgtgaaaaagttttattcaagttcacaactgacaagtagtataaacagactaattttccccaaatatcctgtctttcactaactggaaacagaatcacaaaagcaaatagtggagtctcattaaaaattattgtagagaacttttacttattgcaaacacaacctacgccagaagaaatttcaaaagcgacttaatgaaaatataaaccaacacctgatctaactgtgctaatgaaatctgtgaaaaaacaatgccaccacgtttcaacattagccagcacacccaacatgaacatctactttccgttgaaataaacgtcaaaggctgtcagctgctacaccttccaaggcaaattggaagccaaattctttctagagtttggggtttttatgagttgatacgggtgccaaatcagggaaaaaagaaacaaaaggaagcaggtaagaccccttttaggagtccctaaaaaatatcactgctggctgctgcaacaaatgttttgaagacctaagttcaccacaagccttatttatttctggtggcgatggtggggaaggaggagagtaagcacagaaaattattaaaaggtaagaggaccttaaagttcatctaactcaacgccctcctagggtaagggttcccagtaccccaaaggttcttttttccagggcatgagctgcaatacaaccaaaaataaggggtagcgatggcgaagaaacgggagaaagacgatcttctgatcaggcccgtcgacggttgcagcgttcccccaagacgccaagagcccgccagtccctccgcccctctctccccaaaccccagcctcggctgaggcgcgcacgcgcagcaagtaggggctgcgcgtggcgacgcgcaggcgtaaagtgggtagaaacaataagctttgttgccgaggcggtgggaggggggcaggggaaagggtacccggcggagggataaaggaccgggagaatgaggaacaggagaaagtgctatcccggcaaccctcgcgccactgaggacccggatagagagctgcgagatccaaatcattaataatgacaatgaaaaaaaagcgacggccatgtctcggagaagacagagacgaagtcggcccaagctcatccctcagacttggtggaaagaggcaatgaacaacggaggccgcaatggactcggtggccaaccacccagggaaccctttaggcccctctgccgtcgccgacttgctgtccctcgacctccgcacccctgtcgccactctgcccgagaggacccctcacccaatgcacagcagcggggacggcagccaacgaatcctgtcggcctccgcggatctccacaggcagcgccgctcccccgctcgacgtgcgcttcgcccgccgcctcccttctccagtccaaacaaacaccccagcccggaagtgacttcacttccgtcgccgccaaccccgccctcttgttctgtcagctctgccctccgaagccactagagagcgcgcgcgagaacgcgcgaccccgaagtctgtctccaaggctgcacacgtgtgcacgcgcagcagcctttccagcgcgcccctacggccggctgccgggtgtagcaggaacgctgtcgcacgttctctctggaaggcaggaatgggggcgtaccactgttcccacacccgcccatcttccgagaatgatgatatgcaatgagtgaggcagctggggactgaagagcaccctgacaagatacacaggcgtggactttcacagacatcacacacccccccaaaaacgtaatatttaggtaatgacatagcacacacatacccatacacaccccaagaatgatacacaatgtcacacaaacagcgacatgcaccgagtcacgtcaagatcctgacacagaaaaataataaactaagggaaatcacagaggcgtactaaatgatatgcaaacatccgcactcagacatgtgcaggcacaaaaacacactttttgaagctggatgcaaacgcaaaatacaaatacatgtgcaacttctttgtggctaaaggaggaaatgccctgtccacacaggatagaaaagtgtgacctccgggttcaagaattttgtagtccgtgatcctgggtgcactggccccatagttattcttacccatgcttccttcctgtcatcgttgacaagccccaagatatatttctagtgacactaagcaatgtaaagaagagagtatgtttttgtttttttgttttgttttgtttttttgaggcggagtctggctctcttgcccaggctggagtgcagtggcgccatctcggctcactgcaacctccgcctcccgggttcaagagattctcctgccacagcctcccaagtagctgggactacaggcgcacgccagcacacccggccaatttttgtacttttagtagagataggggtttcaccgtgttggccaggatggtctcgatctcctgacctcgtgatccacccgcctccgcctctcaaagtgctaggattacaggtgtgagccaccgcacccggccgagagtatgtgttttacaaatctggatgttcaaatgtgtagatactatctttgaaaaagggacacaaactaatttcttccctttggagagggcaaatgaccgactaggaaatgggtgcaaataactatccttttctcctgaaaaatttgaatcttttaaaaactatatgcttgtagtatttactaagacaaaaaattccctccatgggaaggcttgaatttagaaaccgggttgttcctcttcagagctatttcattcactgaatactcttctgggccagtccaaagccccaaagaaatgaatgcagatggttctgccctagctcctgggtcaaccaccttggcagcacttacagatctatattctaaactgtgaagataagctatcaatctgaggctgaaggaagtctgaacataacaaaataggtatttatatagtctgagatgactcagactctctttttaagacacagtcttccatcacccaggctggagtgcagtggcatgatcacggttcactacagccgcaacctccctggctcaagcaatcctcaaacctcagcttgcaaagtagctgagaccacaggtgtgtaccaccatgcctggctaatttttgaattttttgtagaaatgaggttttgccatattgcccaggctggtcttgaactcctgggctcaaatgatctgcccgcttcagcttcccaaggtgctgggattacagccgtgagccacagggcctggcctaacccagactctcttaaaaggtaagcatgaggccaggtgcggtggctcacacctgtaatcccagcactttgggaggctgaggcgggcagatcatgaggtcaggagtttgagaccagcctggccaacatggtgaaaccctatctctaataaaaa

SEQ ID NO: 318294 - DNA, 4001 bp, Homo sapiens
gcagtaaacacgtttttatttcttgacttgtggttgcaataaaaggatatttaaacaaactagcttaaatgcagctgctcaatatcattttcctttattagaataatttttcatattttaatgcgtacttgcatgctgcattacagaggctattactccacagagaatctcaaaatgtaaattttcgacattccatttcaaaccacaaatgataatataagtaaaattttaaaaacaaaatttaagtgaaagattcaccttgaaagacttaaccctctttaaaatattcaattattctagccttagctggagtcttgaaagcaaatgcctacgtttaaagaagttcctacagctgtaaatgcagtttccttactttaattatagattgtatccagaacaagtgaataatgaaagacaaaattcctctcacctgtttaggtgtaaccccaggcatgcgaatatccaatgcaaaatctgatgaatcaataggaactacgggtctggtggtaccaagacattcattggaaaatggtctggtagtttctttaaaccttaaaaaagagggcaatttcaatattcttgaacataatggaatctaaactcaacatgagaaggggaaagaaaggaattctatgaccttaaagatgattgatttaaacccaatgaaaactctaaagatgtgatgactacacaatgttcgtaaacatactcagattttcattttatagtccaataacaatatatacctaatttgtaaataaaatataaccaatgcaatcaaccaggctacatttaaaactccattcaataaaaacttgtttttattgaaaatttataaaaaattatgtcatataaaaatatgtcaaaacatatatctgtttcaagttaatgaagatatagtattaatacattacaaattatcacaggcatgccaattttctaatggcagaaatattaaccatgacccagtaaaaatttctgtaactattttcagtgtccagaattactagctagaaacaagaaagccaaccataatcttgctaggaggcagagctgttaggaggaagaaataaaagactgcgatgtgaattacaaatgtacaagtacataaatatttaataaagtaattatgaggcgtttgtatacagctcagtgtttccttgtgagctattacagtctatgatctgcttctcctcgacactgatgtatccttatattttattcttcgagctgttataaacaagcaggcattcaaaactaagcgaatatattgtagttcctgaaatacctcccccagagggagtgattagttttggaaatcacaacttctaattggagttttgaaagccagaactgcttggctacaatgcagtgggctttttctgcacgggggacttcacaagaagttactgtggtaaaattccaagtcattccagcaaagaacatcaaccccgtctattttgccaacactcaggttcataaaagtgattacatttctcaacagcatgcacagaaagcacccgaacaacgaacacccacctcttaaagacagaaagtgggcttcggaaagccaaacagctgcttggaaaaacaaggagaactagcaggctagggacgcggccagccatgtccacgccgatacgaccccgccgggagaggaccgggcagcgcagcgcggggctggggctggcggttgggcagcggcgccgccagcagccgctacttcatggcccgggcacggcgggcgtcctgcggcggccacacaccatccgccagcgagagcagcgagctggccgcggcgaggcgtctcggtcacgagcggcgggcaaaaagccgtgggcaggcgggacttttgtccggcccgcaggcggaagctttcctccctccagcgccgctcgcgtgccctggcgctggggctagacgcgcgggtgccttatgactccggaatgacaggggctgtgaggggtatcacccaaacccgcgtcagtcatcattcagaacctgcaaaaatagaagcagataatggatgactaacacgttacagcatttgtcctcagcaaatcccagctgaggttctttaatacattagtagtttcacaaggttgcgcccaagcctggggaaaatgctggtctgttgagctccctcccccacagccagcccccaagatttcaggaacccccacggcgcagcccctgtagagccggtgttctgtctttgcttgctcttcctcccttggacccactcctgttttcttttcctacttcttcccccctttatccctcacagccaccccagtctgaatttctctttacttcctctatcactcctttctctcaccaaaaatgctctaaatacctctctgctgaatgtaaacatcacacaaatgaccggctaaggcgcaaggaaaaaaacaaaacaaaaaacgaagagaggcaaagacaaagcactggataccacagtaatcagatagaaaaagacttttgagaacaaaggcatgcttatatacatgcatcacagagctacagatccaagaggaatgatatctcctaccaagagctcccaaggatcatcacagaattgcccaagttctcagaattattttaaaacaaacaaaaactctacagctaacatgatacacaagatgtaaatgcccatttaaaaatcctgcatctcataagcaaaataataattttgtactcataaggcatgccttccaaaagatatcctttcctaagtttggagttttacaacataattagaaagagtagggagaatcttagctgccccccaaatgaattttatcttcaaaggttatgatcaagaacgtcacattaatacaaatgagaggccatgaagaactaatgttacagctcaacgttttataagaggactcaactaggttaaacttgaaaatattcatattttgactgaatatatttaaaactatgttatcaaacctgcaaattttagtctgaaggcataaattaaaactgtataattcacaatataaaaatactgtacttccaaagaaagagattaaagttttattttagtcagtaactataaacatcgttccaagaatctcaaatgaatttgatgggaagatgtgtaacagtaaaaagaaaaaataaggaaaaatcatatcggaatgtttcacagtaatacatcagcctctggaaatcacaagatagtgaagctaatctaaaacaaaacaaaacaaaaacctagaaccaaaacaaataaaaaagcactaaccttaaatgaagtgagattcttcatgataagtgctttctagataccatataccaaatataaataaaacctgacttaacatccaaccaaatcaaggatgcttgaggctcaccagcagtcaagggtcagctaatttacataagcaatgacatttttaaaagactgacaatatttgtttgaactttctctttggcttgctgtttgggctttcagaaacaaaaaccttcagctttatccttatcctgtgggtaaaggaaagaactccttctggaggaagagaaacaattggcaggaaggctatgctattgcctttgctagcaacaaagtataatcctatcaaatgacaatacttcacattccctgaagttctttaaaaaaaaaaaaaatatatatatatatatatatatgaagaagggattatattttaatattttattcagaacaggattcaaggacagtccctcttccagttggcaaggagatttggtattacacaaacacttgaaaacaaattaagtattaaaattctctaacaggaacacacccttaagtactagcctttgaaaaaaatattccacttatctctttgattttattacctttgatgtccctaaaccacccacttaaagaaaagggaattaaagttgtgggtagaagcaaagttggtatttgtagccatgaatagaacaaaaggtcttataaaaatgaaagctaattatgcttcttgtttctggatgacttgtaagct

SEQ ID NO: 318295 - DNA, 4001 bp, Homo sapiens
atttcaggtgtgacccaccgtgcctagccctattttataaacttctcataataatctttataatctctcctaaaacacctttgaaggaggtagtactcatacctgattattagtttgttcaaatctaagtaatcaaatcactatcatgacaaaagaaaataatcaccaccacaagagtcagaatttgagttggtcatacactgttcaccaaatggaaattctaagagaagcagagaaaacgtatgcgtgagggaaaatgtccaagtgttctaattactgcacctgttcaagatgcattagtttaattcagcaaatgaaaatttaaagtctctctatattacttttcatttaagccttcacatcactattttatagatttcttgaacaactatgacaggatctattcagttataaataattttttaaaaattttaattaacagatgaaactaccagataaagtacttagacaatgctctatgggtgcaagagaaagaacactgtattatgagtcagtccccttagagttatgaaccacatagcacatggttggtacatgcttggaaaagttactctggggctaagttcaatttcctcacctgtgaagttaagaccaaattaccttacagttatataggaatttgtagttttcacagggttttggcttgttgcctctcaggtgagttttacaggaaccccgataggcgggcagggaaggtgtcagcgccctgttttatagttgtggatttcttaacagttaaagagatcacatgaaacactgtaaaaacagcaaaagtatcaatacgactctaagatgagcatgaatccccacgttcctagtccttctgggaggctatacttaaaaagagtgacaatcacaatggctgggtgattaaataagtcaattactggaataaaaggtttttaaaagactaaacataaaaggaagcaaatgaaagtcgacctttctaaaagcatagtcagaatttaagtacatgcatagaaaaatatctacgggtattcaccataatattaatagcggttcgctccgggtgcggggaatacgggtgactttatctttcttgtttatctgcgttttctaaaacaaacatgaactagttgatattctaaacaaaaacaagccaaagcaattacacactggcagactgcatgcacgtacgtttgaaagctccaactgtaacaacagtgacaactcccaggaacccaccggcatttcaaggacacaagcaggaagcccggaaatccctaaaaacaggtgctaaaagccgccagcgcaacctgacagccgcgaccgcctcttttcaacctgaattcagggggagctgggagaggagactagtctggtttgacaaaaatcagaatcagaaattccctctggcacctcccagatctcgaagagaaagtgggaggaaaggctagggggcggcaggcattcaccatgcatgaatagggggatggggaggacggaagcctcgaactcgtggctcaaatggtccctccgcccccataccggacgaagcgccggcgaggagcgacgggcttggaagccgaccgcccagccaaggggctttcagacggggcccaagggtgccctcccaacctggcgggccccagcccccgtcttacagggtttcttggcatctttgatcttcatggcgtcggcccgaggggcgatggacggcctccgatccggggcactgagagcagaggcggcgactccggaggtggctgggccgcgcggcgaggcccggccggttcctcccctcaggccgggcggggccggcctagggcggggcggcggcgcctgaggagatgcccggcccagggggcggccccccacccccgcgaggggtggccgggaccgagcaagctggggaaggccgccggcctcgccgctccggggcccccccgcagccgctccaaacaaaaggccccggtccccggagccgccgccaccgccgccgccgccgcactgagaaatagcccgcccaggccgaacgcccacgtgacgcgagccccccctcgctccgcttccgcccggctgctggggattgtagttctccggttcgtgaggccccgctctctggctgtagttgtgcaggtggactacaaagcccgagatgcatcgcggcccctcctccgaggcccctcagcttccgcagatcgcctcagagtggtcccagcgagaagagggctgggtcttagtcacgccagcgaggaggcgaccaatggtgactgagatgggcgtgctggggaagtcgggctcagacctcagcaggtcgcggagagaagggggaatgaactcttcgagaggactgtcatggctgttcggccattctcagatttccccttgagacaggaaagctggtcgtcaggccatggaaagcgctacaatcagggctctagagctgtgcttaagatagacccttgagtacattggcggattaaaattattcacaaaggaatccttttgcttaatagagacaccttgaatgttagggtcggaatgatgacaatagcaggaatagaggtaacatctatggaacgcgttatgttcatgggactctgctaagcactttgtgtgatttacttaaattcaggggccttgtggaccacgtgcaattattcattttattgtcactcattttgaagatggggcacggtctgaggagttaaattgcttgctgagcattctttttgccaccgatccatattcccctggggccctccagcccagctctctccttctaaagggaaaactgactcccagagaagaaaatttagttgctccagttctcacagtaaagccaggacaccctttccccttgcctcctagagtcttagtcctccagctggaatgggagaagatggcattgggtatcttctcttggccttcacttttgttgcccagttagatggccaggaattctgtagtttttacaatagatggatagagggttggcagtagaggattgggcattccagtcaaagaaacccgcttaccaaagagccttactgccccttcttgcagatgataagccaagggatgtgaagaaggacaggagaggacacaagctaccatttattgagtacataccaagggctgacactttgcaaagtgccttacttttaaaatttaaatttaatcctcccaactactttttgaaatacaatgattaaaaactaaaaaaacttgctgggcgcagtggtgtgtgtctgcagtcccggctatttgggagactaaggtgggaggcccaggaatttgaggctgtatgtgatagagtttgtgaatagcaactgtgtcagaggcatttaccagagcgactccatcttgaatagggattggatgaaataaggcggagatctactgggctgcattcccaggagtttaaggcattcttagttgcagggtgagataggaggttggcacaagatacaggtcacaaagaccttgctgataaaacagcatgcagtaaagaagctggccaaatcccaccaaaatcaagatagcaatgaaaggaacctctggtcgtcttcactgctcattatatgctgattataatgcattagcatgctaaaagacactcccaccagtgccatgacagtttacaaaagccatggcaacatcaggaagttatcctatatggtctgtaaaggggaggaaccctcagttctgggaattgtccgcccctttcctggaaaactcgtgaataatccaccccttgtttagcatatcatcaagaagtaataataagtataagcagctgagcagcccatgctgctgctctgcctatggagtagccattcttttattcctttactttcttaataaacttgctttcattttacattctggattctccccagattctttcttggaagagatccaagacccttctcttgggatctggatcgggatccctttctggtaacaactgtactccaggctaggtgacatagtgagacccatctccaaaataa

SEQ ID NO: 318296 - DNA, 4001 bp, Homo sapiens
aaaagagtagattaattcggccgggcacagtggctcacgcctgtaatcccagcactttgggaggccgaggcggatggatcacctgaggtcaggagttggagaccagcctggccaacatggtgaaaccctgcctctactaaaaatacaaaaattagccaagcatagtggcacgtgcctgtaatcccagctactcggcaggctgaggcaggagatcgcttgaacccaggaggcagaggctgcagtgagccaagatagtgccattgcactgtagcctgggtgacaagatcaagattccgtcttgcaaaaaaaaaaaaaaaaaaaaaaaaaaagattaattcctagtaatttctagttataaagtatttggtcctggaatttgcaacctggaatttctgtcctcaacttgacctctcctccaacaaattagagaacactcaaggttatatataattccttcatcaggattctttagaaagcagaatatacctagaatgaaaaccagaaatttactggctaaaccaagatactgtccattttgtccaaatacctttgatatctcaaacccacttttctccacaatacgaaaaatccagttcctaaatcctgccaacccactgtgaaaactacttccaggttttgaacaggatattccttttggttaagaattaaattacacccaagtgttcaaaaaaataatctagtcacatggctccaaatgggcatttcttaaacaactcataaacggcctatttcacatggaacctgttacaggacatttccagaacagacataattagggctattcacaccaacaaagtaacgtcactattactggctattaatcagtataaattaatagccttatggctgttaatcagtacgtgttagaagcctggtggtactgaaccatacaatatgaagatatttacaaaagttactatgttacctgtaatataaaaacacagatttagtaatcagttacaatctctttcttcacaaaatcatacactgcacatgtgttatttagcttgtgttttacagtttccctttgtttcttctctgttcaccctaatgaaaaatatctgctactttaaacaaagagttgaaagagataagacaagtaatttagagaatccataagttttgagacatataagcctttcgtgttctcaccttgagagacgaagagcttttctacaaaggctgaacaagaaaagaaacgcacacaacagtcttaacctgtgcattttcctataaagtgaaaagctgaagcaatttcatgccatttaattaaggcttaaaagataaatgccttttaaattttttaattaatccagctacgtaccttagttcttcaccaccctttgaaacaccatgcaagggtcccaagactatcttcctcttttggtcctggagtggtggacgaggcagtacgcgaggaatagaaaacgagtaagcaaagtaagcggtcctaagattcttcaaaatgtacagcagcccagatgccgcccataaatttggaataaccaagagatactgctggaacctcccacgcaaaacaaaacgctaccgtttcggaaaagtttcccgtgccccgccgccgacctgggcctacactgctgcgttcctctccgaaaccccctaaactcacaggtgtcctccgggaagggctaagcagggcctacccgcactgcccgttcagaagttctaaggcccgagctgggcgtacttggtcgtagctttctcccgaaccaaaggaggtagtggtggcccgtgggacagctaggcccagctccggctccggctgagatctaacccccctcacggctgccaggggaggagcaacacaagaaaaggtaggggctgcaaggatatagaaggttgggggcggtggcaaaaagcggaagagcaaaaagtcgccgaaaaagcggcgtagaaaaccctgtcaaagacacccggaagaccgacgtgaccccggatgagaataggcagcggggagcgaaaggtcacacttccggtggccgcctccctcccaccccccaaccccccccaccccccaaccccccccaccccccccaccccgcctatgagcgctttgcttgaatgcgcaggcgcaagacagccggatttgaaaggagtttcttaactgctgccagcacaagttgggaaagggttaggactgcactaagaggggtggagcaggcagtcgccggagggccacttctgggccccttgcctgaactcacgtgcagccgttctagctgtaacagacgttttctgtgggtccttcgtgtgttggccgagtgacttgtccccagagaagcctttctttaaccagtgttcccctaatcttctcccccggagcaacattaaactttatctgttcttttgcccctccagtaacctgagagcttctttggaaggaaaatgctttctttggccggacgcggtggctcacccctgtaatcctagcactttgggaggctgaggcgggcggatcacgaggtcaggagttcgagaccagcctggccaacatggtgaaaccccatctttactaaaaatacaaaaattagccgagcttggtggcgtgcgcctgtaaccccgctactcaagaggctgaggctggcgaatcgcttgaacccgggaggcggaggttgcagtgagccgagatcgtgccacagcactccagcctgggcgacagagcaagactttgtctcaaaaaaaaaaaaaaaaaaaaatgctttctttctctctaaagcctggacttagcgccttgcccatagtaatagctggtattcactaattcaacaaatatttattgatatcgcctcttgagtgagctttaataatttgtagaaatgtctaaattgtttaataatgcaaatctgttagctgtattcctttattgtccacttaatgtctataaaatctgacccctcaggttctgaaattggtaatttgtgtgtcatctttttttctgatcgatctggtgaggggcttctcggtttacggatctcaaatctcaaagcccgtttttgctttcttggattttctctactggttttctgttttctattttattgatttctgctcttatgtttattgtttcctttactctgctattttttaatttttaaatttcttgttttgtttctctagtttcttaactcagaaactgatgaccattaattttagatgtctcttgtttgtacaggcatttggtgtgataagtgtccctctatactgttttagctacattccacatattttgatatattgtattttcattttccttcatttcaaaatactttgtaatttccctattgctttctttttttgaccatgggttttttgtaagtgttggtctgcaaatgtggaggagttttccaggtagctgcctgttactgatttctgatttaatcccattgtgatcagagaaggtacttcgtacactattaataattttaaacttattgacacttgttctgtggcccagagtatatagtctgtcttggtaaatactcactgtgcatttgaaatgaatgtgttttttgcagttgttgcatggagtgttctataaatgtcaatcatgtcaagttggttgatattagtgttcaaatctatatcctttctgatttactgtctacttattctactaattattgagagtattgaaatttctgactattactggtttttttcaattgtagttctatcaatttctgcttcatgtactttgcagctcagctattagttgcataaacatagttattctcttatttgtatgaatttatcctttatgaaagtttcattattatgaaattatccactttacaaatgaccctcctctttgctgataatgttctttgctctgaagtatattttgtctgatagtattacagctacttaggctttcttttgtagggtgttaacatggtatatataaggaaaacataattccaattctagataaagtcctccaaaaattgaagaggagggaa

SEQ ID NO: 318297 - DNA, 4001 bp, Homo sapiens
gaaggggaatctgaccagacctgctggcagagaagattgccccattacctgtgatgggaaaggactcaagcaggaccagagtgcatcaaaggcacctccggctgcttgagcaatctccacagaagtaacaagagcctgcatgagggaggatgaggtgtggagagattaaaagggccaaacgaacagcatgtgatgagagactggacgtgggtgacgaagagcgtgagaggggacctgcacaactgagcagggtactcttgtgctctaggcagggggcacttgcaggcaggtttcagggtgggtcaagatcatgagactgtgtctcccatgccgtccctgccccagatccccagatcctagcacagcacctgatcctagtgggctcattcactaacaaaagcaacaccacctactgagcctgactagagttacctggaggaaacagctcggggagcccaagtgaggtgcatgggacctgatgcgctaccactttctaagagcagaggtacaacccaagactggcagagaccacgtgtcttcctgttttttctagtgctaagagaaacggagtccattccagttacataacaggctggaaacctaaaggtcctccccaagcgagcccttaggtatatattgctattcatcaagaagaaactgctcccaaccacctgctctcagaaagttctacaggtaagaactggagggagagaagaggagtctgcgctcctgccggcgtctgcactgcatgtttacacttcgggaaatttagaaggtatcgcttgtagcccaagccaggtgaaataagttacagaacatgcagctattacagtgtatcacacgctttaaagaagtatcaactcgtgtttcccaacatacttcaaatgagaaaaagagttacaagcaaaagtttactataagaactcccaacacctagcaattgtggttatttgtaggactctactgcatgcaacaaccctcataccccagcaaatccttaattgttttttaaattggggggaaaaattgtgcaaggaaaaattatcatttaagtcttaaaatactgacatacaacctacacataaattgcttccagacgctcagaaaagcccaaaatggcaaaggggctgcgtcaacagcatcacacctgaacagcctcacctgggacaattccaaccccgaaacacacaccacctttcgtttcattccttgccgtctgtaagtgcactaaatttaagtagagcctctaattccctctaggcggatgtagaaatatttaaaataaaaatggcaccttccaaagaatagacatatatgacaaatctggttttttctttgaattaagccaatgtttataaaccataggcgatgcttatggtaattgcagcacaaaattaaaggacacaacaccccccaaaaaatgaatcacctctaagttgacagttaaatttttttaaaaaatgaaattaaaaaggttaatatttaccttcgacgtgattcgagttcctggcaatgctaaattattctgcaacttaacttacgtgaaactccacacttatctacgccccactttgacaaggggttcctcacttgcccggaggcggggtggaggggtagagagtcgatttcccgttccaatctcaagagtaaaaaagacaaatacctgcaggtcctacccagcagccccttttcttggactgttacttgtaggatctgggcaagtcactccacgataaatgagtctgatgtttaaaaaaaaaactttcagtgcagagtcgggccttggccttagccttcaacatccatcctccaaaagcccgggcgcctgggacgggtgtctgcaccgcgggcgccggccaggaccatgggccccgcccccgcccccgcggcctccccgcgcactcacccctggatgcccgggctgtacgcgcggctcttccacggggtgccgggccgcggcgcctgggccccggggccgccccctccgctgagagcggccgcgcggctgccggacagcaggtagttgaggccgtaggtgctggccttgttctcgcgtttccggcgacccgggtggaactggtgctgcgacggggagccggcgggcgcggggccgcgcggcccggggtgcccgttggctgtgccaggggcgctgggcgcgccgtcggcgaagttgaagaaggcgccgccgcggccgccgcccggccggcccagcgaggcgctgctggaggacgacgacgagcagccggggctctcggtgcccgactccgcgttggacgaggaggacgacgacgaggacgacagcgacggcgacttgtgcaagcgccgcgcgccctcggccgcgggccccagcgccgtcagcagcgcggggggcagcgcggcgggcgcggtggggccgggcggcgggggcgacgcggcgggcagcgcggggcccaggccgccactgccccgcccggccgcccccgccgcggccgccgtgtccagcgccggcgagttgaggcagaaataggacgcgaagcccgagccgccgcggcccacgccctgcgaggtctcccagatctgcatccacagggcattggccggccccttctgctcgggctggatccaggccacgcgcggatccatccacgcgccgcccccgcggggcccgcgcgcccgcccgccccgacgcggccccgcccccgccgcgccccgaggcccggccgcgcgcgcacggacggacggacgggcctgggccggtggcggcggcggcggcggcggcggcgggcgggccgagccccggcctcctgctctagccgcgctcccgtcgggctccggcgtggggcggcggcggcggtgatgggccccggcaggccgcggcgggcggctccggcgcttggcgcgtcccagcgggcggctgcggtctccgggctcccgcttcacgcggcgcggggcgggcgcgggggccgcggcggcggcggcgttccactcgggccgcggggagaggccatcggagaagggcgggcggcggggccgagggggcgggcccaggcgccgagcggctgaaggacccgcgggaggcgccgccgcccgtgcggctagccctcagtcacgctcgcgccgctggctcggcgctcctgcggcggcggcggcggcggcggtgaaaagacactctcggcggcgacagcgcgggggaaggagggggccgccgccgcgtccgctccaatgaggggcgggggagggggcggggacgggggcggcaggaggaagcgcggcctcggtcgccgggccgtgtcgccggtgcgcacgcgcgaccgatttcaaatcctcactagacactgccgccgtggttaccgcgcctgcgcgttggggccccgtcggccgcgggcggggtgaggacggcgtcagaagctacgcgactgggaggggctggagggagaggcggtggcgttgagccattactgactaggccggcgttgggtggaataggcagcggctggaaggcccgcacgccgccctcggcccgccgcggcgcgcagaccccggcgtgcagacatgcgcgctagggccggtgtcaccgggctgccgcctgagccgcgctgcgcgtgcgcagggcagcgtggccgtcaccgccgccggtggaagtttccgagcagccgggcgggggcagcggacgccaccgcaggcgcttcccccgccggccggccctccctcctgacgtaagggcgggccccggtcgcagatcccgccccaggtctctcatccgagggtccgtgcagcaggtcacgctgcgctctctggggtccgcgcgtcggcccacgtgctccctgcacctcgcggggtgagcggccagcgtgccgtgccgggtggctggctccgccgctccggagccgggaaggacacgcggcagagtcctgctccctagcgggtctgcttacaggcgtttggtttgctttttaaaatgattttctatgcgaaaagtgaagtgaaaacttccaagttaattccctgggcaaaatgggcag

SEQ ID NO: 318298 - DNA, 4001 bp, Homo sapiens
tcagtcaacgctaatggaacctacaggaagtaaatcctttagaatggaatgtgaattctcacgtgtggaaaactgggacagcaaatcaaaggaatctgtcacagcagtcaccaaggaagccagtcaggagaagcttaattttcataagaaaagcactgtttctaattttaatctacaaacaactcattcttcacaatcaggttaagtgtggatttcttttaaaggatatatgttctaagtactggagttttatcttttctagatttatattataactcaacgattatgtgggtctttgttttttgagtacatttcagcagacacttgaagacaatgccaatgtctccaatgtgactcatccaacggacaaaaatggatgatacactgccataccgtgctaccaagaaaaccactcaagagcctgcacaaatcatgccatctataaacaacaacaaaacacatcagccaatgtgttttccttgagacgatctttaggaaataaataaagctcacatcccagaagccataaaacaaaaacaaccattaaatctgaggtgtttttttaaatgtataggagctgaataaaaaaatacaaatgcaaaaaacaaattggaaaaagtatgacatgtgtgacaagaaaggcttccccgacacacacaggccttgcacacagcagaggagggcagccagcaaccgggcggacagcacacagagccacacagaggagaaggcccagggacacgcgcctggagctgggctctccaccacctgttctgtcacccgtccgccaacgattttatcaccaacagtaagaatggtatctcacctaacagacgctcaatcaaaatttgtggaattcataaatagcaatgtgtttaaccccactaatcattaaagaaatataaatttaaaagcgttaacacatggttttatcagattggcaaagattttaaaagactgtcaccaaaggaatgaggacataaatacccctgaatacgccaatgggaataaaaccgggaaacctctagcccagccttagactcttcaatgcggcaatcctcacgacaaaacacaacctacacacataggaaagggtcaagggtaagcgttaagtcaaaagccaagtgacaaacgtgtttgcgttgtgggatgtgttcaacaagataacaataataaacattaatatccatatagggaaaaagtggagaaatacatgtccaaataaaaggggattatggcatccatggtttttctatattacatacttcagagaaacaaatggtttagggtggatatgttatacttcaataatcagaaaaagaaaagattttccttaattcttctttattatagaatgtaaacagttagaaagacaaaagttaattagaagcattaaataaggatttctcaaagtgtgattattaactggttagtataagagaaacctgcatcaagagcaaatgaactgcccggggctctcagagccccaacacaggccctgtcaccagcacgtccccgaggctggcccagctctcagcagtggagatcagggcgcccttacctggcagcagggggtcctcaatgcacagcatcgacggtctgtacccgctggtcatggctttcatgatctcctctttggcgatataggcacctccttctttgattctaataccggttttcaagtaattaaaatttctcccatagagttcaaaaaattctacaagaagcattccaaggttttcatcagctctccgggcatcaattcttggatgcaactgtaaaagcaatgcacccacaatttgtatggattcatggcatgttctaaagaaaatagcacgcgacgaagtctgctgtccagcagcctcttcaaggcaataccagtgagtggcactcgctcactcaccagcaccacgaggaagcctgaacagcagcctcttcaacgaggagtgttcaaaaggaacacaacggactcatctgaattttagtgtagtttgatttttgaaattggtaatccatacagcaaacttcctgcaaacacagatatctgattaaccaaatatgggcaaataagttggactatattctgcataacttagtcacctggatggtagatgtaatttcagattctcgtcatcctaatttcgttatgctgaagcacaaccaacaggggtcagtgttagactgactagtatggcagtatcacataaaaccggaaaagtgaaaggattgattttagctgtgtaaaggtcattagcattatatcacaatatttatagcaagcttccatcctgcttgtcacacagatgagcaccactctcagttcagtgccatatcgtcttcaaaagcaggcactgggcttgttcggaagtaaaccactgtccaccacacctcctgagggtcataattctcagctgtccagacctgcattgcccacatgtctatttaaatgaattaaaacaaattaattaaaaatccagcttgttgctctcaccagccacactgcaatactcagtagccacatgtggcgccctgccccttgccggaccatgcagaagtggccatcaccatcacagaattctatcggacagtgccaactcgaaagggatggacgagggcacatgagagaaagccctcagagaagcacggtgcttgaaactatttataacacagagtgccaggaggagctgcagctagaaagcatacaaatgtttttagggttcagaagaattccggagttctctgcatatttccaccacacaagaggaggattccgattctggcctgacctttattcccttccttattccttgtcttttagccaaaatcacatatccaagagcctggccggtgccagggtgggcctcctcccctcacttagtcaagaaactcagatgctgccacagtcacaccgctgaggcaggacaagctctgggcactggacaaggcacagggatgtggcagtgaacacaggaatcccactcatgctgtggtggcctcctgtggggtcacaggatcactgaaaggaccccctgagggggtggaggaggccctggacccaggcctggcacatggcacatgcatgatcaaagtattaagtagctgttgttactacaaggccatgaaaatagtgcaagtcaggagtatatcagtaaagaacagaggcccatgtttaattcaaaataatgtccaaaaactatggaagaaaggctatatataagggccacatctcagaggggaaagtgaagacaggacagtgtgactagaactgtaagaaaacagacatggaattccattttcactacttttaaagcatcttggcagagacagaccaaggaagctgcgatcatcacaggtagttacccagtgattctactatcatagcattcatgacagtgagaacattaccaaatcatggacagattcggtaatctcagcacaatcacaaagaccaaattaatggtaaacactggagaaatacagccgtgcggctaaattatataggcaagattttgtaaaggacagaattcttcactcaagaaaatataaacggaataattactgttccaattagagatgattttatatgtttaaaaagtataattacagtttatcaatacatcacagcatttaacaatactttttaaaacacgtaggttttctattgatagattttccatgttactcagcaaaataaggaccacatataatttaagacaaaataatgatgtttcatcagtctgagaaagctctcttgtaaatccttttctcatatgtggtactcaactttattctgagacaaatttttttcaatataaatcacagacaagcaccaagaaatgtttattgtttaccatgaaatggacatttctgaatacagagaattccctgagcttggactgatgtgcactggactcacagaaccagacgggcacccctgcaccaacagttacacccagtacaaaatgagcatccagaaaggtgcattaatcaagagggtttga

SEQ ID NO: 318299 - DNA, 4001 bp, Homo sapiens
cccgactgggtgcagcgggaggccgccccccgcaacaagtgccgggtgccatggcaacagcgggaatttcccgataggggaggccggaagcagcctcagccgggctcgcggtagcgaaagcaaaatcccgggggagcaaaatggacgaaaggcgacccccaggcaggggcgctgggtgccttgggaatccgaggaatcccttctctttgccagtcggaggggactagagggagccgaaggggccggagatgggccgagcgctgccccccgggggtcctcggcgccgggcgcagcttacaagcgcagcgcagcgcagcaggctccattcccggccgccgccgctcagcccattgcgcaaaccaaccccgctctgccgccgctgctggaacccaggaagcgtgcttggaggcttcgggcactacgcggggctggaaataccacgcactgccccttcgcctagacccccgctccggccacgcgggctctgccctcaaagctggtggctgcctcagacttggcggtgggggaggggaaggggagaggctggcgccccctcccccttttggctcccgcgctcgttgcagcagctgttgccaaatgaaccccagaatggggacgtgcaaccctccaccccacccccagccacagacgtcgcggtcagaaaactgggaagggggcgctgggtccgaggttctggaaaagcaagaactcacctgcaaacaggcagtccttctcagctctggacttctggatcacgacgtcgatatccttctgaattcgctcttgccttgaacacatccccattaaataaatccctggaaaagaagcagccgctatttccaccccaccccacccccctcgcacgcttccagctttcgtaaatattcagttaaaaatgaaacctctggccgaggcaggggctgaaggcgaagtggtttcggaagtgatcctgggtgagagaagaggaggaggaggagggggaggaggaggaggagggggaggtcggctttgcattcccagatgtgaccgcccagctgctgctcgccgctgctggattccaatttcctccccttctgacaatggatggtgatgacaccaagtctcactttctccctcacccgcccggaccaacggccgtgggggccgaggtgccggggacagccagagagcaatcaccggctgggcggcgggcgccggcgaggggcgagccccgctccggctcacgcgcgcacacccctcacggctcgcacgccggccttccacacccgcgcacactcgcgcccgcgggcggcggcagccgtgcccaggctgctgcagcgccgcccgcccgccgcagaccctccgcgcccgccgcctagtcaccccgccggccgcgggctgccggggctcgcagagtattagccatcccgggcgggagccgcttctccccacaccgacctccactcgcgccgggagctgagcggtcgtgaagactccctggggctcccagccttccctctccgcgcccctccccccatcacttttatgaattcgactccactttctaaaggaattatagtcttgtggcaaacccaaaccggagtggctgggagggggaaaaggggggaaaagaaaatctttaaaaattaaaaaaataataaaacgaacaaatctttccttattgccacatcacataacacggaaaaggccttaaaattactccagacgtgcaccctccccttccctcagtgcctgagtctttttcctccagatcgaagtagttcagcccttttggggcgccgtttacgaaacacagccccttttgagggacttcctcctcttgaaactcaccagttctcccttcctaggtgtttctgttcatgagaaatggtcagaatcaactggcacgttccagggtcttcctaaaagatggaaacctgtttggcttgatttttaaaaccacctcctttgacagtcaagggaaagctacaatccaggtgttcagaaatgagatactgctctgattctcactttctgttctgcctaaggacaccccaggctgacgtagctgccccacctctatattggtttatgccctaggagaggtctccagcaggcacttttcttgttgatcttttctccactgagaaggctcccgccagtagaccatgactccttttgctttgcatactcagtgccatgtacagtgcctggaatacaggagggtggcctaaatgttggctgaatgcacgaatggtcatttcttgcagcctcttttcattaccctgtctcatcacttttcttatcagcataagtgcccaagagttgccaaactgtttcagacccttaatcaatttagttctgattctgaccgtgacaacatgatgttcagcacggtaggaatgactgccatccctgaaggagtcttaagattctgtagaatcaatgaaagatcctatgttctaactcctttatctttcaggaaacaaattacaaaataatttccttgtccagtcatattcactatgagttacaaaaggaaacattctgcattattgagatccactgcagcctttgatgtagtaaagccacagtcacaacagtctatatctcctgctcagtcctctcctgaaatgcttcctgtttagggtaggacaggttcaagccctttgtccttcctggatatgttgctttgtgtaggccctttggctgccaaaaatgctctcttctcttccacatcaccactgagaatcatgagtatttcttcttccattatgtgctttaatttctctgaaaggctgaaagtctattaactcacaagaatttattttatagttatctagccacaaggcttgcatcttccaagtagaacccttactacaaataaatgtgaaatagttttaaagctaccaaatatttttttgtctggatgagctcttagtttactactcactccttaaaataggccttcttgtgacttgtcctatatttgatttttttttaagcttcatgggctgccctgttttggttaaacaaagctaacctcaccctgttcatgcccttaaggtgtgatgtatttaataaatatttgtacatttgaaggagtaagattaaaaaataaaaacctatctagtatgtatttctgcaagataaatttctctaattaaaaactataccaacgtagatccttccaaggatcttccaggctagatccttatggagcactttgctcaaagtaagtcagcccatatccaggatcctttctttaccttgccccatctccgaatatttaaatgtttatattatgtgtgctcaacatacttcccttatcaaaaactatatgcgcctttgagatgaaacagttctatctctccttaaacactcatgagtatacaacatacacacacatgcattcaggaacgtggcacataagaggcccttcaccaatttgttaaataaataaaatcaatatttacagtgagggagaactcaggtggtatcccaaactaaattgaagataataatctacatgttggatgatagactctactgaaaaaattccaccggtttagaataatgattcaaagccaccagatataatttattagtgaaaaatataaattttttgcctgtgccaaaaggcccaactgcggaagtataaggtaatggacatgcggcattaagttcaataatgtgatgtgggtattaataactaacatttatccagaacttaatatttatccagaacttatccagaattcattaacatttatccagaactggtagaaactgttctaaaagctttacatatagttactcatttaatattcacaataacccgtatatactagctgttatttttctcattttacaaaagaggaaacaggctcaaaggggttaattcatctaaggtgagacatggactacaagaagtttttttctctcttgaaacctttcagcaattgaattgaacttaaaggaataaatatgtacagaagccacacgaggaagtaaaccgcccc

SEQ ID NO: 318300 - DNA, 4001 bp, Homo sapiens
cctaacagcagggctggtctaaggaattccctctaagctaaatctggtacttctcatatgtggctactgctcttttaaactactgtgtccctaaagggctaaaaggaagaaaatcctaactcaacaagtgaaggtagcaaggcatagtatttgaatggctacctttcattttaactctacttcctaaattcaaaattggatttgggtttgtttcaagttgttcacaatttactaacgaaatgtgcatctctcattcttcccccaaaagaaagaagtcatccactccagctacatataagtctccaatttctatacgtgaaaaccgaaataccactcattgaaaaaaaaatgtacagagaattggcaggctgcatgtttatgtaaaccttcagaaaacatggaaacacgcagccccaactcaccaggaaaatcaacacttctgatcaaactattttgtgacattttatgtcttttatacatttcacttcatatccagtattccagttttgcaccggcgtgcctgtatcaaccccaaatcgcctgagagcaatctagtactgtagcagaacagtttcaacatgaagagttctgctcattgcctgtggcgtggtcctcgaaacacctgaatcaaacattgattcccctcctcctgctatttaaaaccgagggacgtcaggcttgggtagcaggtaaagaaaagccacaataatcaaacaaacaagcaaccaaaatacccgaacacggaacacgctaagaacaaaggaaacacaagagtgtgaacaggaaatgaagcaactctatacacataaataccttctggggccgccaacgtaggtaaaagtaaaggtggagtcagagtatctgaaatctgaaacagaaagtcccgtcaaaagctacccctggagtggatttgttttaaccccgatcaggacttgagccccacattcggtggtgtcaggggaggcctggccgggcagaaggcaagggctagagggcggcgaggtccctctgcgccgcgtccgaggggatgcggcgcgcccccgactgggtgcagcgggaggccgccccccgcaacaagtgccgggtgccatggcaacagcgggaatttcccgataggggaggccggaagcagcctcagccgggctcgcggtagcgaaagcaaaatcccgggggagcaaaatggacgaaaggcgacccccaggcaggggcgctgggtgccttgggaatccgaggaatcccttctctttgccagtcggaggggactagagggagccgaaggggccggagatgggccgagcgctgccccccgggggtcctcggcgccgggcgcagcttacaagcgcagcgcagcgcagcaggctccattcccggccgccgccgctcagcccattgcgcaaaccaaccccgctctgccgccgctgctggaacccaggaagcgtgcttggaggcttcgggcactacgcggggctggaaataccacgcactgccccttcgcctagacccccgctccggccacgcgggctctgccctcaaagctggtggctgcctcagacttggcggtgggggaggggaaggggagaggctggcgccccctcccccttttggctcccgcgctcgttgcagcagctgttgccaaatgaaccccagaatggggacgtgcaaccctccaccccacccccagccacagacgtcgcggtcagaaaactgggaagggggcgctgggtccgaggttctggaaaagcaagaactcacctgcaaacaggcagtccttctcagctctggacttctggatcacgacgtcgatatccttctgaattcgctcttgccttgaacacatccccattaaataaatccctggaaaagaagcagccgctatttccaccccaccccacccccctcgcacgcttccagctttcgtaaatattcagttaaaaatgaaacctctggccgaggcaggggctgaaggcgaagtggtttcggaagtgatcctgggtgagagaagaggaggaggaggagggggaggaggaggaggagggggaggtcggctttgcattcccagatgtgaccgcccagctgctgctcgccgctgctggattccaatttcctccccttctgacaatggatggtgatgacaccaagtctcactttctccctcacccgcccggaccaacggccgtgggggccgaggtgccggggacagccagagagcaatcaccggctgggcggcgggcgccggcgaggggcgagccccgctccggctcacgcgcgcacacccctcacggctcgcacgccggccttccacacccgcgcacactcgcgcccgcgggcggcggcagccgtgcccaggctgctgcagcgccgcccgcccgccgcagaccctccgcgcccgccgcctagtcaccccgccggccgcgggctgccggggctcgcagagtattagccatcccgggcgggagccgcttctccccacaccgacctccactcgcgccgggagctgagcggtcgtgaagactccctggggctcccagccttccctctccgcgcccctccccccatcacttttatgaattcgactccactttctaaaggaattatagtcttgtggcaaacccaaaccggagtggctgggagggggaaaaggggggaaaagaaaatctttaaaaattaaaaaaataataaaacgaacaaatctttccttattgccacatcacataacacggaaaaggccttaaaattactccagacgtgcaccctccccttccctcagtgcctgagtctttttcctccagatcgaagtagttcagcccttttggggcgccgtttacgaaacacagccccttttgagggacttcctcctcttgaaactcaccagttctcccttcctaggtgtttctgttcatgagaaatggtcagaatcaactggcacgttccagggtcttcctaaaagatggaaacctgtttggcttgatttttaaaaccacctcctttgacagtcaagggaaagctacaatccaggtgttcagaaatgagatactgctctgattctcactttctgttctgcctaaggacaccccaggctgacgtagctgccccacctctatattggtttatgccctaggagaggtctccagcaggcacttttcttgttgatcttttctccactgagaaggctcccgccagtagaccatgactccttttgctttgcatactcagtgccatgtacagtgcctggaatacaggagggtggcctaaatgttggctgaatgcacgaatggtcatttcttgcagcctcttttcattaccctgtctcatcacttttcttatcagcataagtgcccaagagttgccaaactgtttcagacccttaatcaatttagttctgattctgaccgtgacaacatgatgttcagcacggtaggaatgactgccatccctgaaggagtcttaagattctgtagaatcaatgaaagatcctatgttctaactcctttatctttcaggaaacaaattacaaaataatttccttgtccagtcatattcactatgagttacaaaaggaaacattctgcattattgagatccactgcagcctttgatgtagtaaagccacagtcacaacagtctatatctcctgctcagtcctctcctgaaatgcttcctgtttagggtaggacaggttcaagccctttgtccttcctggatatgttgctttgtgtaggccctttggctgccaaaaatgctctcttctcttccacatcaccactgagaatcatgagtatttcttcttccattatgtgctttaatttctctgaaaggctgaaagtctattaactcacaagaatttattttatagttatctagccacaaggcttgcatcttccaagtagaacccttactacaaataaatgtgaaatagttttaaagctaccaaatatttttttgtctggatgagctcttagtttactactcactccttaaaataggccttcttgtgacttgtc

SEQ ID NO: 318301 - DNA, 4001 bp, Homo sapiens
ggaacctggagtctgtagaacacactgagctgttttctctgagtgctggaccatccacatccccgctaagatcagtggtatgcactttatgcccacaacagacacctgcccagcagcagggaccacacccaggactgggaaatggagccacttcatctacataacatcaaaggcccccatgagggcacattcacagcagaacccttggtggtgggcttaattttttcaggggatggggggtaggctaggatttgaagagagtaaactagatctaaggcctaactttgttacttttagctgtgggatactaaactccgcttttctgaattccgggatccttctgtctgtagtggggatattataatatctacctgccaagattttttgaaaggcttagattacagatcttgaatgtgagggtacctagcattgagcctggcatggggcagcgctcaaatcatgtctgttgactcattccttcccagaacaccctaatcttactggatcactagcacctggggcagagtacgcctgaagacacgcctaggtgacagtaggcactcaacttgtgttctccccttcgtggacaagaagcggcggagtgcctatcttcctccgtcttcgagctattttaaatttcttctattacagcactttgggaggccgaggagggtggatgacgaggtcaggagatcgagaccatcctggctaacacggtgaaaccccgcctctactaaaaatacaaaaaaattagccgggcgtggcgacgggcgcctgttgtcccagctactcgggaggctgaggcaggaaaatggcgtgaacccgggaggcggagcttgcaatacgccgagatcgcgccactgcactccagcctgggtgacggcgtgattctccttctcaaaaaaaaaaaaaaaaaaaaaaaaaaattcttctattaaagaatttcaggccaggcgcagtggctcgcgcctgtaatcccagcactttgggaggccgaggcaggtagatcacctgaggtcaggagttcgagactagcctggccaacatggcgaaaacccctctctactaaaaatataaaaaattacctgggcgaaatggcacgcgcctgtaatcgcagctactcgggagggtgaggcaggagaatagcgtgaacccaggagatggaggttgcagtgagccgagatcgcgccactccactccgggctcggcgatacagcgagactccgtgtcgaaaaaacaaaacaaaacaaaacatttcaaactgaaatgggcggttaaaatgcaacttaaaatgagatggtgagtttaacgcaccacttttccactaggtggtgctgcatgttaaaactttccctccatttactccaaaatattaatttctacagcaggaaaactgacggccccttggaaaaggaaagaaaagtcaatatgtcaccaaaaaagacaatttattaataactcctccaaaacctctgtgggttccccttggagtgaagcgcgagcagggagccgccatagggagccaggcccgcagcgccgttcgtcctcagcacaacgagcggcagcgggcaccgaattgttctgcaactacttttcacatctgccttttgtagttgctgaacaaaattcgttcccatttgtttccggttggcaagttcgtaggcttcggcggaagtgtaaagtcaagggcaagtggcggaggctgcggccaccccggtctctgagcggcgcaccggacaggtggtcagtcccgggacgcggtgacccgacgcccgagctccaaggctcggcccacgccgggttcgccccagtcccgctggtccctcagccgacgccgccgggcctcgcaccgccccccgaccccggacccccacccacgcggccgctgtgcactcaccatggccgctagccctaggctctggcctcgcagcgccgccaacaagcgccgcgtcgccccgagcgccccgagcaccgccgccattggccgtctgccgagggctgccccgcgcgctgcctgccggccgcccacagccgcccccgacccgaccacgcccagctaccgccagccctggtagtctccctgcggggctggcccggagcggggtctgtgtgtgggaagcgcccagccttcccgcgggcacaggcgcagcccggaccccgaacacccccaggagcttcagcggtcgccagcgcccttggccgccaggtggactctgcgcgccccacagccgtaggcccagcaggcgcgcgcggtccccgccccgtgcgggcccgtcgcgtctgtgcccgggacgcaggtcgcccggcgcgcgctggccttgccctccggtcctcgctgcgctaggaggaacttcgcccagcctcgggcgccggcctcctccgcttcgcgggcgctagcaccgagctgggctccccgcttggcggcgctgcgcgcagtccatgcgggcaggaggatgtcgtaggccagggcggggcagttgagcggcggggctggggcagtgaaccacggcagttcccatcgggggctcctaagtcttgcagtagtgggttcgaacgcagcctctgttcagtcatcacgcagctgccaagttcttgagccagctggctcgtctgggtttgcctggaccaaaaagtgtggaaacccggcctgtaatcccctcccaaacgtgtccgtgccctgtttacccccaggctcagcacacagtaggagctctgcagacagctgtgaacagatttaggtgaatcttttcttgtatcatttttggggaggtattctttcattctttttttttttttttttttgacttttttgagatgtaattgacatactattaagaatactcacttgtatcttttttttttttttttttttttgagacggagtctcgctctgtcgcccaggctggagtgcagtggcgcgatctcggctcactgcaagctccgcctcccgggttcacgccattctcctgccttagtctcccgagtagctgggactacagtcacccgccaccacgcccggctaattttgtttttgtatgtttagtagagacggggtttcacagtgttagccaggatggcctcaatctcctgacctcgtgatccgcccgcctcggcctcctaaagtgctgggattacaggcgtgagccaccgcgcccggcctcttttttgtttgtttttaactgaatagtttaagcaggccaggcatggtggcccgcacctgtaatcacagcactttgggaggacaaggcaggaggatcacttgaggccagatgttcgagatctgcctgggcaacatggcaaaaccccatctctattaaaaatacaaaaattagccacgcgtggtggcacgtgctggtagttccagctatccgtgaggctgagatgggaggatggcttgagcccgggaggctgcagtgagctgaaatcacgccactgcattccatcgacagcaaaataccctttccctcacccccctcaaaaataaaaaaaaaagtttatgcaaattaataagcagttttgcagaggatatggcaaaatattttttttaagaacaagagtccatttaacttcaacttagcagttattagcagtccatccatatggacctagaaaaaataaagcattttgcctcaaagtagcccaaaattcacgggcttctgttcttcccatttgcccacttgacaaaatgtaaccatttcgccgggtgcagcggctcatacctgtagtcccagcactttgggagggtgaggcgggtggatcaattgaggccaggagttcgagaccagcctggccaaaatggtgaaaccccgtctctactaaaaatacaaaaatcagctgggcatggtggtgcgtgcctgtaatcccagctactgaggaaactgaggcaggagaatagcttgaacccgggaggcggagggtgcagtgagctgagattgcaccactgcactccagcctggcaacagagcaagactctgtcaaaaaaaaaaaagatgtaaccattt

SEQ ID NO: 318302 - DNA, 4001 bp, Homo sapiens
aaaaggctgaaactcccacccatctcccactttggcttgaggacccaggactaagggttttccaggatgggtaatggtgtccagggcaggccgagcctcctcagctccctcacatcaaagagagaggcatcttcagcccatggggaaggggaaaggagctggggctggcaggaggccagagctgagatgacagcgggagatacacccacctgtctgcagagacgctttctttgctccctcccagtccccagccccaccaagctgcctagcgcctggggcagttcccatggagaggggtgctgagaacttcaacagaggaaattgaccccccactgaaccccactgtaccaagcaccccacatctatgggcaccccatgcctaggggaggaggcatgtatacagacaccctagtatgttttttcagaactctgagggtcccacctggctaaaatgatctcatctgactttgtcaggaagaggcaaaatgaggctatatcctccagcttcaggaaaacctcatctggctaaagagaaactatccctggttgggaagatactctcatctcaggagagattctacctggataaacggtgattcctttgttccaactcagctcacctggctagcagagaaggatctacttgactagggcgggagttttacttctcagaggttcccccagcttgagtctgccttaggggtcacgggaaactgttcatatgctatttcactgtcacctaagtagcctgatagaggaaagtaatatcacctgctggggtggggtgggaaagactcccctggctgagtttggggagaaggggtctcactacagtattctggcagtttttcccctaagtgaagggaactctcacctggttgggtgggctcccatttctagtggtgggtcaccctgacagttatacggagggggcctctcacctggatgaccgagtggcctatggggctattctcagatagttcggcctcataggagggccgctcaaacttgggggcgttgtcattggtgtcaagcacggtgacacgcagcagggcactgctggcgcgtggggggctgccgccatcctgcaccttgatggtgaggtcataggagtcccagcgctcacggtccaggttgcccatcacaatgagctgtggttgcttctcctcctggtcctctgccacctgcagcccaaatagctcctgggcctcaggcccagcctgcagctcataggatgccacaccgttgggaccagcatcacggtctgaagccagcgggatggggaagagtgagccgatgttggtgttctcagggatggccagagtgatgactggtgaggcgaagttgggtgtgttgtcattgatgtcttgtacttctatctggccctctagcagccgggggctgccattctgcacgaggtctgtgatagatacctcaaactccaggatgcagggatcaccagggagctggttctggcattcacggagcccctcacggtcgatggaggtctcggtggtgaaaatgtcacctgtcttgccatccacgcgaaggtacggggcacccacctctagcttgtacaggtgccccacatctggaaaaccatagtcggctgcgaggctcccaatgagggtgttgggtggctgttcctccggcaccttgtacactacccgagtggcgtggcctggggatggagccagcaggagcagcagtgctagcagcatggagggcagcagtagccgttgccccccagggcctgggctgtgcctcaggtgctccatcctgggaggccccagaatcaggagggctgcaaggggaagaggcaaaacagaggccatgagctgggaagaaaagcctggccctgagctgcccagagctggccccatactcaccctctcccactgacacacgattctccacaagagcagtcagtcccagcacagaaccccgattccagaaactcagatccctgaatctcatccacagctgggtgtagcagcagtgtctgccccagctggaggagccagtaagaggcctggcatgcctagagcagctcccgcccatggaacaccctcacccacctgacgctccctgggcccaagcccggctgcccgccctctttccttcttttcctccttgctctctgctctgtgcttcacccaacacctccttctcacgagcatcctgccttagtcaccgatggtaattaccttgatactgagatagggagagagagccagtggaagggtgagacctcgagcatccccaactggagcacccctccccacatgcatggtaggaaagagacacaagtacgtccttacacaccccagaccctgggaccttgacttgtcacactgggctccattaaggttggctggagggagaggggatgatgtctcatttctctttgttctgagatgccaagtcagtgcatatgcatgaggtatgacatctcaaatcctctttttctgacaatcacccacggtgcccagtattctccacccccataaaaggccagcttgaattgggcaaggcttgtgaaaatggttagggttgaggagtaggtgttagccttcccgactttcccccaacacatatgccccagaacgtgcacacaggccacagagcgtgcacacatgccccagagcatgcacacatgccccagagcatgcacacaggaacatgcacagttgctagggctcctctcctctccctcctgctgccatgggcaggtgcgtacaagggaacacaggtcaagattggggtcagaactgtggtcagggctgactagccctggaattggcattgggagctgccctggcctgtccttagcaacagggagcccagcaggtctaactgggacagagctgccgatgataatgacaccagcagcctttccctggccactcccccaccccacaccctctggtctctggatgaacatctggctcttatttgacatccatctccgtatatccagcccctacttcacacttgcctctcccaacctctgccctagtcaaccacaagctgtaccccatcacaacaataacccccttcttctgcccatctcccctggctttgaggtcgtgcatttgcagatcccagctagacccagctactgtctctgtcttgaatgccccctcctctccaacaaaatcatggccagtccctcctttattcaaatccaaaatctttggatcagcagtttctttggaggcttctggttcagtctcctttccccacttcctcacttttacctggaataccttccccacacctggaacacccaccccacatcaatcccactgagggcaggctctggccctccaggaaaccttcacagtcctctcctgcccacggtgacctctccttcctccaactcacagccacttattgtctgctccaatcccaaggcaatgaatcatggggctgactgggacaccgcccgcctgtgttgttcagcttcagtattgtgcacctattcctgagttctctgcctttccaggcaaacacaaagcactacgaaggaagggacagtactctgtacactcactcatcccctgccccctaacaatgcacctttgcacatctgggtacactgtagggactcagtcatgcattcaacaaatgtttattgggcatttacaatatgccaggctctgtcctgggcactgggatgcagaagtaaacaagactggtccaatctgccatgacagtgcttctaactcaatgactatttgtccattttgtttggttgcttctgtataccatttggcgaatgtaaggcagcagggtggagaagagcgagggttgtggcattagacagtctgaggcaaacccagctgctcacttcctggctgcatgacctgaagcaaagatttagtgcctcagtttccttacctgtaaaatggggataatactacctatttcctagggtgtttgagatactgtgggctaaatgtgggtactcaacaaaggactccttcaaagcatttagc

SEQ ID NO: 318303 - DNA, 4001 bp, Homo sapiens
cattctcgtccagcacattgatggtgacaccaacgtaagctgagcgaggtgggacgccaccatccactgccttcagctggaaggtgtaggtgctttgttgctctcgatcaaagctcaggctggataggatggtgcctgtgccattctggataacaaagtcaccgttgtcctgctccactgagagctgcacctgggcattctcccccttgtctccatcaatgacagtcaccatgcccactggactcagtgctggcatgttctccatcactgagaagttgtagccactcagcataaatttggggtcattgtcattgcagtccagcacattgacaaggacagtggctgtgccctggaggctaggactgccccggtcagctgccaccaccttcaactcatagctctcccgctgttcccgatccagagatgtcttcacctggatctctccagtctcgggtgagatggtgaagaggcccttagcagccggctcaggctccagagagtaaaccagctcagcattagagccagagtcagcatcactggcagtgatctcagcaatcacttcaccaggcttgttgttttccgggaaggcgacctcagtgacactctgagtgaagacaggtgcgttgtcattgacgtccaccacctgcaccttgagggagttagtgctggagagtggggggttgccagagtccacagccacaatctcaatggtgtagtctttgaccttctcgtagtctagcggggtggtagtctgcaggaaatacttcttcttgctgtcactgcctgtctcactggcctggcgcagctggaagggcacatcacctgccaccacacaggtgacagctgcattctctccctcatctcggtcagacacctgcaccagggccacagctgtctcctctgccacatcctctgagatgttagccatcccatcttgatgagtcactagccctatgccccggatctcaatggtgggggcattgtcattcatgtccttcacggtcacaaccacctgggcacgggcactcttggggttggtgcctcggtccttagcaagcactgagaagcgcagggtgcttaggtcctcacggtccaccgggccctgaacagtgataagtccagtgttcctgtccagtcgaagaagacgcctcacaacttcgggcgcctggtggaatgtgtattcgatttctgcattggcaccttggtctgagtcattggccttcacctatagggcaggagagaaaaacaaggagaacagagatggtttagatcagggatagcaaataaaggggcacacatgctgccaatgtcctttccaacaagcatggcagacacagccaatccaacatcgctccctttccagaagccatgtgtgtcctgccttttcccaattcggacattctggcaggcattactaacctattttcctgaagagcccagatgcagcctgcaaatcctcaacagtgctacaggcaactattggagatgggacagggcagaattaaacctcacttgtcattgctgtatgggtccacaaaaataccaggagaggatgaggatccaatagaactagggaagccatttcaccaatgaaccctgcctgaaccctcctgaagagatggagaggtgcgagtagtagaggcggtgtgtgtgcccgtgtgaatgtgcactacatgcacgcacgcatgcacatatgtatgtgtatgattgtgtcagaatgtgtgattaaatgtgatatgtttgtgtgagaaggtatatgtgtttgtatgtgtatgattgtgtcagaatgtgtgattatgtgtgatttttgtgtgagaaggtatatgtgtttgtgcatatgtgtgtttgcacacatgagtaaagactcacatgcccatctgaaggccccaggttgggggatttcttttgaaagaagtcaggtagggttgtgggtcagagaagccctccaggccgggccccagccaccgctctgtcaaaccggggaaacctgtttcagcagcaacttctcctcccgactggcaccggctggcgaggcaccaatgcgaggaatccggcctgagcctgcagccaggagggaggggttgatgcaggccacagagcctgctggcagtgggctgggctcccagcatcaaacaatgaactgtctgtccctctgcagtcagcgggcacaccctcccacgccaactccaacgcgcactcgactcaactctatacaaacatggttggtaatggggaagaggacccaggtgggaatggccatggggtactactgggcagggagaaacatgagggctggagttaggtcacagccagacagaatgtgactgctgtggggagtgaggggagaataagcataacttggcagagtctctggggtaacaaaacagaagagtcctgggttcaaatcccagttataccacttcccaagtaactatgtgaccttgggccaattatttaacctccctaagcctcagtctatgaatgtgtgaaatggggataataatgtaacctatttcacagaactgtggtgagcatcaaatgggataatacaggtaaaaatgcctgacattgcccggcacagggaaagtgctccctaaagagcatgtatttctttttgtctgtccaaccatctaccctcctacccgcctgcctctgaaaaatcagtgctaatgcagtagtgggcactgcacctagtgagccctcaagccactgccagtcctctcctccttgggaatgggaactccagctatccccgcctgggcttttcctacagtgaagactcctgggcaatggttccccaggtaccctggtctctgctcacatctctgagtgccaaaccctaacagtttctcctcccctcaccccagtctacctgtcatcaactttatgatgaggatccccagtctcccttggctctagattggtcttccagcttatctgtctcttgtcttacctctctttgtctctgtgactcttggcttctgtctcctttctatccttgctcagttctgattcttcccctttcccacagcctgttttcttccatcctctcttttcagccctgctgacctctctgcttactctctgccctactctcccgcttcacctcactgggaggtggtaaagctcttacacacctaggctctgaagccagactcttggctgcggcaaaggtggactctgaactcattagctgtaggatatcaggcgagttttctaatctgtttgggcccggtttctcatctgcaaaatggggataatacttaccttgtactgtaaggattaaatgatataatacacatcatgtgtttagaacggtgcctggcacctaggctattattatttgctatccccgactgtctgtctcccttttctttctcagtctcttttccaggtcccagtccaccaggctctaaaaaaaaaaaaaaaggctgaaactcccacccatctcccactttggcttgaggacccaggactaagggttttccaggatgggtaatggtgtccagggcaggccgagcctcctcagctccctcacatcaaagagagaggcatcttcagcccatggggaaggggaaaggagctggggctggcaggaggccagagctgagatgacagcgggagatacacccacctgtctgcagagacgctttctttgctccctcccagtccccagccccaccaagctgcctagcgcctggggcagttcccatggagaggggtgctgagaacttcaacagaggaaattgaccccccactgaaccccactgtaccaagcaccccacatctatgggcaccccatgcctaggggaggaggcatgtatacagacaccctagtatgttttttcagaactctgagggtcccacctggctaaaatgatctcatctgactttgtcaggaagaggcaaaatgaggctatatcctccagcttcaggaaaacctcatctggctaaagagaaactatccctggttgggaagatactctcatctcaggagagat

SEQ ID NO: 318304 - DNA, 4001 bp, Homo sapiens
agccggcgccggaatcacaaagccgcgaacccggctaggcggggacattctcataaaaccgaccctctcgtggcgagcagagggggttttttgccctacgctcaatcctccaaggcctcagtgccgcccccagtctttcctggcagaagaaatagtagccgaccactgttggggaaactgaggccagaattctgacttacagagggtagctggggggaaggggtgcgagaccacctcgcctacaaattctgctcctatgcctgccgcgatctccgttctggctccagggcctgcccgcgcacacactggcctacagcggggaccaggcggagggggcgctcaggtgtgagacgaacccaggtgtgcgggacccaccaaggtgtgtgggacccaggtgtgctggagacccaggtggctcagaaaactcagctaaatggctggaagagggtcgcaatcaccgtcccaggctagcaccctctacaaaggaacctggggccccagagctccggggaggcgggatggcttggccagccaggtccagcttgttcccggaacaccagccggttcggcccgggagtgggggttggggaggcgccgactgggaagccggcaggccggcccagccttcccgctgtgccgatatttacaataataatgtcgcgattaacgtggcggggcgcttggggctcgccgaacgaccccggcggcttctcctgcctgaatctggactccgagagagaggaacggagtgtgtgtgtttgtgtgtatgcgctgcagggtgtaatgtaatgtgacactgttggtttaaggtgtgtgtgacacccagtgttaagatgggtgaagcagtggattctgtgtttgtgaccgtgaggcgctgctgtaggtgccaattcctgtgttagagtgtgtgccatcaagcgtgtgctgagatactgggttgtgtgtttgtgtgggtgcagtagaggggtgcaaggagacctgtgctgtgtacctatgttctggccaagaagtgggtaagatgatatatgctagggtgtgttccttaaaggaatgtggggggtggctaggttttgagggttcatctagtgaactgtggctgtgacactcgtacatgagggcacgagattgtgtttgtgtgtccacgtcgcggggtgtcacacccggttgtgttattgctctgtaaagccacgggttgtgtgtcggtgctgctgatcgtgcagacactgaagcggattctgagctggcgacggtgccccagtgggcgctggtgtgcgggaggtatgtctgtgtgcacatatgcagggatgtatgtatgtgtgtatatatgtccacggtctggccctctgggtgcccgcgagaagctggaagcggctgagtgagccgaggtagttgcccaacaagtgtgtatgtatgtgttgtggacaacggtccttgcttgctccgtcctccgggagacccccaccaaactgggggccgcgcgcttccccaaacccatcctccacgccgcgcgctcctggagtctccttatccccgtctctccgagcgcgcccaggtttgggacgcggggactagggttctgctcagcaccccctcccctccctcggcttctcgccgcggacctgggaggacggaatccctcagccgcatcccctgctatgggctcccagcagcccccacctcagccccctcgcgccgagctcgtgttgggcccccgcggcctcgctccgccgagcgcccctccctcagctcccgccggccatgaccgcttcgggccccaagccgctgctgcctccaccgccgccggatccttacccgcctccgggcagcgccggccgcccgccccgctgtccatgagccgccgccggccccggcctgggctgcggctccgcacggctggggctggagctgcagttcgggctccggctccggctccggctggctctgggcgcagcagcccggcggctttgcgtccgcgccgcgctcccgctccccgagtgtgtgaggcggcggcggcggcggcggcggcggcggcggcggcggcggagccagcagagagcggagcgcacagcccggcccgccccctccctcccccctccctcccggcccgcccgcctccccgccccccctccggccgggaggtggagctcgggaccgctccggtccggctgggaggggaccccgagcaccgctccccaaagcctggacccctccctctgccatctcttcactgcccgaggcccagtacacaggccgtgccctcctctgagcttcaccttacacttatcccacccaagcctccatctaggaccgctcctggattcccctccttaccctactcaaacacctgtccccagctctgtctgccccctgggaagtcgaggcaagggaagtgtctcccacagcgccttcttccctgggcacctgctcctccatatccaccctcttcccgcccagatccccgatcgccctgtgtggccctcccttcccgctgcgctcggggaaagtccacccctccccctccggccgaagccgcagagcggtcagcctcggtggccgcagcaagccgtgggggtggggctatggaggggaccgtgggaggaggaggctaatgggacccgggggctctagagtgaggatggggaagatacacaagcgtgaagacgaagtgctgctcctgagcttaggctattcgagggtcccctgatcacctgccctctgcacggcgtagtgctgcggccacacgtatttgccagtgacttacattatacagtcaccgggtccctgccccgcgaggccgcgcagtgtcacggcctgtgtcacacgccctcgcagtgccacacgctccctatcacactcacaccaaatcacacacggtgtcacacgcagtgtctcacacactccaatactcggtttctcccattcagctctggctctctggcgccatctagaggtctctgagtagcttgggaactccctctcctgcgcttgcggtttggtaacccaggctaccaagtgtcccagttcaacaggacctcctgccttcttcgcctgcaggcccaggcagagtgttctaggtcaaaagaatgaggaaggttatccctagccaggcctagtgctgggtgaggaaaggctcttgttatgggatgaccagttgttgggcctctttttgccatagcctctgactccccatctctgtccttccccattttcctgttcctaccactcttctgtgcctttcctctttcttctacttccttctcttctcagctctggcctctctcggtgggatgctcttcagggtaaaagtggaatctctggttagctaagagggcaagcaaagtctgtccaagatctctcccagagcagccctgcttaactggactccttttctgacctgggctctgctctatccctcagccccaggagcccaggggcagggctctagatgggagatggggtaatctggtgaaagaggggggtgggtctgttctgtaagtagcttctttctgtctctagaaagctcatactctccacatcattgagcacagctccgaggagggaatcagtggcccagagagaagaaatcttccacagaagagctgccccggtctccctgcccccagcgtgtgcccgctgcccaatgcagcaaaccctccccagtctgcttgctgggagccattcaaaggctcctctgttctcctcccttgctcagggctgagcaggatcagcagccgcagagctgggcaggaaatgctaatctcccagatgttcgcctccatcctccctgctccaccaccatcaaactcaaattctgcaccaagtggtaggagcagaactgggccacagcagcagcaccagggtgtgcctactcttctccctgctccccagcccctcctaccccagctgccaggctgggctctgtgcccctgagtcagggacaatgtagatatgagaattggggccttttttccccaggaaagagggcaggtgagcaagcaggg

SEQ ID NO: 318305 - DNA, 4001 bp, Homo sapiens
gagaagcgtaccaggtgcagcatcttcttggatttccagtgccagtgaactctcagcaaacgcagggctattgtcattggagtccaagacgttgaccttgaccaagctggtacctgacttgggggggttcccattgtcataggcagttaacaccagatcaaaaaatgaatggatttccctgtccagctccttcaccactatgagttctgcatgtttggtctcatcagggcccacaatgacatccaaggcaaagtgctcactgggagacagagtgtaggtgtgcagggtgttagggcctgtgtctgggtcaagagctctgtccagggggatccgggttcgcagagaggcgctctcagagatttccagctcctgctcgcctttgggaaaccgtggctggtggtcattgatgtccagcacttggatctccacatggatcagagccaaatcccctgtggcaagcacatcaaaggaaaccaggcagggatcccactgtcggcacagctgctctcgatccagccgcctgcctgtgctgagcaagccttcctcagagtccacctgaatggggagcgcctgaggcagctgcaacacctggaaggcagccccagcttgcctccgcctctcctcccggcccagttcctgggacagcttcccgatcactgtaccagatggcacttcctctgacacttggtatttcaccgtgagagtggtcacctcctgacaatcccctaaaagaaataagtagccacctggccccaaaagccccagcagaagttgcagaagttgcatcatgcttaccgccaagtgggctagattcagaaaccactagagttctttcaaggctggacaagtcctccagtgtttcctggatggcttgatcagccccgtgctccttcccccagagctgccggcacaaccttgtcccatagttagatgattatgaaacaagcaggaccccaaggcaaggccatcttcattggaagcgatctgagatgtccaaacgccgatcaagaattgccaggggagaccccctactggggaactagttggtccacttcagcaaatgatggacaagagctggtctaagagggacctgacccagttgagcaggatgtgggactctgactgccaaacagttgctaggctggggaaacagagaagcagctttttcctatggaaaccccacctacaggaaaagggagggctgtgagtttcaatgccaattagagaaagagcatttcctgtgaagctaagtggcctgccgctgaggaggatgaggccggggctccggggacaggccagatgggaagctgctgtccacgcagcaaggcggctgctgagggaaagggagcctctgcatcaccaagtgagcagaaaacttgagcctccacctgcttgcacgtggactgatgcccctcccgggcaagtcatgtttcctgtttctctccccttccccaactctctttgttcctatcttttcccccattgttcccctctcattcctgtctttttcccaatcttgtttacctctctgtcttgactctgccctgatcacccgtttttgtctcactggaaagcagctgtgattaacagagcagccatcagaggtaaactgcctgagttcaaattctgactttgcaacttaccagcggtgtcatctgggacaagtcacttaactttcctgggcctccattacctcatctgtagagtggggatgggagtaagaatagtagccctttcagcaggaaactgtgaggattaaacgaaatgatgtaggaagggctttggcctgggcctggccccgagtcacaggcagtgacgttattgcaaggggtgagtgttgtaatctgcacaacttgtcacaccctatggctacctctggatcttggattggccctggggcagtccctgcccacactgacttatgagggtgcccatggtcttgattccagaagctgcaagaacctgtgcaacttgaccgtgtggctctcctcccgcttcccttctgcccccctccagccttgaagtccattgttctctgcatctggtccagactgagtctctgtctggggaacccccagcctcccactcctcttggaagcttttatacgtttccctctcccacaccttcccctccctttcatctatgtctttcccccttcctccaattcttctctccccagttttgtttataagagtcccgtgaagcacatctcctttgctgcccccaactctccttttagatgttttaagggataccctatcttccactcacctcctcataaggtgaaattcaggaaggaaggaggtgaatgagcagtttgcttgggtgggctttgaggtggccttattgcttcttattgtgcccttcagtttgctgcccccaacattctcccagccttatacccacttcaaggttgatccctgaggctcatgaagcatttgaggtgatgagaatgaacgccagcttccctagatgggtgtttgctactaagcccttggggccagagatgccatgtttggacccaagtggcactagtcagggcttattggcatggaggcctgtggtcatcaggactggggtggctaagggacagtcacctgcactccttccctttctctctggcttttctttcccttaactccatatcccactcctgaggtttcccaactatttcactgaaacccattaaaccatagcaaggggcctgaatccagggccacctcctacagcatggccctggagacagacaggccactcacaagctctgagacactgcacaagggacttaacctctcctagcctctgtttccttctctgagggctgtcatcgatctcacaaggtggggtaaggactcagcacagggcctggctcagagaaagcactcagcacataaggactatgattttgctgtttattatcttccaagttttatgcctcatacgcaaatggcaaagatggccttgcatttgtcccttcacttttttctttgcctctttggcaggaatcccatttctcaggtctccctcagcttggtgtgggcaaggtgctgcctaagctactaggagcccctgggagctcagggacacaagggtgcccattgccccctgctggcagcccacgtgacagtctcactatccgccccgcaatcgtccccctgtgtgcctgacagtgaacaaggcaaggggctgacagtcgcaggtgggggcagggaaaatgaaaggcgagaggccagtagaatggctctggaatcaggcctgggggtccgggaggctcctcatggagggcacacgctgaatcctgacggacctggaggagtgagcccgaggaagttgaataggcaggagacaggcaaagctggtggcaggggcaaaatgggcaaaggccccgaagtgggcaggctggctcctggctgtgctgcaagagggtcagtgcagtagtgtagggaggaaggttgggcaggggacataagcaggggtcctcagatgatgcagtggcctgggttcccatggctaagaatttagaccttgtcctgaaggtcgtggagtgcttttgaaaagctctacgcaggataatgagaacagcgaccacatgccaggccttgtcctaagtgctttacctacatcctctcatgacgcactcacagccataccatcacattgaagatgctgagcacacagcgttaggtaacttgcccaagatcacacagatgtgccctccagaaaggccttttggctgcaccctggaaaatggcttggaagggaacagagaagagggagggagcctagttgagagtaatgcaggggagctttgatgcagaaaactcgtttccagagcgccatctggtggccaaaggcagagaaaacggcacagaggcagggaccggggacagccacgaaaacaggaagtgggtgcctggggttcataaatatccacagctccagccccgtgctacacagaagaatacaacaggagaagctactcactgatgacaatagtatc

SEQ ID NO: 318306 - DNA, 4001 bp, Homo sapiens
ctgctgccggctgcagttcataggacagccacgcgttgtagcccgagtcggcgtccactgcgcgcaccttcgccaccacatgacccgcacccaccaatcgcggcaccagctcactgactgcaccaatagtgccacccactcgaggcgccagcagcgccggcgcgttgtcgttctcgtccagcacgaacacctgcagcgtcacgttgctgcccagaggcggcacgcccgcatcccgcgcgctcacctggaactgcagcagctccagctcctcgtggtccaggggctgcagtgcgtacaccttgccgctctccgcgtgcactgacacgtagttcgacagcgcgcgctcgcccacccgccgttccaccagcgaataggacaccagcgcgttctcctgcgcgtccgcgtcccgcgcagacaccgtgaagatgtggcagcccggcgggttgttctccttcacgaatactgtgtactcgggctgcgcgaacgcaggcgcgttgtcattcacgtcggccacctccacggacaccctggccgtggcccacagcgaaggcgagcccccgtcccgcgcggtcaccaccagctcatagaccgacaggctctcgcgatccagggcgctgtccaacaccaacgagtagtaattcttgaaggtggacaccagcttgaaggggacgtggggcattaaggagcaagtcacctgcccgttggcacctgagtcacggtcagacacggtgatgagggcgatgacggtgctgagtggagcgtcctctctgataggcaaatacaatgaagtgaccgccagttctggagcattatcatttacatccagcactttcaccaaaaccttacagtgatttgacatcggaggacttcctttatcaactgcctttacttgaatttcgtaggattttgtttcttcataatccagtttatcaattaacctaatttctcctgagctggaatcaactttgaatttttcttgaatgtcacgagaaataccactgtcaaaggaaaagacgacttcaccatttacaccttcgtcagcatcagaggcatttaatgtggtcactaatgttccatttgctgtagtctctaacaagtggactctgtatacggcctggtcaaacagtggggcgttatcattaacgtcgaggacggtgatcagcagctcaactgtaccttgcagctccggtttgcccccatcagtggcagtcagtaataagtgaagttctggtgtttcttctctatccaaatattttctcaattcaagccaaagagatttactcagttcatcacttgcctctacatccaaagagaaataatcactcgggctgagcgtgtacgttagaagagcgttagcaccaatgtctgcatcagcagctccttctatcggaaaacgcgaattcaggagtctagattcaggaataaatattatttgttctctgcccctgaagacgggtggattatcgttaatgtctttcaccttcacctccacatggaaaacctgcagcggcctgtcggcgatcaactccaggtggatgctgcactccgcgctccactggcacagctcctcgcgatcgatccgagaattcacaaacaaaatgccattctgcagatttacctccagaaggtccctgtgtgttttggacgccacccggaacaggcgaggcaccagctccgccagctccagtcccaggtcctgagcaacgcggccaacgaaggtgccgtgtttggcttcctccgggatcgagtagtggagctggccgctccccacctcccaggctgcgaggagcagaagccaaagaagcagatcccgggctcccaggccccctctcctagaaaacaccattgcaaaaggactacacctttcttatgctctcctcttacttcaaaatcatgccattttatctaatatttccaatcatttatctctttaccgtttctgtcttctctcaggcggtgacaaaatggagcttcctccttcacttttagtgatcagtagctcccttctattgacaagactttgtggtgtacagcgacatcatgtggccaatgtaaattttagatccattcgttgattttcaaaatgcaatctatatccgtctgcaatttgttaaatgcaatcattttcaattttatgtccttttaagacccagaacatttcaaatctcattggagagtgtgtaatccagtattttcttttagtaatgattacaaacatattacaattgaattagaaactttaagatctacttaacctctccttacatcattttatttaaaacgatttatcagcttatatatttttattattaaatatttgcaactgaatgtcaaagttttaaaataaggtagtttgactgatatgattcaccttattctaggatagcttgggtgtttttttttaaatgatattatacacacacacgtacatatgcacatgtatatatagttatcaggtacttacagatgacatttttggaaaatttctgaacacatgtaaaattcctttaatgtggtatgaacaacttcatcattttctgatactttaactgttagaataaagatatttgtgacattttcccttgttgttatataacataatgacctaagtattgaacttataactctgacttccaaaactcagtattcctaattgaatcggtgtccactagatcttttattcctatgttaaattttcatccatgcttttttcttatcaagaccaaacattgtcatattacaacaaaaatcatatggatattgaatcgcaatatcagagacacgtactgagaatctttatataatccatagtcaaaagaaaaatgtaaatcttatgcaaagatatatttaaaaaataatttgagaataacctacctattaataaacctctctttcaatttcagtccaattcataatcagaatcccatagctacatcttagtttgactaagaaatgtgatcagaataagctatcactagtttttttttaaaggaatggccataatgtttatattttaagtactaagaatagttaaggacattaatgtgaataaggattatttaatccagtatgtcttcataatcagaaagcctaaatccttgtttacttgataattaagatatagacaaaacatggagctattttatttttaacaagcagtttatatattttaacagttcaatgtagtaattactttattacaaaagatagagcaacataagatacatgaatattctcttagtctaaaagtgaagcaaactttaaacttggaaacattctaaaggttagcagatttagagaacattgtcaacatttggaagtgcaaaatactttaaagtgttataaattttgaagactgacacagtggtgaaatctctgggtttttgccttatctattccagacttggaccagaagaagccaacaaccagaaacattattgggtactgatgcaaaaagctcaaaaaaaaaagcatgctttctctagacaaaggaccaggaaataggcagcctagcaagacaaaaagctcctagataatcatttactccaggtaatcaccacagaaaaaaactgtggccccacaccagcaaaagttgagtggggaatctagattaacgctcttgcaaagctgttaatgaggaatcccaatacttctggtggtatcagatcaggccaaaaaatgaaactgagactttcattcccccaactgctagcaagctccacagttgtggtatcagaggagaccatgtggacagcctggactgtgcagaaaataacacggtgccacctccccctctctgctggggtggtgcattagtccattttgcattgctataaaggaatacctgaggcgggtaatctataaagaaaagaggtttatttggctcacggttctccaggctacgtaagaagcatagtgccagcatctgcctttggtgagggcctctggaagcttccaatcacaactgatagcaaagggggagccagcatagctcatggtaa

SEQ ID NO: 318307 - DNA, 4001 bp, Homo sapiens
gactgcaattcatacgacagccacgcgttgtatccagagtcagcgtccactgcgcgcaccttagccaccacgtgacccgcaaccaccgaccgcagcaccagctcactgactgcaccgcccgcgctgccagcgggagacgccagcagcgcgggagcgttgtcgttctcgtccagcacgaacacctgcagcgtcaagttgctgcccagaggcggcacgcccccatcgcgcgcgctcacctggaactgtagcagctccagctcctcgtggtccagcggctgcagcgcgtacaccttgccgctctccgcgtgcaccgacacgtagctcgacagcgagcgctcgcccaaccgccgctccaccagagagtaggacaccagggcgttctcctgcgcgtccgcgtcccacgcagacaccgtgaagatgtggcagcctggcgggttgttctccttcacgaacaccgtgtactcggactgcgcgaacgcaggcgcgttgtcgttcacgtcggccacctccacagacacgctggccgtggcccacagcggaggcgagcccccgtcccgcgcggtcaccaccagctcataggccgacaccctctcgcggtccagagcgctgtccagcaccaatgagtagtaattcttgtaggtggacaccagcttgaacggaacgtgaggcgtcagagagcaggtgacctgtccgttggctcctgaatcatggtcagaaacgctgattagggcaatgacggtgcccacttgagcatcttctttcactgggagagacagagaagtgacaatcacctcaggtgaattatcattttcatccagtagttccactaggaccgtgcagtgaccaaccataggtgggtttcccttatctgtaacatctacatgaatttcataagtgttactgtcctcaaagtcaatagcatcatttacttttatttctcccgtcctttcgtttatccaaaatttccttcttatcgtgggtgggaccaaagagctaaatgaatacatcatttccttgtttattccttcatccgaatcagaagcgttgagccgtattactaatgtttggttcacttgattttcatacatcttaacttcataaaccggtctgtcaaagataggggcgttatcattggcatctaacaccaggatcagcagagaaacagatccggtaaattcaggtttgcctccatcagttgctgtcaacaacaactttagctgaggattttcttcacgatccagcagcttccgcagaacaagcactgggaatttgtctttgtcttttttgtttataatatcaagaacaaaatactcatttggactgagtttgtaagtaagcaatgcgttctctccaacatccgcatcagatgcgccttctagtggaaatcgagagtcaagcagtctggattcaggtattgagagcttttgttctgttacggagaacctgggcgggttgtcgttaatgtccttcacttccacgtccacatggaaaacctgcagcggcctgtccacgatcacctccaggtggatgctgcactccacgctccgcccgcacagctcctcgcggtcaatccgagaattcacaaacaaaatgccattctgcagatttacctccagaaggtccccgtgtcttttggacgccacccggaacaggcgctgcaccagctccgccagctccagccccaggtcctgcgcgatgcggcccacgaaggtgccgtgtctggcctcctcgtagactgagtagtggagctggccgctccccacctcccaggctgcgaggagaagaagcgagagcagcagacactggacccccaggcagctacatctggaaaccatcttatccttctcttgttttacaaatcgacgaatcagcggtctagaacgcacatacgatctgacattttctgtcctatttcttatatctattttttatcgaaatggctgagatctcagaatgacgctacttcctagtccttgagaaactggctgatgcctttgttctaaaaagctattttgtggacgacagcgacatccggtggctttaggtgtaagtacgattccatgagttcacaacttttctttcattcatatgttaattctttttttacgtatttttatgtctatggactttcaaagcctcacattacgtctctttatagttaataacaataaatgttgatcccacgtgcaatgttttcttaaatgtagactctcagagtagtgatttcttccctaaccacatgattatcaatagccgaatttcaaaatgcccttaatatttgcatactactgagtatactaatattttattaaatgacaactttagttccatttaagttctgacacttaacttacttctctttctcattattttgagatttaataaggtttatttagacactaatgtcaagcatcaactatctgtgaggtgtttataactccgaagatctagtcatcactagaatttagagatcattagcttcaacatcagacatttctccatttagattcctattatcctactcactagccacatgacttgggaaaatcgtttaacctctccctccctcatgttccaattttataactttggcctaatagtaatacggtggttgagtgaattataatatagtaagtgcttgcaatagtaccttaaggagaatgagtgcttcataaatggaaactattctcaggcctcaatttggccacatttgttttcatgaggctcaataccaaatttggctcatcaggcaaaattattacctatagaatgccttaattattgctactgcacaggctgagagtggtggtttctgtatttaagaaaacagaaaagtactattacagaaaaatcctttatacaagaagtttcattttataatatcttacacgggcaaaaagaatcttaattataattctgaataaagtaattaagaaatttattatttctgctttcagaggcaaatgctttcaaccctgttatatttacgcttttcaaatgcccaaaagacacagttctgaaatatatctagtaattttatcaatgtcagtgaagtttttcatcaccacttgcagtaaaaatatttttttctctctcaaagttcttgaaatcaaatattcaggaatgaaaatgtaatatatctgtgctgctgaaaaaaacttgagttttctgtctttccaagaaaggaaaacttaacaacagacatattggtcttatgcaagggttaatttattttatttaatgatgttttgacttttctaaagaatatttttaaatgtgtcaattactttaaactttttttattaaaatctgaatgacagagcaacaatatttatgaataagaaaactgacagaaatgggtgtcacttaatccatcagtttatgtgtcctactaaattctgtttctatacttctctactcctctggaatgcctcttgcatcaaaattcattcaaattctgattttagagattacttttttataaaccctgaattaaaatgtaatgagttatgtatcaaaatatcaacgtttgttttagctatctggagcgtaaaataagtttgccattgatcaatcatctccacgcacaaaataataaaaactaaactcaatttctactaatgtacattttataccaagtgataacataaatatcccaatgtagatgtccaatattgaataaaaagtagggagtagttaaactactctttttttttttttttttgagacagaatcttgctgtcacccgggctgaaatgcagttgtgccatcacagttcactgcagcctcaatgtcccaggctcaagcgattctctcgcctcagcctcctgagtaattgggactagagatgtgtgccaccatgcccggctaattttttttttttggcagagatgagtctcactacattggtctcaaactgctgggctcaaggaagggaccctcccaccttggcctcccaaaatgttgggattgcaggtgtcaggccaccacatctttttaaa

SEQ ID NO: 318308 - DNA, 4001 bp, Homo sapiens
tctctgagcgagaacaccggcgggttgtcgttaatgtccttcacctccacgttcacatggaaaacctgcagcggcctgtccacgatcacctccaggtggatgctgcactccgcgctctgcccgcacagctcctcgcggtcgatccgagaattcacaaacaaaatgccattctgcagatttacctccagaaggtccccatgtgttttggacgccacccggaacaggcgctgcaccagctccgccagctccagccccaggtcctgcgcgatgcggcccacgaaggtgccgtgtttggcctcctccgagacggagtagtggagctggccgctccccacctcccagaattcgaggaggagaagccagagctgtagtcgtggggtgcccaatccccttctctgaaaaccaaacatcgcatacgaaattggcttccaaaataagcttctttacacttacagtaccagattcttcagtttcaggttaaaaatctcgttgaattcttaagaagtttcaaaggatccttaaacggtggcatccggtatgatggagttcctttgtatgggagtgcctcactgttcagaccaacctttaaatgaactttccaccaagtaaagagcgacaccttgcgcctaaaactgtgagtactgtgcactgcatttaccaccacagaatttcacgtgttttgggtttcttcccccaaatatttccaacgtgcttatttatggaatattcagattataagtcatattgaaactaaatatatatggaaatggcattgtatttctcgattaacatcaaatttaaattattgtgtctatgtttgacttaacattataacattgttcttttacttatctaaaatacttatacacagagtgagagagaaagagaattcagttgttaaggtggcctcatgaaaaactagggttaaacatttcctgaaagtgttgttcctcatataaaaatactatcaaatttgaattgttttactttcagtctcccttgttactttggctgctagggaactcaaagaaaaaattgaagttttataaaagcagctctttagtgtttatgttccacatgatctattctcatctctgtgggcttgcattttcatatctattttctatagttctcattctttactgttatttacatttaattgctttctgattataagtgactttatattcattgcagaacaatatgaaaaacaaatatattcatattctcaaacttggtagttttaaaaaagaatccacaaaggaaaagtctattgatctagatgagtttttatttgacatatattatttctaatgtaagccatagtagcataatatgagatatcaaaatttagcactttatgtaacagaatcaatgatatgacagaaataggcttttcaactataaaataaattttattatcattttataaaataaataaaatcaccctgaacatctttgtgccatattggtatttccaagtcaccaacattggtttccttaatctaattcagttatattcatgaaaatagtttgtttcttgttgaaagaattttgggtttgggagcagaagttcatggaaaacaagggaagtgatttttaattataccttctgtaagtacctgatattgtgcttaaaacatagaaaattaatcaaacaattcaactaaatggtaaattaccttagtgcttgtggaaatggaatttcatagaaaatgctaagtaaaatacaggaattgcttatgagagttttctttgcctgaagttgtaacttgcttgaattttctttgtcttttcatatacccttaggatttaggaggaaaaaaagaagatgcaacaaaattttagagtagaaagtgatttagaataaatatcactctagcttaaatattttgttctatagttttgatggtttatctccaatctaaaaatactgcaagggcatatgaaaaagttatcatatgtgtatgctaatattttatatatatattcaactattaatttgagattttgttctacttttttcatatttactcttttcccaatgttgtcataacactagaactctaattcaggtaaatgcaaaattctgtattaaaaaattaaaggagacatatcaacttttataaccgttaattccattacgcatctgtaaaataatcaatcatagtagcctctaatcaaaacataacattagaccagatgacagtatattcaacatgatatttgaagcacatcaggtttattttgaacaaaaggaaacaacagatcctcaatcaccttattatgggaattggggatgaagatgttacatggaatgtggagtcttgcgaggtagggaaatgaaccttagaaggtttactctggaaaaatgataatatcacatatttgaattaaaacaatatgttaatttaggtgttaatttccaacaatacagtattttgtgaatatataaagtagtactgaacaaacgccaagtcataaaagagtttgatatagtgtatgaatcaatgacccatcttttgcattttggctgtgatatttcagatgtcaccatctcaaccagcccctagtgaagagattatgcgccctttgaactcatctttgaggatcagcctaatatctgggtataggctaataccaagaagtcatttcaatacagttattgttaactgattttgtaaaatcaattgaagattaaggaactttgtgcctgacttttactatatcagtcaggacatacaatctgcctgtatgtcctgttagtcatataagtattagagtgcatagtttaatgtcttactagtgcacgtcatccactgatattctaacagacctagtgctattatttcttgaaaacacataaataaattttgacaccgttgtcagaaccccaggaggttctccaaaaccaacagattagaattacattatccaaccactgtattaacaaaattataggatttattccgtgatgctaattctgctctatcatggcttagtcaagtaaaaacagttatttggtcacaaatcatttgtcagttgttatgagcttcccagccaacaataagactgaagaagactgaaagacctacacacatttgaagattttcatgggaatctatgtctttaaaattgttattgaagtatgcaatattgtaaacatttcttgaatcctttggccaagttcagggtccctgaaataataatatcaacatctatacttgtcccaaacactgtctttattcacagtaaagaaagaagggtgtcatttttggtatatagtatttagtttaggtgttccacaaggatattggaaaccacagttttctgacttttcttacatgttaaacgattcttacttatatcacttccaaacaacagatacgtagttcttataaggcaactcttaattacttaacaattacataaccaaaatacctatctcagtgtggcattgattaaaacaaatgataatgatgatcacgaactcttacaagaaaaaaatcacttaacataaaaaaacttagtgccatctcaatcacacattgtacaaaattaatgatgaagacaatcatgaagtttcttctaagcacaacagaaagaaagatttgcctgtacacaatttgtgcttgattttcctagccgagaccatgtttgagcagagaaatgacttactaaagaaagctctacattatagtggataaaagaatgagtctgaagcctgaaagatacacatttgaataatatctccaccatgtactggcactggataaaatagatacacatctcagcttctcttattttatctttcaaattggaacagtcatatgtactttagaaattgttataagtattaaatgaaataatgtatttaagtcccttcatgatgtctaacaaatatattaataaactgctcaaacaatggtgatttattatcatgagttactgatcaatattggctcttgtcctatagctatggatgaagagaattccagcac

SEQ ID NO: 318309 - DNA, 4001 bp, Homo sapiens
ctcgtaggacagccaagcgttatagccggagtcagcgtccaccgcgcgcactttcgccaccacgtggcccgcacccaccgaccgcggtaccaactcgctaactgcgcctcctgcgctgccagccggagtcgccagcagtgccggcgcgttgtcgttctcgtccagcacgaacacctgcagcgtcacgttgctgcccagaggcggcacgccggcgtcgcgcgcgctcacctggaactgcagcagctccagctcctcgtggtctagcggctgcagcgcgtacaccttgccgctctccgcgtgcaccgacacgtagctcgacagtgcgtgctcgcccacccgccgctccaccagcgagtaggacaccagcgcgttcttctgcgcgtccgcgtcccatgccgacaccgtgaagatgtggcagcccggcgggttgttctccttcacgaacactgtgtactcgggctgcgcgaacgcaggcgcattgtcgttcacgtcggccacctccacggacactctagccgtggcccacagcgaaggcgagcccccatcccgcgcagtcaccaccagctcataggccgacacgctctcgcggtccagggcgctgtccagcaccaacgagtagtaattcttgtaggtggacaccagcttgaagggaacatgaggtgtcagtgagcagatgacctgtccattggctccagagtcacgatccgacacgctaatcagggcaatgacggtacccacctgagcatcctcttgcacagggagcgacagtgaagtaaccattacttcagggacattgtcattcacgtccagaacttccaccaggaccatgctgtgacctgccatggaaggaatccctttatcaatggcgttaacctgaatttcataggcattattctcttcaaaatccagttcaccataaattctaatttcacctgtgtctggatttattgaaaacatacatttctcactcactggcaaaatcattttgatcccataggaaatttctccattaagtccttcgtctggatcggaagcatttagttggatcactcttgtgtcgttttggacattttcagacaacactactttatagctgggcttatcaaacgccggaccattgtcattcacatccaggacggttatttgaatctggacagaccctgttagttctggtttaccgccatcgattaccatcagcaataaattgagttttggcgtttgctctctgtccaataacttccgaagaactaattcaggcaatatacttttatctttttttgtttttattttaagctcaaaattctcatttagacttaacgcataggtcaaaagagagtttacgccgatatccgcatcagaagcgccctctagaggaaaatgagagtccagaggcgcagattcagaaacaggtaccttttgttccctttctctgaacaccggcgggttgtcgttaatgtccttcacctccacgtccacatggaaaacctgcagcggcctgtccacgatcacctccaggtggatactgcactccgcgctccgcccgcacagcttctcgcggtcgatccgagaattcacaaacaaaatgccattctgcagatttacctccagaaggtccccgtgtcttttggacgccacccggaacaggcgcggcaccagctccgccagctccagccccaggtcctgagcgatgcggcccacgaaggtgccgtgtttggcctcctcgtagacggagtagtggagctggccgctccccacctcccaggctgcaaggagcagaagcgagagcagcagacgctgggatcccgggcctcttggtccgataatcaccattgcagaaaatgagggcctctgagttgggacaatcagttttaagggatcgcttgcctgaggtattttatgagcagtcacccttttctgtaagtacatatttagtaaattttttccagcatcacagtcattatggagtcgatcctattccgtgaatgattggaatgtgggtgcggagaaaaaaattttcctgtttcaccttctgagtgtagagcgacatcatgtgactgattatgtaagtacaagaaagatcctgaggttcttttcggtttagccacttcctgggtcactcttaattctaatgtttcgactttgggttatttttcacggatcatttataaatgcgggtttagttaatatacatgatattagtaacaaaacatcaacaattttattacgctgtagcttaaaaatgttttctgcttcaaagtagaaatctttcaaatacagtaggccagaacctacactttatcatggaaaatgatatacagaataatatacagcacccctccccttatatagcttacaattccgctgtttcaataacttttaaccttcacaagcactccatcgtaagattttagagaaagttaggaatttgtatttaacaaaggataagaaactaaaatatgtctaataccaaacaatatttcatttatataaattgtcttattcataaatctgatgaaagttagaattcatcataaatatggagagcgttattgtttggttccttgatgcttgaatgtgataacttttcacataactgctctcatttccataacatgttaaaacaaatctcaggaatagattctggaaagttttactctagcaaaagtaaagcactttaatgtaaaatgtttagttgaagcctccaaatttcacactatcccaaagcaacaatggagcactaaaatgcgaaagatctcttaaagggttttggagcctaatctcattgactaaagtcaagagaatgtgaacttgatatcaaccttttgctttttctctaaatcttcccctacaggtcatttagtagttaggacatgcttctcttcagaaaatcagaatggtgactgttatgcaagggggcatcaaaagacctttcatgagtttattcattaattcaagatcagctttaagagaaaaaaacagataagatcctacaactcattgtgaacaagtacacatagattttgtaagtctattaatactcaagtcaaaatctttaaaccaataatttgttgccattcattcctactgcatataataataaaggcaactgaaatatgacacctttacaacaccaggaaagagtaaccaagaatggctctacaagtataagataacttaaataaactataaaacgttaagtaattaaaaacatatttgaattttgatgtcatcaggctaattatttaaattgtctaatatcatcaccaagtttctttcctatttttcattttcaaaagtggtcaatgtaccatacatgctaaggaactttaattttaaaaaataggctgggctcagtgacttacacctgtaatcccagcactttgggaggctgaggcaggcagatcacctgaggtcaggagttcaagaccagcctggccaacatggtgaaaacccatctctactaaaaatacaaaaattagccaggagtggtggtgcatgcctgtagtcccagcttctcggaaagctgaggcaggagaattgcttgaacatgggaggtggagattgcagtgagctgagattgcgccactgcacaccagcctgggtgatagagcaagactctatctcaaaaagaaacaaataataatagtgtgttatgtagttctcacatactctttgacctaaacaaattgttaagccaataggaacatctaagtttagcttaatacttaaacaaccaaactagaaaataaattgaaattataattttataccatagaatgcaatcttggcattaagtataaaagacacaactttgcagaaatcagtccaagtaatttgaattatctaaaatgcaaatttgttatttatgtgatataaaataataatttacaaaattttaacctgtactgaaaacattcccaagtctttaaaagatcttcagttattccaaaaatttcatctggagatgagtaatgtatgccctatctaatattcacctttat

SEQ ID NO: 318310 - DNA, 4001 bp, Homo sapiens
caacagcaccgttgccgtggccgtcagcgcgggctcaccgtggtccttcaccagcaccagaaggcggtggtgcggcgcgtccacctcgtccagagggcgcgtcgtgctgatctcgccagtgtacagccccacgcggaacgggatgcgcgcgccgaccgccgccagctgcaattcatacgaaagccacgcattgtagcccgaatcggcgtccaccgcgcgcaccttcgccaccacgtggcctgcacccaccgaccgcggcatcagctcgctcactgtgcctcccgcgctgccagccccgggcgtcagcagcgccggagcgttgtcgttctcgtccagcacgaacacctgcagcgtcacgttgctgcccagaggcggcacgccagagtcgcgcgcgctcacctggaactgcaacagctccagctcctcgtggtccaacggctgcagcgcgtacaccttgccgctctccgcgtgcaccgacacgtagctcgacagcgcacgctcgcccacccgccgctccaccagcgagtaggagaccagcgcgttctcctgtgcgtccgcgtcctgagcagacaccgtgaagatgtggcagcccggcggattgttttccttcacgaacaccgtgtactcgggctgcgcgaacgccggcgcgttgtcgttcacgtcggccacccccaccgacacgctggccgtggcccacagcgaaggcgagcccccgtcccgcgcggtcaccaccagttcataggctgatacgctctcgcggtccagggcgctgtccagcactaatgagtagtagttcttgtaggtggacaccagcttgaaggggacatgcggcgtcaaggtgcaggtgacctgtccatttgagccagagtcacgatcggacacactgattagggcaataatggcgctaggctgagtgtcttctctgatggggagtgacaaagaagtgatggtaacctctggggcgttatcatttacatctagtacttccaccaaaagggtacaatgacccgccattggaatatttcctttgtcaactgcctccacggatatttcatataatttcttttcttcgaaatctagtttgccttttgtcctaatttctccattgttcggatttatggtaaatgcatataccactgcaggccatacaggccttctaaatgagtaaactatatctccatttgtaccatcatcaggatctgtggcatttagcttgatcactaatgttccattgaaggcgttctctaacaccgtcactttataaacggattggtaaaattccggggcgttgtcattcacgtccagaatcgtgatgagcagctgaactgtgccagtcagctcgggtttacctccatcactggctgtcagtaataaactatgttcctgaatttcctctctgtccagtgttttcctcagtacaagtgataatgaagacatttgctcaagactgttttgtgcgtccaaagtgaaataatcgttgggatccagtcggtaggtcaatgccgagtttactccaatatctgcatcggatgcgccatctagtggaaatcgagtttccggaggtctagattctgcaatgattattcgtttcttgctttcagggaatatgggcgggttgtcgttaatgtccctcaccttcacctccacatggaaaacctgcagaggcctgtccacgatcacctccaggtggatgctgcactccgcgctccgcccacacagctcctcgcggtcgatccgagaattcacaaacaaaatgccattctgcagatttacctccagaaggtccccgtgtcttttggacgccacccggaacaggcgcggcaccagctccgccagctccagccccaggtcctgagcgatgcggcccacgaaggtgccgtgttttgcttcctcggggacggagtagtggagctggccactacccgtctcccaggctgcgaggatcagaagccagagcagtagttgccgcggtcttgggcctccttgccaggaagacagcatggtacactccaaaaacctcagagctatctgcaatatatacaacgccttacctcaaactgtctctcaaggcccaatttttatggcttcctagtgcggaaggattcgcaagaggtattccgctttctgctatattttctgcaggaagaaagaaacggcggctttcttcgcggaaacgttctcagtgaagagcgacaccatgcgcatgaacgtgtaagtgtaagtatgactcagtcttcatattttccattgatgtagtatttttttgccccttgcatttcctgacattttcactgcaaatatgtaattgaagattaaatgtttaccttcccagaaacagcaaatcactgcattctgctcaacattttatattagctgacaattggttgatgagtttcattttgccacaaatttatttttccatgtgtaagaattccatgcagaactttaagacaaagaatattcgacactcgttttgggacaattgatcggtagttctgcatagtcatgtaggtttttgtggtactgtcctcttcctgtaatatttttcaagacctcctcacacaacagccattgactccaaaaggaaacataacaatcacataagaataaaatcggtgaaggtgaaaaatattggtaactgatatatcagattttgaataagcacatcatattaataaatttccctcaatgtgacttgagatgtagataagatatttatattcaaaagaaagtgttcagtcaatatgtgtgggattttgtatgtgagtgtgtgtatgtgcataaacacaataatttagccacaacaatgctctaaggttttggattctgtttttataaaatatgcctggaactaatatcctattgatttaatagaatttaacttaccgccgccggctgcaattcatacgaaagccacgcattgtagcccgaatcggcgtcctggttaaatagaatttaaccaggaggttaaagtttccattttctctctccatcttacttcatcatcactgagtaaaaccttgccgtcatttaaattgactttaattttccaagaaacaacagctagacaaagatgttaacatatctttagcaaggaaaagaggaagaggatcttacttttatctattgttataactatctctaccaagccacaaaatcccaggccaaatggtgtaatgaaaaatatatcatagctccaataattatctggcctgttctgtgcacaactctataggaaatgactgttgggtttatttccatagctctgctctcctctgaaaatttaggcagagtatttggtattctcttaccctcatcatcctctcctgctccattacttttactaacatagtatttctcttctaattctttctatctggccctacatttctttatttacctcttcacataattagactacatagtcaaccatttaaaatatgcccttccagacactctagagtcattcacctatttatattactcctctaacattctttttagcctccaacacgcagttacactgacaatccattttctctatgcttcctattaagctgctcaacattgtcacttaaccatgactattctcttcaaatttactctcacctttacctcagttgggctctcaagtgaattgataattaactcctccctcttgcttacagagattcttccatattctctttcctctcttctcaaattctcaacctcatttccatcagttcactttcagatgattcacacattgagagatgtgaccaaacagaaattcaattgctctcttcttgtgtcatttttccttatattatctgttttcattttctactagttgtaaggaaaaactgttcccgcttttaaggtcaaccatatgctcttaaaaattattttctattctctcatggttttcatctaaattcacctgctgcctgtcttatttttagtatcttattttttacttgtttctttcactcacactatgaagatagtcaaacttcttt

SEQ ID NO: 318311 - DNA, 4001 bp, Homo sapiens
ctgatctcacccgtgtatagccccacgcggaacgggatgcgagcgctgccagtacccagctgaagctcgtacgaaagccacgcgttgtagcctgagtcagcgtccactgcgcgcaccttcgccaccacgtgccctgcacccaccgaccacggcaccagctcactcactgcgccagcagcggtgccagccctaggcgccaacagtgccggcgcgttgtcgttctcgtccagcacgaacacctgcagcgtcacgttgctgcccagaggcggcacgcccgcatcccgcgcgctcacctggaactgcagcagctccacttcctcgtggtccagcggctgcagcgcgtacaccttgccgctctccgcgtgcaccgaaacgtagctcgacaacgcgcgctcgcccacccgccgctccaccagcgagtaggacaccagcgcgttctcctgcgcgtccgcatcccacgctgacaccgtgaagatgtggcagcccggcgggttgttctccttcacgaatactgtgtactcaggctgtgcgaacgccggcgcgttgtcgttcacgtcggccacctcgatggacacgctggtggtggcccacagtgaaggcgagcccccgtcccgtgcggtcaccaccagctcataggctgacacgctctcgcggtccagggcgctgtccagcaccaacgagtagtaattcttgaaggtggacaccagcttgaaagggacgtggggcgtcagggagcaggtgacatgtccattcgtaccagagtcgcgatccgacaccgtgatgagagcaatgacagtgcccagggaagcgttctctgagatgggaagtgagagagacgttattgagacttctggtgtgttatcattgatgtccacaagttttaatgaaattttacaatgtcctgacattgaaggggttcctttgtcagttgcagtgacctgaatctcgtaggactttgcttcttcataatctaattttcccttagttctgatttcccctgagatgggatctatggtaaacttagtctgtatagtggaggacacatcactaccgagtgaatacacaatctcgctgttcggtccttcatctgcatcagaagcgtttaacttaaccactaaggtcccatttgccgtattctctaacaattttactttgtaaactgattgggcaaaagttggttcattgtcatttacatctaataccttaataagtatttgaacggtgcccgtgagctcaggtttgcccccatcagtagccaccagtaacaaattaacctcagcagtttcctctctgtccagcgatttccccagcacgagagacaaagattcgcttagttcatcatttgcctgtatatctaggaagaaaaactcactggagctgagcttgtaggagagaagagcatttactcctatatctgcatcagatgctccctctagaggaaaccgagaatcaagcagccttgattcgggaaaccggatagtctttactgtcattggaaatattggcgggttgtcgttaatgtccttcacctccacttccacatggaaaacctgcagcggcctgtccacgatcacctccacgtggatgctacattccgcgctccgcccgcacagctcctcccggtcgatccgagaattcacaaacaaaatgccattctgcagatttacctccagaaggtccccgtgtcttttggacgccacccggaacaggcgcggcaccagctcctccagctccagccccaggtcctgcgcgatgcggcccacgaaggtgccgtgtttggcctcctcggggacggagtagcggagctggccgctccccacctcccaggctgcgaggagcagaagcgagagcagccgtgtccaggcccctcggccccttctgatagaagacgccattaccaatcctcaatgttttgatcaaattagaagagcatgttttgcaaaaatttaaatattctagtctctgttaaagtcctgctgcttctcttattcctccgcttctctgaagtaacaaaggggctctgggtattttccttcctagagaacactctatggtggacagcgacatcatgtggctaaaaggaaggctctactgtttattctgtagatttaaaactagtcgattttctggtttaagtttactcatagctttcatcttggaaaaaaataactattttaagccctaaaatatattacctttttacccttttttactctggttaaaaaacacacaacataatatttaaaattaccatattaactatgattaaatgtacatttcagtaatgttaagtatattcacattgttacaaatttttcatcttggaaaacagaaactctatacccattagacaacaactccgcttttcaccgtcactccagtctctggtaaccacagtcctattttctatttctatgaatttcactactttagatatttcgtgtaagtggactcgtaaagtatttgtctttttgtgactggcctatttcacttagcacaatgtcctcaaggttcatccatgttgtagcatgtgacaagatttatttcctttttaaggctgaatactagtccatcgtatgtatacaccacgttttgtttattcattcaagcatccgtggatggttcctcaaggttcatccatattgtaacatgtgacaggacttctttcctttttaaggctgaataatagtccaacatatgtatacaccacgttttgtttattcattcaagtattcgtggacatttgagttgcttccatttcttgactgttgtgaacagtgctgccatgaacatgggtgtgcatatatttctttgagaccctgctttcaattcttttggatatattagcatttttcactatttcttcaaatgaagaacatagtaatcaaaggtattttagtccattgaaaatatatgtgtatatatactgttgttttgtgatttaattttgatttttgaattgtttgcaaatgttttgaaattaataatttatttgtttctcatttggataatgtactattactttagaatattccttttccattacatttagacttttatgcaagaacaatacaatcgatctctttttttgtgttaattacttgagaatatcttcttttgttaatttttagctgatcccttcacagtaaaaaaatgaaaatagaataaagataagatgaggatgaaataaaatgaatcaaggagtgggatagcatacaaaatccataataaagggtcaccttcagttactctaaccatgtcaccaattttgttttcagcttcctagagcaaagagagaagtaaaattaattgcaaaatttgcaatgtccgtaagagaaaagcaaagctcttgttaagaaaagctagctttttttccaataacaatttttttccctcatgtacagtatcttaagatactcatttgtaccatctatggaaatgtgtatttatgttaatcatactctaacagtaaatcccaagttaaccgatttaagcaaaaataaaccagagaatcctgtactgactcatacatggaaatgggtaattaattactggtttcagacagagctgggtctacacccttccataattccataaggaaaataatctccacatttataattccttttcccctgctgaacttcttctcagatagacttttcccatctgctggcaaaatggccaaagtagctttctagactaaaaattaccagtttgatgactcttaccagaaagtgctcttttctaatagtccagcaaaaatcctggatattacttcctacagcccagtttggatgatgtaaatttcctttagtcaataattgtgatttttctcacattggctagacatgggtccacttgctcattcttgaagccaggaaatgaaatcagctccacctaaattatgtgaactgaaaagtgggaggttggtttttatgtgaactgaaaagtggaggtcatggcatgtacccaaattctcctggagcttaaacagatggcag

SEQ ID NO: 318312 - DNA, 4001 bp, Homo sapiens
caccagcacagtggccgtggcggtcaatgagggttcaccgtggtccttcaccagcaccagtaggcgatggcgcggggcgtccacctcgtccagggcacgggtcgtgctgatctctcccgtgtacagccccacgcgaaacgggatgcgcgcaccgccggtcccaggctgcagctcatacgaaagccacgcgttgtagcctgagtctgcatccactgcgcgcaccttcgctaccacgtggcccgcacccactgaccgcggcaccagctcgctcactgcgccaccgatgccacccacccgaggcatcagcagtgccggcgcgttgtcgttctcgtccagcacgaacacctgcagcgtcacgttgctgcccagaggcggcacgcccgcatcgcgcgcactcacctggaactgcagcagctctagctcctcgtggtccagcggctgcagcgcgtacaccttgccgctctccgcgtgtaccgacacgtagctcgacagcgcgcgctcccccacccgccgttccaccagcgagtaggacaccagggcgttctcctgcgcgtccgcgtcccgcgcagacaccgtgaagatgtggcagcccggcgggttgttctccttcacgaacaccgtgtactcggactgcgagaatgccggcgcattgtcgttcacgtcggccacctccacggacacgctggccgtggcccacagtgaaggcgagcccccgtcccgagcagtcaccaccagctcataggccgacacgctctcgcggtccagagggctgtccagcaccaatgagtagtaattcttgaaggtggacaccagcttgaaggggacgtggggcgtcagcgagcaggtgacctgtccattgactcctgagtcgcggtcggacacgctgatcagagcgatgactgtgctaagtggagagtcttctaatacaggtaaagatagtgattgaataactaactcaggtacattatcattgatgtccacaatttcgagtagaactgtgcagtgatctgacattgggggatttcctttatccgtggcttctacctggatttcatatgacttactttcctcgaaatctatgttaccctttacactgatttgtccattgactggatctaaatggaattttgacagaatatctgctgacatgtccgtattgaaagaatacgcgatatccttatttactccttcatccaaatcggtggcgttaacggtcaccactagggtaccatttggtgcattttcgagtaatctgactttatagatcgtcctctcaaacgctggggcgttgtcgtttacatctaaaacagtgatctttagttgagtcgtgccagtgagctctggtttcccaccatcaattgctgttattagtaaataatgcttaggagtgtcctctcgatttaaattttttttcaacacgagtccaagggatttaatttcctcatcatttcttttaacgtccaaggtaaaatattcagtggaatcaagactgtaagtcaacaacgaatttgttccgatatctgcatctgatgcgccctctagcgaaaaccgagagccaggctgtcgggattcggaaataaacagattctttacagccattggaaaaactggcgcgttgtcattaatgtccttcacttccacctccacatggaaaacctgcagcggcctgtccacgatcacctccaggtggatgctgcactccgcgctccgcccgcacagttcctcgcggtctatccgagaattcacaaacaaaatgccattctgcagatttacctccagaaggtccccgtgtcttttggacgccacccggaacaggcgcggcaccagctccgccagctccagccccaggtcctgcgcgatgcggcccacgaaggtgccatgcttggcctcctcagagacggagtagtggagctggccgctccccacctccgaggctgcgaggagcagaagagaaagcagcaggcactgggctccaggatcttctcgccaggagaacaacattgcaagtattttccaaatattagattgcctttacattgatccaaagtttaaaaataattcgagttccttatcttcatttcttaaactcctcggtgttaaattttagagaggatgaagcaaagcagtatctgaatacgtaatgcacgctgttatttcttttgtggagaaagaccttgtggtggacagcgacatcatgtggctaaacgtgtaagtattaaatatgtaaacgtatcttcttttccttgtatgtcgtttgaactttcccaaaatttctagtttcaattgtaatatccttcggtcactcctcaaagtccttatattttatctaaatatttccttagaacttttatactaattcactatcaattgtgctaattcatgacatacactaaaatattgtgattcctgttttaacagtggacatctattggaaatatttcccatgtgacagccacttttctatttgtcttaatggaattatcccgttaaattatcacaatcctctgaaataagttttaatattattcgctttttataaacacatagaggttaagtaaaacgatattatctcttggtacgatgggatttcaatctgattcaagacaacttaccattaacctctttaccacccaagttacattttatagaaaaatcagatcctttcagatttatgatcatcaaaacattgagatgttgaagtatttaaaagtgtgtgtgtgctgtatatattaaaacatacatatatctacttttatgttattacagcaactgttaatttcttaaaatatgtacatttatggttttttaaatttgtagaatgtctgtaattccctcccatgcccctttttcaagaactatagcctcatcaactgtcttgactgtaacttacataaagatttcagaagtcggtcctttacagagaaattcaaacaggaaatttgtttcctattgtgggaatgtgatttgtatatttgttacactcacatcacatcaattaagaatatattaggtttaatttttccacactctttatgtatttgaatttacctgtatatactaaaatgttaacaatataaagtaattacgtttttgatgatctccactcctgatgaatttctagattccagtttttttaaaagttgttacttgaaagaattgattatttaactaaacagtgaagggagaaaagtaacctaggaacataagccagtatttactcaacatatttaacactaagcaataaaacattctaaagatatctgtgaattcaatgagaagcatgaattctcgccgcatttggaagtggggcaaagaaaatttatggaaagaggtcaaatttagagaaataaaataatgtacaaatttttgcttatacccagaccatttaaaaatgaaatcaaacatgtgatttaaatatttaggggaaaagttttcatttcagcttttgtttcctgtgtattcatgaaatggaagccaggactgcaacttactcagattttatcattcatatttagaataggataaattatcaattgttgttttcatgaataaataaattaatattttgaattaactttttcaagcaagataaataaaaatgtaagttaatgatatttgttaatatcaaacttacataatttctaaatgattatattgtgctatattatgaagaagtaagtaaacatttaagcattatttctgaaaagcatggacctaagaaataattatagctattaatattccagttaccactttgctgaatttttaaagatggtagctagtttgaaaataagagataaatttaaaatttttaaacttcatggacttcatagtaatgagatgcctttgacaacttattgtaatactgcacttttcagtacctttaagagttatactaattgcaaaatggaatgtcacatgagaatttatagcagagtagactccatactgattattaagagataaaggtaatattaaaggaactatgagtttagaagatt

SEQ ID NO: 318313 - DNA, 4001 bp, Homo sapiens
gccagtgtacagccccacgcggaacgggatgcgcgcgccaccagtccccggctgcagctcgtacgaaagccacgcgttgtagcccgagtcagcatccaccgcgcgcacctttgccaccacgtggcccacacccaccgaccatggcaccagctcgctcactgcgccaccagtgccacccgcccgaggcgctagcagtgctggcgcgttgtcgttttcgtccagcacgaacacctgcagcgtcacgttgctgcccagaggtggcacgccggcatcgcgagcggtcacctgaaactgcagcagctctagctcctcgtggtccagcggctgcagcgcgtacaccttgccgctctccgcatgcaccgaaacgtagctcgacagcgcgcgctcccctacccgccgctctaccagcgagtaggacaccagcgcgttctcctgcgcgtccgcgtcccacgcagacacagtgaagatgtggcagcccggcgggttgttctccttcacgaacactgtgtactcgggctgcgcgaacgccggagcgttgtcgttcacatcagccacctccacagaaacactggccgtggcccacagcgaaggcgagcccccgtctcgcgcggtcaccaccagctcataggctgacacgctctcgcggtccagggcactgtccagcaccaacgagtagtaattcttgaaggtggacaccagcttgaaggggacgtgggacgtcaaggagcaggtgaccagcccattgacacccatgtctttgtcggacacgctgatcagggcgatgactgtacccagtggagcgtcctctctaattggaagtgataaagacttgaattccaaatctgggacattatcgttgttgtcttctacttccacaataactctacaatggccagaaagtgggagctgtcccttatcaatgccctctacaataatttcataggatttgctttcttcaaagtcaatatatccctttacaataatttgtccagtaattggatctatgtgaaacttggatttcacatttggcgaaatatcatttgagaatgaataaacaatgtccccattcaatccttcgtctaaatctgaggcgttaagtttaattaccaatgttccattaggaacattttctagtaatctcaccttataaatggttctgtcaaaagctggggcattgtcattggcatccagtactgtgatgagtaactgaacggtgccagtcaactcgggtttgcctccatcagtggctgtgagcactaaaaaaatctccggagcttcttctctgtctaaagatttccgtaatataagcccaagaccttttaccagctcgtcatcaggtggtttttccagagaaaagtattcatttgggctcagtctgtaagtgagcagggcgttctccccgatatctgcatccgaggcgccctctagtggaaaccgagagtcaagcggcctggattccgcgatggacaggttcttttgtgttgctgggaacaccggcgggttatcgttaatgtccctcacctccacgtccacatggaaaacctgcagcggcctgtctacgatcacctccaggtggatgctgcactccgcgctccgccggcacagctcctcccggtcgatccgagaattcacaaacaaaatgccattctgcagatttacctccagaaggcctccgcggcccttggacgccacccggaacaggcgcggcaccagctccgccagctccagtcccaggtcctgcgcgatgcggcccacgaaggtgccgtgtttggcctcctcggagaccgagtagtggagctgaccgttccctgcctcccaggctgcgaggagaagaagtaagagcagcagacgccgggattcctggccgcttccccaggaaaactccatctttagtgcacagtattttgttctgattaaatatcgtttctcaaagtcaagggaaatcttttaatcggtcagtcaagtgcagctgcatcctccatatttcagactccaaagagtgtatatggttccttccagtaagaatagaaggaattttcccttcttcctccttctctcatgtattttgtggtaaagagcgacatcatgtggctccaaaccgtaagtagcaattgtggaaacccccacacactctactgtaaactacttggttttatttattatttcagtcgtttcggagaataggaatacattttgtactactgtggtacacattgtaccactgattgattgagtgtggtccttagtttcgccataggggcaacttttacttcagtagaaataattttttcaacacaggttttaagtattacagagacctaactatacactttgtaaacatgtaactgtaaactgttgattagaaaaattcattacagattcctgtgttcccaagaattccagggtttttttttattaatgataacaccctcttcaccctagtatttctggtgttgttgacttgaggggactggtctctagggaacttctggtgccaagaacaagctattgacagggaaatttgcagatgttttataaaaggatcaaagaccatcagcatttaattagatgtcttccttgagtcatgtcagggctgaaagtgcaaggaagcaggaagttatagcaaatagcttgcatggaaaagcattccaaataattttattcattggaactcatttgctcccatgagaaacgctggtattctcattttgactcttacagtttataagtacttgcttgttctccagtatgtaatgtgcctaagcttctattttctcctatagtgcttatatattttagccaaactgaatatttcctgcttccaatagctttttttaataaacaagcatgttcattttgtcctgtctataagtaatccacatcatttctaaactcttctaaagccaatttaccccattttataaccacttaaaacttccctgacccatgaagaatgtcatgatcaaaccaattgaacaggtattttttcttcttttacaaactgcagcaccagggtggaatcgcgtgggccatttattacattaatttatctcttataagcatttgagtatgtgtgtccttttttggaatatatattttaaagggaatagttgtatcttaattgtttaatagctcagagggacttacctaatatttcctaaatatttaccctgcagaaaatgtttgcttccttccattgcctaataaaatgcattaatttaaggtgatcgcatatctagttgggaaaatgtggtgtttcaatagcctctatgattttctaaagatacaaaaaaagtctctagacatttccccaattaagatgtatttcaagttcaatgttgaaaacttgggttttagcttaatttttattctaattcttggtaatcatgatctttgaatcatcctgggtattaatggggaatgaagacttcccaataaataaaccacaatacattttcttacataaagaaatttaatatataaagacataatggtagccatttaaaaactttccttgcctcctatatccataaagttattttcatcctgtttgtctaaacaaaaaatcaatctagtgaaaatagctttacgctccctctctattgaagaactacactcacacaaacacacacacacaaaaaccaaaacaacaacaaaaaacccaccaaatttctgaatcaaacagaaaccagagtactttcactatgtggggacccaaactatatttttacaaaatgatcattgacatcaagcacattggaaaaaaggaggaagaattccattttcacccatttcatttgtaatattttcatttaccaggtattttaatgtacagatggggaatgcagcagaatagaaaacaatgtttatttggtagctattcaatatttatttggcatagcatcagtacatctgtgaagtgaaaattccaaagtcttcaaaatgtctttgccaagagtcttgttagacaatagtttcaagaggcaagctggatttgaaga

SEQ ID NO: 318314 - DNA, 4001 bp, Homo sapiens
cgacaccagcactgtggctgtggctgtcagcgggggctctccatggtccttcaccagcaccagaaggcggtggcgcggtgcttcggtctcatccagagagcgtgttgtgctgatctcgcctgtgtacagccccacgcggaacgggatgcgcgcactgccaggcgctggctgcagctcatacgaaagccaagcgttgtagcccgaatcagggtccactgcgcgcaccttcgccaccacgtggcccgcacccactgacctcggcaccagctcgctcactgcgccgccggtgccacccactcgaggcaccagcagcgccggcgcgttgtcgttctcgtccagcacgaacacctgcagcgtcacgttgctgcccagaggcggcacgcccgcgtcgcgcgcgctcacctggaactgcagcagctccacttcctcgtggtccagcggctgcagcgcgtacaccttgccgctctccgcgtgcaccgaaacgtaactcgacagcgggcgctcgcccacccgccgctccaccagcgagtaggacaccagggcgttctcctgcgcgtccgcgtcccgtgcagacaccgtgaagatgtggcagcctggcgggttgttctccttcacgaacacggtatactggggctgcgcgaacgccggagcgttgtcgttcacgtcggccacttccacagacacgctggcggtggcccacagcgaaggcgagcccccgtcccgcgcggtcaccaccagctcatagaccgacacgctctcgcggtccagggcgctgtccagcaccaacgagtagtaattcttgaaggtggacaccagcttgaagggaacgtggggcattagggagcaggtcacctgcccgttggcacctgagtcacggtcagacacgctgatcagagcaatgaccgtgctgagtggagcgtcctctttgacaggcaggaaaagggtggttatggccatctctggggtattatcattcacatccaggagtttcactactactttacagtgtcctgataatgggaatgtacttttatccatggcatcaatattaatttcatatgagttatagtcttcataatccagttccccgttaacttttatttcaccagtattagaattaattataaatttggactttacatcgtcaagaacaagattactaaagaaatacactatttccttattgatgccctcatctgcatctgaggcgttcagtttaataactaatgtcccacttggtgcattttccaacaatctgacattataaatggatttatcaaattctggggcgttatcattagcatccaatacattgatcaacaactgaactgtacctgttagttcgggttttcctccatcagttgcaatcactaataaacggtgttcttgtgtttcttctctatctaaggatttcctcaaaaccagctctaaaaagttcgtttcttcttcatttgttttaacatctaagtcaaaatattcgtttggatttaacctgtatctcaattgtgcatttgctccaatatccaaatccgacgcgccctctagcggaaaccgcgaatctggcattcttgactctaaaatgaataatctttgttcttgtctggagaacctgggcggattgtcattgatgtccttcactgccacctccacatggaaaacctgcagcggcctgtccacgatcacctccaggtggatgctgcactccgccctccgccggcacagctcctcccggtcgatccgagaattcacaaacaaaatgccattctgcagatttacctccagaaggtccccgcggcccttggacgccacccggaacaggcgcggcaccagctccgccagctccagccctaggtcctgcgcgatgcggccaacgaaggttccgtgtttggcttcctccgggatcgagtagtggagctggccgctccctgccttccagtaggcaaggagaagccagagcagcaggagccgggatcccagacttcctctccgggaatataccatctcaatctcgttccaattatgagctttctattgcatcaccacacaatgtattttgtaaattcaattcccaattaactatatattttttatattatcgcctttctgagcttcttggcacagccaaaaatggaaggttcttttcctttctgtctaaggaaaatctactcactgtattcctttgaggctgggaagggagaaaaaccttccggtgtccagcgacatcatgtggatgaaagggtaagtgttttattttgttttgctttatttagcttatattcgtcaatatttctcaagtattctcactttcaatgacatgattcttattctttaaatcacttatctctagtcaaaatatatcattaaactctatcttaaaatgcgtcaatataagtgcgtcattaaaatattacagaaaaatacatctaaagtcatgaaaccccaatccttactagagaaatttgtgctggtgtattttatatagggaggagtttatatatttccaaactgataaaaataacttttaagagttaaagttttgacttttctcatctctatttaaacatatctaattaaaacttttgagttttttctgtattagtcaatggaatgtttgtatgctatctccgtgttactcataaaacaaatttttattccaatttcactgtttaatagtgacattttgttgatgttattttcaaaaacaactaaaactattttaatggcattcttacctgagtttcttctcggagttctaattttcaaatcgatgaaaacctatttctttatctataacacctatctactttttgtattgactcaaaaactgtaatggggatatttcagctttctagaaatcaaaagcataatagaacgactttggtaaatcgtctttgcactattttcaaattagaagcatctagatagcatttcttcaagttgctattactgataaagcaattattaaaaattgtaaaatacatacctttgtacttacataacaagtcaaaatcctaatattgtctatatgacatactatttcacaaaatgtttaggttccagtaaatataatcatgttgaaaagaatatcattttattaaccaggctatctttatattagtttaattactttttaatctcccaactgtttactggatggtatgatttgaacacgacctagaaaatttagtaaacttcacttaataaatatgggcaaaagaaaatatcaccaagttttctattgaagaaatagctaacattctgcttgtatatatactccataaaattccttaaatattacaaaatatcccttacctgtgaagacaagagggaccaagagattagcaattctattgttggatacttttacatttaaaatatagcttgataagaaaaaagaaattaccagaaaatgcaaagtcagaggaaattcacttgatttctggaattcaaacttgtaaagaaacaagatattgtcatagaattgtttctgatacaatctttaaagatatatttaccagttcccttataagatttttactatctctattatcatgacttttcactaatatttggatcgttgaaacacaaatcaatttcccagactatttgcctaatagttttcatactgataattttgaaatattttaatacacaatggttaaaaacataagaaaatgataataaatatttagaaaacagcattagctgatgttagccactttctattatataacagtaaataatgtaaaactacaaagctatggaataaattatagtagaattttatacaaaatacacaaagataacctttgaaaaaagtaaatattaagtatttaaaaggcaaattaacaatgtagtattaacaatgtgtacattgtaatctgcagagtattatgataaatactgagtattttaaaagatatactcaatggagaaaaagtcatcaacaatatcagttcacatgctcctctcagtctggaaaaaatatctcatgtacttat

SEQ ID NO: 318315 - DNA, 4001 bp, Homo sapiens
gctcatacgaaagccacgcgttgtagcctgagtcggcgtcaactgcgcgcaccttcgccaccacttggcctgcacccagtgaccgcggcaccagctcgctcactgcaccaccagtaccacccacccgaggcgccagcagcgccggcgcgttgtcgttctcgtccagcacgaacacctgcagcgtcacgttgctgcccagaggcggcacgcccgcgtcgcgcgcgctcacctgaaactgcagcagctctagctcctcgtggtccagcggctgcagcgcgtacaccttgccgctctccgcgtgcaccgaaatgtagctcgacaacgcgcgctcgcccacccgccgctccaccagcgagtaggacaccagcgcgttctcctgcgcgtccgcgtctcgcgcagacaccgtgaagatgtggcagcccggcgggttgttctccttcacgaacactgtgtactcgggctgcgcgaacgccggagcattgtcattcatgtcggccacctccacagacaagctggcggtggcccacagcgaaggcgagcccccgtcccgcgcggttaccaccaactcataggccgacacgctctcgcggtccagggcactgtccagcaccaacgagtagtaattcttgaaggtggacaccagcttgaaagggacgtgaggcgtcagcgagcagttcacctgcccgttggcacctgaatcgaggtcgttcacgctaattagggcgatgacagtaccaaattgagcgtcttcacgtacaggcaaggataaggaagtcagtgctatctcagggacgttatcatttttatccaaaattctcactaaaacggtgcaatgacccgccatgggaggatggcctttgtccgtggcgtcaatgaggattttgtataagttttcttgttcaaaatccaaattaccccgaatcactatttctcccgtatttcgatctatgctaaagtggtcaataaccatggctgcaacaaggctattaaaagaatatgaaattgccccattcgctccttcatcccgatcagaagcattcagtctgataactgttgttccgttgtctgcattttcgaatattcttacttcgtattcagactgttcgaaagtgggagcattatcattcacatccagcactgtgaccagcagctgaacagtgcctgtgagctcaggtttgcccccatctgtggctgtcaggaataagttgtgtgcaggagcttcctctctgtccaaggatttctttaataagagcccaatttgtttattgtcatcactgtttattttcacatctagcccgaagtattcgctagaactgagtttataggttaagatggaatttgagccaacatctgcatcggacgcgccctccagtggaaacacagaatctggcagcctagattcgtaaatcagcactctttgttcctctaccgggaacaagggcgggttgtcgttaatgtccctcacctccacgtccacatggaaaacctgcagcggcctgtccacgatcacctccaggtggatgctgcactccgcgctccgcccgcacagctcctcgcggtcgatccgagaattcacaaacaaaatgccattctgcagatttacctccagaaggtcctcgcggtctttggaggccatcctgaacaggcgcggcaccagctccgccagctccagccccaggtcctgcgcgatccggcccacgaaggtgccgtgtttggcctcctcgggtacggagtagtggagctggccgctccccaccttccaggctgcgaggagcagaagcgggaggagcagacattgctttcccaatctatcctccggggtaaacaccatgtcaaatacctctggttttatttccattagaagatcttccgcataaagataaaatactgtatgttccggaatttattaatccatttcttctgcgtccgccatcattcaacagtcagggaatgatgcagtaatagaagaaatttgaatgttggctagctataacttcatggtagacagcgacatcatgcggctccaaaaggtaagaaatcaattcacgtaacagtgctataccatatatttttaaaacagtatcttcttttctctacttttatagtaaaccctcctcacgtttgtaatttgcacggtcagtgttatcccgacttcttttattaatttaaagtaagggatctaattattcacagctaaacaacttttctaccaatatttgcaacattaatatcaaccagttcagcaaatttaagtgttaacggaactgctttttaaatcagaaatgtaaactattctacactcttggtagaaaagaaacttgcccacatctgtctttcctaggacatgctattatatagtgctctagggaaaaaatgtaacttaaaattatcaaattttggttgaatttttaaagccttatagattattgaagtccatgctttctttgttcaataaatatcagatgctcttaaggttcttctgtgtaatgatggaagataaaattctagagcatattctttatcacatttaatttatctgcagcttatattaggattcttgcttaaaatattttcttttcatatacttcaccacttcaaattctagtggaatttctacccattgtgctttgctgtttttgattcttcagctgttcctaaatgatctcgtttttctctctcaacttcaaccctgtcccatatcctttcctttaattgttctcactcacttccaagttttgaataagacttttattgaggtatttacaaatccatatctgcatcccttctttctatgtttctaattgtcactttcacctatacatgctgactcctagaaaatagtttgttaaatagcaaggcatgagcaattattaataatccccaaattcaaatttttaaattcatatttttaatgacatgagcatttcccatgtcacctatattactttttaaattactccttttccctggcttgccttattccacatccacctaagtccatctgtctttcacatgctatcatatttatctttatgagtacagctttcattgaattttactaaacctagaaattgcaagacacttgagaaacttctagtaacctaatatgtaatcacatgttaggtaatcaactttttgcaggttattttcaattactctccaatatgaatcttatttttctgacaatatagaccacttgctcttcctctttctcaataccacctttgttttagctgggtttttttaattacgtctacaatttacttgcaaaaatgttaccttcatataaaagtcagggccaaatatcaacttcgcccttaatttaaccttaatgttatccatttgaagtgattaaacccctccttcaaaggagaaaaatagagtcaccaataagacttttcaaatgacatgatcatcttcaccttactccaaaattctgatatacagtaaaatgcctcacagatgattgtgacacaaagccttttcttccatgtgaaattctatcttaaaataattaacctggatctatttagtagttcttatcactgactttctattgcagttattttgggcaaacaaagggttcaatttcttaaccaaaaacaatccccaaaacaagaggttcctataaaaaagacaagctgcacaaaatatacataaagacttgatatataaagagatatataaatagtttatatcacaaaacttgattttttaaaatgtgaccattgttaactttagatttatagaatgacaaaaactatttctcaatttctaggacttcctcaaagtagctcaggatattaggaatatataaatagcatgatagaagggtacttataaaattgaatgcatatgagaataaaagaaacaggcaaagcaacagaaatagggaattcacattttatcatgtaaagtgtggactatttactacctataaatccatacttttcccctcaaaagagtagacaaatggttctcattatttcagatggagagga

SEQ ID NO: 318316 - DNA, 4001 bp, Homo sapiens
caccagcacggtggctgtggctgtcagcgagggctccccgtggtccttcacaagcaccagaaggcggtggcgcggtgcgtccgtctcatctagggctcgtgtcgtgctgatctcaccagtgtacagccccacgcggaacgggatgctcgcaccggccgccaccggttgcaactcatacgaaagccacgcgttgtagcctgagtcagcgtcaactgcacgtaccttcgccaccacatggcccgcgcccacagaccgcggcacaagctctctcactgcgccaccagtgccacccacccgaggcgccagcagtgccggcgcgttgtcgttctcgtccagcacgaacacctgcagcgtcacgttgctgcccagaggcggcacgcccgcatcgcgcgcgctcacctggaactgcaacagctccagctcctcgtggtccaacggctgcagcgcgtacaccttgccgctctccgcgtgcactgacacgtagctcgacagcgcgcgctcgcccacccgcagctccaccagcgagtaggacaccagcgcgttcttctgcgcgtccgcgtcccccgccgacacagtgaagatgtggcagcccggcgggttgttctccttcacgaacaccgtatactcgggctgcgcgaacgccggggcgttgtcgttcacgtcggccacctccacggacacgctagcagtggcccacagagaaggcgagcccccgtcccgcgcggtaaccaccagctcataggcggacacactctcgcggtccagagcgctgtccagcaccaatgaatagtaattcttgaaggtggacaccaacttgaagggaacgcggggcgtcagggagcaggtaacctgtccgttgactccaaaatctcggtcaaacacgctaatcaatgtgatgacggtacctggttgggcgtcctctggaatagggagagacagggaagtgagagtcaactgtggagcattgtcatttacatccacaacttccacaagaactgtacaatgaccagccaggggtgggaagcctttatcgacagcctcgactgggatcttgtgtgctctactttcttcaaaatccatatgtcctatcactgtgattgccccacttaaggggtccatgtggaacttggattttatatctggagaaacatcactggagaaggagtaaataatatccccattcaagccttcgtctaaatctgaggcattggggtgaatcaccagcgttccgatagaaacgttttctggtaatttcaccgtatacagggttctgtcgaacactggggcattgtcattgttgtccagtaccgtgatgagtaattgaacggtgccagtcagctcgggtttgcctccatcggtggccgtgagcaataaatgaagctccggagtttcttctctgtctaaaagtttccgtaatacaagtccaagaggttttacctgctggttgctggttggcacgtccaggaagaaatactcattggggctcagtctgtaagtgagcagggcgttctccccgatatctgcatcggacgcgccctctagtggaaaccgagagtcaagcggcctggattccgcgatgaacagattcctttgtgtcgctgggaacaccggagggttgtcgttaatgtccttcacctccacgtccacatggaaaacctgcagcggcctttccacgatcacctccaggtggatgctgcactccgcgctccgcccgcacagctcctcgcggtcgatccgagaattcacaaacaaaatgccattctgcagatttacctccagaagatccccacggaatttgcacaccgcccggaacaggcgcggcaccagctccgccagctccagccccaggtcctgcgcgatgcggcccacgaagttgccatgtttagcctcctcggggaccgagtagtggagctggcctctccctgcctcccaagctgctagaattataataaacagcagtagatgtcggccccctgggtcgtatccattcgggcacaccatttcaaattattggcttgtttttctagtcagcaaaacttgccttcgaatttataggaatgtttttatcccttcatttcaatctcgatgtgtggccattgttgtgcatccaaagagtgaaagagagtggagcgtctttccagtgcgaaaaggaatgacttccttttgctgattacgaaagaatttgcggtaaagagcgacatcatgtggccatcatgtaagtaagaattacaaaccattacaaactattaatcagatgaaaagttttatttcaaactctgaatttttttcttcattgttgttaaaggttaaaatagcatttctcatgattgttagaagcattcttaggcgactgatggcttttgaatactcagtgttaccagaactgtagcttcctcatgccttagaaaaacttttttttcacacagttttaaataaagatagaaacctaagtgacaacatgaatttaaacaactgcaagtttaaattcctttgatctagatcccaggaaacttcatattcttgattcagtatcgcttgttaagaaaaatcctgtactcttttagggacccaggatctcaagaatctactgattgatgaaagagaaacttagaaagcggtgtgtgtgtgtgtgttttctttttaggaggcaagaaacattagcaactatccagacacttctcttgggaaaacaaaataagagaaggtttggggaatctttgaaggggaagaatttgtatcatgtgaactttttgaggaggaagtattctgaattttttgctttagcagaatctatatatactgtttcaggagttcatcattttatatttgtttcctcattctatcctttcgaacacttgtgtgttatgaatatatgcctatttttacaatctcaaatatgatttgtattatttcttttaaaatgtaagtttattttattagataaatttcagtgctcagccatctcacatacagcagccctttgatcaagtcttgaggtatttcatcctttttggatctaccttactgtgttcgttttctggaatgtttcactccaatgttcccaatggcatgtaaaataattatgtctgtattcagatgctttcctaaataagtttttataattgctgctctcctggtgtattgcagtagcttcttattgtgtaacctgtccattcctatttcattctccttcatttaatccttgcagtcatcttccgttaatactttttattcgtattgcttcacactttttgacagctttcaaatgactttgaagagtgtcaaaattactcgtctagtactcaaagttatacaaaaggtttttctcatattacttttcttgctttatatcacactctctcttatgggaaccatgtgctttacccaaagtggactattcctcatttctaggtacatttggaattttctgtatactcacttaagttactctcttctcatgaatacctgttagtctccatattctcccagggaaaactctttccattttataaccagtaaaacatcatgactcttcacggtctccttcaacaagggaaaaaggcaaagatttttttccaattccaataacactatgatgtacctttctagcacctcttacaatattcttgcttttactatcatcgtatttatgtaggatacttacctttatttatctattaaatttgaagccaggtcttgttaattcgatgattctcagcaggcacagtgtgatactcttaaagaccctcctaggaactttttaaaaaacatttactcactagcaacgctatagttctctacttcctaagaaagtatgctgttttgaggctgttagatatcattagctacacaaatggtgatcttcagtataatcagagacaattctgccactcttaagtatgtagagttagtttttttaaattttagtgcaatattaattacacgcttaaaaattatcatgtacttcttttagaaaacagaaaataccactaccagtttct

SEQ ID NO: 318317 - DNA, 4001 bp, Homo sapiens
caccagaaccgtggccgtggcggtcagcgcaggttcaccatgatccttcaccaggaccagcagacggtggcgcggagagtccgcttcgtccaggacacgagtggtgctgatctcgcccgtgtacagccccacgcggaacgggatgcgagggctgcttgcagctggctgcagctcatacgaaagccacgcgttgtagcccgagtcggcgtccactgcgcgcaccttcgctaccacgtggcccgcgcccacagaccgcggcaccagcttgctcgctgcgccaccagtgccacccacccgaggctccagcagtgccggcgcgttgtcattctcgtccagcacgaacacctgcagcgtcacgttgctgcccagaggcggcacgcccgcgtcgcgcgcgctcacctggaactgcagcagctctagctcctcgtggtccagcggctgcagcgcgtacaccttgccgctctccgtgtgcaccgaaatgtagctcgacagcgagcgctcgcccacccgccgctccacaagcgagtaggacaccagcgcgttctcctgcgcgtccgcgtctcgcgcagacaccgtgaagatgtggcagcccggcgggttgttctccttcacgaacaccgtgtactcgggctgcgcgaacgccggagcattgtcgttcacgtcggccacctccacagacaagctggcggtggcccacagcgaaggcgagcccccgtcccgcgcggttaccaccaactcataggccgacactctctcgcggtccagggcgctgtccagcaccaacgagtagtaattcttgaaggtggacaccagcttgaaggggacatggggcatcagggagcaggtcacctgcccgttggcacctgaatcgaggtcgttcacgctaattagggcgatgacagtaccaaattgagcgtcttcacgtacaggcaaggataaggaagtcagtgctatctcagggacgttatcatttttatccaaaattctcactaaaacggtgcaatgacccgccatgggaggatggcctttgtccgtggcgtcaatgaggattttgtataagttttcttgttcaaaatccaaattaccccgaatcactatttctcccgtatttcgatctatgctaaagtggtcaataaccatagtttcaacaaggctattaaaagaatatgaaattgccccattggctccttcatccggatcagaagcattcagtttgataactgttgttccgttgtctgcgttttcgaatattcttacttcgtattcagactgttcgaaagtgggagcattatcattcacatccagcactgtgaccagcagctgaacagtgcctgtgagctcaggtttgcccccatctgtggctgtcaggaataagtggtgcgcaggagcgtcctctctgtccaaggattttcttaatacgagctcaaccagtttattctcatcgttctttgaattcacatctagcatgaagtaatcatgagagctaagcctgtaggttaacacggagttagctccaacatctgcatcggacgcgccctctagcggaaaccgagagtctggcattctggattctgaaacaaacagcttttggtcttttacccggaacactggcgggttgtcattaacatccttcacctccacgtccacatggaaaacctgcagcggcctgtccacgatcacctccaggtggatgctgcactccgcgctccgcccgcacagctcctcgcggtcgatccgagaattcacaaacaaaatgccattctgcagacttacctccagaaggtcccggtgtcttttggacgccacccggaacaggcgcggcaccagctccgccagctccagccccaggtcctgcgcgatccggcccacgaaggtgccgtgtttggcctcctcggggacggagtagtggagctggccgctccccaccttccaggctgcgaggagcagaagcaagagtagtagtcgccaggatcccagctctcctcgccagtgataatccatgttaaatagtcgtttcctatcagaaaatattatcttaatataaagatgaacgactgtactttcagagtcttttaatccaattccgctgcatctcccgttgttcggcctttagagacagatgctgtcagagaaaagactttgaacattgaccaaccagaacttcttggtagacagcgacatcatgtggcttcaaaaggtaatgattacatgaattacttccgcaatatctgggttcttctatgcactttctatttctttatcataatttaatagtaaatccttaactttatcaattgcagaggcattcatactgtctggctccttacattagtttcagctagggatttcttcttcataaggaaaggaatttcttcccaatatttcaaatatcgtatcaattaataataaatttaagtatgacctgtatgtcatggatatcagaaatgtaaactgtcctccatagtttcgtgtggaagaaatgcattaatatttatttggtcaccagaaacactggtatatattactctgaggtgagcatataattctaacttttctacattttatcttcttgtgttcttattgttaaatttttgcttttctttattcaataaatgtcaaattgcctgaaccgttttatttactaaagtaataaaaatgtatgtgcatattctttacactatttctctatatctctatagcttgttaaattcagcctctcacttaaaacattttcctttatgatttctctgacatgccaaactctagcagtattgccatcattggcttgttagttcttcatctttcttctgctccaaaaagtgagtatttaccagaattatgcctttaaacttttttccccaactttttatttaacgtttctatttccacggctttaaactagcctattatttgaagtattcttaactccatatctgcaaccccctattttcattttctacctgacatttttacctgtataccctaacattgcctagaaaatgagtcgaccaaagttaaaagaatatctaatcaataatcacccaaaacccaaatcattaaaaaatcacaatttttatagcatagtgattctccacatttactcatatgtatttttatgacttcttttcctttgcctaccatatttaaaatttgtatacatcccatctctcctttcacgtgtgataatttctgtccttattagtacagctttcactcgatttcactaaaatcttcaacaagtttatctttctattgactaattgtcaagacattagacttccatctgggagatacgctacgtgaccatgagccaatcttctcagtgctaaggctaaccactttccaataggagtcatattttacagaaaatatgttgtctccttcttggcacactctttgttcaaggtttttcttctattacttcatctttttctgtcaaaattctattcatctttcaaagtccacctcaaaagtaaattctccatggattcatcatgaatgccttcatagtaggcaattaagagctcctccaaatttctacaaaattcttaccaaaaacgtaggttaaataggaaaggcaaataagggtattttctgtgaaatgatttaaatttgtcatcacattatttacccaaaaaaatctctgtagttgactctaaatagtagcaaacaatttgtaaagaaaatagtatttctcgatatctcaggagtttgagaccagcctgggcaacatggtaagaccccatctctacaaaaaatacaaaaattagttgggcatggtggtgtgtgcctatagtcccagcaacttgagaggctgaggtaggaagatcacttgagcccaggaggcagagattgcagtaagcccagattgtgccactgcactgcagtctgggctacagagtgagaccctgtctcaaaaataataatcatcatcatcatcataataattgatgaatacagcttaggtggctaaggaggatcccctatcaacttcaggtatt

SEQ ID NO: 318318 - DNA, 4001 bp, Homo sapiens
gtaaccaccagctcgtaggcggacacactctcgcggtccagagctctgtccagcaccaacgagtagtaattcttgtaggtggacaccagcttgaaggggacgtggggcgtcagggagcaggtaacctgcccgttggcatctgcgtctaggtcgatcacactaatcagggcaataactgtccccagttgtgcgtcctcttttacaggaaccgagagcgttttgatagtcaactgtggagcattgtcatttacatccacaacttccacaagaagtgtacaatgaccagccaggggtgggaagcctttatcgacagcctcgactgggatcttgtgtgctctactttcttcaaaatccatatgtcctatcactgtgattgccccacttaaggggtccatgtggaacttggattttatatctggagaaacatcactggagaaggagtaaataatatccccattcaagccttcgtctaaatctgaggcattggggtgaatcaccagcgttccgatagaaacgttttctggtaatttcaccgtatacagggttctgtcgaacactggggcattgtcattgttgtccagtaccgtgatgagtaattgaacggtgccagtcagctcgggtttgcctccatcggtggccgtgagcaataaatgaagctccggagtttcttctctgtctaaaagtttccgtaatacaagtccaagaggttttacctgctggttgctggttggcacgtccaggaagaaatactcattggggctcagtctgtaagtgagcagggcgttctccccgatatctgcatcggacgcgccctctagtggaaaccgagagtcaagcggcctggattccgcgatgaacagattcttttgtgtcgctgggaacactggagggttgtcgttaatgtccttcacctccacgtccacatggaaaacctgcagcggcctgtctacgatcacctccaggtggatgctgcactccgcgctccgcccgcacagctcctcgcggtcgatccgagaattcacaaacaaaatgccattctgcagatttacctccagaaggtccccgcggcctttggaatccaactggaacaggcgcggcaccagctccgccagctccagccccaggtcctgcgcgatgcggcccacgaaggtgccgtgttcggcttcctccgggacggagtagtggagctggccgctccccaccacccacattgcgaggatcagaagcgagagcagtagaggctgaccctctggatctcctcgacttgagtataacatttcaaatactcagtcttcttctaattagtgaaaattgcctccaaattagaagaaatcatctgatttcgtcagtcccattctgctgtgttcgccatcgttcagcacagagagagtgaaaaagaattgagcctctttcccatgggaaaagggctgtatttgtctggattcagagagaacatcgcggcaaagagtgacatcacgtggcccaaagtgtaagtacatatttcatgaataaaaatttcacagttattctgcaaaacttatttcattttcttaattttttcttaagtaatgattgttgaaacagaagatcccgtttctcttgctggagccttcttagcagactgactgcctctaaaagttttgtatgaccttgattgtggttttcttatccctgagaaaactctccacttaagttttaaataacgacagaaatgaagtaacaattaaaatgattccattgagcaatcacgaattttaaattacaaaattcttttgttctggaattcagaatctcccatatggctcgaaataggattctagtgtaagagaaatccaggagttgcaatctctagtgaatataggagcccagaaatctactgatgaaaaagaaacttagtcatgtctggtaaaaggaatcaacaaaaagtagcaaccaactgaggtagttttcttgagtaattctatgaattgaaaaggtataaaatattgcaagaaaagcgagaattgactttaaggtcttgtgttgcgtggggagaaaatatatttttctcttttgtagcatttatacaatctgtttccagaaatgtgttgttttgattctttccaagctttataatctatgaataatctcttctttgtagtctccaatatagtttgtgtaatgttattacaatatgttttaatttcattattgctcatccttagtactcggggcaatttctgtttttaaagctatgcttgagattcttttcctgactaagttctacaaagttttgttgtgagttttactatcttattccaacgtccaagtcgattaattaaatctagattttagtgtatctcaagtctaaaggcaaaaccgtgagtgtttattgtgccattaatgtttttgcatatttatcttttatttcgtatttctactgataacagcctaagaggtgcatttaacaattgcttctgtccttgattactgcaggagcttctgagtttgtcttcccgttcaaccttctttcaaaagtcgtgatttattttgctcaaggtagttaaatagctcccaattaattctaaagagtggccaaattccttaatcactcatggccctttagtttattactcagaaatcaagagatcttcttacattggttttcctgctttcattctctgcagactgtgtgttttaaccaaagtggacttttctacttgtcatattgatgctttctgtgtcttcaactttccttatgttttctctttccaagaaatgtctatcattctcaatattctcccggggggaacttacttattttaaaaccactgaaacacaccatgccccttcaagtatttcttcaaaaattcaaataggaaatgattgtctttcaacttcaacgtcattctgatttacctcttgtacctgttacattatcttgccttgcattgtgtgactcatattctttatttgacctcaaattttaaagccaggggctggggctcagtaataattcctgacatgatgatatgctgttagagatctgtaagggtcctatttaatgtttaatgaagactggttattacaatcttctctacttgctaagaaagcattttaggctgggcgcggtggctcatgcctgtaatcccagcactttaggaggccgaagtgggcggatcaggaggtcaggagatcgagaccatcctggctaacatggtgaaaccccgactctactaaaaatacaaaaaattagcagggcatggtggcatgcacctgtaatcccagctacttgggaggctgaggaaggagaatcatttgaacccgggaggcagaggttgcagtgagccgagattgcgccactgcattccagcctgggagatagagcgagactccgtctcaaaaaaaaaaaaaaaaaaagaaagaaagaaaagaaaagaaaaaagagaaagcactttaaaaggctatttacaacactctacataaatggtttacttaattcatagaactacaacataaattgactttaaatcatcatcaaaacattattgtatacttctttttaagaaaaatactattaatggaaagatctcatacatacaaagaactcaaacgcctactcaggcctctgcaggatctcaggcaacttttaaatatgggaaacatacaactatcaaagtaagatagtctacacattccttggaaggactttaacctttccaaaaaactgttttcccacataggtggtgttaacttgactttcctaaactcgtaataacttttagatttttttcattccaccacacaacattcaaaatattgaaacatcctaggttaatctaaaaaatgactttacagaagatagttttacacaaaaataagattaatatggaaggccataacgactttctgacattttaggttgcctttctgcaatcactaacttcttttctcttaagaatggtaataactaaattttattatgtacctatcacttgccagagtttattattaataattta

SEQ ID NO: 318319 - DNA, 4001 bp, Homo sapiens
agagactagagtcagacgcccgggagatgtggtaggaaagccaggcattagaaccactgtcagcatcctctgctaccacttttgtgaccaagtgtccagtcctggcagagcggggcacaatttccactgggacagaaccatttctgggcaagggaaacaagataaccggataattgtcattcctatctaccacaaacaagtttatagtcactgttgcacttctgggaggaatgccaccatcccggccttctacttggaaatgaaaccccctgagctgctcaaagtcaaaggaagttttggcagtgatggccccactggatgattccactgccagcaagctagaggctgatggcccttcagagataacatccaacagctcataagagacaaggccattcttccccaggtcggggtcctgggcaaacactcggcctagagaggccccagggccattgttttcagcaacgaaaagttcctgctggggttgaggaaagtttggtgtattgtcattcacatcagcaactgacacagtgattgtccttcgggtgctaagtgggggtgagccactatctgaggccgtgatcaggacttggtattcactgatctgctcccggtccaggggcccatcaatcagcaggctgtagtagttgtcaaaggaagccgtcagctgaaaagggcctgcactagacatgccacaaatgaccctaccattagaatcgaggtcttcatcctttacactaaagagagcaatcactgtgccaggggcagcgtcctcaggtactgggttcgaaagagtcaggaagtccagttcgggggcatgatcgttcacgtcagtcacctccaccagcagtttagcggtgctagctaaaccaaagacaccttcgtccctcgcctcaatgtatgcctccaagagcgtttcaggcggacctagtgaagcagctacttgcacctccccacttttagggtgcacgtgaaagcggtgtcgcagctctgcttgcgtgctgttgcttagggagtactggacttccccattggacccttcatctggatccaaggcttgaactcggaataacacagtcccattgggtgcagtctctggaaccttggtgcggtatacggagcgctcaaatacaggcgcgttgtcatttgtgtccaccacaatgatggtgacttgtgcgtctcctgagcgggcaggtagcccgccgtcccgagctgtaagcaccagcaggtgggtggcgcgctgttcgcgatccagtgctttctccaacaccaactccgggtattcgctgccgtcaacccgcgatcccatgtccaggcgaaagtgctgactggggcttaggctgtagcttagtatcccattgcttccctcgtcgtcatcttgggcattcgggagagtaaagcgggctccgggcgtcaggaactcggggatgtgcagctgcacgtcgccggcaggaaagagaggtgagttgtcattggtgtccaggacgtgaatccgaatcttgtgcagctccagcgggtcctcgagcaccaggtcgtaggtcaagacgcaggcagctttggccctgcacagctgttcgcggtccgccggctctctgaccaccaaattgccgctgggtagatccaccccgaagtagagctcgcggtggctggaaaggaagcgaaagttccgcgaggacatagcggccgctggcagcctcaagtccgcggagagattgcctacggctacgccccgctccgtctcctccggcactgagtactcgagctgtcccgctgcagcgccgcaggaaacccacaaacataaaactgccaccccacagcccaccatcctccctctaggcgtccacgttccaccaacacgctacaccaacggtgacccaggaccatgctccggactcctggagagcacgagccgcggggaagagcacgctcctgccggccgtcactgctgcgggctggatactcagcgaccgccgacgttgcgcctcccgaacgccggcattgccggggctggccagctgggagccgggcttgctaggctggaggctgggcagccgtctgggaaagcggagccggccgggtgttgaggagcgcagcgccgcctaggggtgcagagacgaggccgcccgcccgggcgcgagaggtgctgtctccagtagcagcgggctggggtctcgaccaccacgctggctgcgggcgcagggcggagcctgggagacgccccgagacactaacacttctctccttaaacggtgttttctaggacaacgccctgaggctgcccagatcttaacctccacatcctctgcccgcagattgctgataactgtggctgagcccagctgggctcttcctgccgccctttgggagccgcgcgtcgggtcccggcgctctgaccccggcgcacctctccggcggagagggcgggactcagcgtggagctgccgagcggaggcggcgagaggcgggacggtgaacgtgagcgaccacaccttctaggcttaaggaaacaggagccccccgaaagaagtgctgcggggggctttccgcgctggatcctgctgcagagctttccgcgctggatcctgctgcgggttgaagtctgtcctgcaccctcttgtatcccaggagctgccaagagggcaatagagacgacaaggaggggaagaaggttggggaatagtgtccgcatcaaactgcctccggactctggcttttcgaggcagcggagccagcgagctcaaggctttttttttgcgtgatagcagtttctccttctccaagaggctctacttgggagtgctttgcaaacggcccttgacgatctgggtgaaagaggaggttataaaccagtcaatagcaataactagaaactcaaagacttgacgacccgtccccaaagaagacgtgagaagtggaggggaaagtactgagatactcattagagtttgaccaggaaactactctgtaaattttctttctgtaaatatttagaaaacaccatgaggcaggataagaataggctagatacccaccctcgctttattattattattattattattattattattattatactttaagttctagggtacatgtgcacaacgtgcaggtttgttacatatgtatacatgcgccatgttggtgtgctgcacccattaacttgtcatttacattaggtatttctcctcgcttttaatttggtcttttgcgtggatattgggacagtgatcagttctatgagaaacatctctgagccacaacagatacacccaaattctgcctaacaccctacaaccagttcctttccctaagaaggaggcgagccaaaaggagactcattgactattgactatgaagcactaaattcctcactcaaatccttcttttaatacaggtgcaatatgtccaaagccccaataatgaaacatttgaaaggcaaaatctgaacacagatcaagaattaaagtttccaggacatattttctggtagaaacctgcctaaaagtatcgataattattgaagctgggtgatggtacattggggtcaattacacaattctctcaacttttgtgtatgtttgaaattttttttccttccttccttccctccttccttccttccttccttcctttccagatgagcgtgttgctttgttgcccagtctggtctcaaacttctgggctcaagcgatcctcccatcttatctcagcctcctaaagtgctaggattacagacatgagccactgcactcaccttgcattttttttttaactttttattttattttattttattttattttattttatttttttttttgagacaggttcttgctctgtcacccaggctggagtgcagtggcacgatctgagctccctgcaacctccccctcccaggttcaagcgattctcttgcctcagcctcctaagtagctaggactacaagcgcgcaccaccatgctcggttaatttttgtatttttattagaggtgaggttt

SEQ ID NO: 318320 - DNA, 4001 bp, Homo sapiens
gattgtcattgatgtcagagatctcaaccttcagtgtacgcagggatgtgagctgcggtattcccccatctgtggctgtcaccgtgatgttgtagacagccacccgctctcggtccagtgggccgctcaccaccagtgtataggagtttccaaagccattcagtcggaaaggcagtgtggcctccagacccaggctcactttccggttggggcctgagtcttggtcattgacactgagaacggccacaatggtgttgggtgtagcattctcaggcactgggctatacaggtccgtgagcaccacctctggggcattgtcattcacgtccacgatgtccaccagcaccttgcagtgacctgccatgggcactggaccccggtcagtcgcctgcacatagatctggtaggaggaggcttcctcataatccagccccccaattactcgcacttccccggtactggcatctatgctgaagagctgcctctcccggtccgacgtgtagctgctcaaggagtacctgagctcaccattggagccctcatccgggtctgaggcattcagcttcaccaccaatgtgcctgggggtgagtcctcccgtagctggacgcgataagtggactggtcaaaggcaggagagttgtcgttagtgtccaggacacgcacagagatctgtgccgtacccgagcgggctgggatgcccccatccacggctgtgagaaccaggtggtgcaaggctgcctgctcccggtctaggcccttacgcagcaccagctcaagcactttactgttctcctgcaggggcttaaggtccagctcgaagtgctcgctggggctgagctcgtaggtctgtactgagttggcgcccacgtcggggtcctgcgcactctctatgtgaaagcgcgctccaggcgccaccgattcgcttacctgaagctggtagttgggccgcgggaaacgcggtgagttgtcgttgatgtccaatatttccacctcaacggcgctcaccgccacggggttgtgcgccagcacttccaagctgagcaggcagcgaggccgctgctcacacagcgcctcccgatcaatgcgctcgttgacgaagagcgctccactcgtcaggtccagctccaggtagcgcggactgggcgcacccagatggttgatgcgcaagcaacccggccccaagcgccgcagctcaagccccagcgcgcgagccacgttgcccacgagcgcgccgggtgcctgctcctctggcacagagtatcgcagctgggaggccgcagggccaggtagcagcagcagcaacagcagcaggagaggcagtagcagcagccagggcatgggccgccggagccgtggatgctctgtcgccgcaggtctggtgcccgcctgctccatagccactggccgcggcggaggcagccgggcagggccggaggcggcagcttccccagccgtgccccacgcccgggccccgcctccgctcgtgccaccctgcgcctgctcccccaccgctcacgctctagaaagcgcctggggccgctccctccgtaggccctcccaagggctcctggccccaccgtcctcgctgactccccatattccagctcctccgctcgcctccgagtcgctcaacccggctcggcttcctgctgctgctgccgctacagctccagggggagggaaaaggaaacagaagggaagacagagggggagggggaaagggagcggtaggagggctcagcaagtcctgctctgattccgcgccgaagtggcggacagcgaacccggactgctcagcctctccagccccatctccttcaccctggacctgccggatcccagcggaccgcaggaacacggccactccctttctccctacccccactgtccagttcatccagtctccaccgtctctcccctgcttaacgggtctttaaggagattagtctgggaaaagcagtcaagcccctagaagtctggctatcagctccccaggaaaagatctccaagcgcaattcaggaaaataaactgaggggccttagctaagtatgggcacccaggcggcggatctaacattaaaaggaaacaacgcagggggaggcgctctggggttactggcgatgggaactattcacctgactcccacatcttccctggacactcttaagtactgcagaaagtgctcaactcctagggcaaaaggagggggatggcaaatgctgccctctttccgggagcaagcctaaaaccagcatcctgggatccaagactcaattctgctctcggccaagtggcccttattttcagtgtgtgccttggcaaataaccaatatttaaatgtttaaaatgctctgtttaaaaaaatagtctccatgaagctgtaggcaaatctattatttgacccattttggcgacaatggggaaaatctggtaaaatttttaaagagattcttctctcaagctttttctaatcttgcttcaaatcttttacatttatcacccaagacattttctttcaagagtaatttaaaattttttctttaatggatgacaatgtcttcaagagtctgcaaaaccattaaatcaagagcgttactgttgatctcctaagccaggctggaatttggattccattaatgctttgcagttaaaaaaaaaaaaaaatctgctgtcattaagcaaaatgtgggagtctgggatttatcttacaataaccagcaatttcaatgactgcagcttatcttccttaaatataagactccttagacttctgttcttctgtgtccccaagtttcctcttgtactgctatagaggcaacacagagacaacaaattcacttcagtaaaagagaaggtagaaggatcagaggaaatctttccatgctgtgtcattgcctctgctgctcagttctgaatattcactcttcccaggttctcacatttcttccacaggaatttgaaatctattgcctcatgtgcaaaaaaagcactcactaaaacgtcctttctcttcatctcccagtattctgtcatctgtagatcttcctctatgggtcattttctagctatggactggaacaaagtcagagtgagacctgacatttggcatgcttccctcctagagcggacagttaaaggagccaaggttgtgatcctgacacccagaattcaaaggcctgaactagcacatcccttcgttccaccaaccaagcacactcactatcaatgctccactacctagccagtgttattccagagaagcgcccagcctcctatcactgctgcttcttatttgtcctctttgtttcctcaagggtacagagtaggaagcaattttcatcaaaatctattcctgtctcctttcttgggtctctggcttcttcctcttctctctgcatcctccccaaacatccctacaataattctgtctcagtttgctgtggtaatttgatctcggaggccttaatctctcaagtgcacaaattgtggacctggcctgtgtcctcacccattacttgtttctgaaaataaatggcttataagtggaatcaagttgtaagttgtcatgaaaagtgatctttcctccccttatctcctcccagccctccaagtcgctgccatctctgcacgcagctcagagacctggccactgggtattgaccaggcatagacctgtgactgtgaaaaaatcataggcacttaaggaagagattacagtggcagaggcttggtaattttttaatggaagcccccaaatgtcatgtcttgggagaaaaaccaggactctcctttcagcactcttgtcatcttccagcaaggacacctgccaggttgtccattatgctgttttaggccttgtaggtatttagctccagctagaatttactgccttaattattaaggagtcaaatataaagccaacacaatcagcctcattttgaaagacattgtactaaagagatggtatactctatttggcactataatgatttcgttcct

SEQ ID NO: 318321 - DNA, 4001 bp, Homo sapiens
ctctccattatctcggaccaccacggtcaggttgaaagtgctaccactctcatctcccatcttcctggtagtcctaatttctcctgtgtgcagctctaccttaaagaggtccaggtcagaagtctgggctagatggtaaaaaagccaagcattttgcccagagtctgagtccatagctatgactttggtgaccaggtagccagcaggggcagttcgaggcaccatctcgaaggctgctgacgagttggttgaggtagggtacagaatgtgaggggcatggtcattcatgtccaccacatatacgttggcagtcacagtgctgctcagtggtgggctccccttgtcctgagcctccacagtcacaaagaactcccgaaacttctcatagtcaaaggagttgacagcataaaggctgccactggcactgttaatggagacataggaggtgactggcagcccttgaatctccctctccagaagggagtaggtcacctctgcattctccttttcatctgggtctgtggcttgcacagtacagagcaacacacctggcaaattgttctcctgtatgtagatggaataggagtcctccaggaagcttggtggattgtcattgatgtcagagatctcaaccttcagtgtacgcagggatgtgagctgcggtattcccccatctgtggctgtcaccgtgatgttgtagacagccacccgctctcggtccagtgggccgctcaccaccagtgtataggagtttccaaagccattcagtcggaaaggcagtgtggcctccagacccaggctcactttccggttggggcctgagtcttggtcattgacactgagaacggccacaatggtgttgggtgtagcattctcaggcactgggctatacaggtccgtgagcaccacctctggggcattgtcattcacgtccacgatgtccaccagcaccttgcagtgacctgccatgggcactggaccccggtcagtcgcctgcacatagatctggtaggaggaggcttcctcataatccagccccccaattactcgcacttccccggtactggcatctatgctgaagagctgcctctcccggtccgacgtgtagctgctcaaggagtacctgagctcaccattggagccctcatccgggtctgaggcattcagcttcaccaccaatgtgcctgggggtgagtcctcccgtagctggacgcgataagtggactggtcaaaggcaggagagttgtcgttagtgtccaggacacgcacagagatctgtgccgtacccgagcgggctgggatgcccccatccacggctgtgagaaccaggtggtgcaaggctgcctgctcccggtctaggcccttacgcagcaccagctcaagcactttactgttctcctgcaggggcttaaggtccagctcgaagtgctcgctggggctgagctcgtaggtctgtactgagttggcgcccacgtcggggtcctgcgcactctctatgtgaaagcgcgctccaggcgccaccgattcgcttacctgaagctggtagttgggccgcgggaaacgcggtgagttgtcgttgatgtccaatatttccacctcaacggcgctcaccgccacggggttgtgcgccagcacttccaagctgagcaggcagcgaggccgctgctcacacagcgcctcccgatcaatgcgctcgttgacgaagagcgctccactcgtcaggtccagctccaggtagcgcggactgggcgcacccagatggttgatgcgcaagcaacccggccccaagcgccgcagctcaagccccagcgcgcgagccacgttgcccacgagcgcgccgggtgcctgctcctctggcacagagtatcgcagctgggaggccgcagggccaggtagcagcagcagcaacagcagcaggagaggcagtagcagcagccagggcatgggccgccggagccgtggatgctctgtcgccgcaggtctggtgcccgcctgctccatagccactggccgcggcggaggcagccgggcagggccggaggcggcagcttccccagccgtgccccacgcccgggccccgcctccgctcgtgccaccctgcgcctgctcccccaccgctcacgctctagaaagcgcctggggccgctccctccgtaggccctcccaagggctcctggccccaccgtcctcgctgactccccatattccagctcctccgctcgcctccgagtcgctcaacccggctcggcttcctgctgctgctgccgctacagctccagggggagggaaaaggaaacagaagggaagacagagggggagggggaaagggagcggtaggagggctcagcaagtcctgctctgattccgcgccgaagtggcggacagcgaacccggactgctcagcctctccagccccatctccttcaccctggacctgccggatcccagcggaccgcaggaacacggccactccctttctccctacccccactgtccagttcatccagtctccaccgtctctcccctgcttaacgggtctttaaggagattagtctgggaaaagcagtcaagcccctagaagtctggctatcagctccccaggaaaagatctccaagcgcaattcaggaaaataaactgaggggccttagctaagtatgggcacccaggcggcggatctaacattaaaaggaaacaacgcagggggaggcgctctggggttactggcgatgggaactattcacctgactcccacatcttccctggacactcttaagtactgcagaaagtgctcaactcctagggcaaaaggagggggatggcaaatgctgccctctttccgggagcaagcctaaaaccagcatcctgggatccaagactcaattctgctctcggccaagtggcccttattttcagtgtgtgccttggcaaataaccaatatttaaatgtttaaaatgctctgtttaaaaaaatagtctccatgaagctgtaggcaaatctattatttgacccattttggcgacaatggggaaaatctggtaaaatttttaaagagattcttctctcaagctttttctaatcttgcttcaaatcttttacatttatcacccaagacattttctttcaagagtaatttaaaattttttctttaatggatgacaatgtcttcaagagtctgcaaaaccattaaatcaagagcgttactgttgatctcctaagccaggctggaatttggattccattaatgctttgcagttaaaaaaaaaaaaaaatctgctgtcattaagcaaaatgtgggagtctgggatttatcttacaataaccagcaatttcaatgactgcagcttatcttccttaaatataagactccttagacttctgttcttctgtgtccccaagtttcctcttgtactgctatagaggcaacacagagacaacaaattcacttcagtaaaagagaaggtagaaggatcagaggaaatctttccatgctgtgtcattgcctctgctgctcagttctgaatattcactcttcccaggttctcacatttcttccacaggaatttgaaatctattgcctcatgtgcaaaaaaagcactcactaaaacgtcctttctcttcatctcccagtattctgtcatctgtagatcttcctctatgggtcattttctagctatggactggaacaaagtcagagtgagacctgacatttggcatgcttccctcctagagcggacagttaaaggagccaaggttgtgatcctgacacccagaattcaaaggcctgaactagcacatcccttcgttccaccaaccaagcacactcactatcaatgctccactacctagccagtgttattccagagaagcgcccagcctcctatcactgctgcttcttatttgtcctctttgtttcctcaagggtacagagtaggaagcaattttcatcaaaatctattcctgtctcctttcttgggtctctggcttcttcctcttctctct

SEQ ID NO: 318322 - DNA, 4001 bp, Homo sapiens
ggtctctctcagatatctgccttaatgtatggatttctccattttgtctttgaacagaaaataacccaaggtcagtggccttaagtagatgatatgaaagccaagaattctgacctgagtcaccatccacagccaccactttggtcactaggtagcctgcctctgcagacctgggcaccaggtcattgcagggcaaggtgccgttctgcagtgggtataagatcattggacgattgtcattgtcatctaggacaaccactctgacagtaacttggctactcagtgacaggaagcccccatcagttgcctttaccacaaattgaaaatcttgaatggcctcataatccatggttctcagcgcgtagagcttcccattgcctgaatttatggatatgtaagcaaagactgaaagatctccgttttttggaggcaacagagaatatgttatttgggcattctcacccaaatcaagatcctcagcatggactttgccaataaaaaccgcaggactgttgttttctcgaacagtcaagatataggaatcttcccgaaatattggaggattgtcattaacgtcggatattagcacctctatcatagtctcggcagacaagctaggtggtccagtatccatggcaacaatggtgatattatagcctgagacctcctcccgatccaagcttctgtcagtgaccagtgagtaagaattcccaaatgtaggtttgattacaaagggaaggtcttctctgaggaagcaggtgacttttcctcccactcgaatgtcccggtctctgatagtgaaaagggctactactgtctgtggtggtgagtcttcagggagtgggctggacacagaggagaccatcacttcgggaggattgtcattcacatccaccacttctaccaggactttgctgtgggcagagaggcctccaccatctgtagcttgaatgtcaatgtcgtatgtttcaatggcttcaaaatcgaggggtcctcttagtcgaacttctccattttgagggtcaatctgaaacgtcttgagaattgcttctgggttttgagctaaagagtaagttatcgctttgttggtgccctcgtctaggtccacggcagtcaccgtggccaccaaagagccattggggctgttctctgatacctgggctctgtacaccagtcgcgagaactggggcacgtggtcgttgacatccagaaccaccacgtggatgtgagctgtgccagacttaggcggggacccgccgtccaccgccgtaattgtcaagttgacttcaggctgctcctctcggtccaggggtttgttcagcaccagctcagcatatttaggcccgtggctgcagaagcgggtgtgcaggtggaaatacccattggcactcagggtgtagttctggagaccgttaaggcccacgtccagatcctgggcgctctgcagaggaaaacgtgaacccaaaggggtgctctccggaatctttaaaagcggctccttgtttaggaaaactggggcattgtcattgatatcaaataccctgacctcggcccggaaggactgcagcggctccaccaggactacttcaaagtgcagaacacaagggtcggctttgccacaaagtgactcccgatccagtttctccttcacaaacaaatctcccgtcttgcggtggagccggaaatgcattttgttgccctcggaaaccagccgcgccccgcgcgcagccagcttccctacctccagtcctaggtccttagctacgttggccacaaacgagccgctctccatttcctctgccactgaatagcggatagttgtcgcatcccccacagatatgcacagaaaaatgagaagagatcccacttgcctgttttgcaaagattttctgcgcgtacccgccatcagttctcacaagcgcgctctctgcaatcagagccaactgttgcggatatactttcacttttctgcaacaggttactgcaacagctgctctccgcttcactagcctctaactgcagcaccaccaaaggctagccgagcccattaagctgttttgcacttgaaagaaaatttgcattgagcgactcaactccccagtctagcgaatgtattaatagatatgttctcattccggagagttaggtagaggttgaaagtttgttgccaaagcaacaacagactcacctgttaattccctttcaggaaaaaaagtccttgggaattgagaagccaatgagattagtcgttcaagctgaagtcattctatctgctagctgtctggagccactgaagctgtgggcgaacagcaacaagtttaagctacatctgcacactctgcggtccatccagagaccaagaaagaagcacaaggatcctgcagagtcttccgaagcccaagccaaatatatgaggcagggagctagagaatgtggaggaagtggtcagtaggaaaaggaatgggaacagacattctccttcagaaacttgaggtccagtaagtacactgacaggggactaagccaactgacctcttgatttgcactacgctatcatgctacttctacgtattcgctccgcccccctccaaatatctgtatacacgtgcacaaagggagcagctggcttgtcacttatgattataatggcagtagtatttattggatatgatttccatgtactgagactatgacaagtgatttacatgcattatttaatttaatacttgcaacaactatatggagtagacattattaaaaaaaaaaaaagacaaagaaagtgagatgggagaggttatgtcaaggtcccctacctagcaaatgttagaaataaaactcaatttaattttgtctgactccgaagtctatgctcttaatcagtacactactctgcttcccagataatataatgaataaatcaaatgaagataaatatttggttttggattttaaagcaaataaaataagattgcttacacatattgaaaatgacctaatagaaatataggagatatttgttgagtttcctttatgatcataggataatagaatgtttaataagacatttcagaaagatgagatccagtctccttctcacccactctccactttaaaaaaaaaaaaaaacagatgaagaaactaaggcccgaagtgatgaagtcacttgcccaattcatacagctactcatggcagtgtaagaactagaacttgtcttctgatgctgtctcatgctcattacctaaaacatttgatttctcatttgtgctcaatactttatgtcccaggtgctataaaattatggccacttaacggaaatctaactatattttccaataggaaaaaaagaatgaaagtagaaagtgtacagaacattaattacatcctgacatgagggaattaatgaatctctcaatctctgtcagttattttaacacctggcttaagtgtgcatccttaaacagtttagttttgcctcttttgaaaactatatatcttacttgagtatgagtagaaataaaacaaaactatgtatcaagtaaagtgtacagtaggtaatcctttgaattttgtttctttccctcattttttagctcaatgtaagattggtgttatctttagctctagttcatttatttccattaccgtataaaataccaatatattgtcaatgtcctttagctagagaccatcagacacacacctgtagttgaacaaagttatatttactgacttattataacaagggaagctgtacaccatagagagtcatggagcatctcagtgaaacggtgttagaaagaacatatatttggtcttgtgttagatgatttgggggaggtttgaagcagagtgctctggattggatgtcatcataagtggagttaactctatgatgagtatattgataattcttatgtagaaggtgagaggaaaggggtgaggctaactctgtgattggtaagtaagctgaagtgactaatactagccaggacagaaagat

SEQ ID NO: 318323 - DNA, 4001 bp, Homo sapiens
ggccttgagcagctggtacgacagccaggcgttctggcccgagtcgccgtccaccgccaccaccttggtcaccaggtagcccggctcggccgcccggggcaccagctcggtgcagggcgcggagccgttctgcagcgggtacagcacgaagggcgagttgtcgttggcgtccagcaccagcacgcgcaccagcgcctctctgctcagcgcgggggagccgcggtctgtggcgcccacgcggaactcgaaagcctgcagggcctcgtagtccagcgacctgagggcgaacaggtggccgttgtccgcgttgatggagaccagggaggcgaggggcaggtgcgggtcttggggcggcagcagcgagtaggtgacctgggcgttggtgcccgagtctctgtctgtggcgctgacgctgccgatgtgcagggcggggctgttgttctcgcggacgaacagggtgtaggaggtttgggtgaaggcgggggcgttgtcattgacgtcggagaccaggaccgttatgttgtgctcggttttcagcctgggtgtccccaagtcagtgacggtgatagtgatgttgtactcggctctgatctctctgtccagcgcgccttctgtaattaggatgtaaaaattctccacagaaggttttagtaggaatggcagattctcttgaatgtagcaaaccatctttccattttctccagagtctctgtcattaatcttaaaaacagccagcggcgtctcaggagaattctcagcaacagagttggaaaatgatgatacgatcagttcagggggattgtcattggtgtccaatacttccactaaaaccctacatcttgcagaaaggcctccaccgtccattgcctgtatatttattttgtaagaatttactaactcataatcaagcaattctctgagaaagatttccccagaaaaaggattgatttgaaaggttgttcgaatattttctgaggcatcaaaaaatgaataggatacttccgcgttgactccagagtctacatcttctgcccataccttaacaataaggaacccaatggggctgttttctggagcctgggtctcatacagagcctgggcaaactgtggggcattgtcattgacgtccaagacaacgatgcgtacagtagaggtcccagacctggatggagacccaccatccagcgctgtgagggttaagctgagctctccctgctcctcccgatccagtgctttgtccaacactagctctggatatatcatgccttcatcaccgccactaatgttaatatggaaaaaagagttggggctgatcgtgtagttttggataccgttaagtcctccatctggatcctgtgctctttctagtctaaatgctgtcccttcagctgtattttctgatatttttaagactgtttctttgtcctgaaatactggcgcgtgatcatttatatccctgactctcagctcagcccggtaaatctgaaagggatcatccattaaaatttggaaatacagcatacagggctctttagggccacacagcttctctcggtccagtttctcatttgtgagcaaattcccggtatgtgaatccaggagcaggtattgtttgttatcatcggaaaccaccctggttccccttgcagccagctccccctctgctagtcccagatcctttgccagattgaccacaaaggatcctttctctgtttcctcagtcaccgaataacgtccaaacccagaacctgccaaggacactccccaaaaaagaaaaagaaacaggacttgcctttgtcttgggaagcacaactctctgacagccatagctgctgcatacgttatttcctagttggttacagccacagctcccagcataaaagaacagcagtaggaaaccctgcacctacgccgtgtagcccaggggtcttttttgtcctttccctttcccaatctttggcagctaaagcttctcttttaagttcatctgtccgtgtcttcctttattagtgacttgcatagcatcctcagagcaattcccaaaccgtctctttagcctgcagcgccaccgtgtggcctccaccagatttcagtagttgtacccatttgggtgtgtgtattcagacaatttcctttagtgcctcatttaaatttttcatgtttattttcgtttgtcttgtaaaaattaatgttgagacagagaaatagtcacattgttgagattcttcaattctttttgggaaaagttaaaaattcaacacttgaaaatatgtttctagcaataactctgtccacctcactgtgctaaatttagctctctactagtcctttcatctcagacacaactctcacacaatgtcaagaatcaaagggaaaatgttgctgacatctgggatcaccaaagtaacaggagattttacttttccagaaacatcgggataagaacaccaaaacagacaaagaaaatatgtttcacaccttcctcaacaaacttcaaaatctcatcacactgattaaggagaatcatcactctgtaatcttgtataatgcatttaagctgtccctcctctattctctcataaaaacttgtgtatacaactatgattgccctgcaaatattattgcttcttaattcatgcaaatctatttcttcttcaatgtgtgggctacttaaggataggaactatgtcctaatcatctgtgagtgacaaatcagacaagcaataaatactgcctgtattaggacatgcataaataaactcagatgggtagaacctgaaacgttttccagtgcctttcaattccgaccacttgaaagtttttttctttcatttactctttgcaatttctgtttccttactttcacttgtctttgtttttcttgtattagctttaaagtaacttacagggttaaataagagattgatccttattttaaggtcccctcttaattgaaatttagcaggatctaacttctctgcaccaaataaagggaggtaaagaacagaccacactaacacctatcttaacactattaaaattaagaacagcattctagtgtcttttttcatagaattttattcaaagttctttttaagttattttatattttattttattttattttgatggagttttgctcttattgcccaggctggagtacaatggtgcaatctcggctcaaagcaacttccacctcctgggttcaagcgattctcctgcctcagcctcccgagtagctgggattacaagcatgtgccaccatgcctggctaattttgtatttttagtaaagacggggttacttaacgttggtcaggctggtctcaaactcgtgacctaaggtgatctgcccgccttggcctcccaaagtgctgggattacaggaatgagccactgagccctgcctcaaagaccttatatctagaaagaagctctattttgtctataataggcccaaatggattaagtcaaggaatgtcgtggaggaaaaggctagacactaccaataacactctaatagctgaatataaaagccgcacaatataaacctctactttgtgattgctgttgttttttcaactggatggcactgggctattagccattaaaaatttaacaggaacctcaggaacctctgatttgtttatacagaattaaaaggagcaaattaaatattttcacatgatcctatagaatgactaaattttttttttttttttggtttccagactaaagcccatttacacacgcttaatatcttgcagtggtttttcttctaaggctaattaggggtttatttatcatatcacttacaagagaaacattatatttcaaatagggaactatcaatgccgggaaactagaactttaaaataaaaggtaaagtttaagaaaattattgtaggctgggtgcggtggctcatgcctgtaaatcccagcaatttgggaggctgagtggggtggatcacgaggtcaagagatagaccatcctggccacca

SEQ ID NO: 318324 - DNA, 4001 bp, Homo sapiens
ggagaagccgtccaccaggagcacttgcagcgtggcggtggccgagcgcggaggctcgccattgtccttgaccagcaccaccagcctgtgcttggccgcgtcgcgctcgctcagcagcctggcggtgcgcacctcgccattgtgcgcccacacgccgaatagcccgggctccgtggccttgagcagctggtacgacagccaggcgttctggcccgagtcgccgtccaccgccaccaccttggtcaccaggtagcccggctcggccgcccggggcaccagctcggtgcagggcgcggagccgttctgcagcgggtacagcacgaagggcgagttgtcgttggcgtccagcaccagcacgcgcaccagcgcctcgctgctcaaagccggggagccgcggtctgtggcgcccacgcggaagtcgaaagcctgcagggcctcgtagtccagcgacctgagggcgaacaggtggccgttgtctgtgttgatggagaccagggaggcgaggggcaggtgcaggtcctggggcgggagtagcgagtagttgacctgggcgttggtgcctgagtctctgtctgtagcgctgacactgccgatgtgcagggcggggctgttgttctcgcggacgaacagggtgtaggaggtttgggtgaaggtgggggcgttgtcattgacgtcagagaccaacacagttgtgttgtgctcggttttcagcctgggtatccccaagtcggtgacggtgatggtgatattgtactcggctgtgctctctctgtccagtggtctctctgtttccaacgtgtagtaattctcaactgaagattttagcacgaatgggaggtcttccggaatggaacaaacaattcttccgttgtccccagagtctatatcttggatactaaaaaccataaccacggtctctggcgtattttctgggattggactggtaattgatgacacagtgatttcaggagcattgtcatttacatctatcacgtgaattatgactgtagattttccaaaaagtcctcccccatctgtggcttgaatgattattgagtatgactcaatcgtttcaaaatccagaggtgctcttaaagtaatttctccagacttttgattaatttcaaatgtcttgcgaatatcttctgaggcatgggaaaaggtatagcatatttcaccatttgttccagagtctaaatcccaagctgagacaatcaaaatcagcgagccaaggatgctattctcccgaatcttcacctcataaaaagcctgctcaaattcaggggagttgtcattaatgtccacaaccaccaccctgaccaaggcagttccagacctgggaggggacccaccatccagagcagagaggatgaaactgagctccgggagctcttcataatccagcgccttgtccagaactaactcggggtatttcctattgtctggaatgactctcattttaatgtgaaaatgagagttggggcttattgtgtagctttttacagcattgattcctacatctaaatccttcgcactttctagtaagaacacagcaccaacgggactgttctctgggatttctaggagcatttgtttttccgagaagatgggagagtgatcatttatatccctgacctgaagctcaatttgtaaaaactgcgtggggttttgcattaacacctgcaaatgtagcacgcaaggctcgatggaaccgcagagctcctccctgtctagtgtttcacttaagagcaaatccccagtgtttatgtccagctgcaaacgctgtttcttatcattagagaccacccgagccccccgtgaggacagttctctcaccttcagccccaggtcctttgccagattgcctacaaaactcccgctctgcatttcttctgccacagaaaagctccaggtttcagagcccgcctgagacattccgagcaaaacaaagagaagcaggacttgccttatctgctgagtgcgtgtcccttggttctccatagttcctttcttgtaggcttcttgaagaaaggcttcagctctgcggaacgcgtctctgacttgtccaccaaatcctctgtggtctaaggattttaaccctgttgaatggtttccaggtcaccctcttgaaggcttgttgtttctgtcttctgattctctgtgtgcactggatatcagtgttcacaacgccatccagtgaatatatttttcacgatgttatcctgcagcgccaccaagtgtctccatagattttcacagtttggtgaaagctacctaaattccattcacttatatgtcctccggaaacaaatattgttttattcattgtgttcaagtgattacaaatatattgcacgttctgtaataattatttcatattctctttagtttgatatgctgttaatattcatcttaaagcatttatctttcccccttctccatacaaccaaacgtgcttagttgtggtgaatacagaaatacaagatgtgattcctggctcccagtggtttgtaatctttctgagaagactggaaacataaaacaaccataatatttttaagctgtacaaaattctatcactacttgactttccttaggtggtaatgaaaaggcaaactatacatgggtcattttagaagtcctctcagaggatatgaaactggattaaccatgagatgggacatactttgatagttatgatagcacaagaaggcatttatatagatttccttggtagcaaggaattgtgaactgctagaaagtaaagtaagatattgggagtagaacacattatgagaatccttgatttagttccagcttctcaaaaaataataaatacacaagcacaagcatgttagtttcatttaaagcaggcttatttctaagactgccctccctcagtttcccaagatttattccagcaacatctatggctatctgctttgtttttcagctcaagaagacagaatgagagatattttcttcctcaataatagaacaaaatcttagccttcattctgattagaccaactgagagcacttcagcctgttactgaagaaatcagtgtctcaagatgtataggattaaaggtagagattatagtcccagaatctaaagactccatctttgaccctttgttttaatccaggcagagattgccccttaaacttgaggtggtttcagtcctagccaaagtgcatggcataatgagggagatagttggaataggtgcttggaaactaccaatggtatccactgttagacatctcaaagtactctcaataatggaggacatctaagaagtctgcttttaaaaattctaatttcaaattacattcacaaaaatgtgaactagatacatggttgaaaaattatcagtgcagaagagtagaaattgaatagtatgtggattgactatacaattatccttccttcttcttaacccctctctaaaatgacagaaaagtaataaaaggtatgaattcacaaagactaagaatacataagtaaatacacaaattatttgatgatagaaagcagatgaaagagcaattgacaatagttccaagaaatgtctaaaataaagttccttcattggagatactaaaaataaactactgggttttccctacacaatcctagtaggtaccagacttggaggaaccaggtgtataagaaggctgaagtcaagtaagggcttaaaaaagaagttattagttgaaagtatgtatgtaggatagttgaattctctggtcttttcaccatcatacagagacaagaaaataactgagagccagagaatggaaagcttatactctggagaaattagattatattctggagaaattatactatctccagtcttggaaaccccaggcagagctgagtgaaagtaggaggtatgaaactaaagatagggagattaggcaaaacactgccttctgtattgtgagactcctagccatgatactctcagattgtaggacacaagatatatgcc

SEQ ID NO: 318325 - DNA, 4001 bp, Homo sapiens
gtacgacagccaggcgttctggcccgagtcaccgtccaccgccaccaccttggtcaccaggtagcccggctcggccgcccagggcaccagctcggtgcagggcgcggagccgttctgcagcgggtacagcacgaagggcgagttgtcgttggcgtccagcaccagcacgcgcaccagcgcctcgctgctcaaagccggggagccgtggtctgtggcgcccacgcggaactggaacccctgcagggcctcgtagtccagcgacctgagggcaaacaggtggccgttgtccgcgttgatggagaccagggaggcgaggggcaggtgcgggtcctgggacggcagcagcgagtagttgacctgggcgttggtgcccgagtctctgtctgtggcgctgatgctgccgatgtgcagggcggggctgttgttctcgcggacgaacagggcgtaggaagtttgggtgaaggcgggggcgttgtcattgacgtcggagaccagcacggttatgttgtgctcggtttttagcctgggggtccccaagtcggtgacggtgatggtgatgttgtactcggctctgctctctctgtccagcggtctctctgtttccaaagtgtagtaattatttaccgaagattttagcacgaatgggatgtcctccgggatagaacaaaccatctttccgttgtccccagagtctctgtctcgtatcctgaaaaccataaccacagtctctggagtgttttctgggattggactggtaattgatgacacagtgatttcaggagcgttgtcgtttacatccatcacctgaattctgactgtagattttccaaaaagtcctcccccatctgtggcttgaatgattattgagtatgactcaattgcttcaaaatccaaaggtgctgttaaagtaatgtcaccagacttttgattaatttcaaatgtcttgcgaatatcttctgaggcatgggaaaaggtataggatagttcactgtttgttccagagtctaaatcccaggctgagacggtcacaaccagggagccaaggatgctattctccagaatcttcacctcataaaaagcctgctcaaactcaggggagttgtcattaatatctacaaccaccaccctgaccaaggcagttccagacctgggaggggacccgccatccagagcagtgaggatgaaactgagctccgggcgctcttcataatccagcgccttgtccagaactaactcagggtatttcctattgtctggattgactcttattttaacgtggaaatgagagttcggatttattgtgtagctttttacagcattgattcctacatctaaatcctttgcactttcaagcaagaacacagcaccaacaggactgttctctgggatttctaagagcatttctttttccaagaagacgggagagtgatcatttatatccctgacctggagctcaatttgtaaaaactgcgtggggtttttcattaacacttggaaatacagcacacaaggctcattggagccacagagctcctccctgtctagcatttctctcaggagcaaatccccagtgtttgtgtccagctgcaaacactctttgttatcattagaaaccacccgagccccccgcgaagacagctcactcacctcgagtcccagggtctttgccaaatttcctacaaagctcccgctctgcaattcctccatcaccaaaaagttcccagtttcagagcccgcctgagacattcccagcaaaacaaagaaaagcaggacttgccttatctgcagagtgcctgcccctccgttttccatagcttcttttccaaaaccccaaaatcttcttgcagaattgcctcagcgcctcttcgcagttgtgggaaacgtgcctctgatctgtctaccaaatcctcggaagcctgaagattttaaccttgttgaatggcttctaggttctcccttaaaggattgttctttctgtcttcccagttctccgcgtgtactggataacagggtctacaacatcctccagggtaatttttttcttgatattatcctgcagcgccaccacgcgtctccacagattttcacagtttgatgaacactacctaaattttatttacataaatgtcctccagaagcaaataaatattgcgtttaaataattccttctgttgaagtaattaaaaatatattttatcttccataataatcgttttatattctttatagtttgtgatgatgattttgttttaaagcatttattcagtgtctttccccactcttctcacaaccaaatgtgttcagttgtggtaaacacagatacaagatgtgatccctggctcccaggaattcatagtgtttctgagacaattgtaagcctgaaacaagcagggtataagtgattgttaagctgaatgaaattctattactacttggctttccttacgtgataaggtaaaggaaaggtcatctcagaaatcctttctgaagttatgaaactggattaaccatgagatgaggcatatataggtcaacacaacagcataaaaaggcacttctgtagatttccttaatagcaatgaattgtgaacaggcagaaaatgaagcaagagattggggtggaacatgttatgtaaacccatcatttagttccagtttttcataatttacaaaaaaattcataagtacacaagcatgagcaagttagtttaatttaaagcagactcttattcctaaagctgacttgccttaggttcccaaaatttattgtagccacaactgtagctatctgttttctctttcagcccaggaagagaaagtaagagtctatccctaaacatagaacaaaaacctaactttcactctaattagaccaagtaagatcatgtgtctgccactgaagcaatcattgtttcaagaggtatagaattatagttggagattttagtcctagaatctaaagacctgtctctggccattactgtgttttaatcctgtctgggaccacctcttaagcttgggaaggtttcagtcctagccaaagtacctcattggtacaaaatgagggagactgtttgcaacagatgctaagggctcatcagtgatattcactatagaaagtcttaaagtgcactaagaatggatgggagaagaatccaacaagtctgcattttaaaatgttaaattcaattaatattcttaaaaatgtaagctggatacatggttgaaatagtaattggtacagaagggtaaaacttgaaaagtagatgaattgagcacacacaattaacctctctttttaaaaaaaaatatgcactaaaatggcagaaaagtaattaaaatggtaggaactaacaaagattaagaatacacaagtgaacacatacatttttctatgacagaaagcaggtggaagagcaattaacttagcagttccaaaaagtgcccctaaagtaaagttcctgcattgaagatactcacaagaaacataatctcttttaagcgcaagatctggaggaaccagatgtttaagaagactgaagtcagttaaggatggaaaaaagttattagttggaagtatgtgtagaggataattgaattctctgttcttctcatcaccctacatagatggaaacataactcacagccagaaaatagaaagtttattctctggagaaatttaatgggactttctctagtcttggggatctaggcacagctgagcacaagtgtgaggtgtcaaactgaaaatagggagagtaagcaaacctttgcattttgcatggtgagacttctaatcccttttcatgcaatactcttagactgtaggacacaaagtgtatgcctgacccctagtctatccccatagtgtatattgtagaattctaacctggagaatatgaaagcccaaatgaagacacatattaatatttggcatctcataaggtaatagacttatcctagcatggttatattagaatgaagccctgccatcaacaggt

SEQ ID NO: 318326 - DNA, 4001 bp, Homo sapiens
ttctggcccgagtcgccgtccaccgccaccaccttggtcaccaggtagcccggctcggccgcccggggcaccagctcggtgcagggcgcggagccgttctgcagcgggtacagcacgaagggcgagttgtcgttggcgtccagcaccaccacgcgcaccagcgcctcgctgctcagcgccggggagccgtggtctgaagcgcccacgcggaactggaacccctgcagggcctcgtagtccagagacctgagggcgaacaggtggccgttgtccgcgttgatggagaccagggatgtgaggggcaggtgcgggtcctggggcggcagcagcgagtaggtgacctgggcgttggtgcctgagtctctgtctgtagcgctgacgctgcggatgtgcagggcggggctgttgttctcgcggacgaacagggtgtaggaggtttgggtgaaggcgggagcgttgtcattgacatcggcgatcagcacggtcatattgagctgtgttatcagcataggggtccccaagtcagtgacagtgatagtgatgttgtattccgctctgctttctctgtctagtggtctctccgttagtagggtgtaaaagttttccgcggatttcaggaggaagggtagatcctcctgaatggagcaactaattttcccattttctcctgaatcaagatctgaaacactgaaaagtgcaaccacagtttcaggcgcgttctcaggtattgggctggtaaatgcagacatggtaacttctggggcatggtcgttcacatctatcacttgaatcagaacggtgcattttccagaaaaggttccagcatctcttgcctcaatattgacttcataggactgaagtttttcgaaatcgagttgtttttttagttcaatttctcctgtcaagggattgatcttaaaggttttgccaatctcttctgaagcttggaaaagtgaataggaaatctctccgttgactcctgtgtctacatccgtggcagagaccttcacaaccaggaagcctaccggactgtcctcagagatctgcactctatagaaaggctgctcaaattcaggggcattatcgttgacatccaggacttcgatgtagacctgagcagtgccagatctgggcggagagccaccatccagtgctgtgagtgttaacctgagctcagcttcttcctctcggtccagcgctttgtccagcaccagctctgggtatttcctgccatcactgcgtttgcgggtgaggacccgaaaataggagttggggctgattatatagttctcaatattgttttggcctacatctaagtcttcggcattcttcagaggaaacgtagtcccaggaggactgctctctgatactttcaccaacatttgtttgtccagaaatactggagagtggtcgtttatgtctattacttgcagctcagcttgaaaaaactcgaagggactctctagcaacacttggaaacgtagcacacagggctctgtgtgaccgcacagatcctcacggtccaatttctcatttagcaacaaatccgcggtctcctgattgagctgcaaatgtagtttgttccctctggaaacaaccctaaccccccgcctggagaattccctctgctccagacccaggtcctttgctaaattggtgacaaaggagctgccctcagtttcctccaccacagaatagcttctaggttccgccgcgcccgccagagataagcccaaaaggagaaaggaaaaaaggacttgcctttgtctgcaaatgagcttcccgctggcctccattgttcttgctggattcagcttcctgggaggacggttctgtgggactgtaaagtccccagtatctgaggctgtggttattctacagatacctcagaaatatgccagtgagtagtcctctccagaggacccagccgtcctccctttggcatccaagctccccgtggacttccaggttctgctgctttttgccggttaatggagctgcagctgcggttctggtttgtgccttcttatcctgcagcgccaccacgcgtcctcacaggatcttacattttgtggaatgataatggatgtaatattcccaactctgcctgtatgcaccccgagactatgtaaggttacaacaccaccgttaatatcgccggactttagtgagcagacaactgcccaaaggagaaatcacattagtctttcaacaatgataactgagttttgggcagaaaggaaatatttaggtaatagtctagcttggcaaaaagaatttcaaatataattgtagttatcatggacaacatttagatctttatagttttatttccatgaaccataggaataattagtagctgtgaacctcgaacaaattatttaatctctctgctttagtttgctcctctgtaaagtgaggataagaacagtacctaccacatagggctgttgtgaattccccaccttaaacatgaggaatctaatgcaaatagatattaaccttaaaaataaggtatataccaagtataaagcaatttgatgccatcaagtaactgagtcttgatggcataaatccatcataagtctagcataaatccattactataactagataaacacctcgaaattcaaatggtagaagaatacaggagcatgactatctcaggtagagaggttatgtccaataatgaaaggaaatgaacaaggaaaggctggagagtttgtctaaatagagacaatatctgtaacagcagtggtgattttgtttctgggaaggatgtccttttttattacctccacttctaacagcatcaattaaaagacattattttgaaatttttcaaatctcataaaagagaggagtataatgatcctccaaggactcagtactagcttcaactattatcaatgttttgccataattcttgactctatcccttcaacattttcacatcccagacaaactgaattttctcccacaaatacgtcattatacatttctttaaaagcatcatgactttaaatgactctaaaaatatgcttaagtacaatgccattatcatacctaaaaatcaagttaacattatttaatacccatctatattcaaattcttccaagtttttcaaagtcattgctgttgtttcaatcaagatccaaaaaagatccacacattgtatttgagtggtagacctcttaagatttttccttgtgtaaacttcactcctcttattttttgagccatttatttgtcagagaaattggataattttaccctgagaccatgaaagcaattttagattttactactgtgagtttttgtccttagattctatcccaccagtgatatgcagtaatactagctttattagagttactggcactagtttataatatatttagaacacaactatgcaaaaattacctattttaaatataagaatcggttatatatttttaacaaacaatgcttctccttaactccccaaaatttctaaaaatttaatgatcatctatatttctctttgatattacacatttaaatctattctttttcttaaattttcctgattcagcagtgcagtataggtaagaaaaactgctaaaaacaaactctcaaatcaggaaaatatattacaaatgtaagcatgggtgactctggaaatatactacaatgtaaagaaaataattaactaataatgccatcaaaattatgtactattcctaatcaggaccattaatcttttctgtgaaatgatagttatatgttcaggagacaatgagaaggcataggttgctctttcaattttgttttttacttaagatttgggcagatcagagcattagtaataatagctgaaaatttacccagaaaagcaagattactggtttataagaaaatgaaatcatagataaagtttatttctaaataaagattgaacagtagtatgaatacgataaaaacttttcttctctttagttaggcagaaacttgccaggtg

SEQ ID NO: 318327 - DNA, 4001 bp, Homo sapiens
tagtttcctgcatccagatccttagctgagatggtggcaatccaggagccaaggggtctgtcctcggggacttgcacctcatagagactctgaggaaactcaggggcattatcattgatgtccaacaccttgatgagaaccaaagttgtcccagacttgggcggggatccaccatccactgctgtgagtgttaatctgagttcagcttcctgttcataatctaaagctctatctaggaccagctctgggtatatctttctgtcactactgtcgggaattttaatgtagaagtgagaattggggctaattgtgtagttttggagactgttgcttccgacatccaaatcttgagcactctccattagaaaggtagctccaacagtggtaccttctgatattttaataagtatttccttgtctagaaatgtaggggagtgatcatttatgtctttgacacacagctcaaaccgaaaaaactgtaaagggttttccaaaaccacctgaaaatgcagcacacagggctcggtggagccacacagctcgtctcggtctagtttctcatttaggagcaaattcccagtcagcaaatcaaggtgcaaatactttttattatcatcagacactacccgggcttcacgtgaagacagctcctccacccccagccctaggtccctcgctagattagccacaaaagagccaatttctgtttcctctgccacagaatagtgtgcagattcagtacctgcccgagacaatcccagcaaaacaaggaatattagaacttgcctttttcgcagatcgagtgcccctctgatctccatggttcctttaggcaatctcttgtggaaaaactgaagctcagccgtaattttggaagctgaagctctggtttttaacaggaaccccctggagagtgtatcctccagcagctctgtaggcgaagctcctttaatgcctgtcttttcagtgggttggatgctttctgttctcctgaatagcgaagctcaccgtgccagcctatgtactgttttcgtcttatcctgtagcgccaccatgtgtctccatgttttttttttcattaaaaaagttttcctctttgaaaaagtaattcataaatacatccggaacattcgaaacaaatcccagacatcattttttttcctttaaatacttcactaagtatttttaataggtaaggccttctaaaagataattgtaataaaacgttcacaatcaacaacttgagcaataattccttggtgtaatttatactgcatttggttttccccagttctctccaaaatgtcctttgctgttggtttgtttgaatttgaatccagaaaagtccatacactgcattatcactgttttgaatgctcggcactaaaggatctgttaaaatattctgaactgaagaaataattttttatttaagtcatttctcgagtaattacaaatatattatctccttcactcttgtaaatacttgttgtcagctatagttggtaatatcattacttttttcacttttatattttaaaaatataaagaaggacatggcacaaataagttagagataattcttgctcttacagagctcacaagctagaaaaattggcagacaagtaaacgaagtatgtcataatgtatgcatttataaaaagtaatatagaaatacctagaaaagacttcttgtacctaggaggctgcataccttagtgcttgggaatatgggatctggaaccaaattatcaatattagaatcctggttatgtgacttactatctataagcttgggcaagttatagatacctttgtttcctcacctgtaaaatggggtaataatatttgtctcctatgattattatcgtaggcatctaatgaattaatatttacaaagtggtttgtaagtgctggttaagtgtctgtcaaaaataaaataattaagatcaaagtcggacttgggacatcagtgaaagctttcctgaggtaatgaaaaatacattgtgatctgaaggaactagccaggagaaggaggaatatttcagatgggcattttgaggaacacagagaaatgaagtatgccttggactttaaaaactatggaaggggagggtctaacaatgaaattagggttaaaagcatggtgagaacatgaatcattatacaggtcatatcatgcattcttgaatttatcctaaaggtaattcaagtacaaagatgggttttaaatatctgattaacatgattacatctgcattttaaaaaatcagtttggctgcagtatggagaattaatttcagggggagtgactggagaatcaaggagatcagataagagatgatgatctggatgaggataatgccagtgtggatggagagaagagggatgaatagaaaggtatgaggagatgaaatgttttcaactgttggttgataggttgcatggggagaaaaatgggaaagactcagagatgatatcacacctctggactgggcatctggatgactagtggtgtcattcactaggacagggaatgctaaaaaaaaacatgattggggtggaaaaagatgaagtgttcagttttgaacatgctgatattgaggtaagtgcctgtaggatgtgtgtttgcgtggtggtggggtgtgtgtgtgtgtgtttgcatataaccaaagcataggaaataaatctgagctggcaatatgaactgtggtgtgtatatatgtatatatatagagagagacagagagagacagagagagagagcatatatatagcatatatatagagagagagcatatatatagcatatatacagagagcatatatatagcatatatatatatatagcattcatggtttcaatcaccatatatatatatatatatatatatatacacaccatgaatgctctaggataaccaagcaaaagtgtgtcaaataagtataaaagaggcttggcacagaactctgagaaacatcttcatttagaggagacagggcaagaagtatatttgaaaagataaagaaggctcagagttcaaaatcatgaaatcaaaagcaaatagcattttaaggagataaggaagatcaatggctgcaaatgcttcagaaaaatcaagaaaaataagtatgacaattatccagtgggcttaaaaagatggtcattgtggaggattctgatagatgtctgacaaaatctgttttcctttgcttctatagtaatagaactgtgcccaggtatgtggccatgaaggtagattgcccatcccagcctcccttgtatttgagtgtggccaagtgaattaagttctcacagatggattgtgagcagaatttctgtcttccccttccagttatagaacagaaatcatctggatatgcctctttcttccaagcgagctagaacccagatgtgacagtgacccagctacagccatgcagattatattgccatagggaatgttgaagaaattacttgaaagaaaatttggtttcagaaggactgtgaggatgaaagctgccctacctacctaataatttttacattggtactgtcatgtgaaaaagagagacatgtttacaagccactgtgtcattgcatcacattggttccacagtataatcttaacttatatggaaatctttgataacatttgcaatagcagtttcagtagaatggttgtgatgaaaattagattgtacttcggtgcaaagtgaggcggatgaggaagcaaaaatgaggtaaaccgctctttcaacaattttttttttgagacagggtctcagtctgtcacccaggctcactggctcactgcatccaggctctcaagaaatttgtaaagaatgaaaaggctgtaaaaggaataagaaatacattggtatctggagaagaattcagactcagagagtattttaaagactagagaaacttgaatatatttaaaatgccaatgtgtaatgttcagtagggaaggagaaaattaagatacagaagggat

SEQ ID NO: 318328 - DNA, 4001 bp, Homo sapiens
ccaccaccttggtcaccaggtagcccggctcggccgcccggggcaccagctcggtgcagggcgcggagccgttctgcagcgggtacagcacgaagggcgagttgtcgttggcgtccagcaccagcactcgcaccagcgcctcgctgctcagcgccgggaagccgcggtctgtggcgcccacgcggaactcgaaagcctgcagggcctcgtagtccagcgactggagagcgaacaggtggccgttgtccgtgttaatggagaccagggaggtgaggggcaggtgcgggtcccggggcggcagcagcgagtaggtgacctgggcgttggtgcccgagtctctgtctgtggcgctgacactgccgatgtgcagggcggggctgttgttctcgcggacgaacagggtgtaggaggtttgggtgaaggcgggggcgttgtcattgacgtccgacaccagcacggttatgctctgctcggttttcagccttggagtccccaagtctgtgatggtgatggtgatgttgtactcggctctggtctctctgtccagcgccccttctgttaccagcctgtagaaattctcaacagaaggttttagcttaaaaggaacatcatcctgaattgagcaaatcatttttccattttccccagagtctcggtctctaatcctaaacagggccacttctgtctctggagaattctcgggaatagggctggtaagtgatgaaatacttagttccgggaagttatcgttaacatccagcaccttaacagagacagagcattttccagaaagtcccccgccatcagatgcctctatatctagatcatacgaagacattgtctcaaaatctagttttttaattagtcgaatttctcctgaaaggctgcttagctcaaaaggtttgtctatctcctgagagctgtaataaagggagtatgatatctctccatttgtcccagtgtctaaatccctagcagagaccttgacaactagggagcctactgggctgttctctgggacctgcacctcgtagagcgcctgcacaaactccggggcattgtcattggcgtccaagaccaagatgaggatctggacggtgccagatcggggtggagagccaccgtccaccgctgtcaaggttaatctgagctcggcctgctcctcgcgatccagttctgtgtccagcaccagctctgggtatttcctgccatcccctcgggtgcgagtggaaacatggaaatgagaattgggagaaatattgtagttttgaacattattgctgcccacgtccaagtcccgagcttttttcagaggaaacacagtcccaagggagctagtttctgggattttcagggtcatttctctttcaggaaactcaggagaatgatcgtttatgtctgtcactagtagttcagctcgaaatacttccaaaggttttttcagtaacacttggaaatgcattatacagggctcagtagggccacacagcttctcccggtccagcttctcatttaatatcaactgcccggtctgcagatcaagctgcaagccttgttcgttatcctcagaaactacccgggctccccgctcggctagctcccccactcccagccctaggtcattggccaggttggctacaaaagaacctctctctgtttcctccatcacagaatagcgacggggttcccagcctgccagagtcacttccagtaaaagaaggagaatcaggacttgcctttgttcgggaaagcgctcccctgcaggctccatctttacttctgtacacgcccctttcaaggaaccggagtcagagctacttcagggagcgatgggacagaggcagtgatcgatctgtgcgttgataacctgttcggaaatgtaggagaatagcattctccggagacactggtccgtgctctgctaacaggctttcctcttaggctgaaagaggtctgaagtagctagtagcatttcatgggctttttccttttcctttttttgaagccttagcctgcagcgccaccatgcgttgtctttgcttcgaaacgaattgctacaattgatctattctctattctattaggagtttggaaattgggaggaaatgatgtaatcacaatatcacgcaatggtaattattaatttcttcatttaaaggagtattattggtctctatgtgccaaattatgaaatacatcagtaaacaacccagacatggtccccaccctccagagcctgtagtctgggtgtagtgttctgagggaaattgagaagtgaaagaagacataatagtgatcagtcatcttgtaataataataacataaagccacgtgatttcttaaaaatttatcagcaaaacaaaatgaattctttaatttctttcaaattctagacagcctatgtaccagaattgtgctcccattggttggattacatcaagaaaaagctacacgttaattccagtgtggtatcctttctacataaagtcagagagttatgattttatgaaaattttaaactgtggaaaaatacatatgaaggcacttcctatatctcttactttgctttttcttttttttcttttcatttttcctttttttttttttgagatggggtcttgctctgttgtccaggagggagtgcagtggcacaatcactgctcattgcagccttgactacccaggctcaagcaatccccccacctcagcaactgtagctgggaccacagttgcgcatcaccatgcctggctaatgttttaattatttgtaaagatgaggtcttgctatgttgcccgggctggtctcaaatttccgagctcaagcaatcctcctgcctcagcctcccaaagtgctggggttataggcatgagctgctgtacccagccctgccttgtctctctcgtatttattatctgacgtagtatagatgtacttatttagttgtttcctttctgtttcaacctcacatgttagaacttcattttgttcactgctgcatccccaatatctaaaataatccctggcacatggtacgtgctcaataaatatttgttaaatggatccattaataaatcacaattaatttaaacattctgacagataggttctcctcctactgtagaaattccctcttcttctgggattcaagttcattatataagatggataaacaaagacaacatgttcataaggtagctatttcctatgccctttaaatagtaatgtgaaataactcagaatgacctaaaatgtcatttcattaagtggcaaaacaacttagctacccataagcaagggatatattatatgacagaaagaaagaacataacaagattatgatgaccctaaagataaggattatgtctcttttagacacacatttttcattgtcaaggttttttttttacagtaatgttattatgacacttacgatattcaaaactcttatataataaaatgttctaagaatttctattaaacacttcaaagactgtaccattggaaagatccttcagtttttctcaaaattgtatattctgacaaaagctagtgcatgtcccttatagactactaatattttacaacctccttgatcccaaatgttgtcatactaatatgaaaagccacaataaaaacccaataggaagaaaggtctaacttaccaacaatgcaggaatatctaaacatgcttttgacaacaaaaacctcacttagatctcttaattagagggaaatttattaaagagcacaaatttgtctccagcaacctaagggaaaaagacttgggagggactggaaaatctaaaacaggaaaatctatgacaaggtcattcttttggtaccttattttttcttgtctctcaatagattgatgttctgtatttctttgcaagtgtttagccaaatatgacaccactttctgcttatgttcctaacaaagagactatgttgtatctggttcttaaagccatttttttttaaacagagagaatcagattag

SEQ ID NO: 318329 - DNA, 4001 bp, Homo sapiens
gtttccggagtcaggatctgaaacgctgaaaacagcaactactatctcaggcgagttctctgggatggggctggtgagtgcagacatggtcacctgtgggggattgtcattcacgtccaccacctgcaggagaagagtgcactttcctgaaagacctcccccatctgtggctttgatgcgcacttcataagacgtaaccatttcgaaatctacttgctttctcagtcgaacttcccctgtcataggatttacctccaaagttttactaatatcctccgaaggctgaaagagtgtgtatgatatttttccattggctccgccgtctaaatccctggcggagacggtggcaaccagggagccaagaggactgttctctggaatctgcactttgtagatgggctgctcaaactcaggagcgttatcattgatgtccaccacttcaatacggacctgagcagttccagatcgcggtggagagccaccatccagcgctgtcagggttaatcttagttgaggctcctcctcccgatccagctctttatccaacactagctcagggtatttcctgccatctctgaattcatggattagaacccggaaatgagagcttgggctgattttatagttttgaacattattgcttcctacgtccaagtccaaagcatgattcagagggaactcagttcctagaggactgttttccggtatttttagaatcatttccttttcagtgaacatgggagaatggtcatttatatctatcaccctcagttcagcctgaaatatttctaaagggttttccattaacacttggaaatgtagtatgcaaggctcagtgggaccgcatagctcctctcgatctagcttctcatttatgagcaaatccccagtttgagccttgagctgcaaatgctgtttgttcccctgggaaatgatcctggccttgcgggtggacatctctgtcaaccccaaccccaggtcttttcctagatttgccacaaaagagcctctctccgtttcttccactacggaataggaccccaactcggcgcccgccccagacaagctcagcaaaacaaagaaaacaaggacttgcctttgtctccgattgtgcatccatccaatctccattgctttttcttgaaaagttggttcacagaagcttcatgtatccccaggatcctagtagaactgttttgcagtccagaatgtcagaaccaagcagcccaacggtgtcttaaagaggtttcacactcacgttcgctctggctcagctattcttctgcttccaggctttgggaaacggtttgctggatcctggagctgcgtaggcagttgtattttccgtcatcttaacctgcagcgccaccacgcgttctcactgagtcttttactgtggttgaatattggaggcaaaatacttctaaatgtactgaatagactatgtaatacaaaacactgagttctattttcatgtgactttcgtgtatacagatggagctctgtgatgttgtacagggaggagtacaaagagaagactgtcatttatgttattgactgtttaatgctgttgagattaatgattaaataaaattcaatgaacatttaaccagacatagaatacacacttagaagcaaaatttttctgaagtaacatgagaacagtttcacaagtacatctttttcatggtacctatatagacactatgagtagacactgcaaaattgcaatcagtggtagttctaaagagtatttaacaattgctttattaaagaataaattacttccttttctttctgacacctaaccctgagaagtgtgagtttttacaactttcaagttattggaaaattcattcccaaacaagcaaatctcaaggttgggtctgctacacttttggattccccccacccttttttcatttcaatggcttttaatatattcagaggtgtgcatccgccatcacaattttagaacattttcatctcaagagaaaccttacctcttttaattatcaccgtacccgttctcccatcccacttataaacatatgtgtgtgtgtgtgtgtgtgtgtgtgtgtgtgtgtgtgtgtgtaggttaactgaaaaagactgaagaaagagaataagaaattcaagaaatgaaactataggttaactctacttcctacttagactcatttctttaataatggatatggcacgtagagaaagtacaggactataaatcaggttaattcgctcatcataaagttcatttgtagtatctgtcccagcatacttagagctttgataagaacatgggtatatttgtgcagagtagtataaacaaactataaactaaaacttatattttcacatgagagtttagttcatggagtaggagtaggaataacataaatttcacttccttagttagaaaaacaatgctatcagttaatgcctgaccatatagcatattggctagacttagattatattttaaatttttacctttattatttcagaattataagaaagttaatcgttttttgtgggggggaatgaggtctcactctgtcacccagcctggagtgcaatggcacaatcttggctcactgtagtctctgtctcctgggctcaggggatcctcttacctcagcctcctgagtagctgggactacaggttcgcaatcacacctggctaatttttgtatttttgttagtgtcagtgttttgccccattgcccaggctggtctcgaactactgagctcaaagggttcagcttgcctcagcctctcaaagtgttatgattacaggtgtgagccacagctcacagccaagttacctttctaagcctcagttttctcatatttaaaaaaggggataatatgtcaactcccttaggacttggggaaacatttaaaaggcaataaatgtaaaacattctctacaccacttttaactaaattttacctagattagaaatcaaaaaataaaggcttaaaaagatcagttacattaatttcttcacttcagatctgtgcattttactatgtacattttaacaaaaattgcactgttaaagaattatgattagagtccactggatatactaatgaagagaagatgagatatcattttttaaaacagtgaaaacaagacaaatactatgggcaaatgtagtgtaatttaaaatttatgctaagttgacagaaaaccattcctttgaattgatcataaaaattaaaatatataatatgaaatcaattactttaactgaaggctgaaaccaaagccattcctaaagttagagttttgttccatttctggcccaaaagaatggccctgaatattaggtaatactggtttcaggagctggaactcattcgtccctgagcctcctgccaggcacacctcgtactgatagttctgagacaggctcccggtgcccctcacgtccaccagatgccctggaaaggggccctcaggcactgagcagcgacccaccgaggccgccctgctcctcctacacagcagcaccgccacgaacaggagcaccgagaagaggaagagcgaagacaccgaggccaacgccaccaccaggtagacggtgagagagtcggcctggccctgggctggggcagcctccggaagcggcaggtagggctgggagaagccgtccaccaggagcacgtgcagcgtggcggtggccgagcacggaggctcgccattgtccttgaccagcaccaccagcctctgcttggccgcgtcgcgctcgctcagcagcctggcggtgcgcacctcgccattgtgcgcccacacaccgaacagcccgggctccgtggccttgagcagctggtacgacagccaggcgttctggcccgagtcgccgtccaccgccaccaccttggtcaccaggtagcccggctcggccgcccggggcaccagctcggtgcagggcgcggagccattctgcagcgggtacagcacgaagggcgagttgtcgttggcgtccagc

SEQ ID NO: 318330 - DNA, 4001 bp, Homo sapiens
tacgacagccaggcgttctggcccgagtcgccgtccaccgccaccaccttggtcaccaggtagcccggctcggccgcccggggcaccagctcggtgcagggcgcggagccgttctgcagcgggtacagcacgaagggcgagttgtcgttggcgtccagcaccagcacgcgcaccagcgcctcgctgctcaacgccggggagccgcggtctgcggcgcccacgcggaactcgaacgcctgcagggcctcgtagtccagcgactggagagcgaacaggtggccgttgtccgcgttgatggagaccagggaggcgaggggcaggtgcgggtcctggggcggcagcagcgagtaggtgacctgggcgttggtgcccgagtctctgtctgtggcgctgacgctgccgatgtgcagggcggggctgttgttctcgcggacgaacagggtgtaggaggtttgggtgaaggcgggggcgttgtcattgacgtcggagaccagcacggttatgttgtgctcggttttcagcctgggtgtcccgaagtcggtgacggtgatggtgatgttgtattcggatctggtctcccggtccagggccgtgcttatcaccagagtgtaaaagttctcaacagaaggtttcaagaaaaaaggaagatcatcttggatggagcacaccatccttccgttgtctccggagtcaggatctgaaacgctgaatacagcaatgagggtgtcctgcaagttttctgggatctgattgataagtgtcgacatagttagttccggaggattgtcattcaaatccatcacttggacaaataccacacaagttccagataggcccccaccatctgtcgcctgaatatttactgtgtatgtctggatggattcgaaatccagtttctgtcttaaaagcagttctcccgattttgcacttaatcgaaacgttttgcgaatgtcttcagatgcttgggaaaatgcataagatatttctccattagttccaatgtctaaatccctggcagagacgatggcaacctgggatccaacggggctgtcctccgggatctgcacctcatagagcagctttgcaaactctgggacgttgtcattgatgtccacaacttcaatccgtaccagggccgtgccggacctgggtggactcccgccatctagcgctgtgagggttaacctgatctcaggctgctcctcgcgatccagggctctgttcagcaccagctgtggtaatattatgccatcgagactgtcttgtaaattaagatgaaagtggaaattgggactgattgtgtaattttggagactgttggttcctacatccaagtcctgggcacgttctattaagaaagtagttccaggagtgatactttctggaattttcaaaagtatttctttgtctaggaaaactggggaatgatcatttacgtccctaatccgtagctccgcctgaaaaaactgcaagggattttctagtaacacctggaaaggtaggacacagggctctgtggggccgcacagctcctcccggtccaatttctcatttaacaacaaatccccggtctgcctatcgaactgcaaatgcattttttttcctttggaaacgaccctggcccccctcacagcaagttctcctatctccagccccaggtcttttaacaaattggccacaaaggagccactctccgtttcctcggccactgaatagtgcctaggctggcaactagcctgagctatgcccagcaaaacaaagaatatcaggacttgcctttgtttcggaacgcgctccttcccctctccggcctccattgctttctggtctctcaccaaacgtgctccagctctggctcacgttgtcgctaactctatctccccgtatctcgctgatactgggatgagtggacaatcctagggcccggatttcccggagcgaccgccttagaaagcctcctcttcctgcttgctgcttctttagctgagtatctgggtaagggagcgtcggctgggtgctttgtttctgctacttctaaggctgcagcgccaccccgcgtctcttccgagtatttattttctcctaaactttaagaaaatcccagtgctttctttcaggctgatggcaatcgaaattgagtattttcaagtagtgtctctcagtgtaccgaagtcttattggcgtttcgaaaggctcttcattgcacccatagagacagggcaagaataaataaatcttcacttccctcacaaatccaagctttttttttttttcaaactggaaaaaataaatttcagaacctggaagggagtgatctcagtcctagcatgcttcggaaagaaggcttagactaagaaagttctatttttattcagagtttgggcatgtgtgcaactcagtggtggttagattaccatcatcacactcaaacccagctgaaaaacagagacccaggaaaagcacagaatccaaataagagtattttaatgggcactgaaatagtctccttactcatatttctttctttgcactgctcccacttcacattttcctgaactttgatgtgtctgagcctcatgaaactctccaagagcagccagatatttccttattgtaaatgtatcaatattattttcctttctaatgcctaggagaactttcaacataacctcaattcaattaccacatctagcaaagagcaatttcataatattaaatagccagtaaatattccagtttccccaattatctttaaaaatgtcttttcagtgatggtttcttcaatctgcttccaaacagggtatatatgtcattgtttgttgttaggttttttaattttgtctttttgtttcttttttaatgttaatataaagaagttatcaagccacagaatgacatgaaggaaacttaaatgcatatttctcagtgaaagaatccagtctgaaaaggcaatgatactgtataattcaaattacatgatactctgaaaaaggccaaattatagagacatttaaaagacaagtgatagctaggaagaagagggagggggatgaagaggttaaacatggggtactttacgatactacaatggtagatacatgacattatgccgttgtcaaaatccacagaactatacaacacaaagagtgaacactaaactatgaaatttagttaataatttaccagtattggctcatcaattgtaacaaatgtaccacagtaatgcaagattttgataacagggaaactttgagtgggagaaaatcggtatgtgaggggaactgtttgtactatttgctcaattttctgtaaactctaaggctgctttaaaaaataattttactttgggaggccgaggcaggcagatcacgaggtcaagagatcaagaccatcctggccaacctggtgaaaccccatctctactaaaaatacaaaaaaaatgagccaggcatggtgatgggtgcctgtaatcccagctacttgggagggtgaggcaggagaatcacttgaacccgggaggcggagattgcagtgagctgagatcatgccattgcactccaagcctggtgacaaagcgagactccatctcaaaataataataataataataaatattaggatgtgtctctaaaagatccattgggttaaaaaattgggggatgaagaaaaaaattaaatatatagaacagttaaaagaactatacataaactacaactctaacctccatccaaacttaacaattgtttatattttaccatatttgttctatcttattctgtacacacacccgcttttctgatgacttatatgaaagtaacttgcagacatcatatttcacctctaaatatttcagcaggtatcacataattataatattatctcatataatcataatggttctatcatacctaagaaaatttaaaaaaattctacagttatctaaaatccagccccaatcaaatttcactgtctttccattatcttttcctcaattttgata

SEQ ID NO: 318331 - DNA, 4001 bp, Homo sapiens
cacgcggaactcgaacgcctgcagggcctcgtagtccagcgacctgagggcaaacaggtggccgttgtccgcgttgatggagaccagggaagagaggggcaggtgcgggtcctggggcggcagcagcgagtaggttacctgggcgttggtgcctgagtctctgtctgtggcgctgacactgccgatgtgcagggcggggctgttgttctcgcggacgaacagggtgtaggagatttgggtgaaggcgggggcgttgtcattgacgtcggagaccagcacggttatgttgtacttggttttcagcctgggtgtccccaggtcagtgatagtgatggtaatgttgtactcggatctggtctctctgtccagcgcgccttctgacactagggtgtaaaaattctctacagatggtttcaggaagaaggggagattgttctcaatggaacacatcactcttccgttgtctccagagtctagatcagaaacactgaaaacagccagtacagtctctcccgagttctcaggaatagggctgtttactgaagacaaggtcagttccggtgggttgtcgttgacatcaaccacctggactatgactgtagactttccggataggcctccgccatccttggcctcgatgtcgacttcataactattaatcgcttcaaaattcaaatatttgaccagttgcatatcaccagtaattggatttagctgaaaagttttgcgaatttcttcagaagcatgaaaaaatgcatatgatattgtcccaaaacttcctgtatctaagtcagaagccgagacagtgacaatgacagagttaacgggggtattctctagaactgcaacctcatagagcggctgtgcaaattctggtgcattgtcgtttatatctaagacctggatgtttatctgggctgtcccagaccgagggggagagccgccgtccagcgcggtgagcgttaagctgagttccggctgctcctccggatcgagcgctttatccagtactagttccgggtacttccttccgtccctacgactgcgagtgagtacgtggaagtgggaattcggagtgatagtgtagttttggaggctgtttcttcccacatccaagtcctcagcatttcccaaaggaattactgttcctggcagagtgctttctaggattttcagatgcatttcattttcaaagaataccggagaatggtcatttacatctatgatacggagctcgtttgtaacgaattgcaaagggttttgcagtaatatctgaaaatgtagtatgcatggttctgtggggccgcatagctcctcccggtccaatttctcattcaggagcaaatcacctgtctgatgactgagctgaaaatgctgtttgttccctttggacacaacttgggcccccctcgcggccagttcctctacccttagtcccagatcctttgctaggttggctattaaaaagcccttctctttttcctcagccacagaatagcgtcttgactcggacccagccagagaccctcccagaaaaacaaagagaagcaagacttgcctttgtctaagaaatcgctctcctcccgcctccattgcactttccgtcacgctcttccagggaatgtcgccaagctgaacctcagacagagctgggaaacagtcttttgccccacaacctttgtagacggcctagtgaataagcctttccagaggctcagacttgctggctcaaaaatctgcctgggctctcaaccgctggtttaccacactggatccgtgcgtcaccgagcatgcacaatgcctgtggtttaattcgccttcttagtcaacagcgccaccatgcgttcgcttgcagttacaaaatcttggagaaggtgtttttattttgctttatcgattattcttatcaaccctagttgacgctactggaggagtttctcatgttatatgaattaaataaatgcaatctagggaaataaaatgcacttttatctacgagcagcgattcttcctggtagagtcctcatttacacgatttaacggaagtgtacacatactagtttacccctccccttttgtaataattacacacaaacttcaaaagatttttgctctagatgatagcatgcttcactatcctatttatgtttttctttttttcctaaactttgtgaaatgagcccgaattgcatataccagaaaaacacaaggaaaagacacctcctgcaaggtggtaaaaaagaaaatatatcatgtcagaggtggatccagaggactacaaatacctaatttcttccagattatcatgctcaaggaacacttaaagtgctttctcttcttatttcagagcaaatttacaattattcatttcatctgtattagtttatttccacagataattgttgagtttgtagaagttaggcaagtggtggtaacaagacaatgtctgtatatcttacaacaattttccatctagtgggtgtacagtctttaaacagatgtttaaacagtgtgaaaagtgctacatagaaaaggtactgagtgcactgaaagtatgcaatacggggacctaacttaatggagagtgattaagaaagtttcccccaaggtgcaccatttaatctgaaacatgaaataggagaagtgtgccaggctaagactgtagaatgtgtgaaggccctgagagagcaaagcatagctattaatagataatgaatgaagtacagtgaatacaaaacttaatgtctcaagagtaagtggaaaggaaggctgaaaaggtaaaccaaggccaaataatgggcgcttggattttattattctaagaacaaaaggaagccattgcaaggttgttggtacagaaataaaacagtgcaaatatgtgttcaatgtagccgcttttgtacttctacacaattatcaagaatgtttgctcttaatactagtgatactaaaaataacagcaatttcacttttatgtctttatattgagtataactgcaagctattcaaatacctgctatcatttgggtagaagaaaagaaactttgtgactcatccaaaatcctacaggtaatgagttggttgatcagagacttttgataccaacacagcgctctacaccattgctaatctcaaaacaagaccttcaaagttaatattaaaattttaataggatagctcattcaaatgtatgtaaaaatgatataaaaatataaagatagactgagtaacattaagaattaagatttgttttaatgtatggatcagaaagtaaactgcaagaaatgaaaacagttgggtgagtcatttagggaactatggaaggaaatttaagtaataaaattaaaagccatctgtattccttaagccagtggacaggaaaggaggctcaatttaagcattaagagaaaaagtaaaaatatgttgaaggaaagcgacaacagaatgataactgcatgttcaaacaatggtaaccaattcaattaataacaaaattataattcattgtacaccaaagagtatttgattccagcaaaatgttttcctttaagtgttctagtttatttaaatatcaatatatcacaggtaaaatacttttctctctttcaatcattcaaaaattttattaagagcctataatattccagtgactgtgtgaatcattcaataaatgagggagctgttgagaaacagaactcaagcacctttataaaaaagcattgaaaagtctagggaaatgaaagggggaaaaatagaagtagtcagtgcaaaaaaatagagtgagtggtgctagataaatttttctccctaaaggcttgtttctaagtgaatcctaaatgctccagaaaattttaaaaacagcaataccaagctatgtttgagggttctaaaggtaaaggacaaagacatgtactccctcaaattttttggattttaatgaagtgctcaaagttaataggttattaataattttaaaagattttaaagggggggactggaat

SEQ ID NO: 318332 - DNA, 4001 bp, Homo sapiens
caggtagcccggctcggccgcccggggcaccagctcggtgcagggcgcggagccattctgcagcgggtacagcacgaagggcgagttgtcgttggtgtccagcaccagcacgcgcaccagcgcctcgctgctcaaagccggagaaccgcggtctgaggcgcccacgcggaactcgaacgcctgcagggcctcgtagtccagcgacctgagggcgaacaggtggccgttgtctgcgttgatggagaccagggaggcgaggggcaggtgcgggtcctggggcggcagcagcgagtaggtgacctgggcgttggtgcccgagtctctgtctgtggcgctgacactgccgatgtgcagggcggggctgttgttctcgcggacgaacagggtgtaggaggtttgggtgaaggcgggggcgttgtcattgacgtcggagacctgcacggttatgttctgctgggttttcagcctgggtgtccccaagtcagtgacggcgatggtgatgttgtactcagcgctggtctctcggtccagtggtctctctgttaccagggtgtaaaaattcttcaaagttggttttagaataaacggtagattatctggaatagagcaaatcatctttccattttctccggaatctctatctcgaattcggaagatagagactaccgtctcaggagcattttctgggatggagctggtgagtgaagatatgataagttctgggggattgtcattcacatccaccacctctatgactacagtgccttttccagaaaggcctcctccatctgtggcctcaatttctacatggtaagatttaattttttcgaaatccaatttttttttcaacagtatttctcccgtgacttcatttattgagaaagtttgtttaatttcatctgatgcttggaataagccataagaaacactcccgaagtttccagcatctatatctctagctaagaccctaacaattggagagtctagggggctgttttccaggacctgcaccccatatggagtgtgcacaaactcaggagcattgtcattgatgtccatgatcaggattcgaaccatgaccgtgccagacctaggtggtgacccaccatccagcgccacgagggttaagctgaactcaggctgctcctctcgatccagtggtttgtcctgcaccaaatctgggtatttcttgccctcactatgatttcgagtgagaatgtgaaaatgagaattggggctgattgtgtatttttgaagaccattgctgcccacatccaaatcctcagctattagcaacggaaatagagtacccggctggctattttctagtattttcaagagcacttccctttcagggaatattggagagtgatcatttatgtcctggatcaataattctccttgaaaaaattgcaccggcatttccaggaacacttggaaatgcagtacacacggttcaataggaccacagagctcttcccggtctagtttctccctcagaagcaaatctccagtctgacgatccagctgcaaacgctgcttgtcatcgtcagacagcacccgggctgaccgggaggccagttccccaattcccaggcccagatccttggccagatgggctacaaaggagccgctctctgtttcctccaacacagaataacgaataggctcgaggcgaacctgagacaagaacaccatcaaaataaaggccaacacttgcctgtttggatgaattctccctagcttcttcatgttggagtccaggtccctatatccaatcccctcagcaaccgcaacgagacttgagacattcaattccaatttcttgcttggaggaatcgtcacacagttgcttttaatattaaatttgtttagtatatcgctgccccaagccgttggtaaacctgcactgcttgtaacgcttcttccgtgtgtttttgattgcgtctagcgacacagaagaatacgcgcgagctttttagggctcattattcacaacttagcctgcagcgccaccctgcgtcttgattgagaaattaacaacttcaagacaacgtatttgggaagttttaaaataaaagccatttttaagagcatagaatttttacaaactttgttacattaaactgcataatttaaaaggttatttaattacagtgcacgaaccagaataatcatgagcacaaatcaagaagatatctcagactccccacacgcttatcagtgaaacttcaaagaactccatttcttctttacataatccagccacaggagacaaatttttatacactttcaattcaattcttagtagttataaatgttcttttctaagaatgtgaggactttgtgatgatgcaaaagtttaagatgttctctatacatggtctaaagcgcgactacctttgaaacgaaaggttctattttcctactttaatgtgcaaatagtaatacaggtgaatagacaggtatcttgttttgtatcaagtaatttatagtgtgaacctacattgaacctaggagtaaggcaaatagtattagaatcacagattcttagaactaaagaggaaataaaagataaggaaactaaaactgaagctcagagggtaacaggacttgattattctatgtgactattatgaggataatgtcaagacaaaagtgagtaacagtcacagaattttgtgaagataaaggctttaagctgagcttatttagcaagatagatgtaatctatattttacaatgagtttgcctgttaccacactcaccttttgtatcccagatatcatattccttgaccagctaattttggggaaaacaagaagcactgatttaaaatattttattctgtgaccaaagggtgacttaggctgtctctactcagatatggtgaagtaaagagacttgtgtataaaatggatcccaccacagtgtgtagctactgtgattactctcaaacaataagaaagaatggtaccactgagacacagttaaccaatttattggttgcaattaatacactgaatggagcaccacttatcttgccacatataagattttctccccttaaatatcttgttattttatttagttatccaattcatataagtaattataatttataattcatgttaaattaattctttttaaagcatgaaatctgagatttcagattctgatagtgatagaaagtattagtaaaaattgtgaaagatacatggattttatttagtaaataccagttgaattaataaattaatccactcaaatgatgtttttatctatataagcagattattgtcagatcatatattcagccttgaacatgtctgaaactgaatacagaattttgagaatataatacatgctaagcattatataactaaatttactttgattctatttctattaattaattcctataagggatatatcaatggcagtaataataatattaacatcttagaattttctttcacatttaaagtaaatcagaaaagatacactatgcatcactattaaatgaaaaacaataaaaatatatactgaaaagaataaaaagaaagagtattattttagacataactggaaaacaaatctcctgggcaaatcaaagagaaaattgtttctaatatagtaaccaggttttagttagattcaagttaatgcattcaggacaaaattcaaaccatattttgtttacttattcctacatgttgacatagagtaagaattgggtcttttcagttccttttgcaatccaaaagtaaatgaaatctcaataacattaacatatatatccactatacaccagatatttttctaagcattttgcgtatgttgactcattttatcaccccaacaaccctatgaggtgggcagtcttattagccacattttaaagacgaagaattgtggcacacagagtttaaataatctgtccaaagtcatacagcatgtgaaacggcagagccaggatttaaactgttactatgtgactc

SEQ ID NO: 318333 - DNA, 4001 bp, Homo sapiens
accgccaccaccttggtcaccaggtagcccggctcggccgcccggggcaccagctcggtgcaaggcgccgagccgttctgcagcggatacagcacgaagggcgagttgtcgttggcgtccagcaccagcacgcgcaccagcgcctcgctgctcagcgccggggagccgcggtctgtggctcccacgcggaactcgaacgcctgcagggcctcgtagtccagcgacctgagggcaaacaggtggccgttgtccgcgttgatggagaccagggaggcgaggcgcaggtgtgggttctggggcggcagcagcgagtaggtgacctgggcgttggtgcctgagtctctgtctgtggcgctgacactgccgatgtgcagggcggggctgttgttctctcggacgaacagggtgtaggaggtttgggtgaaggcgggggcgttgtcattgacgtcggagaccaggaccgttatgttgtgctcggttttcagcctgggtgtccccatgtcggtgacagtgatggtgatgttgtactcggcttggctctctctgtccagtgttctctgtgtcactagggtgtaaaagttttttaatgtgggcttcaaaagaaaggggagatcattctggatggagcaaatcatcctaccgttgtccccggagtctggatcagaaacactgaaaacggcaactacagtttccggggcattttctggggtagggctggagagcgtagacatggtgagttcaggggcgttgtcattcacatccaccacttctatagccacagtgcattttcctgaaaggcccccaccatctgtggctacaatttccacgttataatatggagttgcctcgaaatccaatgcccttttcaggcgaatttctgctgttttctcgtctattacaaatggttgagtaacttcatcgccttggaatagagcataggctacactcccatatgctcctgcatctaaatctcgagcggagacaacgacaactaaggagttaagggggctgttctcgggcacctgtacctcatagaatgattgtaaaaattcgggggcgttgtcattattatccaagacgacaatgcgaattgtggtggtcccggacctgggcggagccccaccgtccagtgcagtgagtgttaagctgagctcaggccgctcctcccggtccagcgctttgtccagcaccagctctgggtattttctgccatctccgcgattatgcgtagcaacatgaaagtgtgaatttgggctgattgtgtagttctgaacagtgttgctacctatgtcaaagtcctgggctatttttaagggaaacacagtccctggctgggtgctctctgggatttttaggagcatttccttctctgggaactctggggcatggtcatttatatctgtgagctgcagatcagtttgaaaaaactgcactggattttctagtaagagctggaaatgcaatatacagggttctgtcgccccgcacatcacctcccggtctagtttttcatatagaagcaaattgccggtctttatatcaagctgcaagagctctttgtttcctttgtaatgcattcgcgcgccccgagtggccagttcccccaccccaagacccaggtcttttgccaggttggccacagaatagccactttctgtttcttctggtatggaatacctaactgcctcagagccagcctcccacaaaagcaacaatatagcaagaaacataacttgccttttctgtggcgtttttgctagcgcagtctccattgttcagacccggtccagaaggcgcagtttaactccgtacacaatccacccagatgatttgcataaataaccgcgaatccgatctttcttgactgatttccacaagaacgaagcccaccctgaagatctagccactagatcttacctaaaatgcgtccttcttttagagtttggattccccagcttaatggcgtctgagttatccgcagagcccactatccacactcttagcctgcagcgccaccaggcgtcctaatttactattgcatatagtatttgccatttcatcctaaattctaactgacgtgtatccatacccttttgtcacataagctctcccgatggtatctccagctcttagttgctgaaagttctaaataaatgttgtggagttaattttcagtgagaaaatacttttgagaaaaaaactaaaattatatattaatctccataaaagtacccttgagtacacaaatacactttgtttggtgtttcttatttgattatattaaataagtgatcaggaatatctatagaaatttaaagtttaagaaaaattactttcactttgaagtaaacaccaataacacccagaaaatggcacaaatcataggtgtataactcaatgaattttcgcaaagtgaacacactcctgtaagtagaacctagattaaaaatactacccaaacccaagtccccacctgctattgtctggttaccaccctctccccaaaagataagcactgtcctgacttctgttgtcataggttttttttgctttttttttttttaactttatacaaatggagttatagattgttactctcgtgtgtctggcttcttctcctcaatattatgttcagcaaattgatctgtggcatcttgttcttatttgttttattctcattgctttatatcattctgttgtatgaatatactatgatttatttattcattctccagttgatgaacattgttttccaggtttaagctctttggggtagtactggtataaacatccttgtactagtcttttggtgaccacatatatgtgtttatgttgaatatattcaaaggagttggattgctatgcattaagatgtgcacatatattttgctttagcagataatgagaaagttttctcaagtagtcgtactaataccagcaaagtatgagagttccagttgctccacattcttgtcaacatttgatgctatcttttccattttaaaccactctggttagtgtatggtgatatgatattgtaattttagttagcattttccctgatgattaaacaatttgagcacattttcatgtttatcagccattaggatacaatcttgtgaagggcttatgcaaacctttttacttttttggggggaggcatttgcctgtttgcttattgatctgcagaagtttctcatatattctgggcataagtcctttttaagatatatgtattgcaaatatcttttcccactctatggtttttatttcaagtctattatgtgtctttgatgaataaaatttcttacctttagtcagatttgtcaataagtttcatgtatgattagcatttttttgtgttctatttaaatgttcacatactccaaggtcatgaaaatattcttgtatgatgtattttgaaagattaattattccatttttcatatttaaagctataatcaacctgaaattaacttttcaagtgaatgagtttggagtcaaaaggtttaaaatgtaagtatctgaatgctttaaacctttgcaccatctatttaaaagacaatccattttccattgtttttgaaatgtcatctttgttataaattaggtaaccatagctctgaagatgttttattcaatcttgtttatcctacaataactcattgtgttaattattatagctttatcatgagttttgttatctgagaagtaagttctccagttttttaaaagtagactaaatttttagaatggtttttggttcacagcaaaaatgagagtaaagtacagagatttcatatatgcccctgtccccacacaagcacagcctcacccattatcaacatcctccaccagagtggttcatttgctacagctgatgaatctacattggcacgtcattataacctggagtccatagtttacattagggcccattcttggtgctgtatattctatggctttggacaaatttaaaattatgtgtattcacctttata

SEQ ID NO: 318334 - DNA, 4001 bp, Homo sapiens
gggctgggagaagccgtccaccaggagcacgtgcagcgtggcggtggccgagcgcggaggctcgccattgtccttgacaagcaccaccagcctgtgcttggctgcgtctcgctcgctcagcagcctggcggtgcgcacctcgccattgtgcgcccacacgccgaacagaccgagctccgtggccttgagcagctggtacgacagccaggcgttctggcccgagtcgccgtccaccgccaccaccttggtcaccaggtagcccggctcggccgcccggggcaccagctcggtgcagggcgcggagccgttctgcagcgggtacaacacgaagggcgagttgtcgttggcgtccagcaccagcaagcgcaccagcgcctcgctgctcaacgccggggagccgcggtctgtggcgcccacgcggaactcgaaagactgcagggcctcgtagtccagcgacctgagggcaaacaggtggccgttgtccgcgttgatggagaccagggaagagaggggcaggtgcgggtcctggggcggcagcagcgagtaggtgacctgggcgttgatgcctgagtctctgtctgtggcgctgacgctgccgatgtgcagggcggggctgttgttctcgcggacgaacagggtgtaggaggtttgggtgaaggcgggggcgttgtcattgacgtcggagacctgcacagttatgctctgctgggttttcagccttggtgtccccaaatcagtgaccgtgatagtgatgttgtactcggctctgctctctctgtccagcgcgccttctgttaccagggtgtagaaattctccacggaaggtcttagtagaaaggggagattgttctctattgaacaaataacctgttggttatgtccagagtctgcatctgaaacactgaaaactgccactgtgatctctggtaagttttctgggatgaggctgatgaagaacgacatggtgagttcaggggcattgtcattcacgtccaggaccctgacgactaaagagcattttcctgataggcctccaccatctgtagcctcaacatccacgtcataagactgaatttcctcaaaatccaaagcctttctcagccgaatttctcctgtgattgcgtttatttcgaagggttggttgacgtcatcgacttgaaacagggcgtaagataccttcccaaacgatcctgcatctaaatctctggctgagacggtaataaccagagagccgagggggttgttctcagggacttgtgcttcatagagctcctgagcaaactcggggacgttgtcattgatgtccaaaacctggatctgaatctcggaggtccctgaccggggcggagacccgccatccagcgcgatcagcgttagcctgagttggggctgctcctcgcggtccaacggtttgtctagcaccagctccgggaacttcctgccttcgctgcgattgcgggtgagaacgtggaagtgagggttggagctgattgtgtacctctgaaggccgttgctgccggtgtctaaatcgtgtgccattttcaaaggaaatatctttcctggcatagtaatttctgatattttcaggagcatttctctggcagggaattccggggcgtggtcatttatatctctgactcgcaaggaagcctgaaaaaactgcaaggggttttccagtaacacttggaaaggtagcacacacggctcagtggagccacacagctcctcccggtccagtttttcatttagcagtaaatcatgggtctgtggatcaaactgcaaatgttgtctgttccctttgaaaacaacccgagcgccccgcgaagccagctcccccaccctcagtcccaggtcctttgtcaagttggccacaaacgtgccactttctgtctcctccaatacggaatactgaatcgattcagaacccacctctccccaaagcatcaataaaatgaagaaagccacttgccttttcttgttctgtactttagtttgcatcatgtctattatgtctgaatacggaagaaaaatccttttcagctcccaatcaccacatctaccgtcgaccctctcggatgtctttgcagagatttttaaattcgttcttacaacttgtctggcgacgactgccttcccggacacatctatctcagctttagctgtaaacgtggtctgtatttttacttggcttctggatgaaacggagtccaccgagtctgcagagctttcattcactctcttagcttgtaccgccaccacgcgttcaaactaataacttcatgagatgttttcaggtcaatagcatttcagaaatctgagcattataaagacttttaagtcgagtcagtgtttctcaaactgagtgcgtggaccgcatgcataaataattgcttgcgagcgttggtttttttgtgtgtatgtttttgtttttaagccaattcctgggttcactcccctctagaacttgaatcaaattccctggtggtgctaattaaggagaaagattgaagtgcagattctacacttcagtctttctcctttgatgcttcagcagtgcaatttatctctgatgaactatttaatctattagtccaagaggtacactatttaattgtcccaacaaacaatgcaaaacaacgaagtttgttagcaacaataatggtaaaataaacaataaattatctaaattatatgactcataaatggcatgaaaaaaaaaacctactttgttatatagttatgcctgcacagtaaaaagaacaattaggctattaggaggaaaactgaggccaagaagtacgtatgatacatgtatctaagtaaattaaagtatttaaaagagggactagaagcaatcaagtagttgtcataagcattttaggattctactccatttttgcatggatagaattagacattgttttaacagtcttgtgcattttattttttgatcaaattcccctcttacattatttaatcaaggtccaaatatattaccgtgttgtacaaacatgatgcaacacagaaaacaaacattcaagaatcaccttcaccgtcttctcacagcaaaaagaacaccaagtccaataaatacaggccaaattaaggtactgttaaaacaggtgagttacatttgagtgaatgccatggaattcaatgatggaatattatggctatatccattcccatctcactagtttctactcagatacattggaacatgtatctctaaacaaactgaaaatgtgtgaaatagattagtgcacatagaagaggtaaaatatgccaaacaattcaattcatttcagattaatttcatatttattgagaggtgaaatcaattgagttcaaacaaagttcacttcaggtaagggccaaggtgatagaagattaaaaatcaagatattttcaaatacataaatgctaggcaaaacaaataaggctaaataaaatctaaactctgaatagctgagatgatcttgtagttcaaaatcacctctatgtagccagaaaaacaaaagattatgaatgtgaccagcctccagggttcacttgatagatgctactgggaacacactgttccttgagaatgtaacaaaatgaaattatgaaataaaccaacaataataaacatattggactggtgtcatctctttgctgaaacaaggccattatttcctgctcaatcttaaatgcttccttctttcggtgagcattctgagttctgattccagcttaacggcatccacaaagtcttttattcactctgtttctctgaagcaccaccaggcatcctcgaatataggttgttgaattatttttttacgtcagagcaaatttatcagcagtacagtatttgtcaaactccatttagatccttgaaatgtctttgataacattggtagttatatagaaagaggataatagctcaaagtaccccaaaaagatatcagttgggtctatcaagaaactgcctttttatagaaaatggattacgttag

SEQ ID NO: 318335 - DNA, 4001 bp, Homo sapiens
agtcgccgtccaccgccaccaccttggtcaccaggtagcccggctcggccgcccggggcaacggctcggtgcagggcgcggagctgttctgcagcgggtacagcacgaagggcgagttgtcgttggcgtccagcaccagcacgcgcaccagcgcctcgctgctcagcgcgggggagccgcggtctgtggcgcccacgcggaactcgaacgcctgcagggcctcgtagtccagggacctgagggcaaacaggtggccgttgtccgcgttgatggagaccagggaggcgaggggcaggtgcgggtcctgggacggcagcagggagtagatgacctgggcgttggtgcccgagtctctgtctgtggcgctgacactgccgatgggcagggcggggctgttgttctcacggacaaacagggtgtaggaggtttgggtgaaggcgggagcgttgtcattgacgtcggagaccagcacggttatgttgtgctcggttttcagcctgggtgtccccaagtcggtgacggtgatggtgatgttgtactcagtgttcctctctcgatccaaaggtttctctgttaccagagtatagaagttttcgacagatggcttcaggatgaaggggacatcgtcctggatggagcacactgtctttccattgttcccggaatctctgtctctaatcctaaaaacagccacgactgtctcgggtgagttttctgcaattgggctagtaagtgaagacaggagcagctcgggtcgattatcgtttatatctgttacatcaaccactacagtgcattttccagaaagcccgccgccgtctttggcctgaatagttaatgtgtaagtttgaattgcctcatagtccaattgcgctttaagatgaagactgccagatgttggattgatttgaaacgttttgagaattctttcagtggcgtaagaaaatgcataggctatttccccattacttccggtatctaaatctctggctgacacggagacaaccatggaaccaacggggctattttcgggcacctgcaccttgtagagcgaccgcacaaaatcaggggcgttgtcatttacgtctagaaccagaatgcgcacgagggcggtccctgatcttggaggagagccgccgtctaaagcggtgagggttaaactgaactctggtatctcttcccgatccagcacttgattcagcaccaattcgggatagatattcccctccccgctatcatggacattaatatggaaataggcattggggctgatggtgtagttactcaggctgttggttccaacatctgaatcctgtgcactctctaggagaaatgccgcccctggagtggtactttctaatattttcaaggaaatctctctgtctagaaatactggagcgtgatcattgatgtctctgacccatagttcagcacggaaaatctgaaaaggtttttccaataacaactggaaaggcagcacacagggctctctggggccacacagttcctctcggtccaatttctcatttagaagtagatcaccagtaagcgaactgagcagtaaaatttgcatgttctggtctgaaacaattctagttccccgggctctcagttcccctacccctaaccctaggtcttttgccaagttggtaagaaaggtgcctctctcggtttcctccgccacaaaataccgaagcggttcggcgccagcccaagacattcccagaaatacacaaagaaataagacttgccttttctgcacagcacgctccactctggcctccattcttctttggatcagtctttcaaaatgactttcactcagcctccagcggctctcacaaatggcagcagcggaatcctttgaaatgagctgaataatagcaatgtttgtggggaaggatcctcattttaccccaattcctattaccactgtttcctttcctatgcttttctcttcagattgcctctttgctctggaatctgtaacatcctttctttgtgaaattatttttctctctctctttttagccagcagcgccaccttgcgttttgtggatgttattcccgttatcaagactagaacaaaaagatggcggattgaaggaattctgcaacaagaatgatttgtccccggtatctttgctgtttcattccatctttatcctcaaatggtcacagtaatgctagtaagtaatagctgatgtcgttttcccctgtgataatctggattcgtagaagaattaatttatagtcttcttaaatctaggagcatgaaactaaactctgactccccaccgaaatcctaagaaaatctcctattttaaaaatggatagtaaaaatatatatgagaaaatgaaacctcctccttgaagtcaacaaatattggttggggacattttatttatttgtaaagtatttaacaataataatgtgaatatggcagaataattgacccttttcccaatttcttgtgaattaaacaattattccactttccaggtcttaactctttacctgtgatatttcttggaacactttatgcctcccccaaacccaaccttcatccttcacctgatttaagtattacataagaaattattgttcctctataatttcagtgactagaatctccaatgtccaatgaatactcttaaaattagtagtagcaagttggtcaatcttgcatttgtggaagtgcttctagcatttcatcttcaactatgatggttgatctcaatttggggtaaatattccttttttgaatcaataaagttttctttttattctttcatattttgaagtgatttttgatagctgttgaaataatacatttattctttagtttctaaattactgagttattgatataaatgacatttaaccataatgtattattgttttagtgcacagatagatatgatgtgtcaacatggttttaggatttttctagttaatgttgtttacctagtgcgtgtttgccttttatggccttggtattaaactattatactggcatcatagaatgtgttagggagctttttatctattttatacaatagttttaataattatattattatatgtttctacatgcttaattccagcttgtcttttaaactggttgggtttggtgacttcacttgcagtagatcagtgactaccatttacattttacctttggttattaatctgttcaggttttgtatttttaagtaacttgcattttattttgaaaatcattttatctagtttgcaaatttcttggaattgttttcattgcgttatttacctttaattgtatccctatttttattagtgatgtttagcattttaactcctttttattcttggtgagacttgcaagagctctactttactgatattttgaaatgcatttttttcaaaataatatatgaccttggtccaaaattaaatagcactaagaggcttgttctgcccttttcctcctcacttttcttagttccccttctaagaggtagccattttaaaactcttttagttatctcttcagtcactaatctgttttctgatatattttgattaattaattttagaaattatcaattgactgtttattatgttagattacattttaggtattttagattttcttttacttaccatatattgggaacattattgtgtattaattatgttttctttttcaatttttttgtgattttaataattatcttgccttttcatttacttgattttttttatccctatcacttattcatcccacagatacaattgcctgtcagtgcaattttccccatagtcatttccattcctcctgagacttcaatttttctttaaattgggtggttgctttctgtgcctactgcacagctatcattctggatttttttctttgctgtcattcttggaattctttgccttttattctggatgtgtttgctatttctgggattttataacttgccctttttcagtttactctatggcattacta

SEQ ID NO: 318336 - DNA, 4001 bp, Homo sapiens
ggtagcccggctcggccgcccggggcaccagctcggtgcagggcgcggagccattctgcagcgggtacagcacgaagggcgagttgtcgttggcgtccagcaccagcacgcgcaccagcgcctcgctgctcaaagccggggagccgcggtctgaagcgcccacccggaactcgaacgcctgcagggcctcgtagtccagcgacctgagggcgaacaggtggccgttgtctgtgttgatggagaccagggaggcgaggggcaggtgcggatcctggggcggcagcagcgagtaggtgacctgggcgttggtgcccgagtctctgtctgtggcgctgacgctgccgatgtgcagggcggggctgttgttctcgcggacgaacagggtgtaggaggtttgggtgaaggcgggggcgttgtcattgacgtccgacaccagcacggtcatattgagatgtgttgtcagcctgggtgtccctaagtcagtgacggtgatagtgacgttgtactcggctctgctttctctgtctagtggtgtctctgttagtagggtgtaaaagttccccacagaagatttcaggaggaagggtagatcctcctgaatggagcaacttattttcccattttctcctgaatcaaggtctgaaacactgaaaagtgcaaccacagtttcaggcgcattctcaggtattgggctggtaaatgcagacatggtaacttctggggcatggtcgttcacatctatcacttgaatcagaacggtgcattttccagaaaagcctccagcatctctcgcctcgatattgacttcataggactgaaatttttcgaaatcaagttgtttctttagtcgaatttctcctgtcaagaaatcgaccttaaaagttttgcttatctcatctgaagcttggaaaagtgaataggaaatctctccgttgactcctgtgtctacatccgtggcagagaccttcacaaccaggaagcttattggactgtcctcagagatctgcaccctatagaaaggctgctcaaattcaggggcattatcattgacatcgacaacttcaatgtagacctgagcagtgccagatctgggcggagagccaccatccagtgctgtgagtgttaacctgagctcagcttcttcctctcggtccagcgctttgtccagcaccagctctgggtatttcctgccatcactgcgtttgcgggtgaggacccgaaaataggagttggggctgattatatagttctcaatattgttttggcctatatctaagtcttcagcattcttcagaggaaacgcagtcccaggaggactgctctctgatactttcaccaacatttgtttgtccagaaatactggagagtggtcgtttatgtctattacttgcagctcagcttgaaaaaactcgaagggactctctagcaacacttggaaacgtagcacacagggctctgtgtgaccgcacagatcctcacggtccaatttctcatttagcaacaaatccgcggtctcctgattgagctgcaaatgtagtttgttccctctggaaacaaccctaaccccccgcctggagaattccctctgctccagacccaggtcctttgctaaattggtgacaaaggagctgccctcagtttcctccaccacagaatagcttctaggttccgccgcgcccgccagagataagcccaaaaggagaaaggaaaaaaggacttgcctttgtctgcaaatgagcttcccgctggcctccattgttcttgctgaattcagcttcctgggaggacggttctgtgggactgtaaagtccccagtatctgaggctgtggttttctacagatacctcagaaatatgccagtgagtagtcctctccagaggacccagccgtcctccctttggcatccaagctccccgtggacttccaggttctgctgctttttgccggttaatggagctgcagctgcggttctggtttgtgccttcttatcctgcagcgccaccacgggtcctcacaggatcttacattttgtgggatgataatagatgtaatattcccaactctgcctgtatgtaccctgggactatgtaaagttacaacaccacggttaatatcgccggacgttactgagcagacaactgcccgaaggagaaattgcgttagtctttcaacaatgctaactgagttttgggcaaaaaggaaatatttaggtaacagtctagcttggcaaaaagaatttcaaatataatagtagttaacatgggcaacatttagatctttatagttttatttccatgaaccataggaataattagtagctgtgaacctcgaacaaattatttaatctctctgctttaatttcctcatctgtaaaatgaggataataatagcacctaccacatagggctgttgtgatttccccaccttacacatgaggaaactgattcaaagagagattaagcttaaaaataaactatgtacccggtatatggcaatttgataccaccaggtaggtgactctgcataaatccattgctataactagaaaaacacctcaaaattacatggtagaatagtacaggaacatgactatctcaggtagagaagttatgtcaaacagtgaaggtaaacagggaaaggctggagagcttgtctaaatagagacaaaatgtgtaacagcagtggtgattttatttctggggaagcgtgtccttttttgttacctctatttctcttctaatagcatcaattttaaaaagcttttattttgatatttttcatatctcataaaaggagaggagtaaaattaacctgcaattactcagtactagcatcaactattatcaatgtcttgccataattcttgacgctatccctccaacatctttacgttccagacaaactgaattttcacccacaaatacttcattgtacatttctttaaatgcataataactttaagtgactctaaaaatacccttaagtacaatgccattattatacctaaaaaattcagttaatattacttaatacccatctatattcaaactcttccaagtgtttcaaagtcattgctgatgtttgaatgaagatccagacaagatccacacattacgtttgattggtagatctcgtaagatctttcctactgtagacttctctcctcctgtttttcatgctatttatttgttggagaaattagataattttaccctaagaccatgaaagcattttaagattttactgctgtgaggtttttttgcctctagattctatcccaccagtgatatatagtaatactacctttattagagttaccagcactagtttataatattttcagaatgcaaccatgcaaaaattatctagatattttaaaaataaaaatcagttgtaaatttttataaaaaacagtgcttctccttaacttccgagaatttctaaaaatttaatgatcatctatgattctctttgatattatgcatttaaaactaactattctttttcttaaattttcctgattcaatagtgcactataattaatagaaaacttttaaaaacaaactttcaaatcaggaaaatgtattacaaatgttaagtatgggtgactgcagaaaatctacaatatgaagaaaataattaactaatgatgcaatcaaaattatgtaatattcctactcaggaccattaatcttttttctgggaaatgaaagtcatatgttctgaagaaaggagaaggcacaggttgccctttcaattttgttttccgcttgagtttggacagatcagagcattagtaataatagttgaaaattgacccagaaaagcaggacttttggtgtataagaaaataaaaccatagataaatatgtacattattatttctaaatatagaaaagattggacagcagtataaatatgataaaagacttctccttaattaggcagaaacttgccaggtgatatctaatgacagaaaacagtatggaatcggagcaggg

SEQ ID NO: 318337 - DNA, 4001 bp, Homo sapiens
cgacagccaggcgttctggcccgagtcgccgtccaccgccaccaccttggtcaccaggtagcccggctcggccgcccggggcaccagctcggtgcagggcgcggagccgttctgcagcgggtacagcacgaagggcgagttgtcgttggcgtccagcaccagtacgcgcaccagcgcctcgctgctcaaagccggggagccgcggtctgaggcgcccacgcggaagtcgaaagcctgcagggcctcgtagtccagcgacctgagggcaaacaggtggccattgtccgcgttgatggagaccagggaggcgaggggcaggtgtgggtcctggggcggcagcagcgagtaggtgacctgggcgttggtgcctgagtctctgtctgtggcgctgacactgccgatgtgcagggcggggctgttgttctcccggacgaacagggtgtaggaggtttgggtgaaggcgggggcgttgtcattgacgtcggagacctgcagggttatgctgtgctcggttttcagcctgggtgtccccaagtcagtgacggtgatggtgatgttgtactcagctttgctctctctgtccagtgcaccttcagtcattaggatgtaaaaattgtcaacagacggtttcagaaaaaaaggcagattatcttgaacatagcaaattgtctttccattttctccggagtctctgtctttaatcttaaaaacagccaatactatcccaggagagttttcagcaacagagttggaaagtgatgatatgatcagttcaggaggattgtcattggaatctaatacttttatcaaaactgtacatcttgcagaaaggcctccgccgtccattgcctgtatatttattttgtaagaatttactaactcataatcaagcaattctctgagaaagatttccccagaaaaaggattgatttgaaacgttgttaaaatatcttcagaagcatcaaaaaatgaataggatacttctgcattgactcctgagtctgcatctcctgcagacactttaacaataagggaccctactggactgttttctggagcctgggtctcatacagagcctgggcaaactgtgggacattgtcattgacatccaagaccacaatgcgtatagtggaggtcccagacctggatggagacccaccatccagcgctgtgagggttaagctgagctcttcctgctcctcccgatccagtgctttgtccaacactagctctggatatatcatgccttcatcactgccactaattttaatatggaaaaaagagttggagctgatcgtgtagttttggatactgttatgaccttcatctggatcctgtgctctttctagtctaaatgctgtcccttcagctgtattttctgatatttttaagaccatctctttgtgccgaaacactggcgagtgatcatttatatccctgactctcagctcagcccggtaaatctgaaagggatcatccattaaaatttggaaatacagcatacagggctctttagggccacacagcttctctcggtccagtttctcatttgtgagcaaattcccggtatgtgaatccaggagcaggtattgtttgttatcatcggaaaccaccctggttccccttgcagccagctccccctctgctagtcccagatcctttgccagattgaccacaaaggatcctttctctgtttcctcagtcaccgaataacgtccaaacccagaacctgccaaggacactccccagaaaagaaaaagaaacaggacttgcctttgtcttggaaagctgaaccccctggtcttcatagctgcttctttcctcaatgtcagtctcaatcacactgccccagcacaaatagcaatcgcaaacccagacttatgtgtaccagagatctagggtttttaatttttcctttcccaatcagggactcgacagctcttcttctcagcccatctgtctcagtgtttcctttttgtcaaggacttccgtagcattctggtcaattttgttcctccgtctcttcagtctgcagcgccaccttgtggcttccaacacagtcaaatggctgtgcccaatttttgtgtttatttaaaaattcttcattgcttcatgagaaaagataaaaattgaacagttgaaaaaatgtttctagcagtaaccctgttcaactctgtgttagatttagctgtgttaggcctttcgcctctgacacaactcttacgcaaacaaagggaaaattgtgggtgccttctggaaccaccaaaataatcaatttcactgtctcaaaagctttgggcataggaacaccaaaaattaacaacaataaaaaaaacttgtttcacatcttcttcaacaaatgtcttcaagatctcagattgcctaactagaatcaccgctctgtagtccagaaccaagcattaggctgtctttccattgtgcttctctaaaacttacgcatacaactatgtttactctataaatattattgcttcttgtttcaggccagtttgccccttcatcaatgtgtgaactacttgagaacaactatgtcttagtcatctttggttggcaaattagccactcactaaatgctggctatattaaggcatgcataaataaactagtgagtaggacatgaaacaaaattcagtgcctttcgatctctgccatttgaaaattgttttctttaatttactcatactttgcaatttgttttttttttttcttagattagctttaaagtaacttgcagaattaaagaagggactgacctttattttcaagtcccttttagtggaaatctagtaggccctaatttctctgaaccaaataagcggaggtaaagaacagatcaaactaacacctatcctaacactattgaaagtgaaaacaaattattaaatctgactcacatagaattttattcaaaggcctaatatctagaaagaagctcaactttacatataataagcaagaaatacagattaaacatagggatattttacagagaaagggctagataccgccaatgtatactatgatgaatataaaagccaaaccatgtaaatgtctctttgataagttttttttccaacttaatgagattgagttgttagccattaaaaatataacagggacctctgattttttaattcagtaatagaaagaataaattattaaatatttttacataatacctttgccttttgtctacaaacacaaacacatttacacatactgaatgtcttacaatggcttctctttttatttttagataaggctggttaaagatttctcatatcacttacaataggaatattttattttatttaaggagataccaatacagggaaaatagaactttttttttaaaggtaactttacgagactccatctcaaaaaaataaataaataaaactttggatgggcacattggcttatgcctgtaatcccagaattttgggaggctgaggagggaggatggcttgagcccaggagttcaagatcagcctgggcaacttggcaaaatcccatcgctgcaaaagattagccaggcatggtggcatgcacctatagtccaagctacttgggaggctgaggtggaaggatccgttgggcccaggaggcagaggttgcagtgagccaagattgtaccactgcactccagcctgggtgacaagagtaagaccctgtctcaaaaaggaaaaaaaaaaaaagaaagaaaagaaaagaaagaaagaaactttaagaaaagtattataatgaaaattgagcccaacaaaaataccaattttgaaaggaaaatagacaaaagaaatgtaacataggaaatatgcctaatacatgcaacaggttattttaatacttgaagttctaggaaactgagaagtaacatgaaaaatggagcaaaaaatgaataggaagtaaataaaatataaagacggaaaaattttaaatgacatcaactttgaagataaagtatattttgttaattggg

SEQ ID NO: 318338 - DNA, 4001 bp, Homo sapiens
cctgtcggccacggccacggtgagcgtgacagtggcggagagcgggggctggccgtggtcctggacggccaccacgagactctgcttgagcgcgtctctgtccagcagggctcgcgccgtgcgcacctcgcccgtgtgcagacccaccgagaagagtcccggctcgctggccttgagcaggcggtaggacagccaggcgttctggcccgagtctctgtccaccgccaccaccttggtcaccaggtagccgggctctgcggagaggggcgccagctccacgccggtagaaccatctgtggggagggcggggtacaggatctcgggcgcgttgtcgttctggtccagcaggaataggctgagagacacgttgctgctgaggggcggatccccactgtcccgcgccatcactttcagttgcatgtcccggaactgctcatagtcgaaggatcgcagcgcatacaggaccccagtgtcggagttgatggagaggtaggcagataggggtgccccctggatagtgtcctctattagggagtaagtgatttgtgcattctcattgctgtccaagtcgtgggccctcacagagaagatggaggctcctctggggttgttttcgggaatgtaggcagagtaggagtcctgatggaagactggggagttgtcattgatatctgtcactagtagtgaaatgtgagtttcagtagatagagctggagttccttggtctattgctgttattgtgatgttgtacccagagataagttctctgtccagtgttctttcagtcactaaacggtaataattatcaactaacttttccaatttaaagggtaaatttccaggaatgaaacatgtggtgtagccattgtctcctgagtcctggtcatgcacactgataagagcaattatggtcccaggaggaaagttttctggaactgcagtggtgacagaggtgatggtcacttctggggcattatcatttacatccaaaactttgatcagtaccttaactttagccatgagccccgcaccatcctgggcttgaacttccattgaatacattttgtattcttcgaaatctagtggttctttatttgatatttctcctgtgtaagaatctaaacgaaatatttgggccactctgtggtctacattgtgaaaggagtacgttacttccccattggctccctcatcagggtcagtggcatttaccatgagcagctgagtacccagcggcacgttttcggggacatttatatggtattgtgcctgagtaaatgctggaggattgtcatttgcatccaccacctgaatgtaaattctgagggtccctgaacggactggttcacccccatcagaagctgtgaggatgaggtggtggacagcttcttcttctctgtctaagggactctgcagcaccatctctggatgttgaggcccatcggctccctgttgcacatccagggagaaatgagggttagagctgagttggtagctctggagtgagttcatacccacatcaaggtcttgcccaaaaggcaatgagactctggtacctggagtcgttatttcattcattttaaactccagttcctctaactggaattggggagtgttgtcattaatatcaattatttctacttcaacaggaaaaagcttcattttatcctcaacaaggatattaaaactcacgagacacggcatgctctgagcgcagagctcctcccggtctatcctgcgcgcggtgatcaagctgccacttctaggattcagagcgaaaagcggcatcctacctctggagacgatgcggactccgccatctgccagctcctggggttgcagccctaggtccttggcgatgttgcctacgaaggaacctttgtctgtctcttccggcactgagtagtgaatattcccagccccagcttccaacagcagctccagagaaagacacagaagcatcagcctgctgcagccagtcagctttttctgaatcttcatggctctctcacttcgtagttttcttccagtccagtaccaagggtatcgtttctgcttttctgagctgaaattaacccaattttcaggagaattctgactggagagtcatccagaagtaggatttaggcagtcttggacagtcagttttcaatctggcggttatggaggttctaagaggcacgagagcttttttctttttcttttttttttttttcctcctcctgacctgtgtgtactgcctgtatctaccagattagtgaacagcggcgcccacagtcctaaccagttactgcattcctagcaaatactgaaaaccttctcattaacttgttattttcttaagttttagtctattgtcaaggaaataattctacaatatatgtatgaaaaagagaaactatatgttcacttctttaaatgtgcctaaatgtcaccaaattgaaatatacaggagaatccaagtattcccatgttatctgctttccaagtttgctattcagggaattatagtaaaaacctaacattacaatgaggacaaaatcatctctccactttttctgtagtaaagtttgaccacttggtaatttcccaggccacatagagcagctcccctttgactggagggtgaaaagtattagagggaaaaataatcttttagaatataagctagactttaaaaaaatcataccatcccatttccttcccattatgatttgaatatttatcagaaaccttgggattttgaagagcatggtttaaccctatccttatttttcctcttttttttttttgaagtgtctttgcattatgtgggtttttaaaaaattcttaagattcaccaaaggcaatatattttgaaaaaaataaaactgggctcttggaatttcattgaaaagtcacatgaatatataatttagatttcaaatttcagagacaaagtctatgatattattcttcacagctgaaaagaaaaatggtctcatctttatttttagataggctcttataatatgtattcctctataatcgcacttaatattttctccaagagaagttggttttctcttaacagtattttttaaccagttgaggatgtggccttcttttttttttaatcactgcactattagcaaagggttactaattaaaatgtctcaggcttagagtgacttacttatctttaccccaaagttagagaagcatgctatctgtactccagagtctgataatttcaggaacaaattcggccagccaacccatggacaccatgactgagaaaagttaaaaatgaggaaagaaagaaaacaatgaaaggtctcaataatagtttttggaaagagaactttagttcttaaccaaatctacagtttctcagcttctcaaagacaagtacatggagccaaagagtagaaatttaaaggtgcaataaatcatcttcaatattgcaaggaagtaactctttaacagagaatgtaacttttcagaatacacattaataggcataaacttttccccaaagaaattgtgagctaatgaggtaaattaaaatatacataagaactagtaagtaaacctgtagagctccctactttcagcaaccaaaaacacgcaggagtgatttataaaaggatggtaagtataaaataaaaatgttaaaatatcacacaaatacatttgaatcaaatgcaacatttaaagcttcattgctgcccacacacagtggctcacgcctgcaatcccagcactttgggaggccaaggtgggcagattacttgaggccaggagtttgagaccagcttggtcaatatagtgaaccccgtttctacaaaaacaaaaataaaacaaagcttcattgctggcactgcagagaatacctggttcaaagctgtttcttgagttaaagaaattaagattttaaaaatatctaaaaccacacatacgttgtaggaacagggcaaatttcctttctttaagttggagacaactccatatccgggctt

SEQ ID NO: 318339 - DNA, 4001 bp, Homo sapiens
ggccacggtgagcgtgacagtggcggagagagggggctggccgtggtcctggacggccactacgaggctttgcttgagcgcgtctctgtccagcagggctcgcgccgtgcgcacctcgcccgtgtgctcccccaccgcgaagagtcccggctcgctggccttgagcagacggtaggacagccaggcgttctggccggagtctctgtccaccgccaccaccttggtcaccaggtagccgggctctgcggagcggggcgccagctccacgcctgtggaaccgtctgtggggagggcggggtacaggatctcgggcgcattgtcgttctggtccagcacaaacaggctcaacgacacgttgctgctgagtggaggatccccgctgtcgctggctgtcacctgcatctgtagctcatgaaactgctcatagtcgaaggatctgagtgcatacaggacgccagtgtctgagttgatggatatgtatgaggacagaggtaccccctggatggtgtcttcagccagggagtaaataatctgggcattctctttgctgtccgggtccagcgctgtcactgagaagatggaggcacccctggcgttgttctctgggatataggtaaagtaggagacttgagagaaggtaggtgggttgtcattgatatctgccacttgtagcataaagtgagcttccgttgatagaggaggacttcccccatctgtggctgtcactgtgatattgtaagaggatacctgttccctgtcaagggctctgtgtatcaccaatctgtaataactgtcaatggacttttctaatttaaatggtagatacgccaaaatggaacaggttacctgtccattctgctcagagtctaaatcatgcacatttaaaagggctacgactgttcccagaggtgaatcttcagtcactggactaaatagagacgtgatggtcagctctggactgttgtcatttacatcttctactgtaatcaacacttttgcagttgcaagatatgctcctccatcttctgcttgtatttctatttcatagaaaccggtttcttcataatctagattttctgatatttttatttctccagtatatttgtttagttggaacttcaacaattgcgtgtcaggtaattttcggaatgaatatgtcacttctccattggcaccttcgtccctgtcggtggctgtgactgtcagcagctgagtgcccacaggcaaattctcaggaacactcactcggtattctggcaaggtgaagaccggcgcgttgtcatttgcatcgaagacagtcacactgacaaggacagtgccagatcggagagggtcacccccgtcggaggcggtgaggaccaggtggtgaatggcctcttcctcgcgatctagggagtgctccagtaccagctccgggtacttgacgccattggcacggctctgaactcttagggagaagtgcttattggggctgagctgatagctctgcagggagttcacgcccacatccggatcaatagcttccgggagaggaaaacgcattcccgcagcgacattttcattaatttttacgtctagattttctgcttggaattttggagcattgtcattgatatcagttacttctatttctatcccaaaaagtttcaccctgtcttccacaaggatattaaaactcaccacgcaccgcgcgctctgagcgcagagctcctcccggtctatcctgcccgcggtgatcaagctgccgctgcgcgggttcagagagaaaagctgcgtcctacctctggagactatgcggactccgcgctccgccagctcccggggcgccagacccaagtccttggagatgttgcccacgaaagagcctttctctaattcctcaggaattgagtaggagatctgccgggctccagcctcccatggaatcccgaagaaaaggcagagcaggaccagcccgctgcaatcctttgattcctttgagcgattcctttgagcggccattgtagtctggttacagaattctgcaaagtcctcactggacacgttgtgtgtttcaaccggttcctttgtctttctgtggcttcagggtgtctctgtagcctgggcactttaaattctggagtgagcttccctgcagcccagcagccggtttgtggggcttgtgtagttgaagccctgagaatccggattgagctctggctgcgttttctctcctagtaggtgaacagcggcgctcagagtcctaagaagttactgcacccaagtgatacatgcaatggaaagtaaactattctgttggattattatattttacatagattctttggtttctccactcctatctttaaataatttactatatgtaggtttcttaggggaggtgtgataaagtggagtgaaaatattgtaaatatttcaagataatgtttggttaaatatatatttgcaacacgttttcccaacagaaatgtacacactttaataaaaggtaaataatacttattttaggtcatattagtgtctaggtaaattcagaaaagtcttataatttaaaattgtgatttgaataggccaattttatttagtatacattcatacaaagattatattaaataaactcatgagataattcactctgaagctttataattgtaactacttaattcattaaacttatttagcttaggattgtgtaagaggtttttaaagtactcttctagaatagttttactgagccttaattaacctttttgtgtaaaacatactttatcttacagggatacaagttaaatggacctatttaaatgattaagcaggtaatcacaaactaaaatgaacatatattacagttgcaaattaaactgtttgcattgtaatgagaaaagaaatacgtagaatttgaagtactaaaagttttagaaaacaaagttagatgtagtgatataggtttttaacaagtaagtgtttatgtcaaatgacctgttttcatcagagcattaataccagtataaataatctcttctcttaggcagtttgtatcagaggccaaagtccagtggttcacatatcttcaactgtgtgtgcccatcaacccagtagcaattgttccctcaaatgcaaagggtatagaagttcacttctttcacacagagaacaggatgttcagaagtgtttatgtcactatgccttccaagtatagaactcttcaaagattttatcttttttcttcaaaaatcttctatcagagaatcagagacagagactgagtgcaaaggcaatagtatttcatttatttcttagaaatgtcttttttttttgagacagggtctcactctgtcacctagacagctcactgcagcctagacttcctgggctcaagcgattctcccaccacagccaccagagtagctgagaccacaggcatgtgccaccacaccctgctaatttttaaatgttctgtagcgatggagtctccctgtgttgcccaggctggtctcaaattcctgcgctcaagagattctccacctccacctcccaaagtgctgggattacagcacacttggccctgcctgcatatttatttatttattttagagacagggtcgcactctgtcgcccaggctggagtgcagtggcaagatcagggctcactgcaaccttgacctcccaggaccaagcaatccacccagctcagcctcccaagtagctgggaccacaggggaatgctaccacactctgctaatgtttttttttgttgttgttgttttagtagagatggggggtctccctatattgcccaggctggtctcaattcttgggctcaagtgatactttccgattcagcctatcaaagtgctgtgattataggtgtgagccactgggcctgtcttctgaatatttttaggctttaaaaatatataaataagatatcgtaaattcactaagtcttcgcaaatttgaatagataggttacttgtttgttttcttagatgccaagacca

SEQ ID NO: 318340 - DNA, 4001 bp, Homo sapiens
gcggggcgccagctccacgccagtggagccgtctgtggggagggcagggtacaggatctcgggcgcattgtcgttctggtccagcacgaacaggctcagcgacacgttgctgctgaggggcgggtccccgctgtcacgtgctatcactctcagttctaagtctcgaaactgctcatagtcgaaggattgtagggcatagagaacaccagtgttggagttaatagagacataggaggacagaggcaccccctggacagtgtcatccgtcagagagtaagtgaccagggcattctgtttgctgtccgggtcgagggcggtcactgagaagatggaggcacccctggggttgttttcgggaatgtaggcagagtaagaggagtgaggaaaaacgggagggttatcgttgtcatctgccacattcagccagacatgagtttctgcagacaaaggcgggcttccctggtctgtggctgtcaacgttatattgtagctctggaccaactccctgtccagcactctgcttgttatcaatttgtaataatttccataagtcttttctaatttaaaaggcaggtggttaggaataaaacaggagacttgaccattttctccagaatcttgatcttgcacatttagaagagcaatcactgtacctggaggagagttttccagaattgaattaatagaagaggtgatagttatttctggagcgttatcattcacatccacaacagtgatcaacatcgtcgtggtggtaaagagacctccaccatcttggccttgaatttccatctcatagaatctatatttttcaaaatccagagacccccgtacttgaacttctccagtttgtgaatccaattggaatatttcagaagccttgctttccatgttccgaaatgaatacattacttccccgttgattccctcgtctggatccgttgcattaaccatcagcacccgagttccggagctgatgttttctggaacactcacgcgatatacggactgtgtaaacattgggatgtgatcatttacatcgaggaccaccacacgaatgggaactgcgccctttcggatgggatcgcctccatctaaagctgtgaggaggagcaggtgagcagcctctttctctcggtccaggcttccctccagtactagctctggattcttggccccatccgttctgccccgcagttgcaaggaaaagtaattattagggctgagctggtagctctggagggagttcacgcccacatctggatccctagcattaggaagagcaaatcgcgccccaggaattgcgtgctcactgacttttatctccacttcgtcctcctggaagctgggggcgttatcattaatatctattatttccacctccactccgtaaatcttcaaggtgtcttccacgagaagttccatatttaaaaaacaggaggacaccgtctcacagagctcctcccggtctatcctgcctgccgtgatcaagctgccgcttcgcggattcacagcgaaaagctgtgtcttccctctggagacgatgcggactccgcgcttcgccagctcccggggctccagccccaggtccttggagatattgcccacgaaggagcccttttcggtctcttctggcaccgaatatcggatctgcctggcccggaacccccgcagcgtccccaggaaaatgcacagcagcagcagcagccgactgcggtccccgcgctgtagccgattcgccatggcaggctctaagccgatattccgcggtttctcgagctggttggttgtgaatcggcttatgtatctatgaagtcctaggccgactacatccaaaatatatcagaaagcgaaggaaaatacttctaagtctccagtgtcaggatctgtgagtatccatctcattccgctttgtgtggtagaggcgggggagggagggactcaatggcgcgcagcttcccattccctgattggtgagcagcggcgcctagagcccattcttattattgcaacgactaagaaattccagaagaaatgattacgctcacctttgtgaatcacacgtatttgtagagcttaaaaacgatgatacacaatacttacattatgtgacgttaaaactttaccaagaacacctgcgaaaggagtaattattaaaagggcttgcttaatttttaaaaagttttcaaaatattactggagctgaaaacttgtaggttgtagttggttccaattgattttaaccgactgaaaggaacgacatttctggaagtggaaataatacggtcccgataaaatcatcaggtaggatgcctaactataattcttacaaggttcctttattgagtaaatgaagatgaaatacttgagaaaaattgagtagcatcagggtttcaattaaaataccatgccgtaaaaatatacctgtattttatatttttaaccgaaaggtattttacttcataaaaatgtcaccggagattacccatgtagtttgctttaaaatgtctttgaatagtaggaagactgaggcatttaatttaaacttttgttttaataatgataaccataaatttgacctatattttgcgaactctatgaagaagttatctagaatcttaaaataataccactatattggaatatattggcatattgtaatataaaaaggattaaatacatttttaaatacttacctgtttaagaatcttcttatctgcttcaacgctgggagttaaaatgctagccagtagcatgctatctttgttgaggttatcttgtgtggctggacaatgatcaacagatgtgaaaaaattaaattctggattcatttgatccccaggcacacaaaaattataggcatagggcaacgttccctcactgtagttggggggacccacaggtccggacttggagcagagaactgactcaaagcagtctcctgcagtagggctgaaagactgtcgcaggcgtagagcaatagctagaatcaccgcgaggagaaagagcacagaaatcaaggccaaggccaccaccaggtaaaactgcatctcagcctgggagtcagagggtgtgggatggtcgctgaaatccggcagtacctcttgcaagctatctgcgaacaccaggtgcagcgtggcagtggctgaaaggggtggctgtcctccatctcttacagcgactagcaggcgctggcggaccgagtccttgtcacccaaagcacgcaccatgcgcacctcgcctgttcgcagccccaggctgaagagcccgggctcactggcctgcaccacgtggtaggacagccaggcattgtgccccgagtccgcgtccacggccaccaccttggtcaccaggtagcctggctgcgcggcccgcggcactgtgtcgaagagcgcggagccgtcgggacccagcgcagggtacagcacccgcggtgcgttgtcgttacggtcgcccaccaacacgcgcaggctcacattggcgctgagcgcgggcgagccctggtcgcgggcctgcagcgtgagctcgaaggtgcgcagctgctcgtggtcgaaggcgcgctgcgcgaacaccaccccgctctgcgcgctcacggacacgtaggacgacagcgttcgtgactccaggtcgctggcaatgagagagtaggagacacggccgttgagcccgaagtctgggtcagaggcactgacttgcgctatggaggcacccggctggttgttttctggcacgtggaccaggtaggctgactgtccgaaaaccggcgcgttgtcattgacgtcagtaatgtgcagggttatggttttgctggaggataacggaggcttgcccctgtctgtggctgcgatggtgacgttgtactctggggtctgctcccgatccagggcctcatctgttactagcttgtagtaattattagaagaagaatgaatcttaaatggaacacctctacttaagctacacctgacttccccattttcccctgagtcttggtcccgtgt

SEQ ID NO: 318341 - DNA, 4001 bp, Homo sapiens
gccttgagcagacggtaggacagccaggcgttctggccggagtctctgtccaccgccaccaccttggtcaccaggtagccgggctctgcggagcggggagccagctccacgccagtggaaccgtccgtggggagggcggggtacaggatctcgggcgcattgtcgttctggtccagcacgaacaggctcaacgacacgttgctgctgaggggcgggtgcccgttgtcccgcgccatcactttcacttgcaagtctcggaactgctcgtagtcgaaggagctcagcgcatacagtaccccagtgtcggagttgatggacacgtaggacgataggcttgccccttggatggtgttctcagccagggaataagtgatctgggcgttctcttcacagtcggggtcgtgggcggtcacagagacgagggaaactcctctgggattgttctctgggatataagcggaataggaggcctgagggaagaccggcgggttgtcgttggtgtctgccacgttcagcgagatatgagtttccgtggataggggcggggttccccggtcagtggcggtcactgtgatgttgtagctaggaacctgttccctatccaagactatgtctgtgactaaactatagtaatttccgtaagatttttctaatttaaagggcagatttccttggatgaaacagatcacctgtccgttttcctcagaatcttggtcatttacatttaaaagggcaattaatgtccctctgggagagttttcgggaaccgagctggcgagagaggtgaggaccacttctggggcattgtcgttcacgtccagaacagtgatcaggactttggctcgcgcagaatatcctgcattatccattgcttgcacttccatctggtagaatcctgactcctcgtggtccaactcccctattgttgatattgtccctgaattacaatctagtttgaaaacttgggccgccttgtcgtccacataccggaaggaatacctcacttccgcattgactccttcgtcagggtcggtagcgttgactacaagcagctgcgtgcccaaggccagattctccggaacgctcgcgcggtactcgggctgagcaaacgctggtgcgttgtcgttcgcatccagaaccatcacgcggatgcgcgcggtgcctgtgcgcaccgggtcgcccccgtcggaggccgtaaggaccaggtggtgagcagccttttcttcgcggtccagggcgcgtttcagcaccaattcggggtacttactaccgtcggctccattttgcacgatgagggagaagtgagtgttcgggctgagctcgtagctctgcagagagttcttcccgatatccggatcccaggcgtggggtagagggaaccgcatctcagtggctgcattttcactaatttttatttctaattcactttcacgaaagtaaggcgcattgtcgttaatgtcccttacttctacttctactccatatattttcactttatcctccatcagaatgtctagatttaattgacacttgatggcccccatacagagctcctcccggtctatcctgcccgccgtgaccaagctgccgctgcgcggattcagggcgaaaagctgcgtcctacctctggggatgatgcggactccgcgctccgcgagctcccggggctccagccccaggtccctggagatgtcgcccaccctagagcctttctccagctcttccggaactgaatagcgtatctgggtgcatccggtctcccacagagtccccaggaggattcccagcaggacaagccctttgtagtcccggtgcagtcgcgcaggaatcattcttatcttcctccagaattattttcaattctgcccttaaccactgaagtcaggagcagttccttcgcccatagaatgggacagttgggaagtcagagctcctccgttgtttccacatactcccagggatggttcattcctagctatctgctttgtgcttcaggcgcgtgcaaggcgagcaggatctccgcttttctctccccgattggtgaacagcggcgctcagagtcctaaccaattactgcacaatcttgaactcccagaaaggatatttcgtttttatatcttaaatagctccacctactgttcttcaaaaggggatggaaatctaccgtattcgctttaatagaaactttagtgagctttttttttttttcccaatgagcttttttttccccaatgagcttttaaatgaattggaagtttctataaacaatgattttaatcttataatgttagtgcatctgctttgagattactgttcccccaacacacctattatggagatgtctccctaggagtttctctttttgacaaatcatataatataataatttaaactttctgattcagctataatttggggaaaatatttttaaatagattccttgaatgatcctgaatggaaggattactttaccaggttgttgacatgtaacgcttaaaaatcaaattttcatgatattatggaaacctaaaaatgatatgtgattgtatacattatcagaatcacacttaacaagaacccaagtgaaaaagaaacattaatatttttagcataaagtagaagcattccaacttgcattgactggaaataatggaagtactccagaattctattaatacattatatttcaaaaatatttattgttcaggaaacttagtaaaagaaaattggtagtccaaagaatgttacagacttaccttttcctgggtaactgacctaattgtaattactgagaattactggtaatacttttggaagcccatcaaaatatagggaaaaaattctccctaagaaataactggctacgtactttcatgagcgtaaatatttatactgtaaagatatttgctaggcataaaataaaataatatattttaaattgggaagaaatatataggtagctgtgagaaaatatcagacataaaattgagtttacttgaattacaagaatcaaaagtaaatgtaactgaatattatcaaatcattaccatgttcttatttttttaagcttttttctctgccaggcacagtttcaggcaactgtagtctcagctactctggagattgaggtgggaggattactgtagcccaagagtttgagtccagcctgggcaacataatgagaccttaatctcaattttttttaaaaaaaaaacacattttctccattttctcatgcattttcttcaaaatttatagttaatggattaaagaaaaagccttatatactcaaatattgatgtcccaagaaacatcacaggaaaaaaatttattcctcaattaaaatatctcaatgacagcagtatcataatacccacttttcacacgtgtgtgtgtgtgtgtgtgtgtgtgtgtgtgtgtgtataaacaatgtctccgggccgggtgcagtggctcacgcctataatcccagcactttgggaggccgaggcgggcagatcacgaggtcaggaaatcgagaccatcctggctaacacggtgaaaccccgtctgtactaaaaatgcaaaaaattagccgggcgtggtggcgggcgcctgtagtcccagctacccgggaggctgaggcgggagaatggccagaacccggaaggcagagcttgcagtgagccgagatcatgccactgcactccagcctggaccacagagcgagactccgtccaaaaaaaaaaaaagtctcccgtaaaaatggtgaaaatgtttcaaaaatacatgaaagctaataatgaagttactggcccacacagaaaggaacaggaaatattaagagtgggcaaacaaacctgaagcaatagtagatataatatgtttaagattttcttgccaaaatattggtttgaaaattaaacctcatccatttgtaaatgaaagacattcattggaactcacgtgagtaggagcaacagagttagagcttatcttgttattctcttcagtgaagcttg

SEQ ID NO: 318342 - DNA, 4001 bp, Homo sapiens
ctctgtccaccgccaccaccttggtcaccaggtagccgggctctgcggagcggggcgccagctccacgccagtggaaccgtctgtggggaaggcagggtacaggatctcgggcgcgttgtcgttctggtccagcacgaacaggcttaatgatacattgctactgagtggagggttcccgctgtcccgcgctatcacccacacttgcaagtctcgcaactgctcataatcaaaggagcgcagtgcatagagtactccagtgtcggagttgatagagatgtaagaggataagggtgccccctgaacagtgtcctccgcgaaagagtaagttacatgagcattgtcgttgctgtcggggtcatgggccgtcactgagaagacagaggctcctctggggttgttttcgggaatgtaggtggagtaggatgtgcgggagaaggcgggtgcgttgtcgttgatgtctgccacctggagcaaaatgtgagcatccgtggacagggaggggttccctccatctttagcggttagagtgatgttgtaaaaggaaaactgttccctgtcaagggctctggttgtaaccagtcggtagtaattgtctactgacttttctaacttaaaaggaagatcctcggggagtgaacaggtggtgaatgcgttctgcccagagtctctatcatgtacattaaaaagcccaattatggttcctggaagagagtcttcagaaactgagctagtagcagatgtcatgtaaaattctggggcattgtcattcacatccagaaccgtgacgataaccttcgctctggttagaaggcccggaccatcctgagcttcaatatcaatttcatggaatgtagcatcctcataatctagatcttttatgattgtcagttctccagatgttgacttaagctcaaatacctctgaggtttctccagggcttttctctagaaaatataccacttgagcgtagtagccctcatctgcgtcagtggcggtcaccgtgagtatccgggtgcccacgagcgtattctccggaatgcttatgcggtactcgggctgtgtaaaaacaggcgcattgtcgttcgcatccaggaccttcacgcagatgcgggaggtgccagatagcactgggtcacccccatcagaagccacgagaacgaggtggtgaacagcctcttcctcgcggtccagagagcgctccagcaccagttctgggtacttgttcccatcagctccccttcgcacgtccagggagaagtggtcatttgggttgagtgcgtacttctgaagggcgttctcacctacgtctgcatcatgcgcattcttaagaggaatccggaatcctggcgtagtggtttcactgatttttagctccagttcctctactccaaagcgaggggcattatcgttaatatctgttatttccacctctactgaataaatagtcaatttatcctccagcagaatgttaaaattcaacagacagggtgcgctctgagcgcagagctcctcccggtctatcctgttcgcagtgaccaagctgccgcttcgcgggttcagagcaaagagctgggacctacctctggagacgatgcggactccctgctctgccagtgccaggggctccaaacccaagtccttggcgatgttgcctacgaaggagcctctgtcgatctcttcccgcacagaatagcgaatctgcccggccctggcctcccacagggtcgccaaaaggaagcacagcaggaccagctttctgcagtgtggcaacttttgcagagccgccatttccctcctgtcgcaattttctccgagtcaacttccagcatccagtgcggattccaatctttattcctcagggtgtgagataaccagcattcacgggacccaggtccctatggagagaactggtgggctgttcgactgaatttctttggtgtcctgaagctttagggccaaacctccacccccttgtgctgtgggagccgtattgctggattggatgtctcgctgccttttactccttaggtggtcaacagcgacgctcagaggcctaaataatttctgcacctgctcaggaaaacctaagttacttcttgtttgtttgcctttgttgactttcaaggcgctttaaagaatcttacagctctaagataccctagaattagatctttcaaaacaggaatctttttatcaggattaataagaatggtataaatgaacatgatcttgataatagttgctaggaaagtattattgactgctcaaggcattaatcaatgccaccactgcccttgctccaaacatcttccatctcttattgtataatcagaagcagtaagatcaattaagaaacgttagctacgttttcttctaaggttatatattttgaacgtttatggttgatggctttgcatttaccttcaaaatctgcctttaaattattgaatcatcagacacttaattgggtacatgtgcctcccactttgcatgattgcagctggagctagaaatggtgaacatgataaacacaggccctggtctcaagcgtgaaggttggaggaggacataagaaagtaaagagagtataatagagtatggtaactgctgtgatatgaggtaggaaacactgggtgatggaggaatacctaggaggggtatccagtctagatttggggtcagaaaagtctttttgagggcatgattgaagctgaatcataaaaagtaggattgaatcaagaaaaaggctgaagaagtgttctagaacctctgaacaaatgcttgaaggtaagagacagcatggaacattacagaaacagaaagcaggtctatttgataaagctagagccggaaggggtttttcaccacactaggaatcagtcactcaaaattgtttgaggttgtcaagttctttttctgatattcattttccaagggtgtaaaatacaatgcagtggatgtcttcttactcttgtttcatctttaccattttgaccatagtcaagcatacaattctgtgacattaagtacattcaaattacattctggtgtgaccattaccaccatccacttccagaactttttcatcctccccaactgaaactctgtacttattaaatagcaactccccattgcctttcacccagtccctggcaactaccattctaccttttttctctatgaatttgactaatctaggaacttcatatatgaggaatcatacagtatttgtcattttataacaggtttatttcacttgatatcatgtctttgaagttcgtccatattgtagcatgtaacagaattcccttcctttttaaggctaaataacagcccattgtatgtgtgaaccactttttatttacccattcatctgtcaatggacacttgggttacttccacttttcaactattgtgactaatgatgccataaacataggtgtacaaatatctgttgaagtccctattttcacttcttttgggtaataaccagagtggaattgctggattatatggtaattctatgtttaaatttttgaggagtcaccataccattttccacagcagttgtgtcattttatattcaccagcaatgcacaagaattccaatttctccatattcttgttaacatttcttttcttttcttttatgacagcaattctaatgaatgtggagtagtatctcattatggttttgatttgcatttccctaatgactagtgatgttgaacattgtttcatatggttttggccatttgtatatcatctttggagaaatgtctattcaagtcctttgctcattttaacatccaattgtttgggattctttgttgttgagttcgagttctttattctggatatccattctcagatacatgatttggaaacattttctctctttctgtgggctgccttttcactctattgatattgttctttgctgcatatagtttttaactgtgataaagtccagtatacaatttttttcttttgttgcttg

SEQ ID NO: 318343 - DNA, 4001 bp, Homo sapiens
cctgtcggccacggccacggtgagcgtgacagtggcggagagagggggctggccgtggtcctggacggccaccacgaggctctgcttgagcgcgtctctgtccagcagggctcgcgccgtgcgcacctcgcccgtgtgcagacccaccgagaagagtcccggctcgctggccttgagcaggcggtaggacagccaggcgttctggcccgagtctctgtccaccgccaccaccttggtcaccaggtagccgggctctgcggagcgaggcgccagctccacgccagtggaaccgtctgtggggagggcggggtacaggatctcgggcgcgttgtcgttctggtccagcacgaacaggttcagcgacacgttgctgctgagtggagggttcccgctgtcgctggctgtcaccagtagctttaagtctctaaattgctcgtagtcgaaggatctcagcgcgtataggacgccagtgttggagttgatagagacgaaggaggacaggggcgccccctggagagtgtcctcggtcaatgcataagtgatgcgggcgttgttgttgctatctgggtcctgggctgtcactgagaagatggaggctcctctggggttgttttctggaatgtaggcggagtaggataaatgagggaaggtgggtgggttgtcattgatgtcaatcacatgcagggtgatgtgagtttctgtggacagtggcgggcttcccccatctgaggctctcagactaatgttatattctgatatttgttcgcggtccagggatgtggccgtcactaagcggtaatattgatctattgatttttctaacttaaatggcagatttcccaggacaaaaacttcaacctgcccattctgcccagaatctcggtcatgcacgtcgataagagcaatttctcttccaacggtgccctcttctgggactgagcttgtgagagacgtgattgtaatttctggagcattgtcattcacatccagaaccgtgactagaatcttggctcttgaaagaagacctggtccatcctgtgcttcaattttaatttcatagaacatggcatcctcataatctagactttttaatattgatacttctccactcactgagttaagatggaaaatctcagcgattttcccaggcattttatctagaatataagacacttgagcattgaatccctcgtcagggtcagtggcattcaccgtgagcagccgggtacccacaggcacgttctcccaaacactcacacggtactcaggctgagtaaacattggtgggttgtcatttgcatccaggactatcacttggatgtgcaagttgccagagtggacagggtcgccaccatcagaggcaaccaggacaagctggtgaatttcttttttctcacggtccagggcccgctccagcaccagctctggatacttggccccctcagagacgctattcacagccagagagaagtagtcattggggctaagcttgtagttctgcagggagttaatgcctacatctgggtcaaaagcagttttaattggaaatcgggttccaggaaccgttagttcaccaatttttatttccaattcctctgttgggaaattaggagcattatcattaatatctttaatttctatttctacttcaaaaattttcaatttatcctcaaccagaatgttaatttttaccagacacagcgggatctgagcgcagagctcctcccggtctatcctctccgcggtgaccaagctgccgctttgcggattcagagagaaaagctgcgtcctacctctggagacgatgcggactccgcgctccgccagctcccggggctctagccccaggtcgttagcgatgttgcccacgaaggaacctttatctagctcctcagacaccgagtagcggatctgaccggatcctgtttcgcacagcgtccccaggagcgcgcacagcagggccagtcctctgccatttcggaaactcaggcaattggtcatttccttttcggtgaatcgctttctctgaattcggttccagtttcctacgacggactccaatcttattttctcaagaaacgaagtcttttacgggcctaattcacaggtcaaacagctggttgactaagaggtgaggttggcagccgccccggatcttctgagtctgatttgctggttctttgcattttaggagcaaggaaatggtggactagttctccagctgcgttctccttcttgagtggtcaacagcgacactaagaggcctaaccgtttactgcatcctctcagacacattattatttttgaattatccaagatctgaaatccttcttgtcagagataagaggactagtgttgattgaacataattgaatcgatatatgttaaacagtgtcacctcaagttatctttcttgggaatccatgcactaaccttaatgccaccaatattgcttcaaacatagtggagttaacttttttgaattgttcagtttaagaaacacacagtaacaaagaactggccgtaaggaccaacacaactattaaaagacatgaccaccacttgttcttccaccactgaaccttgataatgtgtttattcttatacttactacatttatcagggttatttgataagatatccacctcctctttgacctttccctctctatactcttaactctctaagagctgagacaaggaaaaaaagaaaagaaacacacagaaatcagccatatttatacattatatttctttaagtttgttcttggtgacctgataacttagtttcgatatttgttgttatttaatattcattaaacaaacacataattaggcatcagacaatatgtttggggatttaaggtgaacaatatagacacagtagcttccttcacagagattataaggatataaaagcaaacagggaattgcagtgtactgagataattaccataatgggagaagccaagggggttaggggggccttcaattgggcctttaatgttagcaaacgctttcccaggaaacatgagaggagtggatcagtgaaaaggcctggatgtgggagagaacagcatgacaatgcctaggtgtgagagagaaatcacagaccttcagggtactgaaagaagtttcctttgtttaaatctagactgtaaggatgttttttcaaaaccaactgaaactagtagaaataagcttttatgttccagaatctctttccccataagtttccaagcacagaaatataaatacaatatatttgtcgtttcaatcatgatgcattacatatctatgcataagacatttattcttgtggagttactacacacactaaaaataactttgctttaattttcctgtttatactttattattcacttacaagtaaagctattatgacatattattccacagtgagttccaattttactcatagacaattatgtaatagtaaccaaaacaacaccttgtctcagaaaattttttcttgatcaaatgcaacggaaagaatcacagcactttgagaaatatggtatcattcaataaaaggctcaattggtacatgataattttcaaataaaaataaaaaatgatgccagttacatagaacattagtgtgcttattattctctgttattaaatacataaccaacatactaaaagccaatataggaagaggaatgggaaaagaaaattgatcagaggggcactgggattgggtgagggattgggaacatttctagcagctattgtgagtagaaaccttgagaagagagatgtataaagaagttggttctgggcaattgtatgatatgaatcttttgtatcttttctttaagcaaaactatattgaggatatatattattttaaagattaaaatacagtatggttcccacgtatgagaaagataaaaaaaaaggagaaacctgtttattaccactctacagctttattatagagcagatgataagtcagtcacttcttcaagaagcata

SEQ ID NO: 318344 - DNA, 4001 bp, Homo sapiens
gtaggctgtaggacagccaggcattctgacctgagtctctgtccactgccaccactttggtcaccaggtagccggaatctgcggagcggggtgccagctccacaccagtggagccatcagtagggaaggtggggtacaggatctcagggacattgtcgttctggtccagcacaaagaggctcagtgacacattgctgctgagtggagggtctccactgtcactggctgtcatcagcagctgcaggtctctaaactgctcatagtcgaaggagcaaagagcatataggatccctgtattggagttgatggagacataggaggacagaggtgcaccctggaaggtgtcttcggccagggagtaagtgattcgggcattgtcaccactgtcagggtcttgagcagtcatagataagatggaggctcctctggggttgttttcaggaatgtaagcagagtaggaagcatgagggaaagtgggtgggttgtcattgatgtccatcacttgcagtgaaatatgagtttctgtagacagtggaggagttccctggtcagtggcagttacagtgatgttatattctgagacttcttccctgtccagtgttctgtgtgtcaacaaccgataataatttccataggtcttttcaagtgtgaatggcagattatctggaatagaacatgtgactaggccatttcctcctgagtcactgtcatgcacgttgaaaagtgcaattactgtacccggggaagaagattcctggactgagctggtgagagatgtaactgtgacttctggtgcgttgtcattttcatccagaactgtcaccagtaccttgcttctagctcggagaccaggcccatcatgggcttctacatctatgtcatagaatccagagtcctcataatctagaccccccaatattgttatatccccactcagagaattcaactgaaatagctgtgatattttgtctcttactttccggaaagaatacgtcacgtctccattggctccttcatctggatcagtggcttttacggtgagtagccgagtgcctacaggaacgttctcacgaacacttacgtggtactcgggctgagtgaacacgggagcattatcgttggtatccacaagtattatgagaatcctggcagtgccagagcgaaccgggtcacctccatcgaaggccgtgagaacgaggtggtgaaccgcctcttcctcgcgatctagagcgcgttccagcaccagctctgggtacttaatcccatcggccccactttgcacgtccagggaaaagtaaccgtttgagttgagctggtaaccctgcagggagtttacacctacatccggatcaaaagcttcaggaagaggaaatcttgccccaggattttcattttcagcaacttttatttccctctgttctgtcccaaaactgggtgggttatcattaacatcgattatttccacctctacccgcaaaatcttcactgtatcttctagaagaatctccaggtttgtcacacagtttggagatctgtcgcagagctcctccctgtctatcctacccgcggtgaccaaggtgccgctgcgcgggttcagggcgaaaagctgcgtcctacctctggagacgatgcggactccgcgctccgccagctcccggggcgccaaccccaggtccttggcgatgttgcccaccactgagccttcttcctgctcctcaaacaccgagtagagaatctgttcggccctgatttccaccagaacccccaggagaaggcagatctggagcagccgggtgtggtctgggcgagcaggaggcgccgccattacaaccccgccgcggagtcgcctgtgcttcggttttccctctgtcgaggcctgaggagccccaggatcttctgggtccaaaataaagtgcattcacagccagagctctcagggcttccgcttgaagctttcataaagctccagagccagtgctttgtgctgcagaaatcttgtgattctgattaaatttctggtttgtcttttccccctgattggtgaacagcgacacccagagtcttaacctgttactgcaatttattcttggttaaaaaaagtttattttttatacacttttctattcctatttctcccaagataataaagtcaaattcctgtttttgatttgcaatgaaaattcaagaatgatccaagtcttcctgtacaataaactttatgaagttatttattttcttagagaaaatatgacgatttttttcctaagatgtgttcttcctcttttcagttttcacattgttcatccccacagcccattctcagtatagcgtattgtgtgagggacataattatctctcctaaagacaaaggtggacttgaaaaatggatgagacagataagtgaaaagacagtgggacaggaacttggaggtctggctttagtcccaatttatgcagtaacaagtttcctcacaggagttgaccctctagaacctggggcaatgcttcaattcccttgcaaaaaactcacctactgttcaagagttagccttaccctgtacaaatgagattgacaaataggataataggtttgggaagagaatttgctccttaattttgtgtacagtagattcttggccacaagctatgcatatgactatcttgttcacaatgtgttctcaatctttagaacaatacctttcatagagtagtaatttttatgaaacctttcaatgtttcatgaatgaccagttcaaatgcaaagcctaaaacaatgggtaaataactctgatcttaaaaataaaaaagaaataaaaagaaaagttagactgaataactataaagtgcagataatagtttagtgattttttcacatgacacattcagtattattttacaatttctaactttactttagctctcattttagaaatagccagtaaaaggaaatgttttggtagccgaacatggattatcattgcatgtgccatcgctttctttcttatgaatacttacagtaatttactaatctgtgaaaatttgagataaagcagtacatcagttcttaagcttattcctcacttaacaattagcagtagaaatgactcatacaaaagggcattagctatacagaatttaaaaaccctcagactttgagagagtagattaaacgtgtttttcacaatcctcaaagaccgcacaaactgcggatgattgagaggtgaaataagatgtttggaaataaatttgacagtatgcattaaaaaaatctcaacatgtttatagatttaactaattcctcagaaatctacactaaagaaacaagaagtatggaaaacgctttataaacccaaatgttcattacattctttgttttaatagagacaaaatagaaagagcataaaaacaaataatttaggaatggttaagaaaattatgaaatatcattgactgaaattatagagtgggaataatattgactcaaagttagtgatgcaaatataaaattggacaatatttgctacttgtgatgagacaaagtgttaagagtcttaataattggaaggctgtattaaacatacatgttgctgcaaaaagacaaactagaatgtaattgatgaagattacattaattacataattacattaatacataattacatcaattacataattaatgtaattgatgaactttaacttgggtgggaagaactctaaatacatttataaagagctaagaataaaatgacttgaaaatatagtattgcatatcaactaagaaaaggcactgctattactaagtgttaacatctaggaaacaggtctctttagcaagatttgccaaccatacagaaatgccaacagtaaagattgaaaattaaattgccaagactactgagcaatcaagaaagcaatctccatctatctagtaccccctcccgcagtagataccatcactagaacaatgaaagaaaatcaaaattacttatacaccaatgaga

SEQ ID NO: 318345 - DNA, 4001 bp, Homo sapiens
cctgtcggccacggcaacggtgaccgtgaaggtggctgacagagggggctggccatggtcttcgacggccaccacgaggctctgcttgagcgcgtctctgtccagcagggctcgcgctgtgcgcacctcgcccgtgtgcagcccaaccgcaaagagtcctggctcgctggccttaagcaggcggtaggacagccaggcgttctggcctgaatctttgtccaccgctaccaccttggtcaccaggtagccaggttctgcggagcgaggcgccagctccacgcccgtggaaccgtctgtggggagggcggggtacaggatctcaggcgtattgtcgttctggtccagcacaaacaggctcagcgacacgttgctgctaagtggagggttcccactgtcgctggctgtcacccacaactgtaggtctctcaactgctcatagtcgaaggatctcagagcatacaggacaccggtgtcagagttaatggatacataggaggacaagggcgccccctgaaatgtgtcttcagccagggagtaggtgactcgagcgttgtcgccgctgtcggggtcatgggctgtcacagagaagatagagacacctctgggattgttttctgtgacagaggtggagtaggaggcttgagggaaattgggtgggttgtcattaacgtctgctactttcaaggggatgtggctttctgtagagaggggcggggttccatggtccatgacggttaaagtgatattataatctgaagtctcttctctgtccaggtccctagttgttaataggtgatagtaattatcaactgacttctccaatttaaaaggcaaattcctaggaatagagcatgcaatctcaccattttctccagaatcaccatcatgtacgctaaacagcgcgattacagttccgggaagacagtcttcagagatcgaactggtcagagaggtgaggatcacttcgggggcattgtcattcacgtcctgtactgtgaccaccaccttagcgctggcaacaagagcgcctccatcctgagctaccacttccatgaggtagaatctggattcttcatagtccagtgattgtagagttgagatttcccccaggttggaatcaagttggaaagtctccgaaattttttcttcttcattgcgaaaagagtaggtcaatttcccgtttattccctcatctggatccgtggcggttagcatgagcagccgagtgcccacaggtatgttctctggaacactcacgctgtactcggatggggtgaacaggggcgcattgtcgtttgcgtcgaggaccgtaacacggatgtgcgtggtgccggagagtaccgggtctccgccatctaaagctgtgaggaggaggtcgtgaacagtctctttctcgcggtctaggggctgttccaacaccagctccggatacttttgtccatcagttccgcttaccacatccagagagaagtgcagattggagctgagctggtaactccggagagagttcacacccacatccgcatcccgcgcgaagggaagcactaaccgtgtccctgcagccgcattttcattaacttttacttttaactcttcatcccggaaacgcgggaagttatcattaatatcgattatttctacttctactccataaattttcattttgttctcaaccaagatgttaaagttcaccacacacagtgggctctgagcgcagagctcctcccggtctatcctgcccgcggtgaccaagctgccgcttcgcgggttcagggcaaaaagctgcgtcctacctctggagacgatgcggactccgcgctccgccagctcctggggctccagcccaaggtccttggctatgttgccgacgaaggagcctttgtccagctcctccggcatcgagtagcggatctgcccggatcctggctcgcacagcgtccccaggagcatgaagggcagcagcagctctccgcagccccagcccctaggtggactcgccattgccttctctctgcccaattttctcttagttctggttcagcctgctgtttccttatttatctaaagccgatgggtacatattccctgacgaaaatgggcgtggagcgttggcttttcgtaggagcttgtctggtctgtgtgtttagtatggagggagcagagtcgggtcgcctctgcggcagcttctttcccactttggtcaacagcgacactcagagtcctaaccagtgactgcatcaaattccatttttatttctcctaagtttagttataattttatttctaataatgttgccatatccttaatgtttaactgtgtagcgttgtttatgaccgttaattcagctttaattctgaatagcaagacttccacaatccctgagatcaatatgattattagatctcaataccttacaaaaattttatttaatgcgtcatcgggggagcctatgtcctttatttacctcttatctatatttagtccattaaattaggacattcaaattcttacctttgtaggattcaagatttcatctccttattaggataaatttaggaaaacgtgcttatttgcatataagaataccaaggaaacaaacccagttctccatgcacctttccaaacaggcctactgatttatgtaagttatattagctgtcatatgcagaagaaataaagatctttgttacttgtgaggactttgagaaagtctctccactatctcagacagcgtttgagttgggttaactatgcatttttatgtttttctattaccatgttcaaatatttgtagttccagtgacaaccagtatagtaactgtggaggatggggttttatttcatcatccatgcaggaaagcatgagcagatacttgtcgagaagtactgagtgacctttctatgttgagacagatatttactgctatcatctttatatgacaacagaaatagaaaaacctcttgattgaaaaaaatggacatttcagaaagtcattttatttaataacactttcatagaaaactaagaaaataaaaattctatataattaggaaattcaaaagcaaagttttaagtaatattttgtagaaaatgatgtgaacataggttgtaagatttttctcaatgtgtagtttttcttaagagcaatttgttaaaatgcatgttagagaatgatttctcacatttgttaaatgcactctttctagcagacacctcagacctcaaacattgcctgtcctttagaaatacatttgtgattccaagacatttagcttactgagtgttggtcttcaagtcaatgggacaatgtcctacccatgccctgtgattaacaagccatgccattatgcaaaagtctttcttctttgtttcccaatttccaaagcctactaaaatgaagactctctttactctgaagtattatgattctaagaggaagtaaaactaaaatttgaataacaaagagcctgaaggtgaaactaattgcctaaagtctcaatagcaacaaatctgcagagagaagtaatgtaaagatgaggaagaaaaagaaatacagtgcaatatctcatgtgataaaggtttgcaatcatgggtaaataaatctcacacttcagagagaaaacacttaaaattcagttagataagattaagacaattaaggcacaacattggccaaatctaactcacagacaaagaaatacgcagtggaacttcctacccaaattaggtgaaacaataaaaccagaagtgaaaataaattaattaaagctcaccttcaaaatagtatctgaggcaaaagggaccccagcggctccatgatttgtattttgttcccaagaggcattgtcacagacgagatcttgcgcgggaaccaattccggggttatgttcagaaaattgaactctgtcttggctgattgtgaggcaacacacaggttgtaggaatagggcaatgtaccctcactgtaattggggagaaccccaggtccaggcttggag

SEQ ID NO: 318346 - DNA, 4001 bp, Homo sapiens
cctgtcggccacggccacggtgagcgtgacagtggcggagagagggggctggccgtggtcctggacggccaccactaggctctgcttgagcgcgtctctgtccagcagggcgcgcgccgtgcgcacctcgcccgtgtgcaggcccactgagaaaagtcctggctcgctggccttgagcaggcggtaggacagccaggcgttctggcccgagtctctgtccaccgccaccaccttggtcaccaggtagccgggctctgcggagcggggcgccagctccacgccagtggaaccgtctgtggggagggcggggtacaggatctcgggcgcattgtcattctggtccagcacaaacaggctcagtgacacgttgctgctaagaggcgggtccccgctgtcgctggctgtcacccacagctgtaggtctctcaactgctcatagtcgaaggagcgcagggcgtacagaatcccagtgtcggagttgatggacacgtaggaggacaggggcgccccctggagggtgtcttctgccagtgagtaggagacttgggcgttctggtccacgtcagggtccagtgcattcacagagaagatggaggcacccctggggttgttttcaaggacatagactgagtaggatgaatgggggaaggtgggcgggttgtcgttggtgtctgccacatttagagagatgattgtttctgtagacagaggtggtgttcctttgtccgtggctgtcacagtgatgttgtacaagaatacctcttcccggtctagagctgcatttgtcactaatcgataataattgccaactgatttttccaattcaaatgggagacttctcgggatggaacaggttaccaggccattcaggccagagtctcgatcgaacacttgaaaaagggcgattactgttcctggaggtgcactttcagcaattgttctgcttccagatgtaacaaccacttctggtacattatcattgacatccaagatagttattaagactttcgctctgtctcgaagacctggcccatcccgggcttcaacacccagctcataaaaactcgagtcctcatagtctagatttgcagaagttgaaatttctccagtcaaaacattcaaacagaaaatttgtgagatcttttctgtaatcttcacaaaggaataagttacttccccgtggactccttcatcctggtcggtggcagtcactgccaacactggtgtgcctactggcaggttttcaggaacacttacacggtagacaggctgagtaaacattggagtgttgtcattcacatctagaactgttaccagaatttgggcgacgcttgagcggacagggtcgccgccatccatggcagtaaggaccaggcggtaaacggcttctccttcccggtccagtgtgccctccagcaccagctccgggtacttgggcccatgggcttcgctttgcacgtccactgagaagtgactattaccactgagcttaaatccctgaagggagttcattcccacatcagggtcatagacctccattagtggaaaacgagaggatggagctgcgttttcgagaattttcacttccaattcttcctttaagaatcggggtgtattgtcattaatgtccactatttccacttccacgggataaagattcagtttatcctcgacaaggatgttaaaactcaccagacaccgcgggctctgagcacagagctcctcgcggtctatcctacccgcggtgaccaagctgccgtttcgcggattcagagagaaaagctgcatcctacctctggagacgatgcggactccgtgctccgccaactcctggggctccagtcccagatccttgacgatgttgcctacgaaggagcctttctccagctcctcgggaatagagtagcggatctgcgctgccgcggccccccacagcgtccccaggagcgtgaggagcaggacctgctcgctgcgctgcggatgcctctgcggaggcgccattactggcttattaggaacttctctgggattaagaagaggaagaacagatctgcatcacttttgctcttctcagaaatagcggtgaaggtccttcaacaagcagagaccggatgcgaagcgtttcaggtcagaatttctgcacagctttcctgctttcccgtctaatttgctttgttgttggaggatgtaacttgagtttccgttgattttcttgcccaggttggtcaacagcgacgcttagagtcctaacttaatactgcatcgttttgtgaaactatcacacagaggattttatttctgctaaatctgcagagatgacactcataatatttccctccccaagataatgaagcatttagaagagtgtaagagattattttgaataattttaaatgttctctgaagtttaccattcatttttatgaaaatatctcttaggaccttggggaacagaaataatattacaatcttctgtaaattttgaattatcatcacatttcaccaccatttatgctagtcccattttcagtaagggtaccaacaaccacaaacacttttttggagacaaagtctcgctctgtctcccaggctagagtgcaggggcacaattatagctcattgcagctgctacctcctgggatcaagggatcctcccacctcagcctcccgagtagctgggactacaggcatatgctacacaaacacattttgaaccaattcattacagtgcccattacaagagttgccattttagatgccattatttcttttgattagcatagaagttaaaaactgccctgacataggcaacatctgtgtatacttttaaaaacatgcaaagggaagtaaaaatattatatacaggttacattaaaaatgtgttaagatatacataatgtttcatatattttaggattgactgcattaaaactaagtaaaccacttaattgtgaggatttgggtctaattctggatagatatgtctgaaaatgacagtgtgagataatactgtattaaaaatgtttcagattatagtgtattaggattaagaaaagtttcaagactatcaaaaggaggctttctatgaaagaacaactgcaacacagatattctacaggaaattctacaaagaatttcctagacaccctactctacaccagaaaatcaataaaataatgtaatcagggaatatttaatctgtattctttttatctctaaatcaatgaattgaaacccaattatatttatggaaggaaaggtttgaagaaactcaccttttgcaaattgcctgaattagaaggcatttctggattgtcattactttcaaaccaagaggcttcatcacatagaagatcttgtggtgcagcattttcagcctttatattgagaaatttaaactcggtgtttgaggaatgtgaggcagcacacggattgtaggaataaggcaaagtcctttcgctgtaggtggggagaactccaggtacagtcttgaagcagacaccaggctgaaagtagccctcagtggcgggtctggaggagcatcgcaggcgcagggagattgccagaatcaccgcgaggaggaagagcactgagatcaaggccaacgccactactaggtgaaactgtagctccgcctgagggtcagagggagtggggcggtcgctaaggtcaggttgtatctcttgcaagctatctgcgaagattaggtgcagcatgacggtggctgaaagaggctgctgtcctccatcacgcacagtgaccagcaggcgctggcgggcggcctccctgtcgcccaaggtacgcgccgtgcgcacctcacccgtgcgcaggcccaggctgaacagcccgggctcgctggcctgcacaatgtggtaggacagccaggcgttgtatcccgagtctgcgtccaccgccaccaccttggtcaccaggtagccaggctctgcagagcgcggcaccatatcgaagagcgcagagccttcgggccccagagctgggta

SEQ ID NO: 318347 - DNA, 4001 bp, Homo sapiens
gctcgctggccttaagcaggaggtatgacagccaggcgttctggcctgaatctttgtccaccgccaccaccttggtcaccaggtagccgggctctgcggagcggggtgccagctccatgccagtagaaccatctgtggggagggccgggtacaggatctcgggcgggttgtcattctggtccagcacgaacaggctcagtgacatgttgctgctgagaggcgggtccccgctgtcatgtgcagtcactcttagttgtagttctctcaactgctcataatcaaaggattgcagcgcgtacaggactccagtgtcagagtttatggagacataggaggacactggagccccctggatggtgtcttcggccaaggaataagtgatctgggcattatcctcactgtcgtggtcctgtgcagtcactaagaaaatggaggcccctctggggttgttctcagcgatgtagactgagtaggatgagtgggggaaggtgggtgggttatcgttggtgtctgccacctgcatgaatatgtgagtttccctggacaagggaggagttccaccatctgtggctttcagtgtgatgttatacaaagagagtgtttcccggtccaagtttttggttgtgaccaatctataataattatctattgatttttctaatttaaaaggtaggttttctggaatggtgcaggtcacctcaccattctttccagaatctctgtcttgtaggtagaaaagagcaatgactgtcccaagaggtgtgtcttcagggattgagctacttaaagacgtcatagtcacttctggagcattatcatttacatctaaaactgtgatcagtacttttgcctttgtcagactaccaggaccatcttgagcctgaacctccatttcatagaaggcagtttcttcataatctaatccttctaaagttgatatttctcctgtaagcgagttcagatgaaacatctttggaagtttaggagttattttccgaaaagaatatgtcacttccccattgactccctcgtccaggtcgatagcatgtaccgtgagcagtcttgtacccactggcacattctcggggacagttacttggtactgaggcagagagaagacaggcgtgtggtcattcacatccaccactgtcacctggatgtgggcggtgctggatcggggcgggtcgccgccatcagaggctgtgaggaccaggtggtgaacccgctcttcctcccggtccagcacccgctccagcaccagttccgggtacttagtttcatcgtctccactttgcacagccagggagaagtggcgattggggctgagctggtaactctggagggagttcgtgcccacatctggatccccagcctcgcttaacggaaaccgaaccccaggagctgtattctccattatttttacatttatttcttccgtcaagaatcttggaacgttgtcattaatatctattatttccacgtctatagggtaaagattcattttatcttccatcaggatgttaaagtttaccagacaccgcgcactctgagcgcagatctcttcccggtctatcctgcccgcagtgaccaagctgccgctgcgctggttcagggcgaaaagctgcgtcctacctctggagatgatgcggactccgcgctccgccagctcccggggctccagccccaggtccttggcgatgtctcccacaaaggaccctttgtccgtctcctccgacacggagtagagaatacgtcctgcccaggcttcccagggggtccccaggaggatggagagcaggaagaatcctctgtagtccccgcccctcggctgagccgccatagtcgtcctgcttctcttgcttaggcgccgatctcgggaagtgcttcagaatgcgggtgtatccgggtggacccctctgtcttaggaaggggagctcagaatccagcaggatagaggcttgagtttagtgcagcctggaagagggcttatcgcaatctgtcgtttctctgtgctgtaaaactcggtggtttctgtgggatctctcgcaccatttttccctggttggtgaacagcggcgctgtgagtccttactaagttactgcaccacattgatgcacacaatacactgatttcatagaaaattgtttcatctttcaaaatttccctgttagatttctttgctctagatatccctgataattaaaaatccattttaagacactgaattaatgcaacagtgttcatggaccggtgtttgataatcttagataatttttaaaaaactgctttgccttgcaactttcaagtgactcttttgggcactgactcacacgttattgcacatgggaaaatcagttattgaaggcaaaaaggtaaattttatttaaatacatatgaaagattttacttagaaaatatttacatcagtgtatataaattttaattaattcagtattaattgaacacatatgttctagacaccatgatgcaagattcagaaagtcaaaattgttgtaaaatatatagacctattttaataaatttttgattgtatagaaccttagagacggtctaacaccttcattttaaccgtttaaaaaatgagagggggggccaggtgctgttgctcacgcctgtaatcccacactttgtgaggccgaggcgggcggatcacctgaggtcgggagcttgagaccagcctgaccaacatggagaaaccccgtctctactaaaaatacaaaattatccgggcgtggtggcgcgcgcctgtaatcccagctactcaggaggctgaggcaggaaaatcgcttgaacccgggaggtggaggttgtggtgagccgagatcacaccattgcactccagcctggacaacaagagcaaaactctgccaaaaaaaaaaaaaaaaaaaaaagaagaagaaagaaagaaagaaagaaagagggaattgccttgccttgttcctgattattgattatatagtagtagaacaatgtcggaatccaaatattctcactcccagtcttgtgagaaaaaaagaaagaaatcgttgtttgtcttggctgcagcaatcagctatagaagcaacccattttctacagaaggcagaaatctgcagagatcctactgggctgtgaattcataagaaactggataatggattggctgattcttttcattatgcaattcaattcaagtcttcatcctagtatgcaattcaaatcttcatcctactctattctagtgtaattgagaaaacagggatctctagacagcatttgagcaaaatgcaggactgtcctgacaggatccttagaggtactcgtctctccactgatgttgatagagtaaaactaaattattgatggatccgaggctaccctctgctagcagaaagaaaagaaagctcctttcacatagttgcagaataaaagagaatgacctgctctggaataaagacctggcaagaaacagtcttggtttgtaaattcttctaggtcctggagagtagttggtggaaccaggaggagaatccagaactaacactaagaaagcttaacttcgttttgtgggaggctcctaagtaacctatttctgctttctggtggcattgctccagaatacagggaacactttgaaggacattctgttttgatctatcaaaataatccatagttatctttgcattcacaaagtagataaattttgtttaaaggaactaatagaggtattatagatgaattctgtaaactggagttaaattctatttgtttaatagtacttttgaacttcttgttgaggcaagcaaagtgtatgattattaaacaatgtaagcacttgtagatattttcaaacaaactttcatgtttggaggttatagctctcaatgtcttgatccatttttacctgatgcctcaaaattcatagtttcatctcacatttgtttcttattctactgttttaaaaaagtctcaattaatttatagtgtcttggtaccttct

SEQ ID NO: 318348 - DNA, 4001 bp, Homo sapiens
aaggcaattactgtcccgggaagagaattttctaacactgggctaaacaaagacgtaatgatcacttctggtctattgtcatttacatcttccaccgaaatgagcaatttggtcctccccagaagtgcccccacatcttcggcttgtatttccatttcataaaatgaacattcttcataatctagactttttgctattgatatttccccagtattttcattaagctggaataacggagtttgtttttcattaattttccggaatttgtatgccacttttccgttgattccctcatccgggtcgctggctgttacagtaagcagccgcgtgcctgggggcatgttctcaaggactttcactcggtaaatcgggtgaggaaaaaccggggcattgtcatttgtatccaacactgtcacgtggatgcgcactgtgctagagcgaggcggcttgccgccatccgaggccgtgaggaccaggtggtgagcagcctcttcctccctgtccagggcgcgctccagcaccagctctgggtttatggctccattgtctccagtctgcacgtccagggagaagtggtgattggggctgagctggtagctctggagggagttcacgcccacatccgggtcaacagcttctgggagtggataacgtgctccaggaaccgcgatttcgttaatttttacttctagatcttcgacctggaattttgggttattatcgttaatatcaattatttctatttctaccccaaagagttttcctttatcctcaaccagggtgttaatatttatcagacaccgcgggctctgagcgcagagctcctcccgatctatcctgcccgcggtgatcaagctgccgctgcgcgggttcagagcaaagagctgcgtcctacctctggagacgatacggactccgtgcttcgccagcttccgggggtccagccccaggtccttggagatattacccacgaaggagcctttgtccgtctcttctggcacagagtagcgaatctgtcccctcccgatttcccacagcgttcccagcagcgcgcacagcaggatcagctcgccgcgtctggggcgactctgtggagcggccattgttgttttgctgcagaatcctctcagaatcttcactgtgcataaatgggtcttatttagtttcttgccgcagctatggagatgacaatcctccggaaacctggagtgcctccaaacaggggtcgggtttcgctgcagtccagcagttagtttgtggcatctgcgggtcttcgtgaggtgtgagatctgagtgttttcggttgcatttgtcttccagtaggtgaacagcggcgcttacagtcctaaatagttactgcactgagatacagattacttctaaatgtaatactctactagattactgagaaaaaaaaatcatttgcttattactttgttttgaatttatttgatttatccgtaaacccatattttaaaagaaacagccaaagaatgtgagatgaaggttttatttagtgttattaaatgatcagattagatcagaatgatcagattgtagcatcggattaaattactcacatttctgcaatacatttggtcttaaaaaaaacatgatactttcatttcccattgtgctctaagctttattgtaaatgtctccaatatatactaacaaataactaagaacttcagttgtcaccagaaatgaatttatcttgagactaaaatagacctactggagatgactgactcagaaattgttttatttggtttaaactacttaatcattttacaagctttctatagagttgttgcttttaaattattcttctaaatgccacttgaattacatgtcgataatattttcaaataaaaattgtggaatttcaataggataaatgcttttaccattgcagttttatgagatattacattgttttgctattttatttacattgtttatatttttctatttgaatacttgaaaggtacagatgaatatatgataaaaagcaaagctccatcccatccctttcaccaaagagatgattaaatttaaagcagacttgacttttacatatattctaaaattaactttacctacattaacactttgatctaaaaaactgcaaaaagtaatgactatataatacttactaagaagccaaaggataagtatgactacaaaaaagtctgtttcccttcaagaccagcctgggcaacgtagcagatgaacttatttcacccttcctttgaagactggtatgatagttttttcactgactaaaactttcttaaaaccactcatgaaatctgaaaactttatattttcctgtgaatatattttcttatgcatatggaaaactgggtagacaatggaaaccataccagttaaattagtgaaagaaaatattttctctactgaaaacagaaaaattagccaggtctggtggcatgagcctgagttccagctagtcaggaggctgatgcagaaggaatgcttgagcccaggagtttgaggctggagggagctatcattgtgccactgcactacagcctgagtaacagacagagactctgtctcaaaaaaaaaaaaagaaaaaaaaaagaatcgaaagacgtttccttctttcagcaatttgtaaagtggccattaactgaagcagttgcttagatatacctagcaaaaggctcatataatgttccttggtattttgtatatattttgtatgcacaccagattggcagttttcaagactatatttctttcctagaggtaggagaatgattagaagacctctagctatattagtttagggctgcagataaggcagttacacattatatattagggctgtgtgtgagagggacaacagacacaaaacattgtcttttctttgatgaaggatatagaatgagcttgaatacagattaatcctgaaactcctatgttacaagtaaggagaatctgcttttgatcttctaatgagcatagtagacctttttctaagtaaaaggatctctctcacacacacacacacacacacgcacacacagcgtacactgcatataatcacaaggggtccatggacataaaaatccagttgactccttattctaagagcttttgaaacaaaagggaagttaacacaggaaacaaaacagtggactactatggagaccataccagttaaattagttaagaaaagtgttgaattttagcttaaattctttggctttattatttttatatttatggtatatccaagctgaaaaaagtattcatcatatattagtcaacaagaaggaaaatgtataggaaaaatctcattcactttttaggagagagccaacaactgtctaacactttcactttgtggttaaaaccacaccctcattgctttataaatctaagcttggctaaaaaacaaacaaatgttgggccacacaattgctcctactttactcctcctttgtagaatgatatgacagctttttaactgactacaactttcctaaaatgatccatgacatctaaaaattatatattttcctgcaaatatgtatattttcttgtgaatatggagaaatgggtaggcaatgagcattaaattatacttaaaggaaactcacctgatgggaagtcaattcactggaattacaaagtggaaataaggccccagatgaatcaccgcaaagtatgtcttgtcctgaactcaactgctcactacattttaggaaattaaactccgtctttcctgtatgtgcaacacatagattgtaggaataaggcaaagtcccctcgctgtagttggggggaaccacggattcggatttaacacagagaccaggctggaagcagctccaggaggcggggctggaggagcgtcgcaggcgcaaggcaatggccagaatcatggccacgaggaagagcactgagatcaaggccaaggccaccactaggtaaaactgcagctcagcctggaggtcagaggggtc

SEQ ID NO: 318349 - DNA, 4001 bp, Homo sapiens
gctgtcagctatggctactgtgagcgtgacagtggccgagagagggggctggccatggtcctgtacagccaccacaaggctctgtttgagcgcatctctatctagcagggcccgagctgtgcgcacttcacctgtgtgcagccccaccgagaagagccctggctcactggccttgaataggcggtaggagagccaagcattctggcctgagtctctgtccactgccaccaccttggtcaccaggtagccaggctctgcagagcggggtgccagctccacaccagtagaaccatcagtggggagggcagggtacaggatttctggggcattgtcattctggtccaaaacaaacagtctcaatgacacattgctgctaagtggtgggcttccactgtcacttgccgtcacctgcatttgcaaatctctaaactgctcatagtcaaaggagcacagagcatacagcacaccagtgtctgagttaatagagacataggtggagagaggagacccttggatggtatcctctgccaaggagtaaataactctagaattctcattgctatcagggtcataggcaatcacggagaagatggaagtacctctggcgttgttttccgggaggtagactgagtaggaggcttgagagaaagcaggtggattatcattgatgtcagtcacttgcagggtgatgtgaatttctgtggacaggggcggagttcctctgtctgttgcagtcaccgtgatattatattctgaggctttttctcggtcaagaatttgggccgtcaacaatctgtaataatcttcttctgaattttctaatgtaaaagatagattctcctggatagaacagacaacttgaccattcttcccggagtctcggtcatgagcattgaaaagaagaattactgttccctgaggtgcgtcttctctcactgggctaaacagagatgtaatggtcacttcaggtctattgtcatttacatcttccaccgaaatgagcacttttgtccaccctttcaatcccccaccatcttcagcttgtatttccatttcataaaatgaacattcttcataatctagactttttgctgttgatatttccccagtattttcattaagctggaatagcagagattgtttttcattaattttccagaatttgtatgccacttttccgttgattccctcatccaggtcgctggctgttgcagtaagcagccaggtgcctgggggcacgttctcaaggactttaactcggtaaatccgttgagcaaaaaccggggcattatcatttgtatccaacactgtcacatggatgcgcactgtgctggagcgacgcggctcgccgccatccgaggccgtgaggaccaggtggtgggcagttgcctcctccctgtccagggcgcgctccagcaccagctctgggtttatggctccattgtctccagtctgcacgttcagggagaagtggtgattggggctgagctggtagctctggagggagttcacgccaacatccggatcaatagcttctggaagtggataacgtgctccaggaaccgcgatttcgttaatttttacttccagactttcggcctggaactttggggcgctgtcgttaatatcagttacttctatttctattccgtacagtttcactctgtcttcaaccaggactttaaagttcaccagacaccgcgggctctgagcacagagctcctcccggtctatcctacccgcggtgaccaaggtgccgctgcgcgggttcagagagaaaagctgcgtcctacctctagagacgatgcggactcggcgctccgccagctcccggggctccagagccaggtccttggagatgttgcccacaatatagcccttttctgtctcttcaggcactgagtagcgaatctgactggccctggcctcccatagcatccccaggagcgagcatagcaggactaatcttccgcggagctggcatttggttggagctgccattgctgcctcgctttggaattttctcaaaaggatctctgtgcgcgctgcttcatcaggttctttcttccaccctgcaaagtatggtgatcttttccttagaagaaagaggctgagttttgctgcagcctgggagcaggtttgtggtatctgccgggttttgtgtagccgcagaactggaaatccggatggagtcctgattttcgcttagagttgatcaacagcggcgctcagagtcctaagccgttactacacccactgatgtgtaacattatatcagatggctgataaagaaaacactactctcttctaattatgattttagatttctccaattgtttcttgcatttgtatttcaaaagcaatctattttttagatatctgagttgtaaataaagtggaataaaatttctgtaagtgtattataaaatcacaaaccattgcttaatattaatttattcttattcttggtagaactttgcactctatttctagatatgtaaactattataatttcctttttatgatgcttcaattttttctgtgtatcttaacaattttctgaagtaatttttatgtgcaatcttgtttggaagtacattcatttttaatttttatacctatatatttgtaaatgtaaaatatataattgtattaatacatatataaggatagattatccactttgaaattattttctggggtttattttgatgataaaattcctggaaaaacgtttattttaaatttttgtattataaaagtaatattaattcagcaatagttacagatgttctcgcctaatattgctaaatattaacaggattaaagttggaaattttcacatttttgtaattgcttaaacttttctgctatttcaaaaatgcttagttttttaatgtgaatatgtaatgcatgcacagactgtgtttcaatgattcaaatgcatatacactgaaaagcaagtttctattttaatccttcatcaataaattatgcaattttaaagtggtcttaaacattattctaagcatcacttaaacttatataataatttgggaaaaagaacacaaaatatacaacaaagaaaactactgaaaggttaaaagtaagtggtattataagaaatctcagcactttgtaaggaacccatttactgaatcacatactaagggaaaccaagcaaaagacttataccatgtaatgggagctttgtatgtacacaagactagtagtttttgtcttaaaaatggaataatcctgtattcaccttccatcctacaaggatgttgagaaaacatccagtcatttatatttaaagctccaaacgataagacaaatccggtgtctttttccccttcttcaagaatatgtcaggattccgagcaagagaaattcaggcaatagcatttccttttttttgtaagtttcttctggtaattatatagaggtggaaaaggattttgcatccaagaaaacctggataaacttagaaaattatttggatgatttggaccttctaagttcagtgaatcagtctctctctttctctctcatacacataacatgtagtatttttcttcttcttcctctccttctccttccttttttttgagatggagttttgctcttgttgcccaggctggaatgcaatggagtgatctcggctcaccgcaacctccacctgccaggttcaagcaattctcctgtcttagcctcctgagtagctgggattacaggcgcccgccaccacacccagctaatttttgtatttttagtagagacgggttttcaccatattgcccaggctggtcttgaactcctgaccatgtgatccaaccgcctcggcctcccaaagtgctgggattacaggcatgagccactgcacccagccaacatatagtatttttaataaaattttaggagattcaaaaaatcataaatccattaggtaggaataagaaagcatatatgaggaacataagaaagagatgaaaactacc

SEQ ID NO: 318350 - DNA, 4001 bp, Homo sapiens
tacctcttgcaggctatccgcgaagattaggtgcagcgtggcggtggcggagagtggcggctgtcctccatcacgcacagcgaccagcaggcgctggcgggccgcgtccctgtcgcccaaggcacgcgctgtgcgcacctcacccgtgcgcaaccccaggctgaagagcccgggctcgctggcctgcagcacgtggtaggacagccaagcgttgtgtcctgagtctgcgtccaccgccaccaccttggtcaccaggtagccgggctctgcggcgcgtggcaccatatcgaagagggcggagccatcaggccccagcgcggggtacagcacccgtggcgcattgtcattgaggtcgcccaccaacacgcgcaggctcacgttggcgctgagcgcgggggagccctggtccctggcctgcagtgtgagctcgaaggcgcgcagctgctcgtggtcgaaggcgcgctgcgcgaacaccaccccgctctgcgggctcacggacacgtaggacaacagctcccgcggctccaggtcactggccagaatagagtaggagactctgccgttgggtcccaaatccgggtcggaggcgcttacttgtgcaatggaggcgccaggtgggttgttctcagacacgtggaccacataggaggcctgatggaaaacaggtgcattgtcgttgatgtcggagatgtgcagggtgatgcttgtcctggaggaaagggctggtttgcccttgtcggtggctatgattgtgacgttgtagtctgctgtctgctcccggtttagggctccagcaatcaccagcttgtaataattcttcgaggtggattctaatttgaaaggaacttcttcctgagtatagcatgtcaccatgccattttgcccagaatccttgtctcgcacttttatgagggctattacagttccaaggtctgaatcctctggaatctggttagagaaggacatgaatgtcacctctggggcattgtcattctcgtcaacaatttctatttgaacattacagtgagctgtgtgtactcctccatccttagcttccacactcaacacatatctacttgtctcttcaaaatccaatgtgccattggttgtgatgtcgccagtatttggattgagattgaagaggctggtacttattggggaattgaggaaggcataggtgatctctgcattaatgccctcatcctggtctgtggccatcacccgcagcacggaggttccccacggtacgttttcttggaggctaaccctgtatacctcctggctaaacacgggagcattatcattggcatccgtaactcggatccagatatgggtggtgccgcttagaggcgggtccccgccatccatggcagtcaggattaagcgatgagagctctgatgttccctgtctagaggtttttccagcagtaataccggatatttacttccatcaggactttccttcgttgacagagagaagtattgattggggttgatggtgtataacttcagtgaattgccttccacatctgcatcttgagcagaatccagagagaattttaccccgggtaaggctgactcacaaatttctaagtcaatgccttttgcaacgaaacgtggtgcattgtcattaatatcttggattacaacaaccacgtggaaaacattcattgggttttcagcgaccgtttcgaattctagtgcacactcaagtttccttccgcaaatcttctctcgatctatcctaccgttcactaacaaatccccgctctccaaactaacgttgaaataatcctctgcactaacccgcagttttcgagttggcaactcccggacactgagccccagatccttggcaagtttccccacccgtgagccgttggctagctcctctggaatcgtgtatcggatctgctgggagatggccccgcagaacaaagacagcaggaagggaaacagtacctgacttttcatcatttcggcttctctggctctctgcatttcaggaactctccgcggagcttctttcctctgggatgtttttcaaaaagaaatggcagcaccctggacttctgtgatttgagcttaggacttattagttaggcgctcgagggtgaacaggagcagcgtctgtgctcagtgcaccggacaaagcaggaaggcaccctgcctgacgctcctgcagaattgagaagccttcacttccttttggtcgacagcggcgcccagaggttgtcttggaaaactgcacagggcccagctttttatcctcaaagcgcaacctcttgaatctatgtaccctgtctttaatttgctggagggaaacacatactcacattttcccctttacatttcagttttctagtttgtcatcatcagataagggccttcatcatttcgtattcttttttcatttaaaaaattcacaaggtacactgccatttttttcagttttgggggtaaaaaaaaatcttcagtgatttcactatatttataaactctggcatgactgctgtatccaaataagtgaattgataatttttatttatatttttagttgactaaaatacctacctttctgtaaattcattggaataagctcccttatctagtattttaaatctctccatatatatgttatcaattcagtaatacttttcaaaaatagtttttgcaaaaaagaggaaatcacagccttactattatgttatttctcttctttataaaatatagataatctttccagttaagtaggacaaagtctgatattttgttaaaagggccaatttagtgttggggtacacatacatgcttttatgaagtggaatctcatataatgtacatttgttttatgaaaccagtgcttcttttttatatgaatgtatattaaatactctaggctgggtgcagtgacctgtgatcccagcactttgggaggccaaggtgggaagaacacatgaggtcaggagtttgagactagcctgtccaacatggtgcaagccatctctactaaaaaaaataaaaattatccaggcatggtggcgggtacctgtaacgccagctactcgggaggttgaggcagcagaatcacttaactcaggaggcagaggttgcagtgagttgagatcatgccactgaagtccatcctgggtgacagagcaagactctgtctcaaaaacattctctataatgccaattctcagctccagccgacttataccattaatgagcaaaacgagtttgacttgaccactggtaaatattggagaggtattcagagttcttagacacccaattttggaacttattctgtagttccaggcttagaaccagtcttggttcaaagcaaatccctttatttcaaatgcattaccaaatgagatccaactcaacaatttattctactattttgcagtgctcacccatactcatactctattcgaaacagcctattatctgttttcttaagataccttttcacttgtttccttgcatcatgcctttatactttccattccttttactatgaacttctcctccctttctgttgtagtggattcttgcccattcttcaaaaaaataaaaataaatcctttttagtgaaaatgggatgtctgagaccttccattacctgtacaagtaggtggaattgtatgggttccatactctcagtgtattttcatgacacatatgtaggctatgtttcatatagaattcttagaaattatctttgagcatccaaatttcccctgacacagctaattaattttttttctccttacagggaaagtgatactaatactataaacatttttttttctaaaaatgatatgttaaaagttacgtgcctttttcttttgagacagggtcatgctatgttgcccaagtaggtctcaaagtcctaggctcagaagtcctcccctggctatgggccttttaaattctgtgatgtatttccatgtttcagtgagaatacaccttactctgcttacagcttttgt

SEQ ID NO: 318351 - DNA, 4001 bp, Homo sapiens
gctatccgcgaagattaggtgcagcgtggccgtagcggagagtggcggctgtcctccatcacgcacagcgaccagcaggcgctggcgggccgcgtccctgtcgcccaaggcacgcgctgtgcgcacctcacccgtgcgcaaccccaggctgaagagcccgggctcgctggcctgcagcacgtggtaggacagccaagcgttgtgtcctgagtctgcgtccaccgccaccaccttggtcaccaggtagccgggctctgcggcgcgtggcaccatatcgaagagggcggagccatcaggccccagcgcggggtacagcacccgtggcgcattgtcattgaggtcgcccactaacacgcgcaggctcacgttggcgctgagcgcgggcgagccctggtcgcgggcctgcagtgtgagctcgaaggcgcgcagctgctcatgatcgaaggcgcgctgcgcgaacaccaccccgctctgcgcgctcacggacacgtaggataaaatctcccgcggcttcaggtcgctcgctacgatggagtaggaaacttggccactggggcccaagtcagggtcagaggcactgatttgagcgatagaggcgccaggaggattgttctctgccacgtgaaccatgtaggaagtctgttggaaaactggggcattatcgttgacgtcggagatgtgcagggtgacaattatgctggaggagaggggcggcttgcccccgtcggtggctgtgatggtgagattgtattctgggatctcctcccggtccagagcgccgtctgtcactagtttgtaatagttctttgaggaagatttcaaaataaacttggcatttcccaacacttggcagtaaacttctccattttctccagagtctctgtctctcgtttttatcaaggcgatcactgttcctggtggcgaatcctccggtaggggagtagatactgaagtcacaataacttcaggtgcacaatcgttgtcatcaagaatttcaacttggatactgcagtgggctgctagatctccaggatcttttgcttcgatactcagagtgtaactacttgcaatctcaaaatccaaatcatcctttgtcgtgatttctcctgttttttcatttaagttgaaaaagtgtttcacttgttcgtccacattatgaaaggagtaggtgatctctgcgtttatgccttcatcccggtcggtggctgtcacttgaagcacaaagaagcccggcggcacgtcctccctcagggtgaccctgtacacgtcctggctgaacactggagggttatcgttggcatccgtgactttgattcggatttgggtcgtgccactttgaggtgggtctccgccatccacagctgtgaggaccaattgatgtaaactgtgctcttctctgtccagagagtgttttagaatcaactcaggatatttacgaccatctggagtctgtttctcagcgagatcaaagtactcgttgtcattaaggtggtatctttgtagtgagttaggaccaacatctgaatccagggctgggtcaagtggaaatgttgtacctggcttagtggattcgccaatttttaaattaatcttagtctgtttgaatagcggggtattatcatttatatcctgcacaattactgctatgtagaaaatatttagtggattttcagcgacagtatcgaaatccagaacacacagaggctgcttcccgcatatctgttctcggtctattctgtcactcacaagtaagtctccgctttctgggtttactgtgaaatattccttctccgcgctaacccgcagcttccgggctggcaagtcccggacgctgagccccagatccttggcgaggtttcctacgaccgagtttttggccagctcctctggaattgaatagcggatctggactgggagagccccggggaacaaagacaacaggaagggcaacagtacctgcagccaccgcaccagcccgcacctccctgagctcgctttcatcttctggctccctttgctcctttgcccataggaggaataagccttccggggatggcagaatccgggctaaggtcacttttcctgcttttgttttctgtttccgaatctatactggccttctctgtgtggttggtttgtgcaggaagttcccctctaagaggctcccaaacgcttctcttcgttcttttgaccaacagcgacgctcagaggttttctcaggaaactgcactaatggcttgtcaatatttgctaagaacttttttcttttcttttcttttttaatttataaagtcttcatttgttttaaaatatgtgaaatattcatatagttccaaattcaaaagatgcattcagcataggttcttcctttcatctctgctttagatgaggagaaatgctttcacaggggaaatgagtgttaaagtttcttaggtatccttccggagatatgtcttgtatagggcaacggatttttataaatattctgtctccttctttacacaaatgtaagcatacaacataccatattctgcacattgcttttttagttgttatatcttaaagatcatatcagtacatagagagctttcctatttatttcttatagttatctagtggcccataatatagttatctagtagtccgtaatatgaatatacaacaatttgtttaatcaaaattgttatttgctaaaagaaacccactgcccattctaacaaaaacacattttttaaaaaatttgattttaggttataaattatctactgctttcctaggcctttaaaacatgtggcactctcattctggaatatattcctaatgccaacacctgaatatgcttgacacagtttcagaccaattgagcatttccaaattatattttatggcttaattactttaaacaatctctcctcagatgtaagttgtctctcaacattcacttgttatttctgctttctgctccccaagccaggtaactgcatcatatcatattccagcttactctatgtattgcaccacaactttctatgaatacaaaaccatgtagaaactaaaactctcctttgtaagtcaaattgaggcatattccacagtctatcactacaacttccagttatcaaattacactaatttgtgtaagcatatgcattcatgaattttgaattctcacagaacctaaatgaaagcacaaagaacaaaagtgttgtatatcccctacacacaaaatattttccctcatataaaataatcccagagccacatgatgacagaaatatctgaaagcaatttgtagcaatagggatgaggccaccttactaagcagcgtaaatcatatcagtccagaacccaagtaactcaacctttgaaagaggctcacatgatgacaagagaaaagactccaaaaacttatattttccttggaaatcaagaaagtctcaatagtgatgtcatgataagcaatttaaaaattattaaagttactcctagaatctacttatatatgactgaaattagcttggaaatatttctcataatcacaggagtgcaccagaggaatcacacatagtcacttctggtgcatctcagaacagcaacaagaaaatatttgaaatataccagttcattgagaaaatatcctgttaaagttatatctaaaagttaaactcacaaattgccagtattcttaaattgacgttgcctgttataatggaaaataccctttcaaggaaggaaaagtaaacttcaagcaaagcatggtagagtgtgaaaataggaaattaaaaaaccctcagtccagatccaacaatagcttcatgagaaagaatattgtaaatgtgaatttacacaattgccttctattttacaggtctcttgtatcttttcaggaacacctaagagaaaaggaaatttattctttattttactttattttattttactttttggagacagaggcttgctctgttgcccaggctggagtacagtgtcatgatctcagc

SEQ ID NO: 318352 - DNA, 4001 bp, Homo sapiens
gctatctgcgaagattaggtgcagcatgacggtggctgaaagaggctgctgtcctccatcacgcacagtgaccagcaggcgctggcgggcggcctccctgtcgcccaaggtacgcgccgtgcgcacctcacccgtgcgcaggcccaggctgaacagcccgggctcgctggcctgcacaatgtggtaggacagccaggcgttgtatcccgagtctgcgtccaccgccaccaccttggtcaccaggtagccaggctctgcagagcgcggcaccatatcgaagagcgcagagccttcgggccccagagctgggtacagcaccagcggtgcattgtcgttgcggtcgtccaccaacacgcgcaggctcacgttggcgctgagcgtaggcgagccctggtcgcgggcctgcagagtgagctcgaaggcacgcagctgctcgtggtcgaaggctcgctgcgcgaacaccaccccgctccgcgcgctcacggacacgtaggacgacagctcccgcggctccaggtcactggccacgatgtagtaggagacaaggccattaggtcccaagtcgggatccgaggctctgacatgcgcaatggaggctccaggcggattgttctcagctacatgcacggtgtaggaggcctggtggaaaacgggaacgttgtcgttgacatcaaggatgtgcagagtgatggtcttgctggaggagagcggtggattgcctttgtcggtagctgtgatcgtcacattgtattctgggatctgctcccggtccagggctccatctgtcaccaacctgtatgtgtttttggtatcttgaacgattttaaaggggaagtttccttttagttggcataggatttctccattaaatccagaatctagatcatgtgttttgatcagggcaacggcagtccccagctcagcatcttcttgtatatgttgggattcagaagccagggttatctccggggcattgtcattttcatctgaaatatctatctgtactttacaatatgcagtgtgatgtccaccatcctttgcttccaccccaattgtgtagctatctctctcttcaaagtccagttctccaatagtggtgagttcccccgttttactgtccagcttgaacagttgtctcacttccttgccaatattgatgaaggcatagatgatttcggcattgatgccctcatccatgtcaatggccatcacttttaatacggaggagccagcgggcaggttctctgcaacattgaccctgtacatgtcctgagtaaatactggggggttatcatttgcatctgcgacaattaccctgatctgggtggtacagcttctggagggctcgcccccatccacagctgtgaggaccaggtggtgatgtggctgctcttccctgtccaggggtgctttcagtactagctctgggtacctactgccatccaggttctccttctgaatcaaagagaagtgcggatcagggctgaggtagtactgctgcagcgaattgacacctacatcaggatcttgcgcagattccagggcaaatgtggctccagtgagagccagttcgctgatttccagctcagtgatattttggctaaaggtcggtgggttgtcgttaatatcctggatcagcacagttacatgaaaaaagtttaaaggcttttcagcaaccatttcaaattccagaacacacgtcgacttcttgccacaaatctcctctcggtctatacggtcgctcacaagtaagttcccattttcggggctcacggtaaagaatttcttctctgcaataacccgcaggttcctagtaggtaaatcccccacgccaaaccccaggtccttggcgaggttccctaccagcgagcccctgtccagctcctcgggaatagcgtagcggatcggttcggagagagcctggtctaacaaagagagcaggaagagaaatagcattcgcctctgccctgctgggcccctccatccggagctatttcccatcccgctctctgcgcctttgcctttctaaatccgaggagaggagatctttaaataatcccaagagttctccgagcaggaccaactatttgctttgtctttgtgcttgggttctctaatgggtgtctccgctgcaggaagcctgatagagagtgcacttttcttccgagctggctgcagcgggaggagccaatattttgcacagcactagccaagagcggcacccggcgcctctgctgcagaactgcagtaatggtgactaaatcagctccaaataaggagctagttaggagaaaaatcggcagtgtactgatagtgatactttcttcccattttaaaaggacttttaaaaaacattaaatatacttactatatctttagtctgttatttcttttaatttgagctttatccatccaaatcaagtaccttttacttgtcaaagggcagagataatcttgctcaatcccgtcacgtttttagtttccattttcataaaatggtcataataatatcttctctgcttactctagtagaaatgagggccaaataaaataatacatagaaaatcatacaaatggaagctatttttggtgatggcagaagacgtagtataaagaggcttgaaatatcagcttcacgtgtattcttattgcattctatttcctttacttctaacttctaaaagttataatgtcatagcttttagttttattctatgtttcactttcttctcttttatctttattatctccccccaaaagaagttaaaggtaatgaggaaatgattgaccttataaaatagaagtatagtaaaaagcaagagggtctcttttcctttgtttccaagtgtctacttttaattaaataagtatgattgaaaactttttttttctatagaggtggggtttcactatgttgcccaggctgggctagaacacctggctttaagcaatcctcccacctcagcgtcccaaattgctgggattatagtcatgaaccaccctggcccaaatgaaaaacttttacaaaggatgttttttcatactacatcacaattgtcctgaaatgtactgtttcttctcaagtagcctaacaatgatgcgttattaggattggggagtgaattgtaagtccttataattatattatttaattatataagtaatcttcctgtccacttttccttggtccccagtttaccatctgataatcctaactttttgttatttacacttttccctggtcaataacatgccattttccatgtttctgacaggtgtcttacagttttaattccattttcaaaccagaaaatcttcctaaagaaattatctttagcctacataatgtattgttactctaaaactaggcaagtgtgcagcaataagcaatgagttccacaccgaattcaccttatagtggaaaagcattatagcatcttaaactactcacagtaaccagaattctagacagacactcattgtcacctttatacaaacatcaaaaatataactgactcaagactttgctccaaaacattccaaagcaagtgccttccaacacaatgccaagtgttcattgtatgaacacttcaattagtatgaaaaattattcttcagaacacatataaaactaaagattcagatatttaaaagtatatggtatatacagtacatacattcaaaatgtatggatcaagcattttatagtctgttagtagtttatagagggtttaaagatatttttccattgcacaaaacatttaactcagaagaaatgtacccaaatctataacctttacttttttcccaaacaccttaccctaagaagcatataacattttcttttaaaaaaaatggaaaagcaagttttcacataggagtgaataatgtcgacacctactgtatagattctcttgttactctttggatgcattcactattcggtgagtttgtacattttacattttggtcagaatgtccatgtgtgtatgtatgtgtgt

SEQ ID NO: 318353 - DNA, 4001 bp, Homo sapiens
ctgcaagctgtcggcgaagaccaggtgcaacgtggcagtggccgagagtggtggctgtccaccgtcacgcacggcgaccagaaggcgctggcggacggcgtccctgtcgcctaaggcacgcgctgtgcgcacttcgcccgtgcgcagccccaggctgaagagcccgggctcgctagcctgcagcacgtggtaggacagccaggcgttgtgtcctgagtctgcgtccaccgccactaccttggtcaccaagtagccaggctctgcagcgtgcggcaccatatcgaagagcgcagagccgtcgggacccagcgcggggtacagcacccgtggcgcattgtcgttgcggtcgtccactaacacgcgcaggctcacgttcgcgctgagcgctggcgagccctggtcgcgggcctgcagtgtgagttcgaaggcgcgcagctgctcgtggtcgaaggcgcgctgcgcgaacaccaccccgctctccgcgcttatggacacgtaggatgacagctcccgctgctccaggtcactggccatgatgcagtaagagacttggccgttgggccccaagtccggatcagaagccctgacttgtgaaatagaggctccaggcgggttgttctcggccacgtggactatataggaagactgtgagaaaaccggagcgttgtcatttacatcaccaatgtgcagggtgatgctggaactggaggagaggggaggcttgccccgatctgttgccgtaacggttatattgtactctggattctgctcgcggtctagaacagcatctgtcactaatttatacgtgtttcttgaagaagttaatattttaaatggaacatcaccttccaatttacaagtcacttctccattgtgtctggaatccttgtcacggactttgagcaaagcaatatgtgttcccagctcggcgtcctccataattaggttgggtagagactggaatatcacttctggggcgttgtcattttcatctatgacttctacctccactgtgcattgcgcaatcattcctccaccgtcccttgcttccaaaactatggaatattctttgacttcttcaaaatctaatgtatttaaaacagtaatttccccggtgttagagttcaggtcaaattgggtgatctggctagcttcactgaaagagaaagtaatctcggcattgacaccctcatcctggtccgtggcagtcacctgtagcaccgtggtccccgggtacacgttttctgaaaggctcaccctgtatacgtcttgactgaacactggagcattatcattggcatcagtcactagaacgtgtatctgtgcagtgctgcttaggggtggagctccaaagtccaaggcagtcaaagtcaagtggtaggatttctgcttttctctgtccaaaggtgtcttcaataccatctcagggtatttactgccatctgatttctctttatttatcagtgagaaatgatcactgggactgagttggtaattctgcagtgtgttgctaccaatatccgcatcatgggcagatcctaatataaatcgtgtgccaggctgtgcagactcacttatttgcagctcaaaggaattttgcgtgaattttggcgtgtggtcattaatgtcctcgatctccacattcacgtgataaaagttcagtggattttcagcaacagcctcaaattccagagcacaagctggcttcttcccgcatatctcctccctgtctagcctgctgctcacaagcaactccccgctctctgcgctcacggtgaagtaaggcttctccgaactgacgcgcagttttcgagtcggtaactcctggacgctgaaccccaggtccgtggcgaggttccccactacggagcccttgggcatttcctcgggaatcctgtagcggatctgctcacagagcgccgggcagaacaaagacagcaggaagagaaagagcactggcagcctctcagcccggcccagctccccggcgccgctccccatccctcttgctctcctcagcttgctcaccagcctggagacgccgggttacaaataacctctgtattgcagatttttggatctccgaacggactttagttgcagttccagttcaagaaaaaattcttctttttccgaggaggaagcggtgtaaaggctggcgctggggagtctgagctggggctgccctggaaagcgcgctgcggctgcgcgaggagatctggagcgccaagctctccactttggccaacagcggcgcccagagtcagcactaggaaactacagcctctgctgcttcaagttaaccagtgcaataattataattgtgtgcctaactgaaagaacaaaaactacgtggatacgtctgtatatttaatgacgtctaaaaatgtactcttaggaatgccttcatcccaactttgaggatttttaggcaaatcatgtagattaagtacataaacatttattgacataagctttccccaatcttcaaacatgcactatctatataaagatagccataacacagacttggcctaaaccgtctcagagtacagtaattttccatacttactcattagaaatatactggatacattttatctttctttcattgttcctaacattttctccacttttctaagtacctccaagttgatttatttcaactttttccggagagtatcagtaataccaaaattgccttttagaaggtgcaatttatacttatcttcaaatacacccccttcccaatagtttcagtgatttcattacaggaatattatgtgattctcatttcgatgatcacaggcagtagcctactcctctcctcattacacaattattttactggttatgaaatacaacattcatcttcaaagttatcagggggataatacatagcctcaaaacacaaagtcactgagatctgctgcactgaagcactgcttcctacctctgcacttattttacattccttggtgacctctgaattgaaggaaacaatccctggaaagtttgattgcaatagctcactgagtttagtgattatgtctctccattgcttaaaaacaattttatgcatctaataaattttggtcaggagattttcttttacaaaataccttataaccgtagttctgccataggatcttccctcagtaacattgttggtgtcagcaacattgtcttctaccccaagtgattgtacatctgaaatgtgaacactgcagaacttgtaaaatgtatccagcctgggtgacagagcgagactccatgtcaaaaaaaaaaaatgtatcccccacactattgtacagagtctatcatgtgcaaaatactaccaaatacaacactagtctaaaaagagtctttttttgaagagacagagtcttgttatattatctaggtgggcctccaattcttgggttcaagctgtcctcttgcctcagcctcccatgcaggtgggctacagcttgcaacaccatacctggctaaaagtgtgtttttaattaatactcaaaggtctctggaatcaagattaccttgtcatccaccccttctggatgacaatcacttgatatactgagctttactaaaatgttatacaaaagaatatggaagtagttaatcccagattgggttatttccaactgaatttttcagtagacctaataaataaaatcaactactggtctaggatctgtgtacataagatggtctaaggtttgagtacgtgagacagttgaaacaaagccagtatccccaatctcccactttgatagcccacagacacacttcatctggctgtaccactaaaacaacatactggaattctctgttaaaacatgtaattgcctatgtcacaaatgccaattacaacacttaaaatgacattttatttgacatattttattggttttgtccgatggcctttagtgtggcattagacttgatgtctgtctttgatatagatcttagtgaagtgtgatacacacacatttcat

SEQ ID NO: 318354 - DNA, 4001 bp, Homo sapiens
cacctcctgcaagctgtcagcaaagaccaagtgcagcgtggcggtggcggagagtggcggctgtccaccatcacgcacagcaaccagcaggcgctggcgggccgcgtccctgtcgcccaaggcacgcgctgtgcgcacctctcctgtgcgcagccccaggctgaagagcccgggctcgctagcctgcagcacgtggtaggacagccaggcgttgtgtcctgagtctgcgtccacggccactaccttggtcaccaggtagccgggctctgcagcgcgcggcaccatatcgaagagcgcagagccgtcgggacccagcgcggggtacagcacccgcggtgcgttgtcgtttcggtcgcccaccaacacgcgcaggctcacgtttgcgctgagcgcaggcgagccctggtcgcgggcctgtagtgtgagttcgaaggtgcgcagctgctcgtagtcaaaggcgcgctgcgcgaacaccaccccactttgcgcgctcatggacacgtaagaggccagtgccagaggctctaggtcgctggccatgatagagtaggagacttggccgttcaaccccaagtccaggtccgaggcgcagacttgcgcgatggaggccccaggagggttgttttcgggtacactgactaagtaggacgcctggtggaaaaccggagcgttatcgttgacgtctctgatatgtaggatgacgcttatgctggaggagaggggcggcttgcccctgtctgtggctgtgatggtgacattgtactccggggtttgctctcggtctagggttccatctgttaccaacttatacgaatttttggatgaagagataatcttaaaagggacttcgccttgtaattgacaattaacctccccattttccccagaatcttggtcatgtattttgatcaaagcaattagtgttccaggcaccgcgttttccagaatcatttcaagtagagaatggaatgtaacttctgggctattgtcattttcatcttgaatattaatttcaactgtacattgtgcaaccagtccaccaccatccctcccttctacaaccattgaatattccttggtctcttcaaaatccagtttcttttgagtggtaatttctccgctctttgaattcagactaaagatttgcccggttctgtagaaggaataagtaatttctgagttgatgccctcgtcttggtcagtggctgacacttgcaacacagtggtgcctggtggcacgttttcccgaaggctgactctgtacacgtctcggttgaataccgggggattatcattggcgtcggttacctggatccggagctcagtggtgccgcttaggggtggatgtccaccgtccaaggcagtcaggactaaacgatggtaactctgttgttcccggtctaaggttttctccagtgccagttccgggtatttactaccatcctgtttctccttaattattaatgagaaacttgggttaagagagagtttatacttctgcagagagtttaagccaatatctgcatcttctgctacttctagtataaatcttgtgccaggctgtgcagactcacttatttgcagctcaaaggaattttgcgtgaattttggcgtgtggtcattaatgtcctcgatctccacattcacgtgataaaagttcagtggattttcagcaacagcctcaaattccagagcacaagctggcttcttcccgcatatctcctccctgtctagcctgctgctcacaagcaactccccgctctctgcgctcacggtgaagtaaggcttctccgaactgacgcgcagttttcgagtcggtaactcctggacgctgaaccccaggtccgtggcgaggttccccactacggagcccttgggcatttcctcgggaatcctgtagcggatctgctcacagagcgccgggcagaacaaagacagcaggaagagaaagagcactggcagcctctcagcccggcccagctccccggcgccgctccccatccctcttgctctcctcagcttgctcaccagcctggagacgccaggttacaaataacctctgtattgtagatttttggatctccgaacgggctttagttccagttccagtttaggaaacgattctttttccgaggaggaagcggtgtaaaggccggcgctggggagtctgagctggggctgccctggaaagcgcgctgcggctgcgcgaggagatctggagcgccaagctctgcactttggccaacagcggcgcccagagtcagcactaggaaactacagcctctgcggcttcaagttaaccagtgcagtaattgtttttgtgtgcctaacttaacaagccaagtttttacgtccatatacttaataaaaaattataacaacttctttaaggtatctttctctgttttccaaattgttagaaatatcacgttgggtttttatacaaacctgcatacattggtccattctttcaccattctgcaaacataccttgaactcttagctagaactaagtattgcccttgtcactggcaatataataattaatatgatacagttcttgctctcagagccttcatactatactgatttcaaaaattcattttttattagctatggaaacaattttatcattcttctgttcatttctatgatttccaactccccaatatttctagtgttttatattacacatattagggaaatctatactatttaaaactattttgtaaagttgtggcaattttataccaatccccaaacatctcctcttcctgactatattaacattctttataaaaataatttttctttactcttctacttcaggaaatattcattcaagtatactgcccatatgatgtagctaagaaatgatataccctactacgttgctcttcttcatatctcaaaatacttctcttatgtcatatcttttacagtacataaattcattcttaagagttattggggaaatgcttatctattctgcaatacaaggtacaaagggatattctagtggattgcattattatcctatctgaaatgactttggaattggataaatgaagctcataagttcatttacataaatttgtggacattggtcaaccttctttagtccatttgtcagattaataaaaacaactagccaacatttttagggagagtaaggattttctttcctaccagggcaactttcatccgagtttttaaaattgcaaagtgccaataatatgttgtcctctcaaatgtgcatccaaatggtacacaaactatgaagttaactcccactccactgaatatgcaccatacagtagaacactacacaatccttaggaaatgtccttttcattaataacaaacatttattgggtcatctacttctaccttacaacaatcaattcaggtattagctttattcaaatgctacaagaaggtatgcaggaatacaataatggatagcctataccgagtttttactattaatattagttttttttttttttgagacggagtctcaccctgttgcccaggctggagtgcagtgacaggatcgaggctcactgcaacctccacctcccgggttcaagtgattcttctgcctcagcctcccgagtagctgggaccacaggcgcatgccaccatgcctggctaatttttgtagtttttagtagagacggggtttcaccatgtttgccaggctgatcttgaactcctgacctcaggtgatccacccacctcagtctcccaaagtgctgggattacaggcgtgagccaccgcacccggcctaataatagtttttttagagacagggtctagttctgccacctaggctggagtgcagtggcatgatcatagctcactgcagtttcaaacccccggggctcaagcggtcctcctgccccagcctcccaaagtgctgggatttcagacatgaggcactgtgtccagccaagactgaataactttaattgaattgatcagcttatttagaact

SEQ ID NO: 318355 - DNA, 4001 bp, Homo sapiens
gttgtctgcgaagaccagatgaagcgtggcggtggcagagagtggcggctgtccaccgtcacgcacagcgaccagcaggcgctggcgggctgcgtccctgtcgcctaaggctcgagccgtgcgcacctccccagtgcgcagccccaggctgaagagtccgggctcactggcctgcagcacgtggtaggacagccaggcgttgtgtcccgagtcggcgtccaccgctaccaccttagtcactaggtagccgggctctgcagagcgaggtaccatatcgaagaacgcggagccgtcaggacccagagctgggtacagcacccgcggtgcgttgtcattgcggtctcccaccaacacgcgcaggctcacgttggcgctgagcgtgggcgagccgtggtcgcgggcctgcagcgtgagcgcgaaggcgcgcagctgctcgtgatcaaaggcgcgctgcgcgaacaccaccccgctctgcgcgctcactgacacgtatgacgacaccgccaggggctctaggtcactcgccactatagagtaggagatgtggccattgagccccaaatccgggtcagaggcgctcacttgcgcaatggaggctcctggcgggttgttctcggccacgtggaccacgtaggacgtctggtcgaaaactggggcgttgtcgttgatgtcagcgacatacaaggtgatgcttctactggaagaaagaggcggcttgcccctgtcagtggctacgatggtgacattgtattctggtgtctgctctcggtccagggctccatctgtcaccagtttgtagtagttattggaagaagaataaatcttgaatggaatgtctgtttctatattacacctgacttctccatttcctccgaaatccagatcccgtgttttgaagagggcaacaaccattcctggaggtgaattctccaaaatctgatcagagagagaagtgatgattatttctgggctgttgtcgttttcatcaaggatttctatgattactttacactgggtagagagaccacctccgtccttcgcttccacttccatggtgtacctttctacatcttcaaaatcaaatgactggttattcttaatcatacctgttttctcatccaatgagaacatatgttttgtgctctgggcagtgcttcggaagtagtagtttatctcagcattgaccccctcatcctggtcagtggctgtcacttgcaacacaggggacccagggggcagattttcactaagactaattctatattcgtctctgctgaaaaccggggggttatcattggtatccttgacagaaatttctatgtgagcggtggcacttcttggtgggtcccctccgtccaaggcagtcaatatcaagctatgagatctctgttcttcccggtctaggagtttctccagagataactctgggtatttgccaccatcggaattaactctaaccattaatgaaaaataaggattagagtttatcttataatctttaattgagtttatgtttatatcaggatccgtggcagggtcaagcgatagtcgtgtaccagcggatgcagattcgaaaatttctaaatgtatttcctttttatcaaattgaggggcgtggtcattaacatcctcaatcaccacaatgacatgaaaaatatttaaaggattttccaccacagcttccaattgcaactcacatcttcttctctctttgcatatttgctcacggtctattcggttcttcacaagtaagtccccgctctccgcgtctacgctgaagtgcagcttctccgcgctcactcgcagcttgcgagccgacacatccaggacactgagccctagatccttagcgaggttccccaccaccgagcccttggccagctcctccggaatcgagtagcggatcggctcactcagggtggggtagaacaaaggcagcagcaaaggaaatagcacctgccgcgggccggcccggcgcctctgcgcgcagctccctcccatcgttcgctcgggttctcgctgggtccccgcttttccagttggagaaagtgcactctaccgcgctaaaagagcattcggcccaggacaggaggagtcccgggtctcggagctggcaatccgctgtgctgggaaaggtctgcgcagccgggaggctctgtgtgggagctggttttcttctttctgttgttggctgcgcagggaatcccaggccagaggctgacggatccccggcgtcagcgcttgctctgcactggccgacagcggcgcccagaggctccgtgcgggacagcagcccggtttttcattttgaattcggtctccgaaatgtatatattcttcgaaaatgcaggtgtacatccccctcaaattttgctctcaccataatattatagtagatatttctatgctttgtgttttaaataaatctattatgcacaatttcaaacttatacaacagtagggagtatatatagtgaaccttcacatagccatcaccccaccttcaacaatgatcaccacaaagccaatctttgtttaatatatactgcgctcccccattatttttaagtaatacgagatatagaatgtcaaccaatgcttctttttaagatgagacattaaggtcaagaattttatctttcagcttatgttctacaatctgttaccaatgcacaataagttaagtcctacatagcctaagaaaaacagaaataaagattttccatactccattcagtcatctgtctggtgagcctcgtgttctggttttaagggcaagagacatttttgtggtatcgaatagtaactacctaccatgacatacaagccttcatggatatctgttatgttttccccaaattaacatacatttcaatatttataaatactaagtatgaaggctactcctcagaacagaaattgtaacaattttcttgttgcatggttaaaaatatgagcctgaagtatgctttattttttttgctacccacttaagggggaaaacgtgtttgaaataattaaaatgtctgtatgtcataaaggattcccagacacttcagcttttttttcttaaaaataaagcaactgaaacccaaataattacaaacaaataaaacaattcttcatttccacagaaatgccagcagtcatcagtgtatctatggatcacatgtttagcatagaattttgagtcaacttcaaagcttattttcaaatgtcttgtgaaatgttatttactatttgaaacaacactatgtttaaaataacattaaataatacattattctcttccttatagctaaaaacagtaaaatagttttagaatcttcccagcagttcctgagaatattttcttaaattatatctgatatgcaagttcatttctagactcaaaagttggagaattgagccagaaataatatataagtgagagaaatatttttaattccttgttttgtcatttcacagtgtccagtcttagaaacttctcttgagcaagcatatactatagaaaagaagaatgtcctactattctccataatttaacattaaagcattaggaaattaagacctttgaagatatgagaataaaagatgtgacaactttcaccattaaagggaaaaaattggtttactagggtttggaagtggataactgaagtttgaatcttcgtcagaaaatatctgtaaacacaaacagactttacacacttgtgatctgaaaaatataacctcaaagaggtgttttcctgtcatagaaatggaagaatagaagcaataaatctgggctttcagctgtttctctaagaagaatacatttacctttttatcagtttacccttacaaacatagtatgacctgaataaatgatcgtaggagtaagaatttgctgggtgaggtggttcacacctcacccagtgctttgggaaactgaagcaggaagatcgtttgagaccagtctgggcaacatagcttgctagccctcccacctcagtcctagc

SEQ ID NO: 318356 - DNA, 4001 bp, Homo sapiens
tggcctgcaccacgtggtaggacagccaggcattgtgccccgagtccgcgtccacggccaccaccttggtcaccaggtagcctggctgcgcggcccgcggcactgtgtcgaagagcgcggagccgtcgggacccagcgcagggtacagcacccgcggtgcgttgtcgttacggtcgcccaccaacacgcgcaggctcacattggcgctgagcgcgggcgagccctggtcgcgggcctgcagcgtgagctcgaaggtgcgcagctgctcgtggtcgaaggcgcgctgcgcgaacaccaccccgctctgcgcgctcacggacacgtaggacgacagcgttcgtgactccaggtcgctggcaatgagagagtaggagacacggccgttgagcccgaagtctgggtcagaggcactgacttgcgctatggaggcacccggctggttgttttctggcacgtggaccaggtaggctgactgtccgaaaaccggcgcgttgtcattgacgtcagtaatgtgcagggttatggttttgctggaggataacggaggcttgcccctgtctgtggctgcgatggtgacgttgtactctggggtctgctcccgatccagggcctcatctgttactagcttgtagtaattattagaagaagaatgaatcttaaatggaacacctctacttaagctacacctgacttccccattttcccctgagtcttggtcccgtgttttgaagagggcaacaaccactcctggaggggaatcctccataatctgatcagagagtgacgtgatgattatttctgggctgttgtcgttttcgtctacaacttctacaattactttacaccgtgttgagagagatcctcggtcttttgcttctatgtttatcgtatatctttctacttcttcaaaatccaaaggctgctgagttagaatgtttcctgtagtgtaatccagagagaacacgtgctgagctttgtcagccacaccaaagaaggaataagtgatctctgagttgatgccctcgtcctggtcagtggccttcactctcaggatggaggtgcctggaggcacgtcttcccgaaggctaaccctgtacacgtcctggctgaacactggggggttgtcattggcatctattaccaggattcttatctgagcagtaccgcttcggggagggtccccaccatctaaggcggtcagtaccaagtggtgagcgctctgcgtttctcggtccagagtcttctgcaatactaattctggatatttgccaccatcaggattgtctttctccaccaatgagaaatactcgttaggacttagttggtatttgctcagcgaattcatactaatatcaggatcttctgcagactcaagaattgttcccatccccaggctgacggattcactgatttctaagtttatttcatctttccggaattgaggggcgtggtcattaacatcctcaatcaccacaatgacatgaaaaatatttaaaggattttccaccacagcttccaattgcaactcacatcttcttctctctttgcatatttgctcacggtctattcggtccttcacaagtaagtccccgctctgcgcgtctacgctgaagtgcagcttctccgcgctcactcgcagctcgcgagccgacacatccaggacactaagccctagatccttagcgaggttccccaccaccgagcccttggccagctcctccggaatcgagtagcggatcggctcacacagcgtggggtagaacaaaggcagcagcaaaggaaatagtacctgccgcgggccggcccggcgcctctgcgcgcagctccctcccatcgttcgctcgggttctcgctgggtccccgcttttccagttggagaaagtgcactctaccgcgctaaaagagcattcggcccaggacaggaggagtcccgggtctcggagctggcaatctggtgtgctgggcaaggtctgcgcagccgggagcctctgtgtgggagctggttttcttttctgttgttggctgcgcagggaatcccaggctagaggctgagggatccccggcgtcagcgcttgctctgcactggccgacggcggcgcccagaggctctgtgtgggactgcaacttgacttttctctacctctttcaaggaattttttttaaactacgagttgacagccaaaatattttaatctttttcctcagtgattccttttacatcaggaaatatatttccacttggtcataactatcatatctttttatttactgaatttacatatatcttgaataaatgaatattttttcttcaaaatttaaaaaggcacaaaataatatagcatgaaggtttataggtctcctatcccacggcccattgctatccaattcctccatccagaggcagtcattcttgttccttttaagagtaattatctatgaagctggaagtactgaagataagcaacaaatttttttgtcttcaattctagcctatattcacccagaaagtaataattccttatttcatacttaagtactggaatgcaaccattgccctagtcattaccatcatccagggtgtcctgtattgcttttaaataattataatcaaaatattttctcacaatagctacaatgtcaagagcagttttttttaaaaaaaaaacctgtatttttcaaaataatagaattatttgagatgaatgcacaataattttgactctcattaacacaaatataaaataatagtttcaatggtttaatagttaataactatgaccctaaagagtgtgctttccttccacagacctatcattcaacaaatgttgactgacctgaaaaaaatcatggaattataagggtcttgagaaacttcggaatgctttttgactttatactaccacatttagtagaatactagtaataaaattaagagatctacctaatacgtcactattttcattgaactaaatgaactcatcagtacctccaatgatcctttgtttatataatttcccttcgttgcatatattcttttcttttttacagctgtggttggtgtttatattctgatctgcagaaatggcatttctttcttgactctaagtttattttgcctctcaatttcagagttttcagagtttcaggtgtttgcctccttatacattaaagagccactgaaatagctttgtcatatatctcttgctcctgttctcgggaacatgtacaaatttatctgtcttcccaacccatatttactttcagccttagtcactagaaaatttaacaaaaaagacaaaagcagaatcccaaatattcttaatttcaccctctatagcctcctcaggatccctattgagcaatgaaagttaaattaaaatgctatatcttccacatagcagtgtgaaattagagaattgtatgcaaaaaggatactgcagtgttatcagttataaatagggctggaaaaatctaagcatacattgttataaataaattgttaattcaatattaatgaaaaacttagtatattcaactgcaactatcaccacaaagtatagattgaaaaatatataaaatgtagtttgaaaaaggcctattgcccttctccttgggaagaactgcattgagtattcttggatttgggttgtgtttccagaggtgatttctttctgatacttacctattcttaccagacctgccttcagaacaagagggttgcttaaggggctggagtttcaatatgtgaccacccaggaggaaatataaattgacaggcacttctgtatggaagtctgtcttaggaattgtcaatattgtactcaacaacactataaactacaaggttctgcaaagctaatcataacaaagccttatgatatataggccttgattgagactaggtgaattttaccagaaagtaaaaaaaaaaaaaaaaaaaaaaaaaaaaaaaaccttaataaacatcaaattctactcatcagtgttttagcatttacact

SEQ ID NO: 318357 - DNA, 4001 bp, Homo sapiens
cgcgtccacggccaccaccttggtcaccaggtagcctggctgcgcggcccgcggcactgtgtcgaagagcgcggagccgtcgggacccagcgcagggtacagcacccgcggtgcgttgtcgttacggtcgcccaccaacacgcgcaggctcacattggcgctgagcgcgggcgagccctggtcgcgggcctgcagcgtgagctcgaaggtgcgcagctgctcgtggtcgaaggcgcgctgcgcgaacaccaccccgctctgcgcgctcacggacacgtaggacgacagcgttcgtgactccaggtcgctggcaatgagagagtaggagacacggccgttgagcccgaagtctgggtcagaggcactgacttgcgctatggaggcacccggctggttgttttctggcacgtggaccaggtaggctgactgtccgaaaaccggcgcgttgtcattgacgtcagtaatgtgcagggttatggttttgctggaggataacggaggcttgcccctgtctgtggctgcgatggtgacgttgtactctggggtctgctcccgatccagggcctcatctgttactagcttgtagtaattattagaagaagaatgaatcttaaatggaacacctctacttaagctacacctgacttccccattttcccctgagtcttggtcccgtgttttgaagagggcaacaaccactcctggaggggaatcctccataatctgatcagagagtgacgtgatgattatttctgggctgttgtcgttttcgtctacaacttctacaattactttacaccgtgttgagagagatcctcggtcttttgcttctatgtttatcgtatatctttctacttcttcaaaatccaaaggctgctgagttagaatgtttcctgtagtgtaatccagagagaacacgtgctgagctttgtcagccacaccaaagaaggaataagtgatctctgagttgatgccctcgtcctggtcagtggccttcactctcaggatggaggtgcctggaggcacgtcttcccgaaggctaaccctgtacacgtcctggctgaacactggggggttgtcattggcatctattaccaggattcttatctgagcagtaccgcttcggggagggtccccaccatctaaggcggtcagtaccaagtggtgagcgctctgcgtttctcggtccagagtcttctgcaatactaattctggatatttgccaccatcaggattgtctttctccaccaatgagaaatactcgttaggacttagttggtatttgctcagcgaattcatactaatatcaggatcttctgcagactcaagaattgttcccatccccaggctgacggattcactgatttctaagtttatttcatctttccggaattgaggggcgtggtcattaacatcctcaatcaccacaatgacatgaaaaatatttaaaggattttccaccacagcttccaattgcaactcacatcttcttctctctttgcatatttgctcacggtctattcggtccttcacaagtaagtccccgctctgcgcgtctacgctgaagtgcagcttctccgcgctcactcgcagctcgcgagccgacacatccaggacactaagccctagatccttagcgaggttccccaccaccgagcccttggccagctcctccggaatcgagtagcggatcggctcacacagcgtggggtagaacaaaggcagcagcaaaggaaatagtacctgccgcgggccggcccggcgcctctgcgcgcagctccctcccatcgttcgctcgggttctcgctgggtccccgcttttccagttggagaaagtgcactctaccgcgctaaaagagcattcggcccaggacaggaggagtcccgggtctcggagctggcaatctggtgtgctgggcaaggtctgcgcagccgggagcctctgtgtgggagctggttttcttttctgttgttggctgcgcagggaatcccaggctagaggctgagggatccccggcgtcagcgcttgctctgcactggccgacggcggcgcccagaggctctgtgtgggactgcaacttgacttttctctacctctttcaaggaattttttttaaactacgagttgacagccaaaatattttaatctttttcctcagtgattccttttacatcaggaaatatatttccacttggtcataactatcatatctttttatttactgaatttacatatatcttgaataaatgaatattttttcttcaaaatttaaaaaggcacaaaataatatagcatgaaggtttataggtctcctatcccacggcccattgctatccaattcctccatccagaggcagtcattcttgttccttttaagagtaattatctatgaagctggaagtactgaagataagcaacaaatttttttgtcttcaattctagcctatattcacccagaaagtaataattccttatttcatacttaagtactggaatgcaaccattgccctagtcattaccatcatccagggtgtcctgtattgcttttaaataattataatcaaaatattttctcacaatagctacaatgtcaagagcagttttttttaaaaaaaaaacctgtatttttcaaaataatagaattatttgagatgaatgcacaataattttgactctcattaacacaaatataaaataatagtttcaatggtttaatagttaataactatgaccctaaagagtgtgctttccttccacagacctatcattcaacaaatgttgactgacctgaaaaaaatcatggaattataagggtcttgagaaacttcggaatgctttttgactttatactaccacatttagtagaatactagtaataaaattaagagatctacctaatacgtcactattttcattgaactaaatgaactcatcagtacctccaatgatcctttgtttatataatttcccttcgttgcatatattcttttcttttttacagctgtggttggtgtttatattctgatctgcagaaatggcatttctttcttgactctaagtttattttgcctctcaatttcagagttttcagagtttcaggtgtttgcctccttatacattaaagagccactgaaatagctttgtcatatatctcttgctcctgttctcgggaacatgtacaaatttatctgtcttcccaacccatatttactttcagccttagtcactagaaaatttaacaaaaaagacaaaagcagaatcccaaatattcttaatttcaccctctatagcctcctcaggatccctattgagcaatgaaagttaaattaaaatgctatatcttccacatagcagtgtgaaattagagaattgtatgcaaaaaggatactgcagtgttatcagttataaatagggctggaaaaatctaagcatacattgttataaataaattgttaattcaatattaatgaaaaacttagtatattcaactgcaactatcaccacaaagtatagattgaaaaatatataaaatgtagtttgaaaaaggcctattgcccttctccttgggaagaactgcattgagtattcttggatttgggttgtgtttccagaggtgatttctttctgatacttacctattcttaccagacctgccttcagaacaagagggttgcttaaggggctggagtttcaatatgtgaccacccaggaggaaatataaattgacaggcacttctgtatggaagtctgtcttaggaattgtcaatattgtactcaacaacactataaactacaaggttctgcaaagctaatcataacaaagccttatgatatataggccttgattgagactaggtgaattttaccagaaagtaaaaaaaaaaaaaaaaaaaaaaaaaaaaaaaaccttaataaacatcaaattctactcatcagtgttttagcatttacactttccaccatcatgccgcaaacttcaaagtaaaaaccaatctttttt

SEQ ID NO: 318358 - DNA, 4001 bp, Homo sapiens
ctgatttgaccagtgtgcagccctatggcaaaaaggctctggttaggggatcccaagagactgtaggagagccaggcattgtgccctgcatccgcgtcccagcctaccacccgtgacactaggtggccagctgaggtacctcgaggcagcatctccaccgagctcccacctggccgaggatataggacctggggggcattgtcattgcgatcagtgacaaatatgttcacgctgatgttggtggctaggaccggggtgcccccatcgctgatatgagctgttaattcaaattcccgccgatcctcatagtctaggggcactaaggatgacactatgccattgtcacgatttattgtgaaatagcgacccactagcccggtttcagctccttgctccaagagaaagaaagaaagccgagcattctgcggggcgtcggggtcccagacacttaggtttagtattggagccccggggaggttgttttcttcaatgtaaacgtcgtaggaagattgagaagattgtggagggttgtcattgatgtcggacacttgaacacgcactattgtaagggctgagagggaaggggttccggcgtctcgggcggtgatgctgaggttgtattctggcacagtctcccgatccaggtctgcactggttttcaaagtgaagtaattcttgagggaagaagtaaggctgaaagggagacccggtggaacttcgcaggtcaccagcccgttctcgccagcatccaggtcagtcacactgagcaaagcgatgacagtccccagaggggcatcctcgggtactgggctgtacacggaggtgactgtgatctccggggcgttgtcattcacatccacaacctccaccaacactttgcaatgtgctccttcgggattggcgcccttgtctttggcctggatgtaaatctcatggagtttggtgtcctcgaagtccagccgacccttgattgtcagcatcccggttacaaggtctaaggcgaatagttgccgcacgccggcgcggttgtggctgccgaaggagtaaataatttcaccgttggggccttcatccagatccgttgcaaggacttgtaccacgcgcgtgccggagggtgcatcctccaggacgcgcgcccggtacaaggactggttgaagacaggcgcattgtcattcgcgtccagcaccttgatgtgaataggcaggctggcggagagagctggggtccctccgtccaacgccgtcagcactaactggagactaggctcccgttctcggtccagggcgcgctccaacaccagctccgcgtacttggtgctgtcctcccgcgtctgcacgcgaagcgcaaagtattcatttcggctcagctcataggtttgtaaagagttgcttcccacatcgggatcgtgcgcgctctcgagcggaaagcgcgtccccggagccacggcctcgctaatctccaatttcatttcctgggtagggaaagcaggattgttgtcgttgatgtcctggatcaccacttccacgctgaacagctccagcgggttctccactaccaactccagagttacagtgcaagagggcagtgtcccacacagctcctctcgatccagacggtcgttcacaaacatctctccggtctcccggttcacctcaaagaatcttcggctagctccagacaccacccggaacctgcgggctgagaggctaccgagatccaaaccaaggttcgcgaccacgttgcccacagcgaaacccttctctctttcctccgggatctcatagtgaatgaccgtggaagccttgttcaaggcaccaagcagaagcaaaactcccactaccctcccggtgcttaccagtccgctcctccaggcctctgggaccatctcactcaaaagcagttcctctcagcggggtccagatcgtccctgagatttcgctgagaaactttcagcgggttagcgcttgggcgctgggcgccgagtccgacatggctttctggatgccgttgatttgctcgccggctgttcagtctctgcctcatcccggggcgcagaaaggggacgggcaggggcccgatctccagcgtcttcattggccgacagcggcacacagagtcccagccaataactgcacgaagaatgagctagcgccgggctctctgagcaggacacgcgctagcgccaggaacttcactttcctttggcttccttccagagtttccagccaaagcgccttgccagtatcggtgcataggaaacctaccttagggaaagccagccttggggctgtgaggctagccgttctgcaagtctccaatccaaatcaagactcattaaacatttgaatcactttctttgatcacaagaaaggggatcgaaccaaaccgaaaactacacaacattgtctggaaaaacaccaacaaatctggcttgttggaagacagacaattagccggaccctacttgtaaggaggcatttagcatttccgtggagacattaataatttcagttttatctcttaccaaatgaaattagcattccctgtcacttcctcattatctggagctactatcaaattagcaggagttacaatctattggtttaactctggcttataaaatttaaaagtacaattcagattttatttcttttaaaactggatgtcattgttagctctcatttcttaagaaccagggagcaataagaaatttccctaccctgtctttcacaaggagcatgatctcagttgtagagcacactctctctatcgtttccctttacttgatcaatccttttcccaagatcttgggtaccatatgccacaagaagttgcactgctaatgaagaagaagacggagaagatttcaaaaagaaaaaaagccaggcctatttaccacctaggatctttataaaattattgaaataatggcagcaaagctccacaaatctttagaaaatacaaagcctttagtcacagaataaagagccttaacttttctgcatttagaattgttgtcaccaaacaaaattataatgattaggatagtgaataaaagagtccactgtgatataagccagagatgagatgtatatccttgaacaagaaatgaacctctaagagttcctgctcctatcctattaaatgaagaaggcaggtaaagtgcctggcacagagtaagcctcaattaatgatgcaaaccactccattagatgtaaagtgttagagcctcatactatttctgtatatttgtcttggacatcactttgattgcatagagtccttttgaagtataatagaaccttgaacataagtgaaggggtaggcacataggttaggtaggtagaaaagaagtaaggatatataggatatttccggaagagatgaaaagccatatgtgacctatatttccatgtctttaacacttcaattaatctctgaaaacccccagttttaaatgctcaagtttgataattagccagaccagcaagagggctgataggcattagaagatagaatacatttagaatttagaataaagagtatagcccaatcacttgctactcaaagtgtgaggaccaatggtctaggcatcaccggggagcttgttagaaatgcagaaatgccctcctctagacctactgagacatgacttacattttaacaaaacatcagggtgatttgaaaacacattaaagtttgacaagcactgatctagtgggttattcagagatacactggtttatcagtctttttttcccctattcagcatcacttaattcacaatctggtttttgaaaatcagcttttaaaaatgtaagtagttttctcaataataaggcctgtcattttcttgataataaggcctgtagttttctgagattttcgttgttgttgtttttgttgttgtttgttttttggtttttgtttctgaggcaggatctcgctctgtcatccaggctggagtacagtggaataatcatagctcactgtaacttcc

SEQ ID NO: 318359 - DNA, 4001 bp, Homo sapiens
ttcctctaaggacactaagagagtaacagaggtagagagtggtggactaccactatcctttaccacaatgaccagcttctgtggtgggaggtcagctgggataggaacagccgtccgcacctccccagcatatcgagagactgcaaacaggctgggatctggggcctccaggagctgataggaaacccaagcattgtaacctgaatccaagtccacagcagtcacctttgtgattaggtggccagcaccaactgatggaggcagtgcttggggacataaggaaccaggccgggcccgaggacggagcacagctggagcattgtcattgaggtccagcacaaatagacgaactgttacagtgctgctaaggggtgggttgccccgatcccgggcctgcacctcaaactgcagtgtctgggtttgctcatagtcaaaggatcgagtagcatgaacagctcctgtctgggggttcagagagatgaaagaggaagctgatacatctcgattcctgggctccaggagtgagtaggagataagcgcattcaagccagagtctgggtcagaggctgcaagggagcaaagcaggtcccctgggcgattgttctcaggaacaaacacctcatgtgacctctgaaagaaagagggtggattatcattcacatctgaaatattgaggaaaatagttctgtgggtactgagaggagggttcccagcatcagaagcagtgaccatgatgtcatagctagatttggcctctcgatccaagggtccagcagtcaccagggagaactggttcctgaaggcagacttgagggcaaatggcaagtggtcaggaatgcggaggctcacatctccgtttgaccctgagtctggatcctgcacactgataagtgccaccacagtgccaggttctgcactctcggggagggttccaagctctgaggtcactgtgatgtaaggggcattgtcatttacgtccagcagatccactcgaaggctgcaatgttgctccatggctggagaacccccatcgcgagcccgcacatcaaattcatagtaattctcactctcaaagtctaggggccccaaaagagtaagctttccagtagtggggtgcaggctaaagaggtttcttacacgatcaggggtatgaccactgaaataaaaggtgacgttaccactgggacccaggtccgggtctgaggcattgagctggatgagcaccatgcccgctggtgcgctctccaacacactaatcctgtagctggattgctggaaggctggggcgttgtcgtttacgtccagcacggatacccggagctctgcggtgccagatctcggcgggttccctccatcgacagcagtcagcaccaggcggtagtccgattgcttctctcgatccaaaggcttctccaggagcagctctgggaccaggctgccgtcgctgcgcttcttcacatccagtgcaaagtgttcattggagctcagcctatagctgctaatcgaattgctccccacatctgcatcctgagccttttccaacgggaaacgctgtcctggaggagctgcctccccaatttccaagtccagctgctgccgcggaaaacggggggcgtgatcattcacatctacgatctctacctctgctcggtacatttccaaaggaccttcggtgacaaactccaggggcacgatgcagctggcactgagcccacacagtgcctctcggtcgattgggttcttgatgagcagggctccgctgtccaaatccacacggaagtgtctttggttcacctctccagcgacctgcagcctgcgagctgacagactgtccgtatccagcaggaaatcttgagcgacattccctacaaaagtcccttcctgtgactcctctgggaccgggtagcggatctgcccacaaacgtaacccaggtggtaaaagaggaacaaaagggtagcccaccgccagatttctgtccagcttctcaccttgcggagcattgctgccgcccgctaattctctacttgctcctgagacgcggatgaagccgacccgccccaaacagccacagcagctggagacacctatctccctttccccgcgccagctctggcgcggttcggccggcgccgcaagggttacgcgccgtttttgctggtggcggggtagatttgtctgcctttcaccacccgattggcagacagcggctcccgggctcagccaataggctgagcagagaacgtcccaacagcagcagggttaatgcgtcgcagcattggaggggaaaaagcccaccctatcctccacgctcccccaccccccaaaaaacccagcctatcttttcgccttcctcccgctcaacggcatgtttttccacgggttgttatctctgtggggaggcagacaacatatatatatatatacattttttttcctaacacaccgactgaccccgccccttttcggcggggaaaacagccacagcctgagccctagcaacctgcggcccactgagagggagagtagccattggagagtggtcactttgttcaagccagtgttgtcatcaaccagtattctaaatgagtagcttccgtctcagtctgattgtattggagcaactgctaattagaaccactgccatatactcaaaactctgcccttctgcagaatattcagaaacggatccatctctttgcagaaaaggcttacacattaacgtagccaattaaatttatgcagtacatgttctcattgtaacaggagacacagcggaaaccaaacctttcttattcagacatttgctagtgatacactagatacactaaattaccattcattgatttcaaggacagtatggaagcggggtggaggaagccaggagagggagatgtttcaaaacagtaaagaatcagtgtgtctgggaggtgctaaggaccagatctctttacctggcagaatgctaatgttcatagatttaatagcttccttgaatgattgagatcagctaccaacagcattgtgcctacaaattccctttatctgacaccaaggtattcttgatcttttgttaattaccaacgaagaccatttcaaaagagcaagcttttcacttagccccaggggacctcttggagctggagacttgatctcaccccacccccaccctcatccagacctcccagcaacctagctactcccttgcacaagcacagaaacacaacacaattcacaccgtaggtacctacgacctgcaatctgagtgggaaacacaccagagctcagagaaatagaaaaatccatcctgatctggacatgaaatttcttaattcaaccaagtccttacctaggttacactggctgccaaaaaaagcagcaacaactggagttcttatccttccccaatatttttccaagcctcgatcctcaggaatatccttttgactatggtgggaaccaatattctggtgtcaaaaagaggaatctggctttctgtgttcttttacacacacacacacacacacaaacacacacccctctataccttctcccatgggaatgatggaggtgtaaaccagcctgacctattaggtgtttatgccagaattcactgtctctgtgaatggcactgtcaaccacccagcttccttagtcaggatctagggggatcagccttgactcatccctgtccctcacttcctatatcatgtcaatcaacaagtcctgatgattttattgtagtcagctccctccatctgtactgccactgtgctggttcaagcatttatcaatcttctcttcaaatattgcaatagctttcaaactattgcaaagagataagatctctttgcctccagtcccaatgtccccagtcccttcacttatgactgacagaataatatttctaaaacaaaaaaacctcatgatatatgcatatcagttcaaatttctgcagtgactgtcatctatatggaataaaataaaaactccttggcttggc

SEQ ID NO: 318360 - DNA, 4001 bp, Homo sapiens
ctccagaaccagcagcactgtggctgtggaggagagtgaagggtcaccattgtccctcaccaggaccaccacctgctgggtgtcagagtcatcctccagtaaggcccgggctgtgcgcacctcaccagtgtgtgtagacacgaggaacagtcctggggctgtggactgtggcaacagtgagtaggagagccacgcattgtggcctgcatcagcatccacggctgtcaccttggtgaccaaggagccaggaggagcagagcgagggagacgctggggggctgagtgttcccagtctggccgtgggtgcagcacagctggggcattatcattctcgtctaggacaaacacatgcagagatgtgttggcatgcaatgggggagagccggagtctcgaacccccaccacaatctgcagcatctgcagcaattcatagtcaaaggtacgctgggcaaagatccgtccatcctctgggttgacatacacaaaggaggaggctggggctccctgaacctgatttcctacaatggagtaggtgaggcgggcattatccccagtgtctggatctgaggcagccacagtgcaaagaagggagcccggaggccggttttctaggatgtaagcagtgtaaagctgctggttgaagcggggtgcattgtcattgacatctgaaatgttgagcctgatggtgagatgtttgtgtagggaaggtgaaccagcatcgctggccagcagctcgatgatatagtgggatgtggcctcccggtccaaaggctggctggttagcagcgagtagtggttctcagaaggcttaatctgaaatggcaggtccggagagatatcaaggctcacttcaccatttctacctgagtcccggtctcgcacattaaacaaccccactactgtgcccactggtgtgctctctaggacagggttggccaaagaggccaatagcacctctggggcattgtcattgacatcccccacatccacttgaatcacacagtggccctccatggcaggctgtccctggtcacgggctcttgcatgaatttcatagaaacgtgactcctcaaagtctatgggacccaacacatggattgccccactgctagggtctaggccaaagaggttccgcactgcctcagatgtgtggtctccaaaagaatagtctagttggccgttggtgccctcgtctggatcagtggcattgaggcggagcagcagagtaccaatgggtgcattctctgggattcccacacgtagaactgaggattggaaggttggagcattatcattgatgtccagcacgatgacagagataagggtggtccctgagcgggctggggtccccccatccacagcagtaagcaccagctgatgtcttgcctgggcttcacgatccagctgctgctctagcaccagctctgggaatggcttcccatcttttagggtcttcacattcagagagaagtggctgttggggcttagagtgtaaaagctcacagtattggtgcccacatccggatcctgggcactgtccagtgggaatcgtgccccagatgctgctgattctgagatgcgcatctctcgctcaggggtggcaaagctaggagagttgtcattgagatccaggatctctacctctacacggattagctccagggggtgttcagtcaccacctgcactggcagcaggcagctggtgctggctccacataggctttctcggtcaatcttttgattcactgccagggcaccactcatcaagctcagggaaaaatagcgcccattctcctcagagcccaattgcagccgccggctcaacagatctgtcatctttaagcccagatcctgagcaacattccccaccagcgtccccggctcagactcctccaccactgagtaacgaagctgcccagacacccagccccagcagcacaaggacaacatgcacagcacttgccatttcccagcgagctgtgggagtgtcttgggccccatgacccagaagtccctttgtggagagtaagtctgtgctgtcctgtctccaaggtagacccagggcttggaatgcagcagctgaagtctcttatgtctccttccagcctcttaaaaactgctcggaggtttgcctgcttgcagcagttcttagtcaccgagtggcgggggtgggcaggggggaggggagctgaatttgagtggagctggggagctggaggaggagaggcgggctggaagagcagatctcccacctcagctctgagtctgattggccaaaaagtctgtgtgctctcaaccaattatggagtttcctcaatcctggaaaccttgggaacacaggctgcaaatctgtgtcacagaagcttcctacctccccactcacttcgtgctgcaggttgattcagcccccttggcagcaaagtttgacagctcagatggtactcaacagggaagacaaagtgatacaaaactcctcagcgttctgtcccagcaacttcctgcatgacttcagaagcttccaccactttgcttgaaccagcaaaatcttgtccttctgggagaggcaaagcccatgtattcccccaccctcccccatcctgctgaatgctgctaaggtgagagaaaagattagtaagaaccttgtaaagtcttgccctgactctccagcaatgctttgcggaaatctcaatgtcagctgacatgggacttagcttttctgacaccccagaccccaaatgtggaatgagtgttacagtttttgggtaggggaacatttctggggctgaatcaggtcacccaggagggtggtcagaggccaagcatggatggcttggcttctaggtttcatggtttcaccaaattcaggagaactcaacttaaagatgcacagggtggctgtttctatgaatcagccaactgtaaaccagttttctgacataagtgatttcacttactgttttttccaaaggtgatgaccaacccgccccaaccttccaatttaccgcatctagttcaaatccccagtagggacttgatatgagtcctaagacccagaccaaaagatctatgccaccactctgatgcgtgcctctctattcctttagttctctcctctttctgctgtctctatgtttcaaatagagaggtcccttcacagtgtactagatactgggagacaaagattttatttcccctcaatcccttgggaaatggtaacctagagttaaggtacttcagaatctgatcccctctttcaggaagagtagagaaaacagccacctttgtccaagtgactgcctggtgcactgtaccctgtgcactgtagcctcctgtgctcccacattccatcatcatgcttccacaacagcctggctcttgatcaccaattactttcatttcttactcagatataggcatgacccgcccccaatgctaaactgtgacaactctggttaattcacgaaacagttacaaagcacagcgtctaccacatagttacctcttacaaaaatggtgacatcactatgggcacttactgagaggccagtactctctaggacatggcctagccatatgcctggatcagaataaccctcaagcatttgttgagcctgcaaaggtctcacctctagcccatagagaagatcagagggtgggcagcttgggcgaacaggctcccctgccataggtgcactgggtgacttcaccatcatgaagctatcactccgagtgggtgcagaagccaagggtgtacagccatgagagtggcctcccacatcaacaaacttgatagggtcatctgaccctagctggattcggaggatcccattggaagggggaagcccctccctccttcgagatctggtgagacaggcacaggtgccagcaggaaagcatgtgactccacaggctgccccacgaagacacttagagagtagtgccacgaatgagccaaaggagacaaagcaaattgccactagggacacagccaagtagagggt

SEQ ID NO: 318361 - DNA, 4001 bp, Homo sapiens
cctagactgtcttctccgatctcattatgtgctcctggcaacctttgacttctgttcccggagcaaatgttttctcctttgggcagttttcattcacccctcccgaattccctactactttcattccttcaaccaatgaatattgagacttcaagtacaacttctatgattacacaaattacaatcagttgcaatcatttatctctaagctagtctcctctagattcttgattacttgagagcgtttctttccctcctcttattcctcagcccctaacacggagcctggcacgagggcaagggctggccaaaagcaaaagactcatctgctgctgggacaccaggaagccaatctgcattgattttcctttcgggcatttcaaagacaatttggtttataaagttgagaatgaagcctctagcaagagcaggcgaattccccagagggttcggtctacagaatcgccaacgcccccgccgattactcatccgtgactccagcggcgtctcaaccaccacctccagaaaaaacgcgccaaaatgttttacaactgcctcctcccacgcttcaatgcagaccaacttcccaagcagggggcgagggcttgattccgagccaaggaaaggaaagctctagactagaagtcacactccctagggtcccctcggaatcgctcagctataagcagtctcccacttaatgtcttgacgcccacccacctccaaccagctacctatcgaccaagccttcacttggacaggcaacaataagctgaaattcccgggaaaacgattacgtacttggctgaagaacaagaaagaaatagatcccttccccatagtcagttcggcatctcgaccctgcagtgggactggccgggcaaagttatgaagcttggactttataagttcccagtgaaaagccggagctccctagagagtcgcggggatagatggtcccgtgtctttcacccaccatttctccccccagcttcccaggctactccgcggcctcccaacctcctggtcgcgagtcccagcagctggcactcttccaatgccctgggcgtgcccttacaggctgccagggcggacagccccaagcctgcttagccccttgcatcaggacttggatctgatgctgccatattgaaaagaaggcaacagccggctcctgacgcagaccgcctcagtcccgggggatggagcgcactgcttctcccgggggcgcttggttggtaagagcttgagtgtatctcaagttccctgaacaagcgtggagggatttttcttccaaaccgcgcgggaacggatttcaattctagagcggccaacagtaagcataagccctacccagctgcagcggcttccttctgcttggctgcgcccagcctaaacagtaaataatgcaagctttctctctctccaagcgcgacaggggcgagggctggagcagctccttgctctttgctactctgggctctggagagtgcaacctggggctcccacttggaagaccgcgctccagtcccgccagtcccctggggccccagaaagtttcttgaaagtggaaactcttacctgacccaaaaggtcatagcccagctcctcggcgatggccgaggctgcttccgggcccccggggatctccgctgcccattcattgacaaattgccttttcgcttttgcactgttcagtgcacaccaagcgcaaaagaggacgaaagcagtgcactgcagactccaggctcttcgctccatagctcacacactcgcttgaacaagagtgggaagggaagaggaaaaagaagcaagataggagaaaagccagacagactcccccttcccaccctcgggctctagaccactcctggctcctggttgctctgcgaagagctaggaggcgcgagaggagaggctgggcggcggcgagcgctcagtgaagcgcttcggtctccaggctgagtggagccccagcccttcccagccagaatggaaatgagtgtttacacgtcaaatcgacgaaagccatctcttgacgtcagatctacctggactaagatccgaatggtattcccggcggggcggagaagcggctaaaataagcagccagggattaggaaaaggaaggaactgtttgctgggatcagttaagtctgctccttgtctgcccataaattctgtaccgtgagaaacattttcacttttcaaagagaagtgccccacttgaacataactaccaagaatcaaaggctgggagtgctttccctcccttccatccattttctctgtatttactttattatctcatgtgtgtggcggggagggggggaggctataggattcttataatggccctttgggcatcagcacctgctatgaagaacaaggctcttaggtctttcaaagagagaggctaggagagtaaggagaagaagggaagctactactgtcccaattctgttctaaattgtctgagaaaattagcatgtctatgttaaagcaatactattaaaaatgaatttttaaccattcaagccaccttagtttacaagtttacttccctcctcccctttgtttctcaacctcagtaaaacaatatcagtagttatactccgatattgcaaagccagcgccaccaccaccttttagggtgtttatcagtaaaatgattaatcatgtgattttaaaaaaacatatttttaagaattcgtcaacaaggggatctaggatcccaaaagctgttgtgttgattcagggagggaaagagcagtttttatttacctcgactttccattgtgcctcagtagagctcttcactttggtgctgagctggagctgtgccattactttcccataaaatgcacaatgcctctttgtggaaaaatggtttcctgtgggaggagagcaaggaaacatctaaatgaattctccacccctcaccctagggaagtgagttcagtctcccatggtggagcctattcgaaccctgagggattgaacctggcgggagataccagtgcctagtattcagcaccgaggtctggacagcgacacacgcaggactgccgcaggagctgctctctcttctgagcaccaaagacctccacccttctgcagctggccagcaccaagctgttttccttttgatatgtgcatttccctcttttgaacagcaaaataggaaattggccgcaggggggagtgtggttaggttcatgatcgtgacaacttgtgtccagctcttgggaacgtgttggactcaggccaaaagtaaaatcgccgggaggtggaattgagagagtatgctgcacctgggaagtttgtttttttttttgttgttgttgttgttgttttttaaagctcaaccgcccgagggcgcgatctatgctgtagaaatagaagaaaggggagaaggttggaaagaaagcatataaacaagtggagaaaggaagcaagagatgttccttacaagaagcaaatgagacaagacttggtggaggatcaggctctgtagtgctaatttttcatttgcctccacgtttgcagaaatgtgcactacataatttctttaaacataaagcatctttacaaaatcaaatgccaatgttaataagccatgtgacatggttaagtgttttacaataatgtaactcacatgagatgaaatggaatgggctccgattgatagctttgttgtctgttctgtaaatccacatgtgtgaatgttgatggctgggtaagctgtcttcttttcccttcacacctcggcctgagttgtggcctcaagctctcaagggtgtttcattctcacagcagacagacactaactgtgcactagcaaggcaagagaagcccagggcaaatgttttataacggtagatgtgtcagaggaggaacatatttgtccctttcttattattgttcaagtaaatcagtttggcagagtgttggcaatagggtccgtgtctctctcattaatgaggcatttgtcttaaatg

SEQ ID NO: 318362 - DNA, 4001 bp, Homo sapiens
gcagttgtcccactttagagggtttgtacttctccgggtatctattgacatctttggttcatttaggactatattcattattcttttgagctagtctccctttactcagtactaaatttgaggctaccaaatcctctaggtaaccctgcatttttaaaattaagaaacaaacagttgacaacagtatattacagaagaaacgtgttctttaaattggtgattctcatcgcccagagaattttaaaatagagaagcttaggccctgctccaagcctgaatctcagtgaatcttcctataagctgtggatggaactggggagagaaatcagcagccgcagaaaaagatcaccagtgcttagctctgttttctctgctgtcaactggtttttcttcttgtcactaccttaatccaagctttatcctgaggcaataaggtacccaatatagtaatgctaaattagtgtaattttagtaatattaaacaaaaagagaaataagcagaaccaggaacgtgctatcagccttctacaaagaattattattctaataaaataattttgttaagtttgttttaaaacttttgttagtaatgccatcttaactaaaaatggttagaggaaagatagtattgtaaatcatatataaatatagatggttttcccccactatttgttaatgcttttgtgactatgctatcccttactcaaagatcctcccaagaatgatgatgtattgttttttactattaagatttatgtttatttattttgaaaagcagttttcacattgaatggtctaggtttagatgcatgcctagagctaacaggtgggaaaaagaagagagatttagtttttgctgtcttccccagtctcctcctacacggttaccagtgctatttagcctttcagtagctgctcaaggaatacacaattaaatccccagtgtccacccccataggtcatacatgatttgtatgatgtccacagtacccaccagcacaatttcctctgctactcataccctctttgggtctcaaaaattcctaataattgcgtgcaattcccagacttactactaaactgtattatgtctcactgttttcccacaagctgttttctatgcctagactgtcttctccgatctcattatgtgctcctggcaacctttgacttctgttcccggagcaaatgttttctcctttgggcagttttcattcacccctcccgaattccctactactttcattccttcaaccaatgaatattgagacttcaagtacaacttctatgattacacaaattacaatcagttgcaatcatttatctctaagctagtctcctctagattcttgattacttgagagcgtttctttccctcctcttattcctcagcccctaacacggagcctggcacgagggcaagggctggccaaaagcaaaagactcatctgctgctgggacaccaggaagccaatctgcattgattttcctttcgggcatttcaaagacaatttggtttataaagttgagaatgaagcctctagcaagagcaggcgaattccccagagggttcggtctacagaatcgccaacgcccccgccgattactcatccgtgactccagcggcgtctcaaccaccacctccagaaaaaacgcgccaaaatgttttacaactgcctcctcccacgcttcaatgcagaccaacttcccaagcagggggcgagggcttgattccgagccaaggaaaggaaagctctagactagaagtcacactccctagggtcccctcggaatcgctcagctataagcagtctcccacttaatgtcttgacgcccacccacctccaaccagctacctatcgaccaagccttcacttggacaggcaacaataagctgaaattcccgggaaaacgattacgtacttggctgaagaacaagaaagaaatagatcccttccccatagtcagttcggcatctcgaccctgcagtgggactggccgggcaaagttatgaagcttggactttataagttcccagtgaaaagccggagctccctagagagtcgcggggatagatggtcccgtgtctttcacccaccatttctccccccagcttcccaggctactccgcggcctcccaacctcctggtcgcgagtcccagcagctggcactcttccaatgccctgggcgtgcccttacaggctgccagggcggacagccccaagcctgcttagccccttgcatcaggacttggatctgatgctgccatattgaaaagaaggcaacagccggctcctgacgcagaccgcctcagtcccgggggatggagcgcactgcttctcccgggggcgcttggttggtaagagcttgagtgtatctcaagttccctgaacaagcgtggagggatttttcttccaaaccgcgcgggaacggatttcaattctagagcggccaacagtaagcataagccctacccagctgcagcggcttccttctgcttggctgcgcccagcctaaacagtaaataatgcaagctttctctctctccaagcgcgacaggggcgagggctggagcagctccttgctctttgctactctgggctctggagagtgcaacctggggctcccacttggaagaccgcgctccagtcccgccagtcccctggggccccagaaagtttcttgaaagtggaaactcttacctgacccaaaaggtcatagcccagctcctcggcgatggccgaggctgcttccgggcccccggggatctccgctgcccattcattgacaaattgccttttcgcttttgcactgttcagtgcacaccaagcgcaaaagaggacgaaagcagtgcactgcagactccaggctcttcgctccatagctcacacactcgcttgaacaagagtgggaagggaagaggaaaaagaagcaagataggagaaaagccagacagactcccccttcccaccctcgggctctagaccactcctggctcctggttgctctgcgaagagctaggaggcgcgagaggagaggctgggcggcggcgagcgctcagtgaagcgcttcggtctccaggctgagtggagccccagcccttcccagccagaatggaaatgagtgtttacacgtcaaatcgacgaaagccatctcttgacgtcagatctacctggactaagatccgaatggtattcccggcggggcggagaagcggctaaaataagcagccagggattaggaaaaggaaggaactgtttgctgggatcagttaagtctgctccttgtctgcccataaattctgtaccgtgagaaacattttcacttttcaaagagaagtgccccacttgaacataactaccaagaatcaaaggctgggagtgctttccctcccttccatccattttctctgtatttactttattatctcatgtgtgtggcggggagggggggaggctataggattcttataatggccctttgggcatcagcacctgctatgaagaacaaggctcttaggtctttcaaagagagaggctaggagagtaaggagaagaagggaagctactactgtcccaattctgttctaaattgtctgagaaaattagcatgtctatgttaaagcaatactattaaaaatgaatttttaaccattcaagccaccttagtttacaagtttacttccctcctcccctttgtttctcaacctcagtaaaacaatatcagtagttatactccgatattgcaaagccagcgccaccaccaccttttagggtgtttatcagtaaaatgattaatcatgtgattttaaaaaaacatatttttaagaattcgtcaacaaggggatctaggatcccaaaagctgttgtgttgattcagggagggaaagagcagtttttatttacctcgactttccattgtgcctcagtagagctcttcactttggtgctgagctggagctgtgccattactttcccataaaatgcacaatgcctctttg

SEQ ID NO: 318363 - DNA, 4001 bp, Homo sapiens
agaggacacgcacactctgcaaagagaccagcatgagaagggcagcatatggaactatatgggtgggtttagagggtcctgatgccacttgggggttctcagatttggtcctgcagaagcacaagcattaagccatcctaacaggaatccgcattcttgttgtgggtagagtccaaaccaccaaggatgaacagaggctcccgtcagagggctgaggaaaatctagaaagctgaagggcagtgaggcattgccaagtgtcctgctctggatgactcttggatggggccagaagggccagctgggaggaaggaggcagagagctccatgttgccacaatgcagcaattctgctgggtggaggtcctgctccttccccaatggtgagaaatgtcctgtcctgttgcctgttcctaagaaaacggggagtgccctgcatattcccacagcacactctgcttactcctagccacactgtattcaaacgatctaaggacagagagagaacacatggtcactcatggatactgcctgcctaactcttccacatccttcaatgcctggctcaaactccaccttctccatgagggcttctctggctactctagcctcaggattctcttttcttggcaagcactaaactctcagtctcaaactggtttctggcatgcttcagtcttcttaaccctgtatggcctgggctgtggttctgctacacaagaagctttagcactgcactggaccctgtaagtttgtgatgcttctatcagatgttccaggcactcctgccaactggggtgcatggagagtggcctagcggaatagagtctttgtcctcccaccccgaagcccaggatctctgcctgtgggaatatcacgtgtgagggacttgaaaatcttcacgagtcatgtagttaaaatgacagttgttgagggaggaaaaaaaaaagcaactgtaaacacatatgacactctagtcaatgatatgcacgatgacgtatttagtgaggtgtcctgatgtctgcaatttatttggagatgcatcaaaatgtaggctggattcgtggatgtctagaacagtgcgtgatagttatgtgacacagcaagtatagcagcagttaatggcagaatgtaggtggtgggtatacagatgaccactataaaattcttgctgtacatctgaacattttcaaaataaagtattggggaaaccacacacacaataaacaaaaagactgttgttaaaagttccccgttctgtcagcaaatctccagcggacctagtgttctgtctctgccaggactgtctcctatcgacctgggggtggtttggcttagatgttacttccaggaagccctcccagggccgcaaagacagggtgaagcgcccctcctctgcatgcaccgtacttcctcagctcagcacggacttccctgtactgtgagggctctaccccagcaggaactacagcaccacgtctgctacacagagagccctcaaccaacctctgtgaatgccatcgcccagcctctctgtcctctgtcacccgggcgcctagccaacagccaggaccatggcagatgctcagcgaccctggacctcccggtgagatccgcggccagtcctgcccaggcctcttttccgtcctaggtggccctcttcacatgccatgccccggccccatcaggaccttccctgccgcgtccccttcggcgcctctcctccacccagctccttttccgaggacccctccctcacccagccgccctcctataccccacctagctgagaactgagaaccctttacccgccggccctccccagctgggaaccccaccgcgtccttcccgcaccgattttgcccggcggggcatctccgccagcagcggcggcggcgaggagcgcggtcaacgcggcgagcagcggggctgcgcgggccatggcgggcggcgagcgggcagcacgccggattcaggcgctagcgggttggcgctcggctctccgccccgccccggcgccccactggcagtcccgccttcctgccgcgccagacccagctccgcattggccaagccgccgtccctctccagcacgaggccctcattagctccatctctctcggggtaggctctctcattggcagcttccccgttccgccccgccccccgcatgcgggctcctcattggctgggttcattcttgcccggcgcaggtgtgcccgcttcgggtcctcagcatcaggaccagggcccagctgcggcagagggatgaaacagaccaaagtgaagctttgaagacctcggttatgtccagcctctgcgttattagctctgtatcttctctgtgtctgtttcctctattataacacagacgaagaatcctgctccacctttctaggtggttgtaaccatcttatgagataagggaagccttttgcagtgtctgcaagtgctggaaattgctgaccaagcatgcggccagggtggtaagacgctacctcattcatatgctgacacaagccctatgctttctatactgctgttatttatgtgtttgcagtttttatatagttaatatctctgctttctgcttcctaaaaaccaaaaggcgggggaaggtttcatctactctcttttcagaaaggagaaaaggagggataaactcccattttcatcctctaagaagacaagagcagcagctcagacttgctagtttatcacgctgtgaaaaacagacttcctctggcagaaaataaagttagggatgagtttcagaataaagaaaatccggaggctgggggtggctcaagcctgtaatcccagcattttggaaggtcaggcgggaggatcgcttaggccagcagtttgagaccagcctgggcaacataatgagactctgagaccccgtctcttaaaaaaaaaaaattcgccaggagtggtggtgcacacctgtagtcctagctattcaggaggcagaggtgggaggcttgagaccggtagtttgaggttacagtgttctatgattgtgccactgcactccagcctgagtgacaagagtccctgtctttaaaaataaataaatatataaaaataaatgaaatccatatttactcagtgagattatggctaaaataagaaactgggccgggcacagtggctcatgcctgtaatcccagcagtttgggaggccgaggtgggcagatcacttgaggtcaggagttcgagaccagctcggccatcatggtgaaacctcatctctgctaaaatgcaaaaattagctgggcttggtggtgtgcgcctgtaatcccagctactcgggaggctggggcaggagaatcgcttgaacctgggaggcacatgttgcagtgagccgagattgtaccactgcactccaccgtgggtgacagagcgagactctgactcaaacaaaaacaaaaacaaaaaactgaagtgattcagagaatggtgaaagagcttatagctggggttctaactcagcactgagacttaatttacttgggccaaactggattactactagtaaactggtagatgaataatcatgcatttgtcataatcttaaacttttttttttggcaatgtttgtgtcaggatgcaacaccttttaagttcatttccaaaggttcaagatactcccttaaacagtttttaaaacaagcactcattgaccactatgtgccaaattctcttatgaacttattctgattcttgtcatttttttgtagggtaaatcatgttagtgttcaaattcatcttcttgactatactttgcttgtaattttagggtcctttgtaactcttaaatctagagctgtttttttctgttaggaagcccttccaaccctactagcccattgacaatgtgtgcgctcatcaacattgtaagagaggttcgaaagagctgataagggaaaagcaagtaggcacaattcttgtggcacaaaggtgccagactgggaatgcagtggggtgactgtatcatt

SEQ ID NO: 318364 - DNA, 4001 bp, Homo sapiens
tcagatacttcccactaataacaagaagcctttcaacattttcacaacatctcaaaactgaccccttttctagcttaaatggcacggatctggaaaagcaaactatacacagaatcagaaaagatgactgcccctgagggattacagaaaaagtggcagtcaggtttcaatgaagtaaaatgtgtccaatgatagcggaggggagggggatcaactgagctgaaactggcaagaacgtaattccagggagctcacaacacgcaaggacccggatttcccgctgcctgaacgcccagtattcgcacactgataagaacacctccccataatcccctggccagcgcctccaacacccccaatcctttccccaggaacccagtcccagtttctgcagttcctgtaacagccacattcccatacaagggctgcctgagctccccaagccctccaacaatcaccccccagtgccctcgaaggtctattcagagaagtcaccaagatgcagtcacccaggaaattcaaggacctccaacttaccaaaaggctttcggctgtacagagctaagcttcctattcccctcctaaacctacaatctagttttcatttctcaagaagcctttccctgtgctcacgcacgcagttgttagctggctcggtgaggcactccaagcagtaacagcggtagccacaaaataaaccagaagcatctccactacgaagcagtaataacaatttgtcctaatgattcctttgtccttggaaaaacaacttcagaaagttatccactgtgaacagggcaggctcgcggcttcttggtccggagacccagttcccactggcccactcaccgttggagagagcttgctgaagctcggtgtctgatatcactccactcctgtctttatcgaccctataacatcaagaagaccaaataagctggcgatcgaaagttcaggaaaagcaaaacaaacgtcttctgtcaaccctgcaccgactctggaaggctccctcctggaacctccgcctctcccgtcccgctgaggagtacagcggaatcaaggaagtgccccaggagccgacgtccagtgtggtcttcccctaagaggacaatcatcttcacctcaatccttcccttccttcctctcctggcctgtctgaattcccatttgcacccgtttccctttttcacagacaagacaagattccctcagataactaagccattccctggccatcagtcactacagtttcggacattcggtggaaaagcgaccagggacagaaggcgccgccataaaggtcacctggcccgagcagacgccaggtcgctgcttcttccttggctgctgacattttaacagcgcccaggcagtctgtttccgctttccccaaacaagcaccctggagaccctccacctggcggctcttgaggcgagaaaaagggcctagcccaggagccggtggccgcgacctcgggtctgcagtggcgcactctgcatcttgggaagggcccgacgcacaggacagggaccgggcaggaggcaggggcggccccaggagaccgggcagcggacgggggagaccgcgggggacccgccaggggacgggggcggccgcgtcggctggggcaggggtcgggggcggcggcaggggacgggagggggccgcgggggacccgacaggggacggaggaggccgcagtagaaccggcagggaacggggttggtcgggggagtcgggacaggggtcggggccgccgcggcggaggcgggaggtgcccgggcggtgccaggccgcacctctggaaaacgttccacaggaagctctggtccggcagcgccgcgcctgcagcaggcccagggccggccccagggccggggcggtaagagtaggcggccatgggccaaggcacgcggctgggctgaggcgcctgcagcgacgagagacctctcaggccgactccgcttccgcctctgccgggggcagggcctggcattatcaccacttccgggggcgcaggaaatgcgtggtctccgggatggtcacggggtcccgcgcagccaatcccctcgcagctaagttgccaggcaacgccctggcgcctgcggggagggcggggtctgggcgcctggaggaagccagagctttggcgcaggccgcctgcgcgctgtgccaggaaagcgcttggagaaaatgtccggccccgcgacctgggacaggaagtgatggagcacggacttagtttgcctttcagttcttgtataaatagttttgaggtgaatgtgatttgctaacagtcggaaactctgggcggggcgcggtagctcacacctgtgatccctgccctttgggaggcggaggcgggcggagctcttgagcccagcagttcggaccagcctgggcagcatggatagaccccatccctacaaaaattacaaaaagtagtcgggcgtggtgggctcctgtggtcccatctactccgtgggctgaggcgggaggattgcctgagcccgggaggtcaaggccgcagggagccgagctcactgcactacaggggtggacagcgagactctgccaaaaaaaaaaaaaaaaaaaagaaagcaaaagcaggccgggcgcggtggctcacgcctgtaatcccagcactttgggaggccaaggccagtggattacctgaagtcgggagttcgagaccagccttggccaattgggagacaccccgtatctactaaaaatacaaaactaaccgggcgtgatggtgcacacctgtaatcccagctactcgggaggctgaggcaggagaattgcttgaaaccgggaggaggaggttgcagtgatccgagatcgggccattgcactccaggcctgggcaacaagtgcaaaactctgtctcaaaaaaaaaaaaaaaaaaaagtcaaaacacaattcgggtgggaaaggcagtgtgcagcattctcggttgtctgttccgcccccaaaagcttccctcctttaggtttaacctgcgcccccgtgctctgcatcagcgcggcccctgaccccgtgcagctggaaacactgctgggccccttcacacccctgcctgctgggccccttcacaccccggtggtggtgcagccctgcctcccgcaagacagcactgccttcgtgctggacacagttctaaggtggagcctggagtgcctgtagcacaaatcccggaattgggaagtgcccagctttgggccactgtgatccctgggtctttcccacgcgcgtagtctcgtgccgccttccaccccggtcctgtgtcctgtgccccggttcagaatactacaattattctcattatttcatggggttatttcagcttttcagtttcttcagtgcctcattccatgaatgctaacttttttcatcctcatacttcctagggttgtctctgaattttcactcagttgtctaccaagatgttgaatggacccagagccaaggacgtggtcttttatcagtggcacctgagactttcttccctgtggacgcaaatccattattcagcactctgggcacagctacagatctgatcagctatccattctccaaactatctcatcctctgtcccatttttctgtctctcttgtccacaaggcatatacctgagagttttcaaattcctcagagaaatttagatattctgtggctttggcattcacctaatgtgttaatctacaaaccttttttacagtgtggattttttttcatgatgtgaattcaagtggtttctaatggtctcttcataaagttgtaaaccaaaagtaaaattctaaggccccaccccatctgaatggaccccttctctgggccagggcactccaaattaacctgaaaaccgttcaggccacgacatgaagtgggggcgggtgggacatggctgactatgccctcctcccttttggaattcagggaaagccaacacagaccttaagtctaatgagaaacaccatctattctctctgaagc

SEQ ID NO: 318365 - DNA, 4001 bp, Homo sapiens
acacacacacacaaaactcaaacacacatttgaacaccattatgattttctgatcagtccaacctactgtcaatcagagttggacaaacaatcccagccctagattttcctgtttccacacccagacctgatttacaatttataactgcccattgttcagacttgtggcttggaggtgcagtacatcgatgcctgtccacatctaaggttagatgacgacccctctactttactattagatgtgccaaggatcagcagctcctgaaatctttttcctgtgcctgtgtgggggaggggattcacggcgtggaaggcctgggacagggaagaaaggagctgtccctgggttatcaggaaagggaccaaacgtgggccccacatccacctccacgcctgagttaagaatctggagctgactcctcagaatggctgtaattggtcctttactcatttccttggagaagcagcggtcaacttctactaaaactcccggttgataggcggcttccctgccctgtcttccggagcacttacgttaaggggaaatcactataatcaaatctctacgtcttgcctgctgctaaaacaaggcgctttcttcctgggattttgcagggacgactgatacacacacggtctccctacacacaagctcgcacacaccgacacagtgtaactcccacagcgtcctcgctccttctccctccctcacccccttgtctctctcaaggattgctgaacattttgctccaaactctccaagtcacccacgtgttctccccttttgctattcaatttacttctccacctgacgaagagaaatgcgagttgttcttaggcttttagctgcaatcctgggaccaggctttctcactcccccctcctccccagtcagagcagccccaccgaccctcttcccaatagggtgagtggacagatgctgggtgctttcgctggtcaaatcccgcaaaaccttcaccttctcttcttctccacccagagcaaactgattttgcctgtttagtctcactagccagggtggtatggaagtgggtggggagagggctggtgcgtggcacagataactgggaagcgcgcgcaccacacacacacacacacacacacacacacacacacacacacacggccccagttaacatttatgcagtacttttggggggtctcttacacacacctgaatagcatactctcaataaaggataggcacacccctgtttgtcctcccccaatttccagactagcattttaccctgggtctagaattggtggtgataagccgacttagatggagtatttgagaaaaggggaggtgaccctttgcctgaatgggggagggggcgctctccactcaccgcctgagtccctggaacgaggagggccaggacatcctggatttcttcaggccgggccggtggccggtctccaccgcgtaggaggtgcggtccatggcgcgacagtacaggtagcgctcggtgtccgagtagccgcgatgccggacgcggccggtggccccgctcgaggcgtagcggccgcgggcagccccgggcggcggcgggggcggcggcagggggggcggcggcggcggctgtagcggacactggggctggggctggggcgagggtggcggcggcgggggcaggtggtgatggggatgcaggaggcggaactggggctgccggagcgggtactggtggtgctgctcgtgcctccagagatgcttgggggctttgagcgtggccccgccggcgctgtcgctgccctctccgctgcccgcccgggccggcgcgctgctgccctctgcctccatcctggctcgcggctccgcgacctgctgcccagcccgggttcaccgcgctggcccgagcgccttcctgatgctgctgctgctgctgccgccgccgccgcttctgcagcccagcagaggctggtgcttagcttctcacttgaaggcgccagagcctcagggctaccgagagggggccctgccagcgggaggggtcacagaacgcggcagggctccttccaccgaggctatggcagagacacgctcccgggctccccaagtcaccaagactagggtgcgcggtgcccggtttcgccagaggttggtccttcttcctccctttcttcttcccttcctttgggcgccggcggcgagagcagggattgtcagcaactcgggctgcagaagcagcagcaacggcggcggcggcagtggtagccgcctccagggcaccggaaccctgatcccggagctgctgaaaagttggacagctccaggctggcacgcccgagctgtgactttcaccaaaaccactccagccagtcaggagtcagacctgtcctcttgatccttcccctcgccgtgcccgcgcctccctcctccacactgctccccactgccccggagccttcctcttcacctccgcttgcctcagtgctcttagagaaatggagtttggcgattcctggctggttctcagagcttgttgacgatgagccccatgctggtgcttccaaagataaggaatgtgaccaggcaaagttgcctggaatattgtctatgcgcgtcgctgaaaaattggatctgggtgaagatccaatagtaagattaattcagtctctttccctgacataggataaaacattgtgtggctctttcccacagcagggagaatgcccaatgtttcctcttgaagatcttcctccaacttggcctcgggagtggtcctcgctggaaatcaaggcgagtcgtccttagttgcagagccatggctgagcccgctggccagagttaaggttaaggcaccttttcaattacaaacctctgattatcttcggtagtctctatcttcagtgcctgcctgcaatttgcctttctgccacttccagcagaacacagctctattactaaagtgttttaaaaacatgttgtatcaatattcacagaaattagagtcctatgaggcactagaatccaaattcaacttttgtcttcctttaattagcattttcctgcagtgtcaaatgttttttaaagaagccaagaggatttcagggcaatatatagacacttttttccctgtaccttttttatttgaccatattacttaaagatgaaatgcaatttgcttactgttaaaataattctagaatttttctttgtggaagttaccacgtaccatccattatttgaacgataatatatttaggactcacaacaacttgttggctgtgtaattattctattcttcccacacactcagtcttaacatattttcatatgtacatttcaagcatatcatgtaatggatgctagagtaccagaatcaggaaccatgtctcaaactctctagactgctgaaaattcaacactctccacacagtctagatgccactgggaaaataatgccaatgaaaataagtgctcactttgtttatcagcaagaacagtccacgaaatgtgcaagtggcaggagaaggccttcatcatctcttcatgctatttatttatttatggttggaaatatacctttcctccatcagtttaatatgagccctctgctcatatgtggactatacacaaaatctgagaaaggttgtgtcttaagagaaacaaggcaatctcctaagcaccactctccactgtgtaggattaaaccatactttacaaaggcactctttttgccccttttgcagacacaagtgtgactggtggcagtggtcaaagtatttaccatgcctaggagggcactaagccagtattttcccaaacacaaaaggagagaaatggaagtgttctgcagtatagactgcctttttcttttaattcattgcattattaacatccaaaaccattttaaagaagtacacaaatttcttctttcccctgaaatgcttgccacctttcgcctcaatataactgtggcaaaatacctctatccgaaactcttattctaatttctcatacactaacagta

SEQ ID NO: 318366 - DNA, 4001 bp, Homo sapiens
ggaaaaagaggagctgagttgaagtcaggagctgattcagataaagcagcttcaactctactacttcttactcttagatgggctccagaccaccttgagggatgggattatatttattttatagatgcactcctttctcccactaatacagtcagttaggaatgtatagctaagaatgagccaaccattactattcgtgtctatggctacagaaactcaataaatcaactcactattctgggtcaataaatgaactcattatactgtttcttcatgaagtaaatgtgtttctaaaggaatgtattaaaattacatttttaaaaatctatgtattttgcatatatttgattgatacagaaaaggagtctacgttggctacttttctttctttctacaaacttcattcattggtgtgatctgaaaggggataatatttcagaaagcaaaaatatttttaacaacaaaactttgtatttccagtgtgatctaaacacaaaattatgcaaaacacaactaatatttctctcctactggctaaatcatgccagttgtttaggtgcaatcaaaaataagccactaatgttatttttataggaattggcaagtaattgccaactatagctattaaaagtttatatttgccacaggagcctgtgattttaaatactgttcaaatgatttatgcttgagagttatacatagcacaaatacatacatttgtatctacaggtctaaagaggaaaaattagacaaaaagcaacttgaaaaggaacccctttatttttaatgacctacctttgtgctgtattgagaaaaagtataaaaattatttgggaggaagaaaaatatttctaagcactaatttcataggcaaaagccctattattttttatgataggctaggggaaatcaataatgatttaaaagcaaacagtaaactgctcacatttaccagtctatactcagtattaattctaccctgcagtgtatgctatagaaggtaatgaaatgctgatgttttctggttttccacttcaatctgctccagctttatcctaaaccttgtcagcaacagaagttaccccccagcaatcatacaaacctaataacggcttccctggcttaatttgatctgctccaatcacaaattccaatccacatactttcttctgttatggttgtgtctgtatgtgtttaatgtactttttataaggcttttttacaacaagcgcatggtttttcattcagccctctaccacataaacagaaccactgaagagcatttttgttcatataaaaatgttttagttattcatagtgtatgtcttcaattggctgcagattacagtgaacaaaagtattgctgccatcattttacatttctcctgttactgtgccctatctgctgtgtacccctgtccccaaagcatttattataatatttgctgcttgctctcagttttggactgagatgcttgggggtgggaaaacttaaaacttgcctgactcaagtgctctctaagctttgatcccagcatcctgctttaacctgctcctgttggacctctgccactttactgaccccataaaacaaacagagctagcaaatgcatcaaacagcctccttcaaaatgcagcttgactgtgattcatggcacaaagctggaataaccctgccagttcttagaagctttaagattcatcgtcttgaacttgatacacatagtatagcaccttaaaaacgaatcatctgctagttcagtattttctacttacaatcactccctcccagggcatgtaattaatttactgagcttaaaaaaaaaatatcaggattactcacacagtcttgaagatgcaatgtcagctatttaggacagaaacatccaaggccgtgtcagaactcaattacgactacatatgcattaaggcaggaactggcaggcctcagggtacgccaactataggactcgtgcttctcgtacgctgggctataatctatgaaactgagctccagagccagccaatcacttagctcctcataacaagtctaactggctctggaaagctgaaagggctgcactggaacaacacagatgagatattctacacattaatctacttatctggaatcactttgcctctaaaggccagagaaaaatcacagcttccttgtcggaggggaaaaggacaggtgatctggggaaaacgcagctacacctggagcaaggtctcttcccggcttggcaatctcagctgtgccggcgctacgggacccgagccgtcccagaaaccaaagggcaggcacggcagcaaacgcctgaggtaattttcatctttctttttatttttagtagaataatgcagactgaaagtgataagcataaagtcgctgaggcaactagatatgcttcgattttattttacattttcctattctaatcgtgtgcaggatcatttgttatgaagtctgaggagggggagaattaatgtacctgaaataaacttgaaactaaaacgatcatttgtggaggaaaatacaggattttccagaacagtttcagagctacctttgcagatgggtaggcttttcacccacccacagaaagaagagtcaacggggctgagacaggacagggatgggtttcaggagcacaattaaaagtttttcgtatcttaaagaaaatatctatgttcagagagaaaattgagaagataagttactgcccagttcctctggtctttgacacttagaccacataagaatgttccatggtagaagggttgggacagagaatcttaggaatcctaagagagaatcaatactgctcccctaccccaggtttttcttgttttctttacaatagtatccttatttcccattacattttagtgttagtcataccaattacttgttacaccatacttctacatttgcagttattaaaggatctgcagaaaacattttaaagtcaaaatgattatagaggcaactaaaataagaaagcaaaaaaatatgtgaaactgacatacacataaccagaacaccacaccccttagatacttaatgtacttaacccaatgacaaatccttccaaatccttagcaaattgtctgtttctttaatacattttgtagcaagtgtaacattagcaacgaagaaaaactttggcaataaacttgtacataactaaatcaatccttatgctttcatagtgacgatagaatatacataatattttatttgttttgttggacttataaaatcctaaggcaagaagctgagaagaaaattttgctttatttagtggtgacatataaacagtaacagaagagacatttatgcactttttttggctgtagataattgactgaattcaacttgagatttgacaccagaaagaaaaacgttgcaatagacagaaaacagaaaaagtaatccattggcaatttccccccagggtttgttctttgaattgtccaatctgtgactagccagggaagaatatttctgctctgtttaaatagtttttatttaattaaacctttgtttatttgacagtgctgctgccttcggtgactatatgagaatggaaacttctaaggaagccaggttgttagaattgttaccccctttactcagagataacatagattatccaggctgagatggaaaacaagccctttattgaattttcaacacagactccctgcttctcatctccttaataaaatttcattaaaatccccttgaactcccatgttcaaatctccatttgttgacagacaaagccaacaatactctaaactgaggcctgcaagtcatttcatttgtatttttgtccagaaatttcccataggaagacttcacctcctacaactccgaagaaaacccttactgtccaagaccgtcaccagcaaccatccgcagtcattcaagtggaagctttcacagcttttgtacattctctgtgtcaatatacaactgagttacagactgt

SEQ ID NO: 318367 - DNA, 4001 bp, Homo sapiens
aaagcagcgcaaccaaaagggacactggacacggaaattctggtcctggctccgtaggaactcatgccagctctcctgctctggcacccgatgcctggccttgagccaaccttctccttcagtgcatctcccagtgtttattcatgcctttcttttattcactgtttgttgctcacaattttttccaaaaagaaaatcttcctcaaagagaagccatcatttcccaataactgctttaagacagaaaaagtcaatgtttgtctcactcctcttatggccattacatctaccaaactcagaaatgccatctaggtgttaaaatcctggggacaataacactttcccagtcagagatctagctacttaaaaccaaatttttgaggttggtcatgtctttgggtgtgacatggcttttatttcctttgtcattgactttcatctataacatcaatgcattcctgagcacggtcttgtcactggtttaggttttaattccttttactttttgctgctttcctcctaaaagccttgtttctgctttttttttccctcccattgctaacgtacatactgtttagttagttatggcaaaactgtaaaaaattatttagtcatacagtttctcaactaacacactcattcttttttgttatgttttctttatcataatttatactcatcttatcaaaatgtagatgtaatgtatagaacctactactacctgaaattatctaagtgtgtaacatagaccctagtacttggactcactgatcagagtttggaatggcctctactcaggcagaaactccaaatactccaaataagctcacatgatggtctgttttaatatttgggtttttcttcttttttttttttccaagagcaggaaaagatgaggaatcctccagaaaaatacatggaagcatatgcatgaaacaaattcacccattataaagaagataaaaatattcacaaagaaaataaaaagattggcaaaatgttctaacaatccaaattcaaagaacacaacaatactaccaagtaccagcctgcaactttctgcgtagaattcctaatccctttcttctttcctttggaaaggcatgtttaagattatgaatactgtatatcaaagtcaggagtgaggaagggctttatgaagacacaccaccattacacacacactgtatgtgtctctgtccaagtggggatcatgcagaaaacagagcaaactatgattttcctcccctcatttctggtcctttctttcctcagctgttggggaagctggcagggaaattggtttaaggaatcaaagaaacgccactacgtacgtatgggaataaaactgcattcttatttgacatctggcatccaattttcttgtaggaacttgcaataggaattgaactttgagaaccacccacctcaaccactcctagtaccagtctccaggattcttgccctgacttggacatttgtgggatttatggttaagggagatcacttggccataaatccccggtgaggaatgatgatggtcctccctccctacccccaaaattaaaggcgcgagagcaggactccctgaagggaaacggccaccatttctgcgaggtctgcgcaaaccttaccatgtatgtgccaccgtgaaacgccgctgtttggggatgttgctgctgagaagcattctgcgcagaagcctgggggaatttctcggagagatcactggagagagcttgggagaaaccgatttcctcgctgtcttggacttctcatgctgcaacaggttttctcgcaaggatttcacaaggtcttcgttcagccacgggtttggacaatgcggattatccacttcaggtactgttaaagtgtccgggcttgtctgctgagccattttcctggtcaactttgtacagctggcaagaatccagggcaacgtggttccctcgctcacggtcccggaaatgtccagggaagcaggtctgagcctgctgctgttagtgcattcagtcgcctgcctcagtctctctgtagagcctggggctgggtgcagaggaggcgagcgcactcctccgcggaagcgtattaaacgtcacccctcctctcccaagcccctgccaaagatcactgacaagctcgcatagcaaatgaacaaggagggaaagcaccgcgctcgcacggctttgtccgtgctacaaagcagcctgttaaactattggaactaatgcgccgcagctgcgcgagtgacttctgctgcttatgtacataaaaagtcctggggggagggcttaaccatcagatgcctgctgctgggttgtttggctagtctttccatttgcttattcctgaatccaaaggaaagaaaaactttgaacttgaccttcctctcccgcagggctatttatctccctacagtccacgttcataaaagaaaaatgccaatcctttgtttttttctctcttttttttttaataagggaagaataaacaagcactagctacacaaggagaaatacttccctgcttactaaactcaatctgatgaaccacataagacaaatcccatgagaatgaaattgactttttctccctctgtctctagttagaacccaaacaaacaaaaggtttcaaaatactacacatggaacgctttacaggttgcagttgtgttctacaaccttattaattagggccctttcaaagaactaacaacactatttagactcacaaatgatatgttttctctttgcatttaaactaatgcccctccagaaggacagatagttttcataagagtagtttcaattactatttgtgatatatacaattttatgtattcaactataagagggtggaatacatctagcttttcgtgatttcctttattgccttttaatgtaagatttttatgtgtgatgaatagagcttcaacaaacttattcagagagcttaaaagaaataattttgcaattggaaaaaaagtaaaaatgttgtaacaagaaagtatgaagtaaagcctgttaaatctcatttatgtggacactagaagtgcagacattaaacagcattggaaagaaactcaaacctttgcatagggaagttcccagtagcttagtgatgctacagaccatgtgggattgaaatcaaatcacatctctaacgatctaggaatattttatgtttcttaaaaacccaataacttagggagctacaaaatgcatccagaaaaaaaaaaatggagactggaatgattctttttgtttcctatgattactattaggtcaattttaaaagtttattctgtttccctgcccccctggttgctccattttaagttccaattccttgtcttttaaatgtttacagaaaagtgtactctgaggttctattcacagaaggacagggtcaaccacttggtccatctttcctgttagcatgcccacaacaattcaatgacacataagtgctatgacttcatcaaaaaatgttagacaaatatttgaatttgaagaatcaggatatgattattcttattctcataatttttaccaatataaaagtttttgtcactttacatcattaagtggcaaggtatgtgtgtgcatgtgtgtgtgtattgtctatatatatactatatttctatacagtgggctgagggactgaacggccttagaagttgtgcaaaacaggtgtgcaatgcttgccctcaaggagcttgtaacttaatggaaaggattggacaatacttagaaaaacataccagaacaactggaaaatgaaatagtcagatgcagaaaagtacaatgaaaatgaaatgcgtatatgatgagaaaactctgggtaaagtttaagaagggaaggttcagaaattaatggaaagaaagaaaagaaagaagtgcactttacgagtaaaaactagaatgaacaaatgcaattaaaaatgtatttgtacatgtttttagttttgtgcaaaacaaaacaaaacaaacgacaacaaa

SEQ ID NO: 318368 - DNA, 4001 bp, Homo sapiens
ctccaaacagtgaaagcagcacatataaaaaaattaattattctgtgggaaattgtatattcaaattaagaggaagtaaaggaaggactgagcctctcaagcttccgaaggaaactgactcatgatggatatttgagatgtcattctcacctcttaaacttgttacaaatgaaacttgttaaaattacagatgtgaggtattcaaatacatgaaaaagtcattcttagctgctaatgcttatattttggaaagggtcagaacttgaccaaaggaaccttgaaaaaatatatttatcatatagctttaaattgttacaataccataacacctcaaaataaaaatatctttgccaaattgagaaggcaaggtttataatatatttgcaaactacacagaagagcttaaactctgcatttcgtgagatttctcaaattcattagtcaatcaagctattgcttttactttattcagcagctggagatttatgatattaaggagcttgttatcagatctagtgatgaagagagcctagaagccaccatatgttggaaatatgcacagtaatgttagcaaatcattgatgttaagttctaaatgtacaatttagcatacaataagcatgagaatcacatttaacaaaatgcaaagcacataggaagcatataatttaaaattttcaactaaattttatagctgtaacaaacataacaaataaatcattattttattttgaaataaaaataaatggagttaatacctatacctttagctggcaaattatatttacctcttgccaaagtttgcttatgcattgttatacaaaatttttaaatttgatttctctgattttatagttccctaaaaattccaaggacattatcttctttagtgtctaaagcaaataattaatccttataaattattttaattcaaactttgaatgttttatatgcaggcaaatcagaacacattttaattcagtgttaatatatatttctacataggcttggcagcttccagatgtgctgcatttggtctaaataagaaagaccttatatccaaaattttgcaaacaatgtcacttctatttactattgattaaatagatacctttcagtgctatagattgtaatcaatcaaaaacagaaaaggttttctttctaaacaataataaagaataatcaatcttctctttattaacacctagaatactcaaatgaagaaggaaatccaatattttttaagtgttttctttctttccagttatttggttaaaataagctgattttgttgtaaaacagtcattgacagtttagtgaagtcatgaggtcaagatttttaatatgacttccagaaacaaaagattattaaaatatttagtttgaattcatgacatgtaattctgctgggcaagatgaacactgaattactacctgaaacagcattagtttccattttttcatgtgcatgtgccctgaaacacttatgaagaataatgtagtgttttttttgttggtcaaacaagaacccttccctaacatttagagttgactgtattaagccattagacaagttaatacactgtttttcaggtggcagtaatatgaatgctttgttaagtttgccatttaactctcagaattagcttttaaagttagtcaacttccttcaacttctgcacgtacctacatacccctatttcaaggtttacatcatcttcttggctcttatttaatatattgtcaatttaacaagcattaggagttagaaggtcaacatagggcaaaggcttatttgcaaggggcctaaggcagttaaacaattcttcctagctacaaaaggaaaagagtaatacctgtaggactttgagaaacgcaatcttgatttggctcttgtagatggtcctggcaccgtggctcccagaggatcccaaacaaaagccatttttaaggacgatgccaagatccccaggaaccacgagaagtcagagctggtgcggggctctggggccctgaggccccgcacggagcaggaggcacttgtagctgagtgagggcatttcctttgtgcagtggtatgcgctgacagagagatggcaggctggctgaggcagggctggaagggatggccaggacttcctgctgcatgacacttggcctttgcgacagagtttgcttcactcaggccttatctcataattaacgtgagaaacactccctcgaaaatttgtttttaaatatagccctgattaaacagcatagtcacatgccactcctgaaaagcacaacacacacacacgcatgcacacacaacaaaaggtgtgattgaagtgggtaaacctttatatcagtgtgaactttaaaaaatgtaaacccacagggcttcgttaaaaaattttaaaaaatacatgcctatgactgggtcatctgacaaagattactaaatttcacacagctaactgccaactataattttccttatttcaacttctcttaaaaagagatggatataattcttagccaaccttccacaggatgtaaacaggatttactcgtcttgaaaataccagcgcctctctaaaagtcagtgtgagaaaaaaaaacaggcagatcactttcagaacttttggcagctttgccctcaaggagatgctgcgtcaccttagagagtgaattacaatgcatgactctgacaacaaagatcaattatcttgtccattttctattccctagaaacatttcttaactctgataaatctgttaaaacaactttctttcaaattaaataaatgatgaaagccaaatagaatccttcatatattttatgagtccaggacattttgggaaagcatctatttcaagaaattgtacccaaggagtcaaaggaccctagtgccgtcatcggtcctcaccactgagtggtattcaatgttaacaatgcagcataatttcatcagtctgtatccaaacactgccccgcgggtgacctcaactgtaaaccaagggagagcgccacttcttcaggataagattagagaggcttcaagtgcccaagagtgaatttaaccctctctgaactggacaaaattgaccaagagttgagctcagtgaacatcaccatatctgcaaattttgagacctctaaagctcaatctgtctcttgtacaccaagggagtcttgaatattcatataatttcaataaaagctcaagacattaaacattatgcttgttttcacaacagcatccaggacaccaggggttcttaagaatgctacaggtttcatatcagctttggagacgagtaatagaaaaggtttttacagtttcacctctttcttatcagacatgagctcaaagaaagtgggtgagtgagaactgccctgaacagcagcaaccttggaggagcagagagttcaaaaataaacacaacacattctccctgaatcaacttgcaatattgtaacgcttcacaaactgtctttttgcttttgtatagagatccaaatttcgcatgagcaaaacaggtagccactttcctggtgttctcaaagaaggactgaaaaggtgcttacactgatgccaatctgcccttctggtgtatgaaatgccaccattatcatttaattctttcaaactatttaatttccattttcggcagctcttaggaaatgcacacattcctggcagagttagcactgagctgaacaacttggtgcttattagaatgtcttcatctgagactaaagccagacagtgtaagataactggtgatctgcgtaaagaggggaggagtccctaacagctggtggggtgaggtggcttggtgtgaaagggagggggagggaggccacaaagacaagcagaagagtagaagggatgttgctggcaaagatggacttttttcaccctccaggcaacacaaagctctcattttgtccagtggtgtttaaatttttgtaggtgaaacagcatcactgatttctaataaaagctacagtt

SEQ ID NO: 318369 - DNA, 4001 bp, Homo sapiens
tttattgtttgaggaaaaaaaggacaggactctccaaatttgtttgcagatgcaatcttttctttaaataaactcaaggaataatttattgcacgtgttattttgtaagaaatggcaagtaacgttaagagacaaaatcttcatctataatttattaaaactcacagaaatactgcggatggggcaattcttgtttctggttgactgtaaaacactacaataacagcaaaggctaacctatccacaaaaacacaagctaaattcctgacgcaaataatttgagtatttacatgtgtgtttgcctgctcacatgataatgcatattttgctggcctgttttcctcccattctcaaccacctcacttcaatcattgcttttatttccccagtgtgaggtatgattatttccatttcaaagaggtgagcttagttatttataatcaatcactaagaaaaacaaaataagactaacccctaaaatagccataaaagtattttgtaaatacctattgtagaaaaaaaagttactttgttggaaaatactccttaagggccatgccatatgctgattagcatatcaaatcaccattggggaaataatagaacattagaatacattgaaactgacatattttttcatcagagtaaaagcattaaaataaccaaaaatataattactaggaatcatttctaataaaataaaacataagagatgaatgaatgataagcaacttgatatacatttagccacatagttaaattcaagtttgtttcatgtgtatgattaaatataaataacattattaatttctaacacatctgtgctaaaagtgagggtattgcttttaaagacaagggcaaagcctgtcaaccaccagcctgcttgcagcaagcaaagaagataagaaaacaagcaactgaatcaaacactgaaaaatgacaagttttcattttcaaaactcccaacatatctgcaagtttctttcctcctttaaaaattatcatcagataaattgttacagtccaagaggaattaaaaaaaaaatcagcacccatttggttaaagcacatgagtttgggaacaaaataaagaataaaagagccgccaatactgccttctttcacaaagcctcgacatcacacaacttactaaatactcaaggagtacgtcaatcttaaaagagaaaaggggaaaagcatgagagaaaagaacgttaccaaactgcctctgcagtccttagggaacttgtagatcgggatcttggcttcataataatgctcattttgaaaaaaaataaaaaggaaaataagtcttcaactattctgattaatacattctaactgtctttctgcaaagaagattttaaagatattccatttccaagggaggctgcttgaagaaatccaattttcctggagtccatctcctgtcctcggtccagctcatgggcaaggttctaacacgcaggagcgctttcttccttcatactgaatttactccagtactaggctgttaggaagtgacagtttcttctgtgtcttgcaatgccaagggaggaactgaattctgaattgattcttcatctgggtcacaagggaaaccagcatagtgaaagagtcacttgatctcttttttgcaattccatagtaacagctttaaaggtttctgacactcgaagagcgcaggtagagagagagaaaaagaaaatgaccgggaggtactgtaacacgggagagctgtcaaggaagttccatttcagggcaagcacaggaaaacactcctctccgtggagcaaagaagtcagccaaggaacaaatctctccacactttggctgggtgggctgatttacctgcgaaagtaatttctgtgtgtccctgcttagaatccagggttttgtgaatgagaactatcattcaatctcaccaggcagaaactattcctcaagggctgtatgacgtctgtaagaaggcagttcaaaacaccgcagggcagtgagaaaggaaaaaaaaaaaaaaaaaaaaagaaaagcccagcgcccagcctagcctcgtcaattgctgagacttacaaagcaaaggggcggatcagctccagagaccagcactgtaaaccggccaagcagacaagagacctcacaaaacttataaaaccatttccttctctgggaaatgagatgtctgtgttattctgggtaacattccgtgatcacctttacaaggaacacaccccttgccattaagttgtttatttaccataataaacaaatgaattttataaaagtcattctttcaaaaaagtatttcactgaagcactaaaactaaacttttctctttagaagcaaagttgagagaacttgatgacttagcagctgttcattttgagcggatgtaatgaaatgtcatgctttggagttggttgtagagatgtaaattacctcttaaaaattcagcagagtgtaacaggcacccttggatcagaacatactggaattttaaactgaaaaattgaatgtattattcctggacaagtggctgcacgtattaaggctgttcccttgcacaatgttttctaaaccttatttttttttaaaaaaaatgcaaatttcattcatctctacacacaaagacttgggtttgctaatccttaacagctcttcagtaaggaatgaagctttatatcttgtcaatatctcttattatttcgaaggccaaaacctttcccacctcctaaatataaaatattttctattacagtagatataatctaagctgattccaattgctcccaacagaaggaacagttgaccagcctgcctatctctctgaacatctacacagaggatatatactcctctgggtgtgccaacttcaattattttggatgtgaattaccaagtgaaaataatgtaagcattctgattgcttaaatggcattagctagtacgttggttctctagtctgacgtgaacttggtgtttatttagcatttgcagacaggatgttggagtgcagttgtgacccacccaaacaacttggaaaatgtagtacggcatccgccagaggctctggctgcttcttacaacaaacccttcatctgctcccctggtcacacttcaaggtgcatttgtgacttagtcttctttcaatgactctcaggcctcttacggtaaatgccaataaattgctttccacatagttatccccttaagcttttcagtttccttatgactgccaggggacattcacactttcttagcactgtcccatgtctagtatattgctggcattttaaagcaggttaattaatcatgtatttttttggaaacttaaaagttttgtgagactaattatttttaggggagaggggatttagaggaagaggtttaatttttttcttattggaatttaaatgtgggaaaagaaagaacaaaagcaaaccaagtaaaattaggcaactactatttatttgaaacactgttccctccatgtaaggtctaccaaatagcttccagttgccatttcagaaagcaaatgacaatgatcagagaatgtaatgtctgactgttgagttttcaactctccagaaataattagcctgtgttctaccgtcccccagatccatgttacaatgagcttatttagcctgatgctactcccttctctgtcacacacacacaagtttagtgcagccccatgtgctgttccttgcttacttgcccaacattctacatcttccaagaatctttctctgaaaacctaacacacttattgggcatctactaaagactgtataatagtaccataatgactaagaaatcgtccctctcccctggcaaaaacaaacttaagtggggaatctgacaatgtatggaactaaccagaatactcaaagtttttggattggtacatcaaggttgccattacagagaaagaaagatgcgctatgttgtaagaccattgagatttaaatttaagttttgcttctactcctaatattta

SEQ ID NO: 318370 - DNA, 4001 bp, Homo sapiens
tacagcagggggtaaaagtcccagtaagagagcaataattggtcattctgatgaggagctgtgccaaatttagaaatgaggcacaaatgacaaaaaaattgatcatcagtgtggacatgggtaggtcagtgtgcatatgggtaggttagtatctgctggccgtgtctacagagccccttttatttatttgaagccaacttttcacttgacaatgctacctacaaaagcactgttaatagataagacaatcaagtggctgttatgccgtggcctttttgtaaaaactgcatgagaacaggtgggataaaaaccatagaaaggtagaaaaaaaaaagcatcactcatttaaagatatgtgcacatagatgaactgtaagataatataaccttcttgaccttgtaaataggtggccaaaaatacttaaatatcttgacgaggcaactattactaattgtctcacaacattaccagtccttactggctgaatccttcagccatctgcatacgacatgcacaggcaaatagccactaaaaacatacacaattccaattatctccttgcataactaaagacaaaaagaacaggaaatccaaaaaatacagcaaaactgaaaacactataccttgccttccgtgctattttaaggctgtcccaggctgaaggttacttctcagccctcaaaactccattaactgccaagaccagcaccttagcacatatggcacagatgcctagttgaagcctccttgtactaaatgacctcaaaaaactgggctttctttccaagattaatggaaacaaaagtaatgatcataaggaaccttctaactctgttaatgtttcctgcggatatgtatggccaactgaatatataaaggctcagttcttgcggggtaccctgacaactagatgaattagggtgaaggttccaagttcgatgaactcttctgagtttgagtgccctaggtggtgacattcaagtgatttcacagacatccaccaattcttattttcaaccgggaatcccaagaacacctttaaacatgcaatgcccatggaccctactgggtttctgctgcaagggctcagtgttacttaggaaccctgtgtcttgggagatacttaaatttagcacgtcaaattgcttttggaaaatgtttatctggcgtgactaggggaggcaaagcaaggaaacaggaacctccctctaaggagcagaatagccaacatgcagtaagcctaaaaaacctctcaatttatttcccggggctatgggtaccagtggctcgccggcatgggaatcagcagcctgggggcaccagtgacagcagaaccggggcttaccttgttggaggccatctcactgacggagtgcctggtctgtagggtctctagctggtccagacaccagtccagctcctccagggtctcgctggccagtttctggtaggcctcctctgcgaagagacagggaaagggggactcagttctcaagcgcttcacgggtccgctagcgagttcaaagggggccatcctgccataccccgccatgctcggatgcccggtgccggcacatgagggctgctccttcatattgcccagcccggcagtgcaacgggggcggaggctgtgctcgcggggcggccggcctcggggaggcacggtctctccagcttggcgtctcgggtcggcctccagggagggcgtgcaaagagcggcgagccaactttcacacagcgacgcgagcggaaaaaccactatgcgacttttcaactgtgcggcgggcccgagtcccagtccaggagcccggctctagcggatggcgagggggtggcgagcgcgcttgggtgcccgccccgcagaggagcgtctggtccacagccggatctcctcggtccccaacccggagccgcggccccacgcccgccccgcctgccgagccttctgcacggcacttgaagtgaatgaatcagccgcggccgggtgcgcggccaccacgtttcctgttttctttctcaactcctcgggcggcaggcgcagcgcggctccaacgccgcagctttccgggaacactccccctcacgcccctctcggccctcggcgctgcctggctcctcctcaacccccttacgaaaagattccgaattgcaaaagcctgtccctgtccgtgccacccgccgcgtccttcccctcgagctctgccccgggggccccgccacctcgcagtgccatccccccggcgcagccgggcgccactcgctttgaagtgcagacgaggaggcgcgggcgcgagcgtgtgtgtctgtggggctgctgtgggactgtctgtgctaggagagcggcggaaaacccggcgtggagcgcctgcagtccgccgtccggggtcgcgcccgccgcggggctcaggagggaccggcacgcaggcgcgcacggccgcgcacctgtctcgctagaaccccgcgcgccccgccgagccactgccctccaggttgcccagaccgctggagcctctgcgactccacgaccggctgcttcctgcgaagtttcacaaacaaggttatttaggaccctcaaggtttctgagggtttaagttttagggtttctgggggttcgtttctaaaggcttaggattcacctacttcaaggaggcagggttgtgggaattaagaccgcattctttttctacccagcccagtccctactaagtaccagacttctaaatgttggggcggacagaaacaagcaaacaaaatatacaatgttgtggggtcggaacgctttataattcacaaatttgacaataggctgcattttcatatgccgaattgcctaagagttctcttaaaggaacagcaatgtgaaagaaccacatggtaaggagaatttacgcatgtcctgcatactactcctttcccctgtgaattgcataagacctagatgatcttgggccaaggaagaaaatctggaagggtgtttctacccaccatgtgcagagtacactacaattttgagaaaacggaaagaccatattcaaaggcatacagaaaagcctgttctgtttacaaaggctgacccagggcaccagggacactgtccctaagcagatcagttgtgggagaacttttctacattagcatgcaataagcaaaccattcatagtgaggagaagtcaaactcccaagggtccatttgataaaactttgtcattgtcgagtggaaagaagatactgagaaacttacactaagtggtgggatcccttgtctttgtctttgaatctacaggtattggagaagaaattctgcccttgaaatttagactccataaattaacatggcacaacaaataaagttcatggactgaatttaggctcctgggatttttgagatagctttttatgtgaactttgtaaaagttagagtaacttttaaagtagttgttacatgtgccacgtggcttattgttatcaagaatacttgaactatttactgttcactttgagtactctaggttaaaatttgcctcttttttgttctacttcctccaccccgcagtctatgtaaatatatactttagatggacaaacaactgcctaaaccttgccaggtgaattaaagtttcagattgaagcttttttttcccccttaacaagcttaaagatattaataattttaaatggtaaatataaaatacctgctctgtatagcttccccaattctaagaatgtaaaaaatattacatgcttgttataaaaattgaagcattacacacaaatataggaagtccattgtaaccccacaccctaaagatcacaaacaatactttcgcctatggctctaacacaatcattttcattttactgaataacttccatatgcaagtatagcatcacctagttgccatggtagtgcatctactatatggtttggttttgatattttcctctctctctcattcccataatataggaatgtaggaaattttaagaggacattgactt

SEQ ID NO: 318371 - DNA, 4001 bp, Homo sapiens
gggtatattatatatcctcccaatatatatttaaggaggtggtatgggtccaatagtaagaaaattttcttattttttcctgacaatattctgctaaaaatcatttgaatatgctgcactgtgatgcattacaagtttggtagatatcagtattcaaagttatttaaacaaatactccattgatggtataaaaataaaaccttcaaaatgcataagaccaaatatatctatatttgctatttttacatgtttttaaaggtacagtattaaacataaagctgtccaggaaaaattttcctcaaaaagaaacgtactaaaattctatatgtagattcttggcaatattgttcataatcatagtacaaatggttcataatcacagtacaaatgtgaagcccttcaaaaataacatcagttgtgagctggctaaaagctaggagctgaattctggcggataatgagggcttcttatatttactctctatacttttctgcatttctgaagatttttagccaagaaatggctaacaaaattcaaataatggaagtctatatattttaaaaacatttttaaaaatctgaatcatccacagatttaaagggaggtaaggaatcatgactacttggacaaccaagactgaaataagttttctaatttttttagaattcaagtaaatctctaaaacaaaggggaacttgtccttcaaaaagaaagaaacaaagcaaacgacaaacactccaatctgaaaaatcctcagagtaacagaaaatgaatcttttaaaatgtgttgtgattggctcccaggttcaagcgagtggctcaaataccaaaaatctgtgaagtgatgtttcatttaggactgaataaggtttttctacctccttctattgtggagacaggatcacaatgctaatgttaccacagggcatggaaaaagcctgccaagcatggacacaatcttattgaattgtttattaattcatttcttgagattcacaaaacagtgtaataaaaactttgttcagttttgcaagtataatagacaatcaagttttcactttagtatcacttacatagttaagtaatgtcaatttttaatgtcacctagggctttatagctaaaggtgaaaaaaacgtattcctcgtcaggttaaagtagtatagatttttagaaacagccacaaattaattttataaactttatgtgcaacatactaactggaatccataaatcagtataagtaatttggcccaataatttatttgcaatgaatgtatttaattaccatatatttttcaagcacaattcaaacatataccacatgacaaacagaagaactactgcgtatctaaaaaagctattttaacactcaaactacaactgatgaaagttatacaatcttatcttgaccactattaacacgtatttcttcctagttcatgtgtaaggaaagaatacataactgatagtttgaacaaattacagtagagtctaagctttctaaataattttgtaatcagagtaaggagttttcaaaagctaagtaagtcttacctttatgtagccccaagacactgacagtaaatagtttgcttcaggcatttttgattgattatatgtatatatatatatatgtatatatatagtaagctctaaaatgtatttagcttcaaaatctcgacactttaacaacctccacaagccacgcagagtatgagtttttaaagatttttggtaattaagtatacataagaaagcctcgcattaaatcccatccagccgtcttcccatcgaatacatgccatttgtaagactccagaatggcacaaaattcagcaactattctgaataaagaaaatccacgtgataaaggaatatctaaagatctaagggtctgcatctttctctcccgagctccagggcttaatgaataatgtatgtcaagatgcttagttgcaagaaaggctagtcctgtcaaaagctaccaaataaggaactgcagggaagccgggaagagtgacaagaagcccctcccataaaaccccaactctgcaccaattgcattccagctcttagcctataaggcgagggggtgtggcctcggtgcaggctgctttgggattggttggcaagggccagcctctggggaggctttctcctcacccgacaaacgccattgaataatggtatccctgcagctctgaggccaccctgagaaaagatgaacggggcttccctcttgcagtgatgaataatgaccataaaactcctcaaaattcgtagttcattcttaagaattgcccatccttttggagggcattttctatgaattttaatgtcctctggcttcccttccttccaaataaaaactgctccaaaaatggcaatcgagcattttaattgcttccctctctcaaatccaaaacaagtggctccctggtgatgtagaaatgactgtagttctcccctcatccaacataaaagcatagggattaaacaatacgactaatgtccagaattcacagatggcacagatggcaatgacacattccctcacctgtgtgccatggctgctctcagctccttttgtttctattgttatgtatgacagagttctaaaaccttcaaaatctaggggtgggaccacttgcaattctggggggagggaaatgtgaaagctagggcactgtgtatgcataaggaatgcagtgttttgtatatagaactcaggatctgtattttgatcagaagagaatattttatttatttatttagagacagagtctcgctgtcgcccaggctagagtgcagtagtgcgatcttggctcactgtcacctctgcctcccgggttcaagcgattctcctgcctcagcctcccgagaagctgggattacaggcgcccaccaccacgcctggctaatttttgtatttttagcagagacgggatttcaccatgttggccaggctggtctcaaactcctgacctcaggggatctgcccacctcagcctcccaaagtgctgggattacaggtgtgagccaacgtgcccagccagaacagaacattttaataactgtacacaaagttaagaaaggaatgagtggctcttaggaatccagaattgagctcaagagtaatcagacattttacgaggagggttaaatgagaaatcaaagttctttctagaaaaacagcattttctatttggtttggtgtagtattaccctgtaactttaatactaaagaggtcttgtgggtgagaaacaaggaaaaactaggttttagttgattttagcatataattctgtgcattttacctcctctccatctcaaagcctgtgcttactactctgtgctttaacttgctggtatggctactctgcagtcttcctgacatttaactatttccacatgtggcatgtctgtcttagagagcatgctctctgataagcactcctgtaacactgtgtctctctgagtttctattggcctttagctgctacagtcctctgcttttgttaacatctgttgtattcatttccatcactcttactcctctacaaaaggaagaaattaaagctccaacattccactaaagctacccccagaggaatactaaggtcctccttttctctggtctccctacttctctgaagtgttccacatgtttgatcattcctactactctccctcaactcccaggatcctgaacttctttaattttccctaggcccacaatcttcaatgaccacttctaacttgaacttcagtgccatatttctgaatacaagattctcctctcgaatgccctgctagtcacgacaaactttttcaaaactgtgagacatttttctatttaaagtagttcttagtataattacttccatttcagtcagtgagcctatatttcttccagtatctcagatggaatctatgactctttcctaccattcaacaggtgtttcatgtgcgtcagacactgtcaggtgtttaatata

SEQ ID NO: 318372 - DNA, 4001 bp, Homo sapiens
gactctcaacttctccatacagctttcaaacatatgtattacagatctagaggagcatgaataagcaaatttgcattctttccaaaacttcagagttgaatagcttatttctttccagtcaaaagtataggtgaggctaatgcaataaaaataaaaagtgcttataattgcaggcattcaaagagtacatggatcctatgtattacaacataaacaaatgggcttaaacagcagaacttaggtagaacaaaaactgttgctttgtagcaaggtacacttgatagaaaggagactggtaatttcccctcccaagcaaatcttaagaggtataaaatgaactctgaagaaaagcctaaggcatagaagaaaaataattgacaaatgcctactacgtgccaggaactgtttccaggatcttttaatctcaagattaaagactattgatgtaaatttgtctgtaagaataatgaggaccttattgctgatgcctgaccctcaccaacagaacaagcaaggcaatggcaccaaggctccccctgactaggaaactctggtgatgcagttggaagtgggccaccgaggtttgcaggcatgtcacccaagcattctagagactggggatagtagctctggtcagcaaaaaaggtagatacgccacagcatcgactctggatggatctggtgttgttagaaaataagcacctgcctagagtgggagaggatgcctcccatccttctctgcaatggattttttagctgaaagccgaaaactctgtaacaaaccagcaggtgattttggtggtaccttaagctctcagggagctttcatttgagacattgtcataaaagcagctggaaagccctccgaaacctatatttaggtatctattattcatccagagtccagccagaacatttacctgaaagatatactttcaaaatcagacaaactgcatttccaaaacaacccatgttagcagacactaagccttaacatgtgcctttattatgcattcacaaagtttctgctatgaaagtcagaatccagctgaccctaaaggtatggcaaaaacaagcaattttaaaataatgaccttttgctcttataaataccctcagcaatgagttcctacacacatttagtcataaactccagcaagaaatggcacatgatatcacatgtccagggacctgaatgcattgcattgaaccttaatagatgaccaaatatcaaggcactaagcaagttctatgagagcctgagcacttcctgattcatatgttagaattctactagaattctactggttcattctggtagaaatatttcttgaatagctaaaatatccttaactgtgaggcaccaacacattttagcattattttaaaattgagtcaacattctaagtttcccttaaccttcttttagaaattcagacaaattgatatatcagaaattcatgtgtgcccttccccagggaattttcaaataaaaatagcaaaacaacaaaaaacaaaccctaagcctcatctttaaaaaaatttattaaattgttgccattctcaaagtttttttcttcctccatgaaatattagcaatttaaatgttctcaagtcctcatgcttgacttatttggggatgcttcatattaacaaagtatttttattgcataaccattactttctcagacaatattcggttttgcacagtttacttttcattctcacttgataccaatactctagttcaagacaaatcctcatctggtacctgtcacggaatttgataattctgagttttacaaactgaagggaatattgattactcaccatatccaggaatgccttctaaagggaaaattattcacgtgcatcatgttcgcagatcttctgtcattaatatttttcttgtctcctacgttacatgtagtgatttttacagatgaattccaactctcttgtttgagcagctatcgtgggcaattattgcaacaagtattgaatcccaaaaaaaaaaaaaaaatctccccccaccaataaaaacaaatagcaattacaaaaggccttccaggatttgaaaaaagaaacatcacagagcactgcaggtatgggtccatccatttaggttccactagttagtcaacatactaaaataaccagttcaactaataatcctaaatggtggcaaatattgtcctggtaaaatctaaccgccttgagtgtaaattaatgcatccttaaggaaggactctggaatgtgggaagaaaggagtcaaaagacagtttcttgatatccttgttaaagaagtgttagaagggaaatggaaaacttcaggttgctttgccatgctgtcctttagaaatgaatattgctttttcttctttcttaggcacatattcatgtatggtcactttaacgcagtgctaccgtctgagacgtgtcggacaaaggcctgggcagaggggctagaaaccatgtatcaccaaagccaacttctttcccagatttcagaattgctggttcaactgcaaaagtaggaaggcaatgagtaatttctgctctgcaggacaagattaccattaactaccatcatgacttcagaagatgctgtcacgatgaaattcatttctgctgcctaaccccataataaggctggctgttctctttaagtaaaatgactaagctattgatcttttcactgcagaatcccctttattttgttattatcaaaaccatgtgggagcttttcatattttgccttggaaagaaaatgaatttcacagctgcaagtcagacgttgtctaagaattcttcccccgatgtctttcttttcttttttttcctctctcaatctcttttgtttttcaccccaaattcagttttccaataggtgtcatttattctgatgctctgacatcttctgaaagattctcatgcccaagctatacagaccttgcatgcttttaaaacacaatggcaacaggctcctgctggagtcccccagcgccgaatttccagcagaacctttggaatcctcgcagccgccttgtctgccctgggctgtgccgccccagctctgatcagctcaggacacttgcaggctccgtggtactgtacattaactctgcagcagcctggctcagctgcagagactgctgcctgacaggggatgtgctggcgtcaagggggccctctaggtgggttcccagacattgcagagccgcgcactccttgctaacctccaagtaagagcaagcaaaaggggttaaaggaatagctcgccctggaagagcagacttctttcagtaattaccaggcaagaaaagctaaacaaggagaagcctgtaaaacacctcacagggaaattacgccttaaacaaatacggagggaggattttttgtttgctcgttttccttcttacccagtgaaaaaaaaagaaataaaagaagtccagagataatttgcaaatgatagagtttggtggatttcactccttaaaaaaaaagcaccggggtggggaagccttgtttacttgatgatttgtaaccatttagctgcagatgaccacatggtgatttttggacaggaaatcctatggaagccggttctgcagaagtcagttgtacttcaattgcaattgcgcatgccataaaactgcttgtttgattagggggtgtgtagatatgaggaatgctgagataaaacgttgcaatccctatcactgatgttttgcatttcttcatgcttgctcctttgttgcaaaaattctgttcaataatcccccaaaagcaccccatcactgttgatgccattttggagcaagaataaaatagtaaactcttgtaatagtaggttggcacttaaatggtatttgtttgaaatcagtgggagaatggactttgcagtagaagtacactcaacattaatataccacttttaacttaggtatttaaaaaggcttttacgcaattgcttgatattaaatggaataccggcaac

SEQ ID NO: 318373 - DNA, 4001 bp, Homo sapiens
gcacggaggccaggtttatgtttgactttacacaagcatctcagtgcagtaaagagcagtattgccaccagcatgtcccacctccagccataaggcagttttctcctatctcagtaaatagaacatatgattgggttttacaccgagacattccattcccagggacaagcaggagacagatgccttcctcttatcttaactgcaaagaggccttcctctttcactaatcctcctcagcatagaccctttacgggtgttgggctgggggatggtcaggtctttcccttcccatgaggccatatctcaggctgtctcagtggggagaaaccttggaccatacccagggtttcttgggcagaggtccctgcggccttccgcagtgcattgtgtccctgggtactcgagactggagaatggcgatgacttttaccaagcatactgcctgcaaacacatttttaacaaagcacatcctgcacagccctaaatccattaaaccttgagtcaacacagcacatgtttctgcaagcacagggttggggctagggttacagattaatagcatctcaaggcagaataatttttcttagtacagaacaaaatggagtttcttatgtctttttctttctacatagacacagtaacagtctgatctctctttctttcccccacagtgcactaccacatccagctaattttaaaattttttgtagagacaggagtctccctatgttgcacaagctggtctcaaactcttgggctcaagtgattctcttgcctcagccctccgagtagatgggactacaggcatgtgccactactcccagcagataatggtgtcgtatccacattacatttctatgattccgtcattgtactgtggataggtaagaaatgtccttgttctggaagtactgtggaggtattgtggaggtactgtgtggaagtactgtggaagtactgtggaggtactgtggaggtactgtggaagtactgtgtagaagtactgtggaagtactgtgtatttccagaacagggacatttcttacctatccacagtacaatgatgggagcatcgccagtacttacagacaaagggcatgatgtctgcaactttctcccaaatgggtcagagaaaatggagagagaaagcaaatgtggcaagatgttaatgaatgataaatttggatgaaagacatacagttctctgtattatttcaaacttttctgttaagtttgaatttttttttcaaaataaagaattatgagtaaatatgtaaataaataaagaagaagcaccatgttgtcaccagccttgtcttggtggccaatgcccctcaccccacctgtaccccagaactccatgtaataatgccccatgccctctctctcatggggaagagagtacctcctctgtgttggggacgttagcaatcttcttagagtgtgcgacatggcccacgatgcccatgtccaaagggaagacgatctcttggtcgggcatcaccaggcagtcctcgaggacagcatccttgtggacattgaaaagcctggtggccagctctgcgatgccattgcgggtccggtacatgaacaggctcatgcggtctgcctgcaggaggaagcacagcttcttcatgacattgaagatgcatttctctgtctgtaaattctcctgaaagtcccgcaggagatcaaagatgatttcgctctcctccatgctgctcggggagtggtagttgctgaagtccacggcagcctccttggccccaaggaggtcggagatgagcttggcccggtagtggaggttgtagtactgtttggcaaagccaatattcgagtccaggaacttctccacctcctctgctgtcacctcgcccatggctgggaatcccactggctactctgtagaaggactgggacggaggccttccaatggcagttttgcagtctgcaacaagtccagtctggacttctctgggtcttgtctgcaaaacatactgagatggcctgcacaggagagggagcaagcttgggagattaagtcattaatatttctcaagaacaaggattatgaggatcagtgtgttccagatgctgtggggccagatgggagaaggtgagagttttctttcaccttggtctagtaagagcaaagaagagatgtctgcacagagcaggaggtgggcttgagcactgccaaagcaggggttgcaaaaaggcagcacagggacagtctacttgctgtaggtgtgtcttctctgacctctgttagttttcttaaatatctgacacagaagactgacatttactgtttaggagatttgtttggcttctctgtccacattcccccatggcgggaatggctgaagctgagaaatgactgcctgccagcctctgcatccccccggccccttgcctcatccttccactccccttcccaagggcttctcccatgtgggctttcaatgtgcagggcccctcggcctactgtcctcatgtacattatggatctggtatgtgtagtctcccatgtcacaatctttgcactaaagtttttatcagctttagatttcaatgactctaattttggcaacctaagggcccttataaaacaacacacctttcaggttttcctttattccaaaagtaatacatattatagtcactgttgaacatacacaaagaagacaattaaaatcacccataatcctgttactcagaggcaacctttagttaacattttatttttaacctgtagttaattctacccatttcacagagccttaactttaaaaatctgtttcccttcaacccactccaactttctcttggtgctttaatgtgttcttttctggtttcagcctgtaatttcttgggttgtctgtcagaaatacacacaaggggctgggtgcagtggctcacgcctgtaatcccagcactttgggaggccaaggtgggtggatcacctgaggtcaggagtttgagaccagcctgggcaacagggtgaaaccccatctctactacaaatacaaaaattagcagggcatagtggcactgcctgtcatcctagctacgcgggagcctgaggcaggagaatcgcttgaacccaggaggcaaagttgcagtaagccaaaattgcgccattgtactccagcctgggcgacaagacctagactttgtctcaaaaagaaaaaaagaaaaggaaagaaagaaatacacacaatggtccacattctagcaactccagtgaatcttgaaataccagaatcttcattaaaatgcccttcctgcccactaggaaggagacagagcacttttctttctggatgaaacttactttagcttccatgactatatccactatagcctggcacctctatgttgtaaactatgtggaacgcataattatagacagttgctagcactttgaacttcaaaaatgacctttactgggaagcagattgcctcctttattgtagagtgtaataaattcttggggcactgcactcatccagcagtgtgcacgagtgctcaccccccaatctggcaggctgtgtagcagcacaaaccttccagacactcccatcataaggaactggaactctctaacctaatgcgctttctcagctctctgcatgccatctccttcttaacttccagatttcaggtcatacaggtcatctctagttttcttatcccaagtagcccccaaataccctctccccggtttctgcctgtcatatcagcctatttattttttctattacatttattactatcagcaattatcatgtttgtttttgtttccttgtcctattgtctggcctcccactatactgtgagcttcatgagggcagggacctgtcagtgttgattccctaggccttgcaagggtgcctgacacatccttggtattcagtattgtgatattgtgatacatgtatttggtcttcaacaccatttccaggtaacacaacttctaaaatccttagaatctcca

SEQ ID NO: 318374 - DNA, 4001 bp, Homo sapiens
gtcttcaaccgtcaggcaaaaggatggtctttactgataatatcccaacttaatattttcaccaaatttaacattttcatccctgaaaattgctcctaaagctaactttgtgtgaacagggagggggagagagagagagcttgacaaaagcaaagtatagcgttcagcacatgcctctgtaacgaatgggcaactggtaggtttgtactgtcataaatcctagactctagtcttcagacatgctatgctaagatcacactgttaacattcaatagttaggagagaaagcttactcctggcacatagtaggtgctcaataaacgatgtttttactataatggtgattatgattactgccagagaaacactgcaaccacaagcaaacatcagtcaagcttcatgttaaacaatcagatgctgttaaaaaaaaaataggttcattaaaaaacttttggacttccagattgaagccaaaacatgttatccttctcctcactcctccactgtgggctgccttcatccaatgaagaccaagtttttaactattaaaaatacaaatgtgtctttgacaaataatccatggaatggttcttggtaacctattgaccaggtaaaggctgtgattctatctgacattaggagtatttttttctctctgtacaataggatatgccattgttatcttgtttgctgaaaggaaaaaagacccagtgcccagatttacacaatgaaaagcctcttggatttaacggtactttgagaacatacgggaggacactatttaaataattatttttcttctgtctttaagaaataaatatttagcgactgctttaaccatctaaacaattttttccacttcctcaaaatcccactctctgggaagatcagttgtatgtgcagaatcatcctcagacagctgtactgcactggaaaccacgtcccctcacggtggctctgctgacactccgaactcatggcccggttctctcaattctgtctaggatgcagccaacccagagaaacgttacagtgacaaacaacaggttccactctgctccgttcccacatctcttaaaacacgaacactcattcattcacaaatccctacgctcggttcctgtgctgagactccagcctggctggtaatcccaggtaaaaatcggaatatggggcactatctatcctggtgctgcaactgcaccagtcacctacaaggcacgcaaatccagctcagtgctcagatttcattcaacaggactggccaccgaatgctctcaatggtccccacccctcttcctgcataaaccaagccacagccttcctgccctcaaggaggaacaggccagcccacctgcttccttctgcgctcccttccccgcccagtcccccaggaccagctaaggacgcttccaggacccctccaggggcctttttctgaccacatttcctgggctcccatcatctccacaaatgaaaagtaaactcctccttagtgacaacctctccaaaccaaccgcctcacggtcacccaactccgccggagccccctacccgtgcgagccccgccgacggggcggacggcccccacggcgtgtgccagcgcggggcatttaccttcacgctggtgtagcaggtctgagtctcggcctcggcgctgctgcagcagtggcgcctccggcccctgctggtggtcgcggcgggggctgcggaacccgcgctgctaccgctgcccagctcggtgcgggccctgcggacgcgggctacgctggggggtcccgacgcgcggctcggggggatggcgtcggcggcgtcggtctggacgaagaggccgggcaggggtgccgccgggccctgcgacacgctggtggtctggcggggcgagctggactcgtccgagtcccggcagtagatcacgccgctctgcgagacatggatgctgggggcgcagcccatccctcggccgggctcccccgcgcgcccgcccgcgcccgcggccgccgggacccagcgcacccgctgccacctgcagtgagggggcggccgcggcggcgcccggactgcgcgccccccggcctgtgtgtccgccgctccgtcgggctggccgcggtgccccccgccgagcctccggggaccgcgcgcgtcaccccaactttcccttttgggccatcttcctccccgagcgggggagcgcgcatacacagcgccccgcgcgcaccagcggccgccaccctccccgccgcggcgccccaaacacgctccccgcgcctccgccttcccctcctccctcggcgcggcccccgccgccgcccagctcgacctcgccgggctcccgcacccgcggccctgggccagggcgcccgcccgcctgcccgcctgcctgcaccttctttccccactttcggtctgcgcccgtcccctccctccctcgctcccaccctccttcctcctcaggtgccccggctccgcggccgcagccgcccgggccccactgcgcccctccgcccctcccgccgctcccggagctctcccgacagggcagagcgtgcccgcggctcggctccgccgcggggcccctgtgcgcggcagctggcaccgcgcctcggcgccctcccctcctcctccgctgtccagaggcctcgtctcttctgcactcatcccgacgccgcccccagcgccccagcccctcttcccctgaagggctgtgtaagcctctcgcttttcaccaacacattttcacacatcccagagctaaacaccaggaggcccctcccgaaatggcaggggccctacagcccaggcccacccaccgcatttgcttgcctctcaacacacccgggaagtgatggagagacctcatggttccgtcctcttcccccagccccaccgcctactccgaaggctgagttggatggtgacccagtcttcagaagaagcccattccatgtctactcatcgtttggaagtttgtgccaagggatgggaggccctgcggaggaaggcacccttgaacacatacgttcccctaagatccaaggcaagaacagaaagaagctgtctgatggttcttggctttctcccccattttcacctcttccttaggtgtcactaaatgttcatgctggtttctatcccgtccagccgcccatgtcaactgctgttcctcacactctgggctgggcagtcaacaaggccttccctcattctccttggtgaggcatgcacagactgagctgtgctggaggagaggaagaatgcctttagaaggatggctgctgttcatccttcccttgtaaactctgagttacagctgcgagacaccactgcccattcagtcactggttcccgcagtaattcctgcccgattttcacaatggcacggggagataaattagatggtctaagaaaggattttatctagagttgcttatacggacaagggcagtaacatagaggcttaatgcaaggcacaaagaagtatccaattttaaggtttgttttttgtttttttttcattcttattttcctttttcttcctggaccactcttggatgtgactggatgaagacttcaaaagacagtttctaaatttcatagagaagcaagatatcattcccaatcccaaattcagttatacagggagagtctaaccttattcttctacctttgcttctcttctcagtttagctctctttttttgatacaaaaaaactccatctccagctaacctggaaaaagtctatgctgtattttttaatggacaggcaaattgctcataaaatttctgcacaggttgggtcctcctagaagcagattctgagatggtgtttagcaggcagagggaggctttttaggaagtgctcttgtagtcaacatttgtgggaggaaataaagggagggaatggagggaggcaagcttgagcagagggagaaattgaccaagcctcaggcatccctgcagggaggattctgaaggtgggatgatgcttcagagttgttct

SEQ ID NO: 318375 - DNA, 4001 bp, Homo sapiens
ttctagtctcacacttgggagcagaaggtcttcagtgagctcctcctccctttcaccaggacattttttcagccgcactgcctatccagggctgggcactgggggaagagcacaggatggggaaaccttaaacctttccccagcagaaagtgcggcctcagttctgactgctggggcctgaacaatctctgatgaacaaacagaacataaacagatcaccaacaggggagggccaagtaacatggcttcagcacaaagtgcatggctagcacttggaagacaggaagaacctaggaaggctgcctggaagaggtggtgtatggaatatccctgaaagaaaagtgatgaggaagggcattccagaaagggggaagagggagggcaaatgcccacaagcaggatggtgcgcattccttctgggaattctgggatctgactggcgggaacaaaaggcccaagtttggagtaatggggcacggggagattccaacctctccaggctgtgccacttactagctgtgtggctacagttatgtggctgcgtgagcctcaagttcctcatgtataaaacggaggtaaaaacagtcactgcctctggggttgctggtgagcattacatgagatcagtctcataaagcactcagcacagttgcggcgtgcagtaagtgtcaagcagtggcagcctctgttaggagctgggactttctccaggcactggggagccataggcggatcctgggcagggaggtggtgtgattggatttatgctttagaatggcatggagaaggggtagagtccagaaggagggagacaacgaggaggcctgagcagctgcctgggaccaaaggaaatggcccagtggctgaccccttcttcacagaggagcccccagatctgacagccaggtcccagcccccagacccagcagcatgaccgctagggggttgccatggccgcccatcaccctcgaactttcctagccctcaaacttttctagctgctgggggtttagaaggatatcttaagaatctagaaaatttgcaaatccatttaaatccccagaggttgcctggcggctgactggcctaaagccagactgattcttagaaacaaggcttgggccaaggaacagcggctatggtcctgaggtccccagtcccctgctttctgtgtaccctgcctaccttctcccaattcccctctcccgctcttcccagctctccccactccccattgactgtgctgtgctttggaggcccccagtcagcacccagaaacccctgaggattgtttgatgaaggcaggagcagcagggatgatgaggtggaggccactcaccccagagcaggggaaaggagaaaactggctcctccatccctgacatcacccacagtctcccagcctcctctcatcttgttttgttaaaaatatcttccctttttttttttttttttttttttacctactcgaagagatgcaggttagggcaaagggacagggcatggggctggggttcccactttttccagcacttaccttgctgctgatggcttctggtgtgggcacagttccaggctctggacagtcaccccctccaggaagtcctccttactgccctctcccagttatcagaaagactgctggtcccagagtgggtaacagctgagtagaaggacaggcaggactggtgcaggctcctgaaggctcaggagaacagagggatggaggaagggggctgctgtaggggagaggagcggcccagcttcgcctcactccccaagcatccttcgggaggagcagagccgccagaggggccgccctgggtctggctgtctgcgttgggcagggcgagcacaggctgctgctgggcagcagggctgaggggccggctctctcctcctccttgttgatctcctctctggctccaagttgctcacagagcgatcctgggtcccagatagggcgggcagtcactgctggctgctggcagcctcaggagctcacaccactatgggcttccatgcccccccacttcccccgccactttgggggaaaggctgcagggtggcttctgattggcccagctgggagaagggggggcggcggggcagggagggtggacgcgtgcgtctgttttcaatttcagtttttttccccctctctctttcttttcccccaagtttcttgtttttcttcttttcactctgcttactccctcccatcgcccgttcgctcaggatgtgaggggatgcttagaaattccacagcccacgccagccgccagctgctgagtcacttttgtcaaagagtggcctcggccccactttcccgatgcccatgtcgggtggcggcctccccttgccatggcacccagggagatcatttctcagtgcctcagtttccccatctgtaaaggagactctgatcatctctgtggttgattcagtcaaccttcattcattgaacaagcatactgagcatttactacattctaacactgtactgggtgcaggggacagtagcaagacgtggtcctgacctcagaagcaccaggctagtgagcaagatattcattgggcaagcaggtgcccggtcggcagacaggaggctgagagtgcatttagaaggacccctaacggaagcctgagagaatcagagagcactgctgagaagaggtgacatggaggagatggaaagatcctccaagatgatcagccgtttttcagaaggacaaaccaaggcccaggggtgaattggcacagagagggaatgtgatttggtcaaggtcatccagcacagattggatatctctggatattgacagatacattccttttcacgtctcaaagcccctggggtgcaaggagaggattatttgccccattttatagatggggacactgaggcccagaggagcaaaataagcttcccaagcttacgcagcaatggcagagctggggcagaactaggtctcatgagacacatgatggaagagacacaagtcatctgacccccacccgagacccctattccagtgtagatgaaccccctgccctgctttcttcctaggttccccctgtggctctttcattcagtcactcaacaagatactttctttttttttttttttttttttttgagatggagtcttgctctgtctcccaggctggagtgcaatggcgcagtctaggctcactgcaacctccgcctcccaggttcaagtgactctcctgcctcagactcccaagtagctgggattacaggcgcacaccaccacacctggctatttttgtattttttgtagagaccgggtttcactatgttggccaggctggtctcaaacccctgacttcatgatccacccacctcagcctcccaaagtgctgggattacaggcttgagccaccgcacccagcctcaacaagatactttcaagtatccgttttgttccatttccattctctggctctcctttcctaccagggtctgccaagactcctccagttcccccagctgggtctcttcttccaccctcagcttctcagatcagaagacatctccagttacagactcctagccctcagatggcaaagggcattattttagaagggcatatagagtgggcttaccacccctgctcccactactgcacccacagggcaactgaattccagagggtgaagaaagctgtcccaggtgacacaggtagaggctggctctgccctccttccctctgcgccgctaagtctttcctcctcagcttcccccagacccctgttcacagagcagaggatttgcgtgagctgggattccatgcccaccacagtcaactatcttgcatttcttggtctagtcccaatcgggattgcccagcagagcatctgggctggaccacatagaaggagaagtgttctcagactggttcccagccacgggttggggaccataagagtaccccgagagagggggcctggccaggtctttgtggcaacagggaaat

SEQ ID NO: 318376 - DNA, 4001 bp, Homo sapiens
tgaagacactcccacatatcttcagtccctgtagacctgccccagaggtacctgctaggcaagctgtggcctgtgcctccccagcgctgtaaatctccccagatcccacccaaacccaacctcagccatcctggctccttgggcctgagctgctgccgcgtgactttgggggacaaaggaggctcttcctggcaaaccttctcccagactgcctgcctggggcctgcatccccagtcagctccaaacaaggctgttgctgctgctgctgccgcagccgcagctgtgacgtgtggaggcctttcctcggagggcaggcagccgcgtgggcaacagatgtctcagctccctgccgcctgcagccgtcagccgccgccactgagcctgtcagcggcctcacgcccagggtgcctggccagcccgcttagtgtccccaccagccccctcagcggacacacagcatgacacacacaagcagacacaggcttgcgtacacacacacacacacacacacacacacacagcaggaatcctataggaaagaggagatgaaaggctctgggatgtgttgaaggcccacctcactcggccccagggacctggcagtgagggcagatgtgggaagcctcctaggacagctgggcctgcctgtcaccctggcccccagaaacgggattccatgattccacgctccacctggtgcccaccccctcccaagaactggacagaagtctcttaaagcccagccggcttggcccagcccccatggcaagaggtggcagtagggtgggggaaggtgcttctctgtgcctctgacacaggcccccaaagacaagatcagcctgtgtgggagcaagggatggccgtcagatggtttcaggttatctcctctgctccttccagactgagagccgccaagggcagggcctgggttctctcctcttctgtcccttaggctggggacccccaagggcagggtctgagtcctctcttttggccctccagacacgaggatgtcgaggctgggccaggatcctgtctcccctagacaggcaccccctcgaacagggcctgagtcacctcctccactcctctatcctcagactagccacgctccagggctgtgccggctccttttccttctctgtgggcaaggcagggccctgggaaacttgaggaacgggcctgaggctgtcctggcccccggctttgtgtcatcttgtggggaggggtctcacaacctcacagttaagtctccctttcccctggaagccaaaattcctcctggtcacttccccttagggtgactgaggtcgtgaatgagagactgactcacgcccaaagtgggaagtggatggacctctgtcttctcagattcagcgaggaccccagacctccctgggtcaccaagctctgccggcagggacccctgataggggaaggggggctctaaatcattttgccccagatcttcaggcagggggtgagtctgaagagtttctgggcctctgtagagctgtctagacccctggcccatctccgcgggtccttcccgggtccacagtggctcccccagatgaggccagcggggaggcgggtgcgtgaactcttgggagattcttcgcgggatcgggcagacaggcccagcgtgggaggagggcggctggggctgcctgcctctgcctggaagccgcctctacagcatgcggggcgcccaggccaaccctccgccttcaagcctcggatacacaggggatctgggtcccgggcggaccgcgagaacccggtctcagacatgggaccgccctgccgccacgcagccgccagactcacccgtgagatggtgaggggcgcgctgaagtcccggccgcccaccaggcggaagccccagggcgaaggcccgcgcagggtcacggaatggggcatcgcgggctggagccgcagccggagcctgagccggactctgaggaggagccgccgccgccgcagccgccgccgccgcctggacgccgcgcccgcccccggcccgcccgcccctgtccccactcggcccagcccccgcccccgctccctgtgcgcctggattggccccgcggccagcccgaccctcccacttcggggggctctgaggacccgccctcagccccggctgccggcaacccggcacccccactcagctctcagagatccccgcgttcggacggccccgacggcctggatcctgctcgggccttggatctgcaggccgcggacccaaacccagctgtcgacaccggccctttgaagtcgcttttaggggcggtgctccagcccgaggagggatggagggcccacttgggggatggggctgccccagctcagatacctcctcatgggcccgactggcacacctgcggcccatcctgccgtgtgaggagccctctgaaccaagaaccctatgaaccaggggcttgcgcagcactgggccggggacgcagacccaaaacgacagcaggcagcgccgagcgtgggagtggacacagaaaggtcctcagactagtttgtggaggccagtaaggcttcctggaagaggtggtccctgacttgtatctggaagcaaggtgtccctgcttccccagaacattcaggccttctcttgctgcttgcaggctcctcgcaggccacctccctgtctgcacagccccctcccctcgtcctttgccaggagatttgtttccccaggtctcctgagaaagtagcagctggagcggctggggtcgtggctgtgcagtgtaaagggaagaaatatatgcagcgcttcactttgggcccttttctctccaaggtcttctctccattcccaaccattatcctccggggatgtacttgaacagccaatgcagatgccatggcaccaccaacctccctctggttctctcggcacttctatctggctacatcagggagacaccttttacttttccagactctgtggaggtctctcatttagcccaaatccttaaccttatgtgtccttttagtcaagctgtgataaggaccctgctcttgggctcctcacaggtggtgggatgaaatgtgtccactgggtctctgacaacccgcaaagaggagaactgcttgagaagcacaaacctagggcagtccaaggaagggaggggcccttcagagtagaatgtgggtgcctctgtaggaggcaagatgctgctatctgttcagctgggagagaaacaagtggtgtgtggtagcggtgtttatatgggagtgtatttggggtgtgtgtgtgggggggggtgcggtgtctgaatccattagagcaccagccattgggctgttctccatcactttgtggtggaggaggtttctgctcagccccttgcagacttggatcccaagtgaagaaaggtggaagggccagcaggagagctggtcactgcattgtctctctgaggtctgtaggccagaagctccccaggacttagaccctactaaatggggtagagagtaaggggcagccatcacttatcactggctgtcctgagggtttggtgtacagcatggcttgtggtcagaggcctgtcagctgggctccaagagtcctagtgaatgtaaacagtgcagaccttttctggggggaagggatcctcaagggtctgtggaagcttccacccaatgtatcccaaagtgaattcctgaaactcctcttcatacattgcttgtttcccccgatttcacatcccaaagactgcctacactccttgcctccatcctgaaattccttcattacccgtttacttctgtccgggggaatgtgaagtggtcctcctgaatatgaccttcctggcccctgagtctctgggcagtgtaatccatctccaaaggcttctatcacaagtttggaggtggaggtggggtggggactctggatgaattttttagaatctggtccataaacttccccatttcattgggcagcatctggacagattggaatgatgcaggatcc

SEQ ID NO: 318377 - DNA, 4001 bp, Homo sapiens
cagggggccaggcctaggccagcccttttcagctctgcagaccgcagccactgttggccatcccagcgtggggctgcattcttgggcttataaggcaatccccctgctacagggaggagccagcctccagctccacccacaccagggcaggctcttggaagctgaagttaagcccctagaatggagccctgtcctacacttctgcttggggtcaaaggccaccacatcctgaatgggaacagtggatgtgggtccttacataggctggggagagaccccttctacccacaaaaaatgtacgccatgctgtgcctcaattccaatccctgcttcaccatggactcgatgagcgagccccgccacctctccatgagttcttctctcatctggaaaaacgggatgaggattgctattccctgggcggcagtgaggctgaagtgaaatcctatagtcacagtgtcctgcctggggcctggctccaagcattgccacctcaagtttagatacctcctgaaatgttaggctcccatcctgcacaatgagcctccctccagccctcagaggtggccacaggagcttgggagaacagcatcgggtacagtgcagggctggagaagcctgggtgctccctcccagtatccacctcattgggagtccttgtggcaggcaggtaccactacatctccggacctagacatctcctggcctgctggcccctgaccagctcctgttaggactccccccatcaccctctggagacctaagcaccgaaagaccgctgggggagccccctccccaaacctaggctcacccgggaaatggagaggggcacattgaagtccttgcccccttgcagccggaagccccaaggtgctggcccctccagcactactttgaaggaatccatgatgccggctcctgagaggagagaagagaaggtgagtggccagcatggtgggcgggcaggcaggcaggccgggccagctcaggataccagccttggacaggggccaggcaggcacgggcagcccctgagcacgcccaagccataggaggcaggtattttgtcaggctggcctgggctgctggctggcggacctcactttggaaagacaggagcagcccccctccccttgggactggaacggtgaggggtgcctgaatccaggcttgaggttctttgcaaccaggggtgggccgagggactaaactggcgcggcctccccccaagccagcctggagcctcgggcggccgggtgagtcaggggccggctctcctctcccccgcccccaggtcccggcaggcaggccgcggctggagcctgctcggactatataaggcgtgtaagctgacactgtgcggagagccagcggagggagcacacgggggcttgggacgcgaggggggggggaggggaggggaggggaggggaggggagggaggcggctgcagcggatcctcctagccattccgggaccagtcgaggctgctgggagccagggcgggacccctgggtgctgaagaaggggaaggcgggagtggggtgcggcccctgtggagacagatgggggctgggaccctcaagcatagcttggagggggatccttccccgagcccagtggggggtggtgcctcccacacagaactgctcccacaccgacgtgactcagtttccccttagtcccccgcccgggccccatgcattagactggccccggccgcaggaagcggcgcaggcgccaatcggccccgccgcagccggcttagcggcaggaaggcgggggcgggggcggaggcaggggccagggccagcgggaggaagcacagcctggaccacgacccccagtgccctttgtggtcctcagcaggccccgggcgcccgcctggtgcagcccaagacgccccgcgcggtcgtcgatacctgcttggcccggccagggcgctgctctgcgtcgggctccagggagcctcgttgggatcggccgccagtgttctgaccccgcccccacagccaccctccactttgagcgcgcggacgggggcggggcaccaggccacgccctcgtcgcgaccacgcccactagactttctccgctggtggaaagccccacccagctcttccgtcctgcccaatcaccaagtcccgtcgggcttagagctgagaggcctcgccgacccgggccctgcaacggggcggagtcgggagggggccggggctgcgggtcgcctccttagggaagcgctgcctcgcccagtccctcgcaccgcccgctggcggagggagaggaaagcggaccttcaaaccagaccgacctgggacatagtagtctctgaaccttagtttgctactccgaaaaatgggacgatcatactcgcctcgcagggctgccgcgagtgtcggtatcgtaggcgcaaccctcggggactgcagaatctgtaaatcagaggggctgggggagacaagttgagggggacaggggcgtttaaagctagagttgcgcaacgctctgccgaaggcaggaaaacagggcaggagcggacgccggatgtccctgcaaccccgagccgacccgcgcaccgtcggaagcgccgcgtcccgctccaccttggccagagcggactgcgccgcctgggaggcgtcctcagagtcccggccccgcgttcagcccaggcactagggccggcggcacggacactgagcacatgcgggtgtcggggtgagggaaggggcgtccaccctccactcgcttggtggtcccggcccatcacctcctcctaggacagagtcgctgcagttctcccctctccatccacagtcatcacacccaccctgttctgcacaaaccgccgtgagagttctcgtcgttaaagaccttctcttgaccccacatccctctccagctactaccctttaattctcctctcgagagtaaaattcctccagggagttgtctgtttatcgcgtctccacttgctttccttcagttatctcttgaagccatgccaggcgggctcttgtccgcacccgtcccctgagatctctcttctcaaggtcccctgtggcctggaggccatggggccatggaatccgtggtggttaagtttcatcctgccctgcctaggggcagcactggtccaggttgatccttttccgcgaaacaccctttttccctggcttcacagcttccccctgccccactggcccctccttcccatcctcctctgcctctggccttggccatctgatgtcgcctctctttatgctcaccccctgagaccccgtactgtcctgtggctttcaacaccacctatatgcaaaggcatcccatgtttcatggccagcctgacctctccccaggaactctaactccattatccaaaaccctgcctagatgtttactagatcaggggtccccaactccccgtttgtggcctgttaggaactgggctgcacagcagaaggtgagcagcggcaagccagagaagctgagtgcagcggcagcattagactcccataggagcgtgaaccctattgtgaactgtgcatgcgagggatctaggttgctcattccttatgagaatctaatgataaatgggccgggtgcagtggttcacgcctgtaaccccagcactttgggaggttgaggcgggggaggatcacttgaggtcaggagttcgagaccatcctggccaatatggtgaaaccccgtctctactaaaaatacaaaaattagctgggcgtggtggcgcatatgcctataatcccagctacttgagaggctgaggcaggagaatgacttgaacctgggcagcagaggttgtagtgagccaagatggctccactgcactccagtgtgggtgacagagcgagactctatctcaaaaaaaaaaaaaaaaaaagagtctaatgataaatgtactgcactcgaaccaccctgaaaccatccccaccccacccccagtctgtggaaaaattgtcttccatgaaagcggtcccttc

SEQ ID NO: 318378 - DNA, 4001 bp, Homo sapiens
ctccttgcagagtctccttgggtgagctgtctccatcatccaaaggtcactacgtttctcaaggtggccttctctccatgattctctccttctaggacataggagccttactcccaggagcccctgaaagcttgacaaaattcatggatctcactcagaatatcctcaaattctctttcccagtctctttcctatatacctatcattaaaaccctgatgtgtagtgaagggttaactcaccaggggtggggtattgagaccatgtgcattccaaagaaaggactggctcctgggagataagatctaacccctcagaatatcctgcttgacaagagtgtctttgtatacctgggggtgtttggccttgccagagagtttatgctaagaatgtgacttaatggtagaagacttgggtcatgtggcattagtttgacctctggagggactggagaggagtagctaagctcagccacacaggtactccatgtttacatgacccacccccaagaaaaaaccttggacaccaagatttgagtgagtgtccctggttggcgtcaaacatcattgctgggagaactgagcaccgtctgcacaactccactgggagagacaactggaagcttgtgcctggtctccacggactctactctctgtgtcttttacatttgctgatgtttatctgtgtcctttcggtgtaatgaactgaaactagaaatatgactgcttttctgagtttgtgagtcctagttaatcactgaacctgagaacggtcttggggcccttggggtcttgttccctgattcacctgggaaacaccaagacagtccaataacttaatatggtggtgggtggccgtgtgggtagaaaacagaaatatgctcgagagtattcaatgcattcagataagatcaaagtggatcttccagggtggggcttctggactgtgagtctgggagcctcacggttgctgggactaaggtgatatgggataggcagatgaaaacacatccaagacccaacctttggtgctccagttgaagatgtgatgctgcgttgaatggatgagggggtttaaatgagacatttcttatgccatcagcttcttattggcaggattcataaacctctgcagctgcagatctgggaaccaccaggttcccgtgtccagcccctgtgccagcaggcattccccctacttacctggccccactgacatcaactccaaccatcagctgcccattcagtgagaggatctcatcccgcagtcggaccttcccactcttccctgctgggctgttcttcctcagctctgtcacccagatgcagcccacatccagcacaggaccctggtgggttttcctcttcttgccccccctgcgcttttcaccatagtccccgaaaacagggatgttcccaaaactcaggcccacagtctctgtgtcccccagctccttggtgaggtacacagtacagatctccatttcgggggggctgtgatcaggtgggaccgtactctcatccacagcaaagttcagctggatgtactcctgcagcttctggatggccgcctggcagagccgctgctccggcccatccccaccttcctgcaggctgttctgcagccactggtagaggaggggcaggtgcagcacggcattgtcctgggtgatgggcatggtgctcactcccagacaccagcatcatcagaggtcttgctcctgggggccagaccccacagggccccacgtcccctggggtccctggccatcatcagctttgcctgtgttcatgttcaggctggcagatgagcctagggacacctactcgagactatgctgtttgccttggcaggaggaagctaggacccaattagaacaactgtggaacaatggcactggagtgctcaatgagggaaggaaggaagtgtctaacaagtccctgccaggttcatttcacagcaggacccatgcaaatgacacaggaatggaggatccctccagcagtggccgtgtgtccttccctgggctcattcacacctgggagaggaagaggaaaacacaaaaagctccagttacaacagtgagccttctcacctagaaaacatagcctcctgtgttacagaaggaccatgtgtactttccaggcaccaagcacaaacccagaacctaacgcttccccattcccccgtgtggctacctccatgctgtatggacactcccttctctcagacagacgcctctggaacactggccttctccaggaagtttcctggatcagcagagaaaccagatgacttggccaagacaaccctcaccaacatactatcaaactcacacccaaccaggaggctgtgtgacaagaccctgtggaaggctgtggaaggatctgcatatatttaaaatcttacactcctaaaaaaagaaaatctatgttgatttgccttggtcagcccagctgtacacacaggaaggctctccattccagaaatctgttctgacaacactacccagagaagaaagatccgatcaacaccatggagagatcccgcctccgtcccagggcaacaccattcctaaacttcgccatcctgtagattcagagggaagtctggctctttgcagcccaggttttagtatcatctctacatttcctttggtaaatggttaaaactgacttattttcaggccaacctaaaagccatcccctccagaggaatgtttctccaaatgcctgggcgagaagacaggtgccttctttgccttgcttttaaacacattgaatacagtggtgacaccagtcagcagacagcagggccagcggctcccaccagagctaaagcctcacactccctctgaattctgcacggtgcctggtacatattaagtccccagtgaaaggttaattcaattctactgccaactcgccttctccaccaaagaaaaatttcacctccattctccataaacatagaaaagtgatccctttcacgctcttctctgaacttcactttctcccagagaaaatcaatataaaccgtgccatccaacgtggaaaacattctccagccttctcaggaagtgatttaacaaggaacaataatgcatgggagaggtgtcagaagccatgtcaataataaatgaccttattactcagtaaccaaaaagaaatttccaatatagcgtgctttgcgtttccaaagaacttgagtgccagctattaattggttccaaataaatcaaaagcttagcaaatatcatctatataatcacatggttgttaaaaagaaatgcaaggctgggcgcggtggctcacacctgtaatcccagcactttgggagggttaggcgggaggatcgcaaggtcaggagttcgagaccagtctggccaacatggtgaaaccccatctctactaaaaatacaaaaattagctcggtgtggtggcaggcgcctgtaatcccaggcgtgtgtaatcccagacagggtttcactctgttggccaggctgatcactgtcttattcatcaatatattcactactccagcacagcacctaccacatcgtagactcctaataatttataagacattttaaaagatcctttacattacaattttaacagcctgtgattcaggatgttagtcacagttgagatggctccatacatataaaaacagtaaatatcaggctgggcacagtggctcacgcctgtaatcccagcactttgggaggccgaggcgggcggatcacaaggtcaggagatcaagaccatcctggctaacacagtgaaagcccgtctctactaaaaaaaaaaaaaaaaaaaaaaaaaaaaaattagctgggtgtggtggcgggcgcctgtggtgccagctactcgggaggctgaggcaggagaatggcgtgaacccgggaagcggagcttgcagtgagccgagatctcgccactgcactccagcctgggcgacagagccagactccgtctcaaaaaaaaaaacaaaaaaacaa

SEQ ID NO: 318379 - DNA, 4001 bp, Homo sapiens
caatgtatatttcaccaacatatatatgaaattgtaacttgttaaacttctctgttacttcaagtttcactcttgtctttttagaggatacgcaaacctcatttcatcatttctactctagagactgcttatttggtagaatgaaaaagtacaacttggatagtaaactactgtattcagattttgcacaaaaacaacaaaatacaatctaaaaaaatttgagttggagaagaatcataggtcaaatatgtgtaaaaagtagtggcagtagctggtaagttaaaccactcaccggctataatgctgttcagcagttaccactgtttggattattggacatttcctgagtagtgggaaatgtttggatgaaaagccagtagctaattattaactctctttacattacctcccttctgaaaaaagctctgcttgctgataatcaacttctaaatcatcttcataaaacttaacaatgcttggccatctaaggcaggtctaaactagctggctctaccctgtttttagtggtaaaaatgctaaattaactagtactaataaccatgccagcagtaaaaacactgaacaattgaatatcaatgatatgttaaagccagctgttaattaacccattaataaggtgattttctttcacacagagattctatcgatacactttccccccaccttcttccatttttcaccatttcaactttcccccaccccaatcagtaactggtaaaaaagatctgaccatgagttcattattgggaaaatcttacaaaatgctatatttcaagctttttctaaattggatacaactttgcatttccactatgtttttaagtcccctccttaaaaatacacatttatgtacaaataacaatactatattttgcatcttaaaagtagactgccctgtgatatttacagagaaaatgttcaccattcctttctacgtttcaaaatatccctcctcttgggtgctgacatagaaacatcattttggaacaagtggcagtttcgtcttgcatccctgccttttcttgttctgcatgggaaaaaagcctaaatagtagacagcaagaaaattcaataatgtccactctggaacaacccgagggtaggaattttgcatatgtatcaggcgccctataagcatcaccctcccatcccatgccataaaaaagggtggaggggaggaaatattcagcaaagtcctaatatacaatgtgtattgtaaaaacaactttaattttaaaagtgaattctaccttctaaggttttcagtgctgcctcactcctactcctagggtgaaggactttggagagacacgaaaactaattcatatcaaaaccagaacgcgaaactcctgcctgccccgtagcctggcctgagtacctggaatgcccgaaagtggatgggcgctctctcttcctatctggcccatggctctgaggacctccctccccgctccaagccccaagcccgcgagcaggagatgctcagagaaaagcgagtcgctcaccagtgaggagccagcagcaggcgacagcgacccctgggcgggcgcggggccgaggggccatggccggagcagcctcagcgccagggggccgcgctggttcgcagggcaggaccgggcgcgggagctgcgctctctggctgggccacttatcccgctgccgcggttcccagtcctctgccccagtggcagcggcgcccaggagcgggagaggagtgatttcctgtgttttcgtcgaattcctctaaatgcgctccacgcttttcacatcccagacggattgccacatcgcccgccccttcgcgctcttggtctctgaaatctcactggcagcttcccaggctctgtccgagacatggacaaataaagccagcttcgcgggtccgtgtttaggctaaagtccacgggctgtagaagcaaaccttaaagggacatctgcctttcattgagagggtgatctcgttctccgggccaaatcccctaaggtggtaggaaggcgggtaagggctggaccttcgggagggtgttgccagcccagtggctccgccttcacaccccttacttctcccggcccgggcagggagggcgctttgacagtgcctgggcgcccttaacgggaggcagctttcccgggtccattgcgcagagggattaggccgtctgtgaaaatgcgaggatctggaatccccccttccatcccctgcggacacttgaaattcaccgtgaagtcgttttgcacgaaagggggcgtccccaccaccccgacaggctccactgagggctttgctttcgcttatgggggggtgggggggttgcttcgtttatggtaattcgtggttaaagggtggttgcagataagcttttctttgagataactaggataaggggagaaaaggagaagcaagacggaggaaaaacagtaagagggagagcgagaagggaagagaggaagaaaagcagcctccttggaaatggaatgtgtgtgggctattttgtttaagtgaattaggatgtttgtacgctggtaattgaatctaataaagaactcggggcactactttatttttttcttgcttgaaactttcacgagtgaaaatgcattaagagtccagaagtgcttaggaacttgcaatgcttccctttcctggtgagttgaacaacctctctgagtcaaaagccatattcaccctagcttcaaccaatgctggctattttcaaaatagctgtgtcttagcggttttgagaatttcaaagacagaaagaataagtggatttgtgtttagaggaatctgagggaaacagttcaattcaattcttcaactcaacaactaattgagcatctctagcagaactagggctaggcaggacaagagtgccacccaaaggagggttcgttgagcagaacgcaacacaggtagcacagaacaggtaacacgagggacaggaaggaagaagcccacagggttcactggatacattgccagatagaggatcacagcaactaaaagctggagaagacaaaagttgaagaagtttaaggagcgtcaaaaatggggtgggcagacccaaggaggttgaaggccatcagatctcagtatgttgacccattaatcaagaaattccttttctattatgtatctgaactgattcactatttagtaaatacattaaaaatctcgttctcccgtttttagtttttataatgtcatttctcagttctgtcttcaaatttacacaaatgagtctctagaaaaattgtattatgttgggtcacagttcaatcccattggactttacttaagttcctttgtttgtgttcaatgctctcataccctgccaaggaattcatttcctgtgtatatctcgtttccctgttggtagtatcagttatgtcttatgcctctcagtatgactctctgtgctttgaacagtaaccaatagatattgattaattcgtagacatttaaaaatcatagtaagtactttcccaatgatatttctccaaattgcttagttttcaaaaacatataatagtgtgtctatatatacacaatcatgtgtatgtatgtatgtgtacatatatatgtacagcatatacatacatatgcaaatacatatatggcattttagcaaattgcaatatatttcattagaaaaaacaaaaagaaattgtaaaatattgaaataaagtagggttaacatataatatgttcaagtttacaattactgggaaatttacctttcttctgggggctaatatataatttcaattttaatatttttatttcctctaggacttacaaattattggtgataaccatcactaacagtgatattgttacaattaattttcacaagttacaaattttatgtttacatgtttacatatttatgaatcttttatatgtctagtcaatacaaatgtagagactgagagataactatggttagagaattaattttagaatcagtgcttat

SEQ ID NO: 318380 - DNA, 4001 bp, Homo sapiens
accaaatgagttaagagataaaagtggcttgcacaaggttgaacaactactggggggaaggcaggtgttatttaaatccatttcttctaaccccttagttcagcaatctttccattccactgtctatagtaatattcataatatgaacatttttaagaggaagaccaagaaagagagtgagaaaaaatgcaaagcactggcaaaagaattgcatcatgatcttcatccacagataccaggccaaatttgacccttgcgtacacttacttaactggaagataaacagttcttggatacttttgttgaagtgcctggaatgactttcacatgctgttaaatttgtgccttaataacatctgtgactgcaatgcacagcaaaggctactacataatttttattgtgaccttgttttcacctactagtaaggttttgaaagatttactttggggaaggggaggggcctgaaatttcctatttgtctccacccaaaaaaaggaccctgtaaaaacattagaagataaaacctttaaacaagttttttaattaattggttatcaaaattattcattttaagtttgtaatcattttcttagtttgcattcaccgcccgcaagtttcaaatgtagcaataaattcaaaagtaccgggaggcaaatccattcactaaaccctgatttaaatcggtacttttaacagaagaaaaggtaaatttttagaatgcacaattttgttttgaaatgtaaaattccaggtatcatctgactgctctatacagcttgctaaggaagctagtataccattaaagatgagctagtatactgttaaagattagagactccacctaagagctaaatttacaagattcaagacaagaagaacaaaagcaagacacaaacacataatatcctcacaacactaacaaaagcttcatttgttagaagcaacagctatttcggctgtcctatttcttttacacaagttgaccacaggcagtcttaactaagatgttgctcatctgaagaactcaaaatagtggtcaaaaaagtgtgagataaggcagagaatactggattctagtcccaacttctgacagacttttctggcactggttccttttccagaaaagtagatttaaaatagataaattctagggtcctttccaatccaccccaccgcacaaagcatactggtttggggtcattagtggtgttagaatgctgatcattcttagatagcaaaaatctgaataacaacacatttataagcaactgaggaaaacaggaaacccaattccttccgataccggttttatttggaaaactttactggttttgttttgtttttgacaattccttcaaaagaaggaggttttgttttgttttgtttgacgagtccttcaaaagaagtggagggggggcaaaatcctgaaatgaacattgctgctacaatgcttggttttccgaactgtagatattgcaactttcaaggtacagaaccgaataaatggcctaaaaacaaaggttggacttggagtttttcaaagcaaatgaggcagaattacggatgccacagctcaggcaaggggtccgaagggacccccatttgaaatgctctctttagttcttactatgaaagtgagtccctgaagcctccaaacgcaacgaaatgtctctggagctcagaaagactggacaagcccgagacaggcccgcagacttacccgacccagaccaaccggctcctacccagcaagagccgctcgccccccaccccgtttatggagacccagtgaggccttaggactctgggaaaccattccctagtccactggaccctccttccttctgcaaggctcgtgcctcacttgatattcttgtctatagtcccctcagcctccaaaaagaagacctccgcctgccaaagaccctcttttaccttcttcagctctagatccacgggggcggccatcttggtgcactgtaagcgcctgcgcagtgggagttggactgaaatagggtggggaagggcgcgtcttactttgtgcgccggtctttcttctgcgcctgcgcatgagttggactaaccgggcttcttatctttctctgagaattgactcctgaaatatttgggtttcggattccgtgtcttcactacctgaccggtcaggtctggcttgctcctccgtatcttccagacatagcccaacgcgcagatttcccatgtggctttaagcagtttgccagctagcttaatatgtgctgctaaattgagatgtatgtagatgaggtcaaaccctcatcagtcgatcagtccttcagctagtcgctgtgctctcaggaatgagtaagagtaagtccagaacctcaggcatgacagtttgggaaagactattggaaagcttgtctggagtgttctttccaaaacgaacttattacttccaaaagcttcccaaagacattctaggcacagtggttctcaagagaggctgaatacgtttgtttaaaaacaaaaaaatgcaggttctctgggtctcatctcaaacgtactcagaatctttgagaatggggtctggaaatttgcacttttgcagactaccccagtgacctaatggtgcaactcctccgcggatcacttttttgagaatctctgccataaaaggacctggcatttgaaccagaatagataataattgacttttggaaatggaaaaaaaagttaacctactctaaaaactgttatgctaagagaaagtgctacataaataattaggaaatttattttattttttaaaaaaagaaagaaagagagaaagaaaacaaactgttagggagatgaaagggcagggaatttggaaccagcctaatctagattcaaggcttggtctgcctttagcctatgtctggttccatttactaattgtgtgactttaagcaagtcacttggatattttgtggggtttttttttttttttgtacgtttgtttgtttcttgagacaggatcttgctctgtcacccaggctcgagtgcaatggtgcaatcacgactcactccagcctctacctcccgcgctcaagcgatcctcccacctcagcctcgtgagtagcgctgggactacaggcgcgcgccacccacactcagctaatttttatatttttgtacagacgggttttcaccttgttgcccaagctggtctcaaactcctgagctcaaacaatccgctcgccttggtcgcccaaagtgctgtagtgctttgatattaaaggcttgagccaccgcacccggccacattttttttttttttttttttttgagccagggtctcgctctgtcacccaggctggaatgcagtggcacgatctcggctcactgcaacctctgcctcccaggatcaagtgattctcctgcctcagcctcccgagtagctgggattacaggcgcctgccaccacgcccggctaatttttgtagttttggtagagacgggtttcaccgtgttgcccaggctggtctccaactcccagcctcaagtgatccgcctgcctcggcctcccaaagggctgggattacaggcaagccaccacgtccagcatctgccacctatttttaatgagcttcagtcttctcatgtttgagagtgaccatattgacctaacagggttattgtgagaaataaatgagatcaggataaaaagctccaaacatagctccatgcacacaagtagatactcaataaatcactggtgttaatcgccgtcctgtttgtctttcaaagtccagcaaatgggcactacatcccccatcacacagagcaaagataatctctcctctgaactcccctcacaacatctatttctctctcaaggcatataacactgtctacctttttttagaaaacatttttcttagactgtaagctccttgaaatcaagaactatggaataatggttcttccacctcttgtacctagaacacctgtcacagtgcatcacgggaaaaaaata

SEQ ID NO: 318381 - DNA, 4001 bp, Homo sapiens
taagggtgggtctgggtatatgactgtgcagctgtttgtgcatagatgttggtgcctgcgttactgaatttgcacacctccttgccaccttccttcctccaagataccatctcctcatcctaacccaggtcttcggcaccaccacaattaattcccttcccaacacttgcctgatggaaaaaaaacaaaggaattaaaactctcctcaggcattcggaagtctttttgctctccatcaatggcaaagggaagaccaagccagggggttcagcagcaccatctcccctcaaagactggctgcaagagcagcctgccctgcccaggccaggtgcagttccagagaagccagccctgcaggctcaccccaaccatctgcctggccctaccttagtgagtccaaaccacaattcaaactccctggaagcccctcctaggcctggggccacccccaaggcaagtgtaaggaggattctgcacccccaccccctgacccccacctggctgaacttcctctggtctccctctgccctctaaattcacccacctcagccacacatcactccttcctgctgggataagatcagggctccagaataagtgacaggtggggtctgccatcagggccgctgggggaggggacgggaagggtgggggtgggcaagagaggccatgccctgggccccagcacatggagggcagggaccagacaccctccctcccacttttgtccactatctttgggcaataaaccaggcctcaaacttacccaagcttttcaattccccctcctccataggtcaccctgaaactgaggcctgcagagtgagactcccgggtagggatgccagagttcctccctctagtccagggactcctgcggggccttttcgaaggcctggggaaggcaggatgtaaggtctcaaacccaattgcgatggtcttggacatgagccctctcagtaggctccccttggaggaatgtgggcagagatgcagaggcctgtgagccccagaactgctttacaagccaccaagcccatcctgtcacccactcacaacttgctagtgcttgaggtatgagtggaggggggaggagcaaattggcctccagcctgacaccctgatggggagaggtgttcgcgggatggggagggggctccctttacttgtcctgcctaatgtgtgggaatatctctgagaaaggacgctaaggctgaaacagactttgagaagcccccacccttggactcttcctcagctgcggagtccctaggaccctgggaacgcgccaaggagcagcagtcaggccaggagcctctgcaaggcgtccatgggagagcagggtgtagggcacaggggcctggcagcctctagactcaaaatcccggctccaccaggtaaccgtcttgcaaagaccagtttccttatttacaactccccccaccgcgcaagtggaggaggagccagccgcgcccaggtcacagtttatttggcccgcgctaccagtgggcggcctggctggccggctaggcgccctgcatgcgcagcccgcgtatgagttcgtgcaccgtcttgttgaggatgcccccatgtacgccgcgtcggcccattagcaccaggagcgcgcgcggcgcacggcccacgcacacggcgcgcgcgtccagccccttggtgcgtgcgtccagcacgccgtcaccctcggccagcaggtggtcgcggatgacgcagcagcggcggccccccacgctcaggcccgcctgcaggaaggtgtgcctgtccggccccgtgagcacgcccacctcctgcggcgagatggccgccagcaggcccccgggccgcgaagcccacacgcagctgttgtccgcatggcccacgatggccacgtcgtcgatgcgctggtcccgcagcactgcactgatgtagaccttccagtcgcccatcgcgctccgagtgcgcccagccgcctcgcacctctcggggaaatatagaggcgccacgcggggaaggcctgcggcgctgtgaggcaggctgggcggggctgtgacgtcacacaaggcgccgtcccggagcgaccacccaggctggggcacgtggggcgtgggcgtttagtgctgtcgcagttctaaggttatcctgtaggatgggtttggcagagcgcagcggctcactcctgtaatcccagcgctttgggaggccgaggcgggcggatcgcttgaactcagtagcgagattatagtaaactattataggatcgtgtcgctgcacgccagcctgagccacagagcgaggccccgtctctaaaaaagcaaaaacaaattttaattaaaaaaaatttttttgagatgaggtctcactatgttgcccaggcgggtcaggaagtcttgagctcaaacaatcctcccgcctcagcctctcaaagtgacgagattacaggcgtgaaccaccgcatctggccaatctatttttaattttaaaaagctggttttgtgaaaaaaggatgttgtgtctggacagccagaccttcacttgtaagggaaccaaccattcaacccccagattgtggttcttaagcatgagagaacatcagaatcccccgcaaggctgttaaacagattgctgggccccaccccagactttctgttcagcagtataaagtgtagcccgagaatttgttatgtgtaacaagttccctggtgatggtactgctagccaagggactctcagacccactacactagtgcgtgttggggtggggacaacgatatgtcacccagcccttagggtccacgccacagtcaatgctctttttttctattttcttttttcttttctttctgtctctctctttccctccctctgttccttccttccttccttcctgccggttcaagtgattctcctgcctcagcctcctgagtagctgggactacaggcgcacgccgccgtgcccggctaatttcttgtattttagtagagacggggtttcatcgtgttgcccaggctggtttcgaactcctgagcaatccacctgccttggcctcttaaagtgctaggattacaggcgtgagccaccgcgcccggccaatgctaagtatttctaaccacgattctcaaccttggctgtacatggaattatctggggagttttacaaatataccactacccatgccccatccctagacatactgatttaattggtctgaggtggaacttgggcatagattggctcaaaacgctccccaagtgatcttaatgtatggtctgagaactactgctctgtaaacaaaatgttagtttctcataaggaataacatgcagcttctccttgcacagggcttggtatacagtatcctaggctcagtaaacattagctgggctggcatctagattttgcacgttaagatctcatagaccttgttctctgagagctgtggagaagctgtgaatcgcttttctgtcttggcatttcccggcgggacccatgaagaaaagagctttccttctcagcattttcaaagcactttattgagttcctgcgccatcctggcgcggagctggccgcactgggggaatgggacacaatcttgccttccatgccccagccactctctcactgcggaatcaccaaggagggaaagatgagtccctgagcaatcaggaaacggtgtgctcccggatccaggccaggtagtaggccacatcggtgtagacgcctggcttgttgcggtcaccacagcccgatccccagctgatgatgccttgcagggtgagccggcgctctgcagcttggtcctcacacaccagcgggcctccggaatcaccctgggtcggaaacacgcagctcagcgctgtggacctgagatttgtgcctgacggcctcggggaagggcgccaaccgggctaagagctcacctggcacgcatcggtgccgccctcgaggaaccctgcgcagagcatgccggggaggatggaggatccgtgcacgtccggggctgagcag

SEQ ID NO: 318382 - DNA, 4001 bp, Homo sapiens
tgtgcattattctatatggatttgtccaagctggaattttataaaacaggccaaacacattggcattttgaaaattaaatcacagacttatagtgatagctgcaagcaaagttcaactgtttaacaatcacaatttaatcagctcacaggacttatacactgcatctatctaagcagtgtatgtatacgataaatatgcacattatgtatcaataacaaaaacaggatggaagactttttatctaaaagctttgaattcacataaaattaatccctattaagatataaacaatttatcaacattttaaaacatctcatatcactacaatcataacctttcggtttggaaatctgaatctttcagtgaaggtataggctctgctaatcgatcaacacctatgagaggaggaaggaatataaacgtttcactctttcttttgtgagaatctgttcatccttcagggctcagctcacattattcaacaaatatttcttagtgcttctcagataccaggtactatttaaggtcctagtgcaatgttgaccaaaaggactaagctgttgcaaatgttgaaatagaaacaattgccactggccaatatggcaactgggtacttgaaatgtggtggctactaccaaaagaatcacttaatttttaatttgatttaattaattcaaatcaaaatagccaaatgtggctagtggctaccagattggacagggcagcccagtcctaagtatagaggtaaacaagatagacgaaaatgttacctttgtgaagtttataatccagtgtaatagaaagacattaaacaaataaaccaatacatacgtaatgtgaggtggtcattggaagtggtccctttaggaagggtgtttaaggaaggcctctctaaagatatctggattatgtacatgcctgtctatatactcctatgaacactacactaacatatagcacagaactctatacaaatgcttgtcttgttcagctgtactctggcacctaccataatgtggttcttgaccaagtgtgcagaagtaatctgcaaagctccccaaactgatccggtcatgcagtgttcaaaatacaccagcaactcagaatttggaaaacgtggggaaagaacacagcaaaaacaagccgctctttcctcccatccagtctcaagcagcttttgagcttcacttcaaaacacagcaatgcggagcaaagattgccttctcctttctttcttctcatccccagcttttactgtaaatgaagtcgcttagtctctgccgcaccacactcttcagctattgcgatacttttaacaggctgcttcacgcaacaccacacctctttcgcctaccattagatttatagttcccacaaagtttctaagaccttagaggttctctgccgctcctacacataaaacaccatacagacactctattaagagttaatgactttagagaggacaaggatgcacagaagtattcatctaaaaatacgacgacaaactttgtccttttccttttacactcggaagtaatgaggcaaagtgacaggctatgggagcgggtaaaaaagcagctcagagttgccagaagaaaagggaagtgaaaaagccggaaactggagatgccacagccctcgacctacagccttccagaccttcccaccgtacggcgggagagtgggggtaacctcaagcccacttgaaaccagtcagtgccaactgggcggccgcgcagcccccttccggcgcccagtttgcggtccgactccgccgcgcctttccgctggagcccgggccttgtgccagcctggctgactgtgccacgagttacctgcttgtctcgagtgaagaatagcgctccggcaaaacctggaggcagcgctggaaaaatcgcacgtgccgatcccgtaagaaatccagccgctctccctcaccgctccctgctagcctctcatcctcagtggccgccatgctgctccggaagcgacgtccgccgcgacccggaatcagtgcccgcggagagaaagaaccctcctgtgctgaaccacagggtgccgggtgaggggacctgcgcccgccgcagactaagccagtatttgaaaccgctatcatctgggtcctgtgcagcacttcctctctccgatatctccctagctagcgcatgaccctaccttttctactcaaagccctcgaggcttgtaaacacctcgcaggccttgtgaaaatcaagtccacaaatccctccgtcagaatttttatcttgggaagcgcaaggtcaaaagcatcaagtacgctttgagacaattctggctctgtagaacctgaggatggtatatctgaaaacgaggatggatcagtataaacttgctaacagattcatttttggagggccagttttaagccgaacggttagggaaacagaaaaacaaaccagtggagataaatgtttattgacactacaaaagctcagagactttcctaatcttaatcctttctggataccaggaatcacttaaaaatctgtgtataatgcccccaaacatatacaacatgcatattcatacctatatatgactgcttgcgtcattcttttacaaatcttacagattttactttgcttgagtcgacgtgttatcaagaatcaatggtgcatcaatctgcaacagcaaaataagctcaatatcttctccaattacctgcattctaaaaaatttaaacatgcttctagttcttttttccaaaaatagggatttaagttgtttagccggtatactatgccctttaaactttcatgaggcattcctgagtagcgggtggggggatccacccaataatataactaaactaggttccctgtgatcaacttagctaataaaattttgggtttaattttgttagctttcttagaaaatgtaattcttatactctatgggctggggtaatcttacacttattcaacaatccaaagtgctctgaataatttttggtactattaactacttattcacaggtattcctgcatgtctttacaaaatgccgcatttaacagccacagacggattctaggctgtcctcggtacttccctacaaatacggagctcacagtccttgcccttcaggtgtgcccagtctggagtttccactgttattaaaattaagatctctcacttagcacacatacccccaaatgcctgaagatttttaaagtggagtcttatacacatttaacttactggaatcagctatggacactctatacattctcagaaaattaattctaataaacatggcccttaagttagggaagccaaatgtttcatctgattctcagctcaaggactagcaatctgatccaaatctagaggaaaaatttgcaatgtgggactcattcagagataatacagaatgcctcctaggtcggtaaaaggctttccatgagtgattttatccctacaagatttttggcatgtgcataacagaatgggaatgatagaacatctatataattgagtgttatttagccattacatgataatgtttgaattaggtagaaatgtacgaaaatgtgtaatgcaattatagcatagtaattaatatgtactgtatgactgtaacaatttaaaaatatgtaggtatgttttttgaaaaagttaccctggaattatgggtactttataacatttcttctttagtgttttttctatgtttcttattaatgtagtttttttgtttccaggcttacttcattttatttttcttgtacaacccgatgttgtagccaccgctggagcctgggtcctctgcacggagactctggtgtgggtcttgaggaggtggtcagtgaattcctgatagggagacttggtgaatacagtctccttccagaggtcagggttcagcctgctgtagaccttagagatggcataaaaaatgaccatgacgaagttgcccaggatggcagtgcagcccctggctgaggtgtagcagtcattg

SEQ ID NO: 318383 - DNA, 4001 bp, Homo sapiens
ctcctgcctcagcctccggagtagctgggactacaggcgcccgccaccacgcccagctaatttttttgtatttttagtagagagggggtttcaccgcgttagccaggatggtctcgatctcctgacctcgtgatccacccgcctcggcctcccaaagtgctgggattacaggcgtgagccaccgcgcccagcctgggcaagatatttttaaaaccccagagtccacggcattaagtttatttaccaagtcatgggtcaatttatgtaaaaacaacctgagattgaaaaacaaaatatcttggtactaatttcctaaacatttatatgcaaaagcaagtatttgtctttgttaaactcctactacgctagaaatggaagttgggactatctatcttcctatcttcaaataataatcagagataacacttaccaggcattactgcacactgtatgctccacagaatccttgcaataaccctatcagtggtacatcatgccaattccacagaggtagacaaaaagcagtgaggctaaataaacctgctgtaggtcacacatcggtggccccaggatctgaacacaggcagcctggcaccaacgccctctcaaagaggttgctacctaccaaggcagtcaagacaaattcccgtttagaaagcagggaagctgggccgggcgcggtggctcgcgcctgtagtcccagcactttgggaggccgaggcgggtggatcacttgaggtcggaagttcaagaccagcctggccaacatggagaacccccgtctctactaaaaatacaaaaattaggccgggcgaggtggctcacgcctgtaatcccaacactttgggaggccgaggcgggcggatcacctgaggttgggagttcgagaccagcctgaccaacatggagaaatctcgtctcaactaaaaatacaaaattagctggatgtggccgggcgccgtggttcacacctgtaatctcagcacttttggaggccgaggcaggccgatcacttgaggtcaggagttcgagaccagcctgggcaacatggtgaaaccccgcgtctaccaaaaatacaaaaattaaccgggcgtggcagcgggcgcatgtaatcccagctactcgggaggctgaggcaggagaatcgcttgaacccgggaggcggaggttgcagtgagccgagatcgcgccactgcactccagcctgggcaacagcgtgagaccacctcaaaacaacaaacaaaatcagagaggctaatgcaaaagcctagtgccatggtaccgcatgacaaagctaggttcggtggaaacatggaaaaccagatctttgagtgagcgataaacttcattcctgggcctcagtctcccttcggctcagggagaaaatgagcatcacaggctgtttcaggctgatgtccctagatgctacatatttggcaaaatctgcccctttatggttacctagcggcgatggagtggggaagccccaagtttagaaaagaaagagcggtaggcggaggtgagacgtctaagaggccgccgcaagccggcctccaggaggcgccagggctcgcgcgccccgcctcgcagggagcagccagttcggggttcgcacggccagccgctgccgctgccgccgtcgcccctcgcccctcggcccccgcagcccgggctccgtgagcccgcctgggggacgtctgctcgccccttctgcggccactgacccgacagcctgggctcctcgctctggcccgggctcctagctcccacccctcaccctcaccgctgcctgcgcgctccccggggcccaggctccgcgcgcccagccacgatcacccaccctcctttcacactcactggcaattgcagcggcctgtcgctgggtgcgaccgtcatgtcggaatccgagtcggaaagctgcccatcttccatatcgccgacctccaacgccatcttcccgcggtgcgctgcgctgcacagcggcgggtcaggagagcacttccggcggggcagccggaaggcccggcggctcggctgctcgggcgcccccgcgcggaggccagcctgtcccagcggcctgaggcgtcccattgcattccaactaccccgggaaaatgaatcccttgttcccccaacacttttcttccaaactttattttcgtgcaaacataaatatgtcacgtatcgcggtcgtctgggattcctcccttggccgtacatccttcccctgtatgctctggacaagcctccccgcttctgttcttgctcctccacaatccactctacatattgcttccagggaagcctttcaagctgtatagtccgccctctgtatccactccccatccacggatgccgaacctgcggatgggaaggacccaccgtgcacccccacataatgtaaggggcttgagcatggcggatgttggtatctgtgggggtcctgaaaacaatgacccgcggatacctagggaggattgtaccttagctcgaatcttccaagtgcatccctccccaaaacaaggactgagttctcagcatggtgtttgaaatgtttgttttccggtgtcgtaaagaaatagcaacataaatttaacttactgaataaggccatttttactttctgcagaaagggtacactcgccagcagttttgccaggagagtacactgaacaaaaggagacagggtcatttataacctgacgtgtttaccttactgctgtggctggtttttattggctggaccggacctcacattttgtatttgtcccgattggctagcaacttagaactttttaaaagaggcaaaggtagaggagaacaaaggaaggaggaagtaacttgtggaatgctgagaaagatgaaaacacttttaaataaggaagaggaacaggctatgacctaatgcttgcttggactagtaaaagcatgccagggcaaatatttaggctaaattgtgggagctaagaacataaagtacatttttttttattatggctagcagatatttaagaatgttagcacagatctttgaataaattttgcttttaagagaagttactatttattcctaattagacggggaggaaagtttttgaagaggaacctctgttttactttgccacatggcaaacaaggtcatgtggactgggcatctggtcactggtcctagtgtgtccccctgcctaaccgctggcgcgctgaacctgttgttcctcaggccaggcctctgcatttgctgttcactcggcctgagaggcccttccctcaacccaccccattctttaagggttatcttggaacccgcctttgcgaaaattataacagtgagaaaattatggcagtgggagagatctgatctagccaacccctatcttgcttttagccttcaagctgcccttaattattcctgtgcttgggcctgtcaatgtaactttgggagacatttagtttatagtttaaatgataataacccttccccaaaagccaaccgcctttgtaaagctagtaagagaccaccagggtagacggataaaggaggctgaattctgctaaggtgtagacataaaccgttgccagtcattatcccagaggtcacaaggtatgcaacttttccattactcttccagataatatcactattgtagaccctaagattggcgttttgagatatcttttcagatattttgcatgtctgactaccaatggttccacctgaacctctaaccgcttctgggttcccacacagaagttgtcgagctgcttgaggacaatttcccatacccctatgactgcatccccaaccaataagcagcaagaacccattgcttagccactccatcccttccccaaactatctttgaaaaacactagtccctgaattctccaagagattgatttgagtaataactctgtctcccacgtggcatgggtggcctcctgtctattaaattctttcttctttttgagacaagagttttgctctgtctcctaggctacag

SEQ ID NO: 318384 - DNA, 4001 bp, Homo sapiens
aaactgaggcactgagaattaagtaacttgcccgagatcacaagttagtaagtaggggacagggatttgagcccaagcagtctaagactagagtctctgctttttttttttttttaacctcaactttattcatcttccatgtgcctgctgagtctcagactccctttctttccatcagctctggcagcctcatcaagatgactgaattcctacttcagctcccttgcctagcacctgagatggccaatggggctgaagcactgccatgaccccagcacttggccagcactgtgctacgttgctggtcacagctgggccatctgccactttgtgagctcatcatcagtcccaagtggaactagactcacagacctagattgctgacccctgcctggtttagcacagctccagattgcagaattccacagctatattgcgaaggctgagcctcctctgcatactgacagtgcctcaactccacccaggttctccacacctctcggcaatctcaggtcaccttgggaccaggttcacagcactgccttcctctcctgccctgccagcctgaggtgtgatactgaccgtgcgccacattgctgatgcaatcgatgtattctgccccctgttcatcgtacatgtactgcccttgggcccggacaatcttaacaggatcctcgggaaaaaagagtctgcaggaagagctgtggggacaggcaaggagtggacagccatgtctgaagaccgaaagggtgaagtctactcatcgcagacccccgcccaccccttcccagtttctggtggcgggggggaaatgagagctggaagggcaaggtgctgcttccctgccttgtctctccactccacaggtggttgcaaagcaggaagcagatggggtaacaagtcgctgaaacttcggattgtttctgaaagcattttcagcctctgtggcctccttgctcatttctgcatgtgtccgcgtcagtctcccggatcctgagaaaaggtggctgccccgtcccatggggactccataaggccgcgtgtcttcgatgggatgggccagggcaccaacattaggtgcctggctctcagccctaaacagctccttgccagccacgtggccctgctgcccctcgctgggtgccagccctaagctccagtgggaggcgacctcacccaccgtcccaccgagggccccctcacaggtcaagtgtgctgcctgtgaaccgactcccccgactctcccttgtctgccctttcagccccctcccaggtcactctcgagccaggcccaggtgctgctgacgggccaccctgggtgaggtcctctcaggcgccagggtgaaggtcttctccggagtaaaggctgccaagcgaggctgacacagccgaacagcggtgagggcggggccgtctcctgaactgggcggcctggagacggcgctgtcggggaggcggccccggagaccacccgccgggactgcccaacggcgccgcccgcctcgggccctagaagctccagcggggccggggcagcggccggacgggatgggtagcagcggcttcctagccggaggcgcgtgcgtagtgcgtgcgtgcgtgcgtcgtgcgtgcgcgtgcctctccgcgcagccccgcgccccccgccgcccgccccccgcccgggtacctgatgagccgttgcctcagggccagcgtgtcggccttcgggcgctggtctgcggccatggtgggtggccgtcagtcggtgccgtgacgccacgcggagacgtcgccgcgcgggctgggcctccaaggccccgctccgggccccgcccctgcctgggtcgggatttggggctcaggttcgcactcggccccgccccgaagcgcccgcgttgcggtggttcatttcttcgcttgcccactgggcctggcagccttccggcccgtggtcgtgccttggcagtcccgcgcaggaactcgagcgctgccccgtctctggttccgggacgcgccccgggcctcgccccgcaggccccgccccgcaggcccctgcggcctcccttccgggaaagggtcccggacgaccccgcccctgctcccggcgcccaggcggggctcggagctcctgcaggccttctctgggccagactcagtctttgagtcgccttgtgcataaaatgggatgaactgtgaggcctaagtgcgagtatgtgactggtaccttacccgggcctggtacacagtaggggcctcagggtgggagaagcaggtcctaggttttcccagccccatgaaggggcagcaggaagagcagaaggagagcccagggtcccttctggggctgaccaaggagatcaccatgggcttgaccttcagggcaccatagttcctgctagaatctaggcagggtgaaccggacgagctgtatcgtcgctgagagaatcatgcagcgtttgggcaagaagagaggttgggaatcctccttgtggtacatgtcggtgaccctgaagcccagaaagggaaagggttttgttgtcagacacgcagcaaggctgcagaggctggactcctactgaggtcttcttgactcccagcccagggagtgagaagaaaaagcctcccaaggggctgggatatgagagaaaagccccctcctggggtgaggcactggggctttctgccttgaagaaccctggaacacgggcctgggactgcagcaggtgcaggggaggctcctgattgtcccttctttctgtccacatcatgattcccaggcctctgcttcactccctcattgctgatttcttcttctcttcccaatacagttgtaagatgcataaggcatttattgaactcttgacctcagatgatctgcctgcctcggcctcccagagtgctgggattacaggccgggtgagccaccgcacccggccgcttaaggcatttattaaagaacatttggagtttcttttttctttattgtgtaaaatatacataacaaaattttaccattttaaccatttttaaggatacaattcagtggcaaaagtacattcacatcgtcgtgcagccatcaccaccatccatgcaacaggactttttcatcttccctaaaagaatggaatttcttatttttaactgtaaagctgaattgaatattttacatgatttttggaaaaaattcttcccaaattaactgcgaggttaactgcttgtggcctgtatttttttttttttttaaagaaagggtcttattctgttgttcaggctggagtgcagcattgcagtctctacctccctgggatcatgtgatcctcccatctcagcctctcaagtacctgctactacaggtgcacgccaccatacccagcctgtacttcgtttctgaggatcaagacctcacagaccgtgtgtgtgtgtgtgtatttgtgtgtgtgtgagtcctatttgggccccgcctttcagccctgtcttgcagcccaaactccagccacagctgtggccccgtgcagctcagaggaatcaggttggctcaggggcttttcctgctttaaggcagagggtgagaaggctgtagctgggcccggctaacatctcacctgctcctgggtcaagaggtgatatagttggaggtcagaccaggttgagccatttcctgggccaggagtatcttatagcatggcacagaacaccaggaggcctcaccttcttcctgctcagaaaagcccactccttgtctctggccctgtgccaggcactcatctgtcctttatttcatgcctggccctctaggcaatgttggagtccaagagggtaggggatggaagtggctgagtcaggatttgaacccagggcatggtgtttctcaacagggttggcaccgggattcttgttgagatgatttgtcactgggtaggactgtcctatgcattttaggtgtttgctatccctggccctgtcccctgaatgcccaggtgtcctgcaatcattgtgctaaccagaagcatcccatgtat

SEQ ID NO: 318385 - DNA, 4001 bp, Homo sapiens
tgcttcaatagctgtccttttcatttggatttcctgcaacataattttaaaaagataatgtcatacctttcatagaacaatctcttactgcaagacactaccaggacatttgatctgtattattagcagagtgggactcaaattcataaaatccattaaaacagtatcccagaaacaagtatttcctctggagaattttctcaatctatgaaaaatgattgcgtagcaatttcctatagtttttatcttcttaaaagctattgtagtttatagcatccctgttgttttctgttccctctggcattcccagatacatgagtgaccagtgaagaataagggtctagaaaagcacagcagtatatagcccttccttttcatggtaggatatatattaatgcctaaatctccatttcagggattagacaagtctgtgaaacttccagttattactaacttccaatctaaacaggatccttctatcacgaattaaatcaacttgaaactcagtgactgcttcagttatcacgtgaacttaatttattattctgatacttaaaatttttggtttaaagctttagagatattacactagaataatcaacaatgattcacaaataaatgctctcacccccacctcattcgtaaaaactcaaccttttaaattcttttttccatgttagtctttaaaagtttagaactcttattttttaatctgattttcatagaaaactcacctgggatgtgcgggtatattcttcatataatctatcatattctcgacttttttcttgaaactgagtgttatattcatgtaattttttccctacagcttcaatattatcttctttgacaacttgatcctagaaagattaaaataaattcaatggataaggtatttaatcaaataacaattgtttaacaaaatagctgacatggaaacatctttaaaattgcaattatgtaattacgagtgtcaagttttttagacttgattacatgtaattcatctgcttcaaatgttttctaagtattaaaaggatcttgtctaaacatcgtaactggataattcattcagtttttattacctgttggtatttggatactggataaagtaatttcacatccaatttgggattatactgagctagagattcattccggtagtggtttattaattcaaccacagaactgaaggttaatgggtcagagaagccatatttcccatctcgatgaaatattttgattaatttgttatttccccctttcctgtaaaaacaatataaaaataaaggtattaacattttggaataaggaaatatgttttaatatcagcccaaaaccctaatttcagctatattccctggcttaccttagtgtaagagtataatcaccatgcattttagtagacgcatctcgtaccaaaaaggtcccgtctgctgtatctcgaagtttttcattcacttcttccctgaaatgaaaacacaaaacaatgctcatcttaaggtttagtgaccacagatttatattttttaaaataggctattttttagagcagttttaggttcacagcaaaatcaagtggaaagtacagtgagtgcccatattcctcctgcccacatagatttaaattaatgaattgcattttcagagctcactaataagagctaataatttgtttaaatagaaatgttagcaattgcagtctcatcacaaacaggtgcatatcactttcactattggtgtatctgtggtactaagtttttattttttcaaccaaacattacaatctctctgacaaatgagcacagaaactcatgatctcaaaagagtttctccaaccttactcccccttcccaaagctaacataaaatggcattgttttcttattgtgtttaaggcaagaattcttagagttgtgcttaatagatagagtgccttcacactctgttcttaggcagtgccacttcactctggcacttcactgacatctctgtcaataatgaaacttcccgggtatttaatttcctgtggcatccagcacccacagttctccagtgctcagtgactttttctggtcgtctttggaagagaaccaactatgcttcatgcttatgttggatgatatcctaaaaatggaacttagcaagctggtgcttttctttcttttaatctaaaactctctgaaaatgaagtttctgtagccttacctcgagatatctccccagtaccattcagcatcttgtaaggacatattgttattcataccgttgttggctacagtagtaggttttggtggtttaggaggcagtgctgcagatgaaaaagaaaaagttgttcgcaatcccaactacattagaactaaatttctttagatgaatacttttactttaaaaaaataaaaagttagagtaactgaaatatatagcattagttcacaattccatgcaatatggaagataattttcttaaaaaaaatctttcagagcatggctcaaaaagaaatgaaactgaaaaggagaaaagagagagagccttagaaactaacaaataaattgggctggccatgtgaataaatttcaaagtaaatccagagtcatgacattctgtacttctagattctagttatattaaagtttcatgcctggtcaaatccatctaaagtaagaaactatgaacatatgagtagcaggaataacatgagttggctttaatttcctcttatttaattacgaaagacaaatttggtctctgtcctccacaaactctgttgcagtaataaaaaggctcatctacagcagtatgttttaagaggagcaattgggtttctctaatcttagtatttcaggcactgttctgccaaaagccactttaagaaactctcatctgtgccctaaatctctttaatatgttaatattctgttggataaattgtgctctatatactaggtctgattaaaaatgatatcccccttcctcaatgtcaaatcagtattcatatataccaattggtgacaaataaaagactgcagtattcctgaataccttaaatgggggcagggggagagctaacattggaataaaacaacttacttaggaaacaaaataaatctaggatttttaggtaaattctgtcataagttttaaagcactgttactattttaacttatacaaaaaatgatttcaggtatctaccaagaatattttacaaagactaacaataatggaaagtcaacttcttttttcattataatatcttaatatgagagagcaagcaaagtctcaacatttagagaactgagttgtaatcactgctacattttacatgctttctaaagtaccaagtgttatcactgcaaagtgctacactgttctcatccactggcaacagagaaaagcagcacaaaagatgcatcattttaattacagggacaatatcccacaacataactcacccagggaaggatctcgattaacaaaagacaccagtgaaaaactggagttcaattcatatccattcaagtaagaataagcatttaccacacacagcctgagctgcttgcttccacagacagtcaaacaatctgtttaatttttaagccatgagcaaactaatttttatcaatgaaacaaattaataaaaacagaaatccaaaaaggatcttttacagtagctttcgaaaaattaaaaagccacgaaattaactaactctctacaataatactgcagtattacctggtgggtccatttctatataaaacatcaagtctgtgccacaatttatatctgtcttggcatattctaaatccaggtcttccatattccaaacagtattgtacatttgtgcaagagtttccttggctgagctcagttataagaaaagagtccggctttctttgtaatggtgtcttggaattcattttaaaacctataaggggctgcactgaaacctattacatcacacgccccagccaatcaagtcagaaaaatgtcaccagacca

SEQ ID NO: 318386 - DNA, 4001 bp, Homo sapiens
gagtgccttcacactctgttcttaggcagtgccacttcactctggcacttcactgacatctctgtcaataatgaaacttcccgggtatttaatttcctgtggcatccagcacccacagttctccagtgctcagtgactttttctggtcgtctttggaagagaaccaactatgcttcatgcttatgttggatgatatcctaaaaatggaacttagcaagctggtgcttttctttcttttaatctaaaactctctgaaaatgaagtttctgtagccttacctcgagatatctccccagtaccattcagcatcttgtaaggacatattgttattcataccgttgttggctacagtagtaggttttggtggtttaggaggcagtgctgcagatgaaaaagaaaaagttgttcgcaatcccaactacattagaactaaatttctttagatgaatacttttactttaaaaaaataaaaagttagagtaactgaaatatatagcattagttcacaattccatgcaatatggaagataattttcttaaaaaaaatctttcagagcatggctcaaaaagaaatgaaactgaaaaggagaaaagagagagagccttagaaactaacaaataaattgggctggccatgtgaataaatttcaaagtaaatccagagtcatgacattctgtacttctagattctagttatattaaagtttcatgcctggtcaaatccatctaaagtaagaaactatgaacatatgagtagcaggaataacatgagttggctttaatttcctcttatttaattacgaaagacaaatttggtctctgtcctccacaaactctgttgcagtaataaaaaggctcatctacagcagtatgttttaagaggagcaattgggtttctctaatcttagtatttcaggcactgttctgccaaaagccactttaagaaactctcatctgtgccctaaatctctttaatatgttaatattctgttggataaattgtgctctatatactaggtctgattaaaaatgatatcccccttcctcaatgtcaaatcagtattcatatataccaattggtgacaaataaaagactgcagtattcctgaataccttaaatgggggcagggggagagctaacattggaataaaacaacttacttaggaaacaaaataaatctaggatttttaggtaaattctgtcataagttttaaagcactgttactattttaacttatacaaaaaatgatttcaggtatctaccaagaatattttacaaagactaacaataatggaaagtcaacttcttttttcattataatatcttaatatgagagagcaagcaaagtctcaacatttagagaactgagttgtaatcactgctacattttacatgctttctaaagtaccaagtgttatcactgcaaagtgctacactgttctcatccactggcaacagagaaaagcagcacaaaagatgcatcattttaattacagggacaatatcccacaacataactcacccagggaaggatctcgattaacaaaagacaccagtgaaaaactggagttcaattcatatccattcaagtaagaataagcatttaccacacacagcctgagctgcttgcttccacagacagtcaaacaatctgtttaatttttaagccatgagcaaactaatttttatcaatgaaacaaattaataaaaacagaaatccaaaaaggatcttttacagtagctttcgaaaaattaaaaagccacgaaattaactaactctctacaataatactgcagtattacctggtgggtccatttctatataaaacatcaagtctgtgccacaatttatatctgtcttggcatattctaaatccaggtcttccatattccaaacagtattgtacatttgtgcaagagtttccttggctgagctcagttataagaaaagagtccggctttctttgtaatggtgtcttggaattcattttaaaacctataaggggctgcactgaaacctattacatcacacgccccagccaatcaagtcagaaaaatgtcaccagaccactcctgcttcatcagttctcttccataccagccttaacataatgccaacctcactaagaagctacatttaatagaactgcaatatatacatgctcatcctttcaaaaaggtgtttaatttgactgttctccagcagcgagttttctaattccttgtttattactccttgcagcatggtacgctctgctgttggcaggttgacaaaagctgatatgctgcagctccgagcttttctccccacttagtgcatctgggtttatagatagcccagtcattccttggtttaaaaatcttacaaaggcattaaaagggtatacttaagttatgttttatagtccttagatatctctcatgtataagagaagcagtacggactactcctggtattttagtcctccataattcactgaaaacccagaattcaaacactgtcacaaatgtaccacattagaaaggacagttaaaagaaaatgtatagatgtcctcctctaccaaacattccaaagttaaaactagactttatagactaacaatgaaaattctgaataggaatgcagatgcctattagcagaaataataaacgtaattgtctgtcaacattattaatgagaattttaatgtgactgcctaaaaaaactgggcaaagaaaatgcttcttccaaaaagaaagaggctatagatcagaatgcagagtggaggtatatttatctttgcaaaatatttcactgatgaacccatcttcgctactaatactgcttgaacgggaagatgatgtaatcactttttttttttttttttttttttttttgcttttccccctctatctcaaatgcctcactccgggacaaatattccttcttagcactacttaacataaataaatcaattttggctcttcaaagtcattctgcatataatcctgtcacccttataggagcctactgtacattctcattgtgaaccaatctctctttacattcacaatattatgatggcggggggggaggggctcttccccaaggtaaatgtggctcatttaaaaaactacagtggggctctgtgatctatgtacacatgtatgtcacatatttgaccatttaaaaaacacagaaacccttgagactttctgtaaaatttgggatcataaaatatattaaaaagcagaccaaaggcaaggcattctgttctctgacgtcccccgtctagtttaattcattttcccagtattgggaaaagcaggctcaccttgtctcttcccaccctctcccacttttctatttgcctaagtttacctgaactcaaattcaaataaaaatggtaaaagtggctgtatgccctaagattcagaaaaacattcttttttagtttaattaaaatgtcgaccctcccccgaagcaaggagacaagttctccgagcagctgtggcgggtgtaacagcccagagtgccagtccatgcatttgggaaccgtcggtgcaaaccagtctggctgttggatcttctgtggcaaactaactcagggagaaggcagggagacaggtgattttcccatggtctctccaagccctggcctggcaccaacttccaaccaagcacgttgtaattagtaccttcttactgaaattccaacctaaaccctatctttcccagccactgtccccctcgaggacagggggagtgtctcccctaatctcccatctgtcctccccaggcagcgcttacaggggcgcacgcacacacacgtactccaagacaaactacagaaaggcaccgctcagataaggaacagagaagtgcacaaattcaaggcaacttactttgcaggttatgcatttcaacggtttccctttgaaatgcctgtatccgacaatgaaaaaaaaaaaatccccaaagctgttcttccaccaagtgggccaagcccccgcacctc

SEQ ID NO: 318387 - DNA, 4001 bp, Homo sapiens
cagttctgcaaggcagggagcctcctccactggcctttccaacttaaaccttaactctgaaccaacatttcttcccaaactttagccgcaggcacgcgcgcgcacacacacacacacacacacacacccccacacattactcttattttctttatactggtcaaaaacacttgcttcctaaagtttaatcaacttttgcacctaagaaaactcttatctgctttcttctaaacggtttttcaagaacagtgtaatctgtcaaaaagttgtatagctagtgagttgctttttcttcctttttcaatgttaaaagatacttgtggccttctgtgcagaagtcaccaaattcctagtaattcaaactgtgacaatctaatattctaataacctgcttaagaaatgaacctgtctgcccactccaacccttcctagctaatatctaaccatctttaaggttgccaaaacgtaacagaactaatgaagcattaaaatataactccacatcaagccttgaccaataagctctgtgaatatccctcctgattactaaaacttgagcctcatcacaccaaaatgacaatcttatgttgcattcaaaacccggaactgctttatccattggtacttcgcactggctgacaaagaggaaaagaagagaaaaaagaaaaaaaacctaaaatcatgaagcccccaaataaagagcagactcacactcggacaccaacagcgctgcagctcaagggattaacggtggaagtgagacctttccgatattaatagcgccccgggaaacagaagaattcccccaaacccagttgacacacattctgcattcaacacgtaacagccattctgcatatatccttgcatttcaggctccaattctggttatcaaagtgtatttctgtacaggagtgcctggccagaggttttctgttctctttgtcttgtgatctgaggggcagtttctgagcttaggttagagctgtggtttccagagaattgcccacgatattttagctccgggttgcaggctccctggctctccccagccggctccatattgctgggcaggtccctcccgcctcgccccacgttccaaaagctggatttccgggcggttccaagaccccactaaatatgcctccaacaacctgcccaagcttggctggcaataaacgctgagttagggccccagcgaccaaccgccccgaggcgcacttcccccaccccggaagaggagggcggcaaacttcggaaggcgggggttaggggacgagctccggggaccaccgccgcctcgcccgccccgggaagggcccgggcagcgaccctggctgcagctggagggccacgggggaagggagcgctccttcccgcaacacgaaggcagcggccagggcgctctcctccggtgaggggccccggaaaactgcagcaaggcgacagcggggaccctccgaagtgtgcggtgacggagggtgggaggaagcccgagctcgtcggcaactccgggggcaaatgcgaccggcggcgtgcaggaccagctcgcaggaggacgggggaaacgggagtcaggatggcggggatctcacaggacgccggccgcgcgcgggggtagtgctgcccggcggccaggagatgccggaggcggggagggccggtggccagcccgcttccccccggcggggctctgcagaaggagaagccgctgccagtgacaggaagagagtcgcggcagccgtgcacacatgcaccgcctcccccgcccgagcacacacacccggggctgctgctgcctacctaccccgcccgccggcttccttcctctgcggggcccgcgctgcagcggtggcctcctgcccgctcggttccgaccggcctccagcccggctgcgacccgccggccgtgcccgatccgtgcttgccgtctccgacagctagcctgccgccctcgccgctgccgctgcttcctccaactccgctccagctgctggcgactcctctccgtgcgcccgcagctccagcgcccggcgctagccccgcctccggcccggccccgcgcgccccgcccccgagcccacaccaaccagagcccgcggctccgcccctttccgtccgcacggctcgggcctccgagccggcggctggcagtgggggagcgagctcaggcctggcggacccttcctgccaccgccctcgccttccgccccccagccgcggggatgccccgggcggccgtgccgcgcgctgcctccgctgcggagtgctctggctctacacgtcccgggcccgcccggctgctgggcgtctcccagcgcagaggcggaggggttcggggaggtcgaagacaagttcagacctccctggaggctggctgcgtctctaatccgagtgtctttcagccaaccccaggctttttcgagcccctagcgccccagcagagtggctggggtggggaggactcggattccagagctcgccaaagcggagaggccctgcaattcctggtctcgccagcactgccttccgagtgggcggaaaacccgcggcacccgcctggcgctccgggggtgaaggaggggtgaaagggtgaaccggagggacgggcgcccgcagcctgccgctggctaactccggcagcctggcaccgccgcctccgggagccaggcggacccgcgagaagggaagagagttttctgagggcgtacgctggctgatggcttctagtcctgagatgacagagcaaatggaggtcactcaggcagaccacgggcccctcggcgttcgcggagtcgggggcggggttggcggggggtggggttggcgcgggcggggggggcggggaagcgcaggtgaattacattgtctcttaaaggtgttagttttgaaatgcatattcttcaagtaataattacctaagttgctccagaaaaatttgatgttggttcaaaccttccactgatggtaagatggaatgccagcaccacgtgtgccactctttcatattaaaacatgtgagaatctgcttcctaaaagctctttccagattctcctttctgcagcttaaagccctgcacccgcccaccctgtttgcctaaagcccttttatagttccctcccagtttccttgcaagaaaactcttaaaaacaaacacacaaaacctaagcacttggcctctgtaaaacgttgaatttggtggtttattcttgtggacgttggaagtagagggaagaacgtcctaaaattcatcgcttatccttaaaaaatatcatttttaaaggtgactcacctaacagaaaagtaagctccactttaggctattcagacactggtgtttctattattccaagatgtctcttgcagaggcgacacaaaaacaggcagctacccacatcatgtttaagaatacactttatctgaaagcaaataggaaatttaccaaggtaccttcttcacacctactgtgtgaaatgaaggacttcatgcattctctgtctgtaaatggaatgatataccttgccttgcagtagaattactttgatccaatccaataagctgagatgaaactgctgtgaccttcccagtatttcctttaggttccgctctgaacaaactctaacagtgaaaaccttgctagttatctccttcttctggagatagctggaaagagtcttatgcactattgcagtgggattctgttcacccgcaaacctaaaaacaataaaattcccaaatgcacctcctcatttagacacagtctttagtaatttatttccagcatacattgtatttcctttacgttttttcatcataaagagtgtcccaagggaagaaaataaggctctcttttcatatactaaataaattcagtatttcatttgttttaaactgatgatatctccccatatcactagtattagcatttttatttattttcaccttcaattgatttctatgaaacaaaagcaaaggcaacaaaacagcagtattcaagctt

SEQ ID NO: 318388 - DNA, 4001 bp, Homo sapiens
tctaattccttgtttattactccttgcagcatggtacgctctgctgttggcaggttgacaaaagctgatatgctgcagctccgagcttttctccccacttagtgcatctgggtttatagatagcccagtcattccttggtttaaaaatcttacaaaggcattaaaagggtatacttaagttatgttttatagtccttagatatctctcatgtataagagaagcagtacggactactcctggtattttagtcctccataattcactgaaaacccagaattcaaacactgtcacaaatgtaccacattagaaaggacagttaaaagaaaatgtatagatgtcctcctctaccaaacattccaaagttaaaactagactttatagactaacaatgaaaattctgaataggaatgcagatgcctattagcagaaataataaacgtaattgtctgtcaacattattaatgagaattttaatgtgactgcctaaaaaaactgggcaaagaaaatgcttcttccaaaaagaaagaggctatagatcagaatgcagagtggaggtatatttatctttgcaaaatatttcactgatgaacccatcttcgctactaatactgcttgaacgggaagatgatgtaatcactttttttttttttttttttttttttttgcttttccccctctatctcaaatgcctcactccgggacaaatattccttcttagcactacttaacataaataaatcaattttggctcttcaaagtcattctgcatataatcctgtcacccttataggagcctactgtacattctcattgtgaaccaatctctctttacattcacaatattatgatggcggggggggaggggctcttccccaaggtaaatgtggctcatttaaaaaactacagtggggctctgtgatctatgtacacatgtatgtcacatatttgaccatttaaaaaacacagaaacccttgagactttctgtaaaatttgggatcataaaatatattaaaaagcagaccaaaggcaaggcattctgttctctgacgtcccccgtctagtttaattcattttcccagtattgggaaaagcaggctcaccttgtctcttcccaccctctcccacttttctatttgcctaagtttacctgaactcaaattcaaataaaaatggtaaaagtggctgtatgccctaagattcagaaaaacattcttttttagtttaattaaaatgtcgaccctcccccgaagcaaggagacaagttctccgagcagctgtggcgggtgtaacagcccagagtgccagtccatgcatttgggaaccgtcggtgcaaaccagtctggctgttggatcttctgtggcaaactaactcagggagaaggcagggagacaggtgattttcccatggtctctccaagccctggcctggcaccaacttccaaccaagcacgttgtaattagtaccttcttactgaaattccaacctaaaccctatctttcccagccactgtccccctcgaggacagggggagtgtctcccctaatctcccatctgtcctccccaggcagcgcttacaggggcgcacgcacacacacgtactccaagacaaactacagaaaggcaccgctcagataaggaacagagaagtgcacaaattcaaggcaacttactttgcaggttatgcatttcaacggtttccctttgaaatgcctgtatccgacaatgaaaaaaaaaaaatccccaaagctgttcttccaccaagtgggccaagcccccgcacctccccccagcctgttcccggcaggcagtgctcgtgtccggcgccgagagtgcgcgcaggagcgggggcgccgccaggaccctccgggcgtgcacagtggcccagctccgcttggctcggctcggctcgtccctccgccccacgccccgcccggcagtgcgtccgggccaccgccgctcactgccggctcctcattgagaagccaactggatttcgctactgtatcggggaggaaaggagcccaggcgctcgcacgtctcccttagataaagatcgcagcttcatgattaacttgggcaggttcaaatatttgctgagctagggatttcgggagggggaggggagcccaagtcaaagttgtcatcggctgacaagtggccaatgcaagaccaacttgctcattttcgcctgggaaatgagaaggccattgtgaggggacctaaaatagtctcactggctgctgagcgcgctggctggctcgcggggctcaagtagccgacagtgaagcgaggcactatgcacagccaaacacaggaagtggctgagctagttcagcaaaaaatagaatcaaagcctcacttgtaaaggcctgaacctcttggaacaacccagaacacagcgcctcgctcgtgtccacctcttgcacctcctcccacacaccagcacagacagccctgcaggtgtaacaggaaagcccttgtgagcaactcgggcagggaggagattacaaaaatgttcaatagtaagtagtaggagggcatcctcggacgaatattaaaccccacaccatatgcatactatactccatgatcatgtgacgattcagaataaaacaacactgcggctatttttatgaggtcgattgcaactcgcatttaaatggccatatgacctgctaattaaaaggtgtctctgcattaggtttatgtgccagctaatggggtaaaggatagaagggcagagaagggcatacctttctaagcggatgtttgccctttatttgagaaagtggcaatggaccagacttgggattactgactactatttaattaaaatttgatctaagaaaattttcagttgcatgagcatagatagctttaaggttatccagggaaatcaccaaactttacaccagaaagtaatttagagttcacttcaatcaattcctgcatgccatagaggggaaaacgaaatctgacccagggaggtgaagtggtttacagaagattatagccctaagactagaacccaatcttctgatggtttcaaatgcccttctctacccattgtccctgctcctcacttccctttgctagagaacgtaaaaaaaaatggacaaaactgaagttaatcttttaagccacatgcaaaaaatttcacacccctaacaaaactctggttttttctgttttctatttttagcttgcttaaattaaaacaaaacatttcattccctttgaagacataggttctttcaataataccctcatactctgcatgggaaagtgatccagtggtcacataaagtccacacaggccaacagcagcaactagcttcagggttacttgaaatatctggaaagtgctgttaaacccacaatgaaagtgattttacaaactttcctttagtgcaactgatataatattgaaaaactttcccaatggaaataacagtctataagtgaatctgccatctgatcatagggacatatggttagttcagagaatacccttgcatcctgagctgcataatcttgccctacttttaaaaatagcctttctaaagctagaaacattggaaacatcagtctcctaagcatacctgtctggattcacatgatgtttcatgtcaaaaccttctaagattaaaatgctctgttaagtccaccagtatattttctgtttcagaagaaaataagccactggaaagcagtactctctcaacgtatagaaagtcttgaaatagattggaaaaactttgccttaaacaaatttctcacaatatgtacaatcatctaccaaagaggtcctattatattaggaaagtgtgagctgaatctttttcccgttgaattttagtgtttaaaaagtgatctgcaagacacatgttctttattagcttaaaaaagggagccctctgctggtagaactgaatcagtaattcctgctttgggagaaaaccatcaactttctgtatatttcgtatgtccaaatttga

SEQ ID NO: 318389 - DNA, 4001 bp, Homo sapiens
cagaaagctccgtacaaacacacccctaactaaatacagagctgtaagtgtataaactccaggttgacagaagcatttatttctctgggatttaaaaaaataatgtaccgttgtagatagatttttaactccttcccaataaggcccttgtagagataatttttaaatcccagagaaacacattatagttagataatttaaattccccaaataacaccactgtaaatggattttgagaaaattccggagaaacgcgccattttggattgactttttaaaatctccggaagaataatgttgcatgtagatattttaaattccagacctacacttcgtacgttaattctttcagaatcgaaagatacagttaaaattaattcatcctcatagatttggttcaaaaaaatcaatatacgattatatatctctctaggttttaaaaataaaaccaaccaaagaccgcgcttaaaacttttgaaaacaaaagtagagttcagcgttgattatgttttaaccaagcaaacaacctctcagaaaaatcacttagggatgcaaaagagaaacagatactaagaaagtggagagaaacattcagctgtgtattaagaaatgaacgcagaagaggcgcccacaccggggagctcggagcccctccggaacccggccggctgcgctgggcagcggattcgctgccccactgcccgcgccggccacccgcgggcccagttcgctgctggaaaaaagctccagctcggacaaaaaaaggcagcgcggagggagacgcgcaggagccggggcgggggccagagccgggctgctccgggcttcggccgcgcacgtgggccggatcccttgatcggcgttccggctggccttgctgggagtccggccgcgcctgttggcccgctcgccctcaccgtcctctgtgtctcccttctacttgatgacccctctccccccgtttacccttcccgcccgccccttctctttggtctctttcattctgtcgcctactgtcacggtgttaacctccctctctgtctctctgagtgcgttctctcgcccgtcacccctcttcctttctcggtctcctcctctcccttcgtccgagccgctccttagcgcccagttgcgcaaatcaaattctttcccgttctatttactcctgatcaagaggggctgtcagtccaaccctccagctgtaggctcgtgcatctgccagtctcttggcgcgtggggaccgcgtggaagtgccttcgcgtgtgcgtaagtttccgcgttcaccgtcaggtcgagaacgggaaaaagaaagctcctgacgcttctggggcggagagggagcttggttgcgcggcgcgggcgtcaggccctgctcccagctccccgtgctccgcgcccgggtaggctctgtgcgcgccgcgcggggaacggcgcttacctggcagctccgtgtcagacgactcgctggcggagttctcgagcggctcgcgggggtcggcgggccgggccaggtggaaggcgggccccatgtcatggggtggcggcggcggcggccggagcccctccggcagccgctccaggctcatgccccccttgaaggcgtccatggaggtggggaccgcggcgggcgctccaggggccggggctgggcgcgccccgccgccctggctgcgacctgcggggacaagagcgcagcgcctaagcggctgccctccagggctgccggcgcctgcagcgacgccgtgcccgccccatggaccgcccggggctgcggcgccgggcgggcagaggcggcggcagcttctcgcgactgggcgcctggctcagcgctccgcgctgcgctcctgccgctcgggcctcagcagcccggccggccccggctccggctccggctccggctcgcgatccggggccggtttctaaggctccggacggcgccggcagagtctgtcttaaagcgacagcgcgcacagccaggttccagcagtccctgcgccaggggtgctgggtggggtgggcctgggtgggagggggctggggagggagcgagcgagcgagggagcgcgggcggaatccagccccaagccgcccgcgccgccgcgccctcactgccgccctccctccctccctgcctcgcccgcgccctccccctccgcagccaccttcccgccgcctccccgccccccgcggcctcgccgcgcctctccctccttccccggtgacacaccgagttctccctcggcctcacaaaagaaacgcatctggcctgcgagtcccgggcggctcgtgcacacctcaggcctcaaatgacttgtttcgcctagaatcaactcccgtctcggccgcctcgaagtccccagccctggcgagaacagcccaggatgagtgaatgtttgccgaacaggatcgcaccgagcgggcgccttcgagccagcgccggggcgggggcagagcccggggcccgttccggcagctcccagcggtgtcctcgtcgaggggccgcctgcccctccttctccagcctcttctcccgggaactcagcccggctgagtgacagcagcctgcgctctaatgggcccccggatgctgcctcctaattagcttggaccttctcccctacggctgcttctcaggcctccctctctgcaccgcagtcaattttccgggattgggatagaaatgatggcttctaatcagacgaaacgtttctgctggctctaggcgtttggagaatgcagaaggaagaccccaaggatcccagccagaccccacagcctcttgtacctctccccttgttttacaccttaggccttggccaaatgggccaggcctggccttggcaggcatggggttggccttggcagcctttgccctccttcagggtagctttgtcccagcctggggcctgcgtcctggcttcccagggcttcaggcataggcctggtaagccaggtgactgctgtctcccaaccctgggccagcagcccaggaagccctcagtcttccagcttctctcccacacagtggtagctgagctgcagctccaatgggccttcactgggcacaggcaaagacattactctcccactcctaagagtgattccctcctcgagtccttgcacgtaggtgaagtttgtcgaaggattttgctcaacaattgttagctggccccgagacctcagcgtcttgagcaaacaggccacagctggggcggcaaggcgccgccctgacctgctcctctggccataggcggaccccagactgccctctgcccctcacctgtgatcagctccaccagacacagcaacccaagggagctgcgccaggattgtctgcctgggaaagaagcagggaggtgtccagtgtcctcaccccaaaacccagtgcctcctcaactcctgggtgggtggcactgactgtgcaggtatcagcgtctggggcactctgcaggttctgcctttgagtcctcgtcttaccccttcccatcacagggagacacccagggtcagctgagctccttgtgggggctgctggggccagggtcgggcatgcagggtggaaccaggcctgccttccattccctccacgttagtccaaagcacccccacccctacccccatccccatccccatccccatccccatccccatccccatcccccgctctgggccgtggagagacagcacagctccttagggcctggtcctttctcactgtgggtctgtgaccacaggatgcagggtctgaggccagagggaggacacttctcaggggtttggattggggaggctcagtgactcctgccttcttccaagctgagatctccctccatgaaatgagtcttggctacggggaggggaacatggggaagcacagttgcccagcatttgccctcagccccaccgttgccatgtttcttggccacctttaccacgagtctcctgcagtagaagatccctcctttcaaggagatattcaggtgttgcagcgtgctagggag

SEQ ID NO: 318390 - DNA, 4001 bp, Homo sapiens
cagtctaaagtttacctagaagaagaaatgcataagaaacattcaagaatattttcaacaagagtaataaagagggagaaagggttaccaaaatttaaaatatgcataatcttttaactgagcaacttcacttctaggaacccatgctccagaaataatcacacatagaggaagtttactgaattgttaacagtggctgacaatcaagatgcaagcaggactagaagtggaagcggtaatttttaccttacattcttccatactgtttaattttttaaaatcaaggatgaattaaaatttgtaattaaacatcgatcaataaattagaaagttattttcattataaatcatcatttgtaatagcaaaaagaaactgcaattaaatgtctttcaaaaagggaatagaataaattatagcccattcaaactcacgagataccagttagccttttaaaaagtattagggagacctatatgtaaaaagtaaaaatgtccaacatatgtaattaagtcaataagcaagcggtatgcaaacatgtttggtatatggtatagcctccctcaaaaaaaaaaactttacgtgtacttgtatgtgtctagaagtgcatttgcaagattttgaaaaatgaacactaaactgtcaactttacactggagtgggactgggggatgaaaagaaatatttaaattttacctaacagtccgttatttatattgttgaagtgtacatcaaacttgcatgtctgcaatgaatttttaaaattaagtggtcatctcatataaaaatgacatgaaccccaaaagacaattacaacactgaaaaatacagtttaaacgtttattactgttatcctcaggtttattcacatacacttcaaatgatccgtagccttcagcaaaggtgactgccattttaaagaaatgtgaccaaatatttcatgataaaacagaatacattaagcctgcaatgaaaattttaaacttcacagaaccagcagactcaaaagaagcgcctatgcggatgtaaatttttttttttttaatgtccggagaaggaactctcagattactctcctccctgcaaaacgactatttaccacctcccctttgcttcaacttggtctgagcgtctttaacctcaccattttgaatgtgcgcaaaatgattaccagtcatctgagggaggccaaattaaaggtgcatctgcaagaggagctctggcctgacatcgctaactgagagcagccctggcggaaaggtgctgatcccgggagtagagcgactgctgcggctcgagcggggtgtctgcgtgccgagcctcactgacaatcggggaaaatgcagacgcccagcaaaacgacggcaacagaaggctcctcgggggaggggtgctgcaggcctgtggcgtaagatggttccgctctacgcggggtgacgggaaaccgcagaaggtgggtgtgaggtgttggttggggggcaaactcttgtacagtggcgagtgtaggggaaagccagcgggctccttggccaagtcaccaaggacagcagaagaggcagcagtaaagagcggcagcgaagaccccgataccaaccaatgtcatctgtcggggggcggcgggcgcgaccgtcccggataggagcgcggcccgggtccgggctggacagggcccaggaggcgaagaaggcctcccacagccatcaaccccacccaccatggccggcgcagcaggccagggacaagccccgctccttccgaagctagagacagagaaactgaggagctgaacgcagcaatttcctcgccccgacccccacactcccgacagcggaacaagccagactgaaaaaaaaaaaaaaaaaccctcaccgaaatgtgcagcggctccggagcgagaacagcgctcgaacctccacccgccaccaccgccttcttctccgcctccaactcctcccccgccgaacgcgaagcggctggcggctgtggcggcggcggcggcggtggcggcggcggaagcagaggcggtggcggtgagtcccgccccttgcgccgcggtggaggcgaaggaggagagtacgcaagcccctcccccatagcagagatgaccagtcagcttacagggtctctgctgggggacaatgcatacgcccaatcagaacctgaggagtgggctcacgtcaatggttgggacgtggcagaaaaagggaaaaatacttggaccttctctacagcctgctcccccatctccctcagggggagttcaccaattggctgaagagcggaaagacgaagccgactcagtcccccgccccagccgagcccacctcctttccctgcagtactgcgacgtttggggagggggcggagcaccgtgtaggagctaaaactgcgcggccttttgtggtttgggctgagagaaaagggcggggtctcggaaagggaagggggtgtggagaactaacagaaagactggcgcagttaggctttttcggaaattccaacagcaacaaccaaaatggaggcattaaaatcgatcctgattcgactggaaacctgattaacaaggttaaggtctcctggcataaagttcagttacaatgcagatatcggtgagacaaaaaaaaaaaatgacacgaagaaaggcttgtttacccaccctgaccctgggcactatatggcgctttccaccctccctctccgcgctgacccttgcccctcgcttcttattctgctggggcggggttcagaggaggcctgcctttcctctgtatagccttgggctgaccacagcctcccagcttgcatcttgaggctgtttgtcaagccgggaagtaacagctcccatcacatgcaaccaaaataaatacaacagctgcagtccccggacaccttgcttaatttaaacctgggtaacagtttagttaattatgtcagtgatacaaaactgtttcttcgttccgcacatattccctttattcatcttgaaacgtgtccgcttatctgattacagtccctctgtcttctcttattccccacccccgacccgtcgcctgatgcccaggatatattcatcgccacccctcccccgcgaattaagagccccacttcttgtgctgtccccttaacaacagcgaactctcttgccagtgaactgagactaatttttttttgctgttgatggaaataaattacccaaaatttactgtagaaatttaggtttatgagaatttgccagacattttgtgaaatccaatctgaatcccagcccactcctgtagtacgtttcttaccaaaaaaccattccttgcttgatattactctgccttcacacgtgttgctataggagttctgactttaaccatccaagtacctctttgaaaaaaaacaaaattcatattttaattacatttccctagtttccctttagggtgttccagattggcccaactggatacattaacctgttctagaaggcagggattcccaaatttcaacctttttcatactgtatctgtgtatactactcactgtccttttttctttaaataaatgtatattttctttaatttctttaagaaggagactttataaaagtactataaatggaaaactagcatcacctattataagttgaaagtaactgtaagaaaaatgaatgcaaaacaatgtttttaaattgtggctagaaactgttgtccactaaaggctctaagtctaaagacaactgtctttgttaaaagggcaagctaccaagcattagacacacattaaagatacagcactcaaatggtatttttatcatgatgtcatcaaaggatagaaaaaatagagccggaatagcaatcactttctcactatatgagtcattgtttttaatcctgcatgcgtgtcccaactacagttaaccaaggcatcataagtgatctatgttactatgagaaacactggtatggaggctgaaaaagcctgtactctagaatcaagcagacatattcacatactg

SEQ ID NO: 318391 - DNA, 4001 bp, Homo sapiens
tgaagtgcagtcgttgcaatcacagttcactgcagcctcgacctcctgtgctcaagcaatcctccacctcagccttctcagtagctaggactacaggggtgtgccaccacacctggctaattttatagttgtcttttcaatcaagagcagactcaaactcacccctacaacaccaattaattacttaattgctatacaattgccagtgtgtagcacataccaacatgagacaatactgccagtgagctttcatctactgttatgttgggtgccatcgacaaatgctctttaatactcctctttgcatattaagccaatgctattgacccacaggtaggaggaatgcaggttgagatgttttcccagtcctccttaattatttgcattgactcagcacaaactatttttttaactgcaataggtcagtgaaaagaaccaagctaatggcagacaccaagatgaactttggcctcatttgtactttgatttatgaaactcagctgatgtgtctatatgactctaaacaaaatcaaattgcagttgccaacccaagggatgaattatgctcaagacagaactgccaaatgaaaggaataattctaattcagtcagtattgactatggaagcttcttacatttgcgatgtaaaattttgccccttaagaactgaaaatagtcaatttctaaatgaaatgaatctaaatgaatttaagattatgtttaaacgtgtcactgtattttgagttttagtagcctgacagcctgtggttttgaagtttgtatgttttatttttcatctccacattttaacttcttagttcaaacaaacagcatctttatatctgtgtacttacatatacataggtttattaaaaaaataaagtagagtaacaattcctgaagtgtggttgtaatttctacttcctttctgtaatgcaacttatgtttcgaagcccctgtgagatataagacaaaatttttctttacattattatgtaatttataagtgacaacaatggaaaaaccacagccacttttagtccttacactgcggggaggaaagctccaatagcttctggctatttttcaattcttagttttacgaggcagggataatttttttactatatactattaataacagattttttttttgagacggagtctagctctgtcgccaggctggagttcagtgacgcgatctcgtctcactgcagcctccgcctccccggttcaagcgattctcctgcctcagcctcccgagtagctgggactacaggcgcgcgccaccacacccagctaattttcgtatttttagtagagatggggtttcaccatgttggccaggatggtctcgatctcttgaccttgtgatccgcccgcctcggcctcccaaagtgttgggattacaggcttgagccactgcgcccggccactaacagattttatatcatgatgtcttctcgccagtcttaagatgaaaaagcaaaatacgaaacaagtaaaacctctcatctgtcctaaccgttttctccaccctcaatacagcttcttgggaaggctggtttctgctggacaggggaaaaacacctcggcttgaattctgtcaaggtcacgactccccagatcaaccaaggactttagagaccggcctagcgacggtcactcgacaggtgacaacgcccagctcgagcctccggcaagaggcgagcgccacctcgctcagggcttcagttttcccgtctgtgcaatgggaccatctgtccctctccgcttccccaggggaggctgtgagggctaaaggtgtcggcagtcacatctctcaaacgaatttggggccgcagagttcctttcagggtgtctggaactgccaaatcgcccctgtccctcccactccttaagaggacccctcaccgcctcggtgccaccgtgacgcctcagccatggcggacctgcactacaccgcccgttcgttcgcctgaggccgcggcgcttgcgcgctagtcttgcggcgcgcgctgcccggctctgacgcctgcgcgagcccccagctcctccagggcggcgagctactcgacaagtcgtcagcgcggctgcgccgcaggagcccgggaggcctttcgcccgaggcgggctgcgggctgctggggtctggtgcggagggccaacttctgggaataacctggctgtgggcttaaaaatcgtagtcattcattatcacgggcttctctctctcgaatacctttaacatttatcgccttgttagtctccacatccacctccgtgaaaggtaggtatttttgtcctcattttaggcctgaagaaaccgagaagctgagaaatgaagtaattcactggaagttggggccaagtcttggatgcccaagcccaaattcctaaccgtgaccctacgctgctgctgctgctgctacttgcagaaactggttattaaccgagagctgttgctggaagtagcttccactcccctgcccccgtgatgtaaaaatagatgaaaaactctgcagtgattatgtgaaaggtcaggccgacacaggagtcctggggcccagacccacatctgacccagaagctttgcaaagatgagaaggttggtaaaccagctatagaaaaggccaaactaatttggctgtaaattaaggcagccaaaagccctccaggatgtaagaccaggacggattctcgtgttgataaaaaggaaaataaaatggaatccagtccaaaggccccagggaaacctgcaaagaaaaccactaaccagttttgaaagtaaaagataaagccacttttgttatttccctgaaagagatgtagactgctgtcgataaatgctgttttatgtgtagataaaaagcaaaacggccacacagtagtgagggtcaaaaactaccatcgatgagaggaacaggagaggcctcgcaaaaggctgacagccagtgaactagaagcccgagaggaaaaaaagctttagaatagttttaacaaaaggatttgggctttcctgtactgggactctcagctgttcacaaaattatgctttctaaagtaacagattatctgaaattgaaattattagaggaaaaacacccatatataggtaatcaaatttacataatttttttttttttagagatggagtctcgctatatttcccagtctggcctcaaactcctgatcttaagggatccccagctcaacctctcccagcagctgggactaccgggctgtcaaatttacattaactatgagaattaagcaggtaatctctagagactattcttattcctttgagcataacagactgaaaaatcctgaagaattagaaacctgtttggttaaaacaaaatcacaaattcagtagattcagtcatgatttaagttcttgtgattgcctttgaagtgcaaaccatggcaagtctagcttagtttctagaggaattggctgagctgtaagtgagcttcacactgttctagaatataacattgctcttttggaacttgttattcataggttttgctgagtggagttttattttacagatctagacttttgtgaagaggagacagtccgttttaaatatttgaattttattttcttttgacatacaactgtggaacactcagataatctataccatgttagtattcctacaagagaaaacgggtaaaacagtatttagaaagcagtaccagtaaacgttattacaagcattagatgtgtttaaaaagttgatactaatttataacctgtaattgttaaatgtgcatgacttaaatgttaaaatcctgtattttaagatagtcttctgcagttacaaatccatatacccagatttcctgtaggcttcacaaatcggaggggtacatagaatgtgcaagagtcaaaggataaataatattataaatatatattaactatattacctaattaaaaccataatctgttaatacagctatggattaatttcaaaaaaatgtaatca

SEQ ID NO: 318392 - DNA, 4001 bp, Homo sapiens
atttcagttcaaaatgattgctcatgtgttgtaattgaaataacaaccatagctaactttcactgagtaccttccatgtaccaggatctcagtagttcattaacaactgaaagattattcaggggctgctacaggtatcagactcaagtagctcctgtagcttcctagacagcttttctacatattacgcccagggaatcttctgctaccatgaagaacaggaatgagtatgcaaacagtggatgaagcttatggccacaaagctctgctaaaccagagaagatgctcatttacctatcaaattccataagttcttcatttagtagaaaaagcaaacattttcatttcagacacaaaaaagttcaaatagtcacattctagttgtgacatcttagaaaatacaacttgtcacaaccctcagctctggcctcctcctccataaaattggatttaaaatatcctagctcctcagttgccagagtattaaacaagatcatgtatgtacctgacacgtagtatgcatgaagtcgatggccactgttattattctaacttcaggatcctgtgtatgctctagggcattctgtatacttttctcagaaacaaaggaaggagaaaggagaactggaccaggttttcagttgtcatatgtgctacccaaatgccttaaaattcagtcagagtgatggccaggcacggtgatgcacacctataatcccagccacaagggagactgaggtgacaggattgcttaaatccatgagcaagactcccatctcttctttctttttttgagacagagttttgcttttgtcgcccaggctggagtgcagtagtgtgatcttggttcactgcaatctctgcctccagggttcaaccaattctcctgcctcagcccccctaatagctgggattacaggcatgcaccaccacgcccagctaattctgtatttttagtaaagacagggtttcaccatgttggctaggctggtctcgaattcctgacttcaggtgatctgcccacctcagcctcccaaagtgctaagattacaggtatgagccactgcgcctggcctcagaccccatctcttaaaaaaaaaagattcagtcagggtaaccaaccattccagttggcccaggaccaagggttttcccaggatagggaagttttagtgctaaaaccagtacagttccaggcaaaccaagatggttggtgatcctaaccctcagaaggtgagggaggctttaactcaggaggcaggaggctaactcctgttaaagtttgatggatgagatacatacttttccctctttttgacctcactccattcctcttcctcttctagcacaagccctaccatgtctcccacatgcctggttcttcagcctggggtgttacatgtcactcttccgtaatcacacttggagtattgtgaaatcattctgccttgtacctaggcctccttgattatttcaaactcagctgaagccaaaacccttgagttttcatttcaaaagggtggaaatgattggcagtctctaaaaataaagttccacttggtcagggttcaacattttaagaataaagagataccatttcacccaagccagcccttttcttgtcaccagccaagaaaggccagaaggaacaaatcagttgccctcttttcaagtttgcatggagaaaagatagcaaccactttcttcccaagcccagttttcttttccctggttccttataagtagaggttgattcgatagtccaactaaagagcaaaagctaggggaaaaactcaccctattccctacctcaagttggaaataaaatgttcatcttcagatgacatgtgtgacaacagaggtgagtatatgttgagtaaggaaagatcctcaggacacctgaagaagttacttccaaaccaattcatagtgagaagtgttttcttgtcctttgggctatcctttttccctttggcaataagctggtttctaaacttcggattagtccaaagtgaaacatctcttgaaagaatgttcccttaatattctggaacctgaggtcatagcagtgtaactaacagacatcttttttctttaaaaacaggtatacacctaactgtggacacattcatcttactaatctgtagggagatattgctggagtatagagtaaatagaagaaaaagacttatctttggtggaaaactctttaagagatgcctctagtaaacatttatctagctaagtgccacttgaccgttccttggaagattcagaaggctgaaaatttctgccatgccatgtgactgagaagcagcagagacctctcttcatcccctgaactgctggtccaattcagccagatgatgcaagtcccatagccaacccaaaagcaggagcaaaaaaaagtctttcagcgcaggtattgtatttgaatccatcttatgaaaggtggtctcctcaagtttgagctatggtagattgtcacaagcctcaaagccttttcagaacttctagaaattctctgctcttccattaacttcattgataatgccaggaaagtggcatttctttcctacccagtccagacggaatctagtaactgaagcaaggcttgcctggtgatgtcctcacaacagctctgaatcctcaaggtctcaggagcctctgaatcatgcctctggcacatgtcttatggaggtgtggaccctagaaatattaggaaatatcctaagacaaaaaattaggcaaaatttcacgttgaggaaagggctctgcaatcataatttgacattacattagaaagacatcaggaggatactgccaattatatcatatattcttttcatcagacccatagagaatggttgcttagggttctgaacttcaaagcatttattgaaccaggttgttaggaaaagcctataataccttccaaatcaagattcctcagacatagcttcataactgccttcaatcatggggttctgggcaactgtcattgtcttcttaacagtaaggatgtaccctacattaaggacaggtatgttttttctgcttactactctattccaagtgctgaccacagtgtctggcacataaaaagcactcaataatttgttgaataaatgtgccctacatgaaaattcaggtttataagaataacagaaattaagaggtgattactagctttgcaaaaaaaaaaaaaaaaaaaaaaaaagatttacagtaagattcctttgaagagtaaaccaccatggtacatataagctatgactccatatttttacatttcatttgcgcccaacttttctaatcaaacgtctattgtatgaagtgactaatccacatgctacacagctttttcatttaaaaataaaatgaaaagaatagaaaaggcatgtgctttataaaagaatgccaaatatttatgaaaaagaaataatagcattagaatatcaccattttgcatagccccagcataacaacatatcaggaaggaaattcagaagcattaaaaccattagataaaaaagattaggaaccaaatattctcaaggtgcaaaaatataactattccacatatttctaattgcaaaagagaaaatgtaccttaactatgaaaaattccagaagtactcaaaatgcatatttacattggaaagttctgaaagtgtaagaaaaaaaaagtacccttacaataaaagctctgggtgtgattttaacaaatatgcctttacatcagaaggtcctagaagtgatcaaaatgtatctttaacattacccttcacccttcctccatgattgtaggttcctgaggcctccccagccatgcctcctgtatagcctgtggaactgagtcaattaaaactcttttttaaataaattacccagtctcaggtagttttttatagcagtataaaaacacactaggccagatgcagtggctcacacctgtaatcccagcactttgggaggctgagacgggcagatcatctgag

SEQ ID NO: 318393 - DNA, 4001 bp, Homo sapiens
cataccatctcagaactagataaacaaacataggcttttaatcctgtagctctagagagtcacctgccagaaggtttgcatcacagtgattgcccttcttaccttctatgcatataaaaacattcaggggaaaccatgtgaaagaagctgtctaaaatccaaataaaaatgaaggaagaaaaggaatgggaatgcctgtggaagtgagaatggagttatgccaaagttgtgctttctactgtctccttgaaaagagcaatctccaggcttgcctaggtagcagaataagtgctgcatggagaagctggggttggttcttttccttggagattcctggccggtagcaagctatctgttgaagaaggacgaaaggagacagccccttctgtggatagcacttgtagtagcctgtgcctgccattgctgccaaacatccacttgactaacaaccattgatttgagggactgatcaatggcagcactcttggttggagcatctagtgattttcaaaataacccttcttttgtttttgtttttgttgtttttttctttattatgttttcctccaacagctgagagggggcgctggatggggcagatcaagaggaggtagaccataacgttgagtttaatagcccagctcagctcagggccagaagtgaactgttcatgagtaatttgccctccagcccagctctgaaaagatcaagtgtgtgctcccccagcccaactgcatagccaaattgacaataaagtatggccgtgtcccagctgtcattgttgtaaactgtcctgaaacgaccctcactcctggatacctgatctagggggttgttaggagctgccaccctagaaacctgcccagtctctggtccaagtcgcacacatcaagctgaagcttcttgatccctcaggtctcttcctcgctttgtccacgcttctttccttctagactgtctggacacattctcagtcaccttttccgtactatttgcctattaatcccacccctccgctcaggtcacgcaggttcccctgcccagcttctgtcccgagcagtaaacatacggtccgcaagggtttgcttttttgacctgggcgaagtgtgttgccaacacgcacttggaccagactcgagacagcggccactcggccaggtcccccggggtccaaaccgatacgaaatggtgccctctgcccgtcgcccccttgggctccttttcaagggcagctatcacgccgcctctggtccctgaactttcatcactcttcgggaagcgctttgtctttttaaaggagattggggacgaatattaatgactgtagccgagaatctatcaaatccgcccaattccatgccagggatagactcaggtccttgcaccgaaggcgagcccctgacactagctcgcgttcttcacacacggtcaccccgcagacccagagatttctcccacttccccaaatctgcaggagaaaccataggagggggtcacgaggcaccatcctggagcccagcttctcctctgccccagtcctccgcatacaacctgcttcaaaagcccaggagaaaagcagtcaccttgactctagcgcctcggtccttaggggtttggaaaacgccaggaagcccaaggctacccggcacgcgctcgcctggcctgagacccaccctggaagacgagtttccctcccgcgggcatcgtggcaagttaccacttagtggcagataaagcagggcggggcaggtggagcgggcgccgagcgcctagcccgcagcccctgcgcgcctacctggaatggctaaattggtgagggggatgctgtgcatgctctccggcagagttgccatccagtcggctaatttcagctcgtttttcccctgagacgaggccatcgtgccagtcggcgtgcagcgcgctggtcccagcactcctcgggcaggctggcaggctgctgccgctaatccaatgtttgctctagccccgctagagtttacactcctctctgcgccacacccacaggatggcgcagacacatgctaattttaataattattcaaaacaccccgtgctcccttagtgcctccgccagactccgctggagcttttgttcctgacgtccgtgctcagctctctccgctctcccctccctccccaaccccctcctcccgtcttatccttcctaggcgtctctgcctttcctcgccattctgcagctttccctggtttcttatttttcttttctattcatttttttccaactgctttgcccatggcttgctcgatcctttgctgtgactttctcgtcctgtttgtatgaaagacagtcttgcacttgaacctaaaatcctagcagactttgggatgttattgcctcctgaggaacagacttctcatgctgggtttcagggctttccgtccttatcaaagagctttcctttttgtaatctacaacaggttatacctttcctcagccagagaccacaaccctgtttattaaaaaatgattatctttattcactcttttgcctactttgtgaaatagctggtaagtatgagtcagtgaagggcatggtaaattctaggtggttcctacttaatcctgggtaccttgctccagacatttcaaagtcaagaaatgctactcccccttcttttctcagatcatgagaagtctacattatttccatggagaacactgcctctgtcctgtcagtttcatggcactcagggtaagactggagccttatgctggaagaaaatcgccacatctcccagtgacatgctctaattattgccagtagcatttggtggaatgtatttggcaccattcaaagtgatctatgtgactgtctgcattttcattcctttgcagactggaaagatgtgcctctctcaagagaaatcactcactgggcctccaaagaactgtctgggtccacctgctctcagatgagtaaaaggagagagatgaagttttacaaatgtaatgagagcagcagtggcctgaataggaattataagagatgaactgaaagtgtgctgggcttttgcaacccaggaaatggaaatgcaataaacagacctctgttctttcatgccagggttgtgtaaatttttatttttctatgggaaatgctattagattgcggaaatgacaatcaacataggagacaaagagagccatgaaacatgagaataattattcaaggttagtaaatccatttaatcccaaatagcattaaaaaataagaaaaaacctagagcctaccttattttctacaatgatgctaagtcctaagaatattcacccccaaatggggagcactatgggaaagatagaggagaggcaacgccttattttggttatcaaattttccatgccccttgtaaaataaattcataccttcaagaggacatggtacagttatctttagtgatgaggaagagatatactgaaaattttccccaaataaatcttaatatacatgctagtacaatagaacccacatatccttttaattaggatgatagtttagcttactataggactcttggtcaagagatctacaaacaccacccttctgtaagaaacctacaaacaccacctaatgctggtggtctcagggcatgattgcaaggcaatgaggaaaattcaaatctagtggtcagctgctctgtctctgagtagtttgggcaagtcctctagtctctgctagccccagttttctccattataaagtggtaataagaactcagagatttgtggtgaagcttccagaagagagtgcatacatgtttaagataacaggatatgtgtatttaccactctttgtcttttctatacttatgaagtatttttttcaaaagcatgaaataattattgaatctggggtacatttttaataagacacattttagaaacatgccctgttaaagtatattgagcttatgtggccctaaaaatttacaaagcattttttacaaaatgaaaccac

SEQ ID NO: 318394 - DNA, 4001 bp, Homo sapiens
caacagggaagaaaatcaatacaaaggaaaggtgaggggctggaaaccacggggaggggttaggacttcttttcactttagctgaattgcagtgaggcgacagaatactctcaggtagtgttgcccccaagtgagtacttctgttacaaagctctttctgcggtaggtcccgtgtgtgtgcggcactctccgggacctgtcagaagttccaggcacagcagcctaactttgaaggcgaaaggctctcgtgaggtggctggaatgggctgggccacacttctgtttccaagggctgtggtgccattgcctccgagcccctggtcaggccaggcaggtaggaggggttggcagggcaggcgtggctgtctccaggcaccgcggggggagcccacggaaaggagggctcagcctgtcactttcccgaggttgggtggccctacttgctggagcctacatcagtatgttcacattttttccttctttccaaaatcactggttgtgttactcacaggatatttctttactcaaaaaaaaaaaaaaaaaaaaatgaaatatttaagaaatatgttgtcattattttcttactttatgtcctgcaaacttagtcttttaaatcatcacattttctctcctaacccttggaaactgtgaatgtggcctccagttggaaactgagtctacggatctggatgtgaggtcgtcctgggtttagaggggccccgaatccagcgatgggtgcccaagagcaaggagagggagattcgagtcagagaagcactggggaggaggccacggaggacggtcagagggctgcagccacagcccgggacacctggagccccagaagctggaagaggcgggatgggtgcccccggtcctcggaggggaacacactctgcccacagcttgatgttggacttgtggtctccagaacgtgagcgccaatatgaacatggagacaggcttcttgtggatcaagtgaccaaacaaaactgtgacagggtgggagggggacagtgcagggggaggttgtggggtgtgcaggggagggggtgggggtgtgcggggagggggtgggggtgtgcaggggaggttgtggggtgtgcaggggagggggtgggggtgtgcggggagggggtgggggtgtgcagggggaggttgtggggtgtgcagggggaggttgtggggtgtgcagggggaggttgtggggtgtgcaggggagggggtggggtgtgcagggtagagggtgggggtgtgcaggggagagggcgggggtgtgcagcggaaggggtggggtgtgcaggggaggttgtggggtgtgcaggggagggggtggggtgtgcaggggagtgggttggtgtgcagcggaaggggtgggggtgtgcaggggagagggtgggggtgtgcaggggaggttgtggtggtgtgcagggggaggttgtgggggtttgtagggaagggggtggggtgtgcagggggagattgtgggatgtgtaggggaggttgtgggggtgcgcaggggagggcgtggggagcatttaccttcctctttggtgcagccgggaccctctactgggacacagtttggggtccccacagcttgtcctcctaggtggcccccaggcctggagcctgctgagtggtgggaggtgtggcaggctgcagcctgggcccctctggagcttctgggtgccctttcccaggaccgagatctcctgggaagagtccgccctgcagctcctggacctgtccggctgggtgtgtgcctctccttctctagacttggggtctgttgggggtctccccgggggccagaggtttcctcctgggtcccactggctactgccccagtccccaggtccctgctggctccagtcagggagctgcaggccaggtccccgagggcctcctcagagctgcccaggggcatggggttccgcaaggcttccatgtacgactccctgaaccagcgtctaggctgcacacaagtggggtcccccggcggccgcctcctgctgctcgggatgcccaggtctgtgtggaaggtgagggccttgggtctgtcctcctggtccatggggtccggcctctcccccgaccccccacagttctcagggggcatccgtgggccctgctctgaggggctgaccttttcgaagtccctgtctgagcttccagacagggtcctggggcttcccagctcggctctttctggataaggaaggtgcctgagctggtcgctgcccgtatgccctcggcggcagggtgaggtcagggtgtcggggcaagaggcgcttccctggaaatgggggcctgctgtggcttgggtggggactggggcctctgaggggctgctgggcagccgctcaggacctgtgcagctggagtagctctgcaggatggctccagggctggggacaaagacagggtcagtgacgtcgctccacggggctcggtggacggccaagcctgaggtcagcaagcaggtttgcagggggacatggcgccgctcccggttcacccactccaggaacgcccccgtgaagacacagccatacatggcctcagggacggtgacttcctctgtgcctcttcccagccgggacaggcatttcaagaccagtctagctgactgcttccccgccgacgtgacctgcaggtagaagtccccgggctggagcctgactccgtgcagggacgccagctgcaccaccaccttctcatgggcgcacagcggccagcctgggtgcaggaagaccagacccctgtacctggcctgagacaagagaggagggaggttagtggtgggcacggccatgtcctgagcccttccatgccctgggtctccacccctcaggggaaggtcagtgactgagctcccacaaggaaggggtctcacgggggctggggtgtcctgttccttggaacataaagcaggtcattaggactagaaaacacgggctgctctttggttcaggggtcagttaaaaaagcaattgtatagctcttcctggaggctgggggtaggtgggcaggacaggggagaggaggccactcgagggccacagccacagcccaccaggcgctccgaaggatgagttgtccctcagagtggtcccagcctgggcaaggggccgggcgtccacacttgcccctgccagccctggtcagggccaccctatggggggctccctcctctgcactcccggtgctccctgtggctcccggctgctgcaggcgctacctcggcctccttagcgaggggtgcgggtgccaggatgctggtgaatttcacttcagtattttctctgttccctttaaatagctgagatcccactccatttacaattgtgtactttaactattttcacccaatgtgatttcattagcatttcctgtgctattagaaactgcacacagatcacttaactgttgagtgtttattttccccaaatgttgctctgacaaactaaaatacagtaaacatcttggggcctagagccccgcctgggtttcagttgcttctgcagaatcttacaccaagttcaagttcaacccacccaccaatcatgttttgcactggtaacaaacatgccttaggtgttggtgccttttctcaagcacgaggcccattctcagctcagctttactatgctggcctcagggactcagatggaagtcacaaccccagctttccagaatggcaataaaaatgcgctaaaaacttaaaagggcatttgccactgaaagagacacacatgcagatggggaaaggttattctcaaaagcctttttctaatcattttcatcttactgggcttcaactctcggaatgtaaaatcgagtatgagcatccctaggtggctgagggaagtgaaaacaagttcctcaacttttaccagaatttaagctcaaacttcacgcaaggggagaatatactgaacaggaggcataaaacggaactatcattgatatggcaaatttgacttaaagaatgtaaa

SEQ ID NO: 318395 - DNA, 4001 bp, Homo sapiens
tagttccatggcttcattaataaaaaagttccctagacgataaacaaaacaaaatgtgaatccctttgaaaatgcgttctaaccaagtacacacacatccactttggagccaggcagccaattgttatatgaaagtcgcccattcaaaagcaagattgcagacacgagatcccaattaagaacattaatatgtaaaaaaaaacagagagagaaaaaagaactctaacacaaaactcagcttttggcgtcaatgacttacctagtttgagatctctgtgcaagatttcttgttcatgaaggtatttcagtccagacacaatctgcctgaggtagtatcgaacttctggctctgtcaacacctttcttgctttcaaaatatgagccattgactaagaagaggagaaggaaaaaagagaatctgtcaaaacagttatcaaaatcactggtttccctttgcaggatgagcaatgaaagttaactttgcagtgtaagtgctgccacagctaaaatcccagataaaatactctttgaataccatgttaattcggggtaagcaaatgttctcaaataggagttgacacttacccttctactgcagtattccaagagaatgtaaatgttttctttgtcctcgaagtagtggtaaaactgcactacatgcttatgatgaagaattctgtgaagctctatttctttgtcaatctaaatgaaaaagcaaggtaaggcttattagcttccagtcacctcggaaaagccagtgattacacatgcagaagacattttcctaacagggaagggccatccttgcacacaaagaaaatactttactcaagagtcatacgcaccttttccctttgatgaggtttagctactctgctgtgaggaataatttttgcggcgtagactttgttatttgtcaaatctgtcatctcgtaacattttgcaaagccaccctgaaaggaaacaaagccgagacggaattgaggatggcacaaaaatggacggcagatattttaaataaataaataaatgggaagaaagaaaagcaaaaaaaaaaaaattgaggaatggaggagggtggacagagggaggcattcgacttcgttaaagctccctcatgaagagaaatgcattgctggaaacagcaagttcaaacagtttctcttcttcttttataaaggggagctttatggagggagttggaacggggagacatgaaaaataatctctgatgagacttgtcaggaaaattccctgggagcagatagagggagagaggtctgatgtagaaagccctcgcttccagactcaagatgcatttctctgggctgcgggagacacacagttctgaggctaagaatgcaaagccgatccccagcgctgccggcgcacaaaagccagagggcaggtgaggagcccacctcgcgctgggatcggacccccgaaaaacccggaagcggcgggcgagggaccccgcgggcttgcccggcttggggtcgcccggacagacctcccgcccgcccggcagcccggcgccctccgcttgtcacctttcccagcactttgccccggcagtagcgcttcccagtcgtggggtcgacgataatccgcgagatctccggccccgagtgcgaatggtggtgatggtggtgaggggccgccgggggcacttgcgcctgggactgaggtggctgcgattcctcggggggctgcggcggccgcttcttcttcgagtccgctccgcaacccttgcccagcgcctgctcgcacattttggtgctggcggctggctggtaggtgatagtccgcaaaagctccatggtcgccttgccgccccgcactgcccgctgccaccccctaggcgcggtcacacgtccgagccggccgtggtcctcgcacccttgcctctggtgccgactagcacccaacaccccggtccacttgtgcgagtgagagcgctcggcgaagtcttatatacggggaggcgggaagggggcggagactcgatacgcgacatcacgtcacggcctatgccccgccccacggccggccgagcgcgcgtggccgggaagcaagtcttgtcccgccacccgggtctcgcttcccagcggagccgcgcgcctcaaacgccggccgccgagatctcttgcggccgcgggaaggccttcagagccgtccgtgggccccgctgtcccgttcttcgaaggctccgagcctcagcgtacaaaacagaatcgcgagggccgacgcctggcctcacccccgccccagccgcctggtggcagggcagtgccgtgacccgagcgagtcgggcgcgggtgtagacgcagtccctcccccgcacagcccttcccggccgcccggggcctcctgtgtcaaggtatcagggtgcccggagcccgccgcacgggcaggcgaggcctcctccggccgtatgacagggctcgtctgcagctgccccgcagtgcctgcccgcgctgtgacgagctcgctggtgtctagctggggcagtgccgagaggccgtgggggtgaaaggccgggattcgtggagccgggcattcgagcccatcgcgctagggcagacacgggcccgcagccgggatcccgggccgatcggccaaccgtgccaggatcccactcgaggcccgtctggcccccgcccatgcccctagagcgagcctctgtctgaggtcggcccctgaaccttgcagagcgaggtcggcgtcctggcaaggcgtcctccgcccgtagcccgaagattggaaagcaagggcgccatcttgtggaatgttccggaatgccgttaggtgtcgaagtgggcagcggttgacaaccgtgggcctttgacagttactagtactaaacatcgatgccgattgtgagtttccaatcagagtcatctatgacttcttccgaatgcatctgttgagatggctcatgagctgccctggttcctggagagtcaatctgagactttctggggtagggagattggtaggatgaagagaggagcgtaggccagtgagtgcaaacacagcttagtttcccatttccagattttgctgtgcagtttgactaatctaggaacacgtttttttgtttgtttttcttgttctaattacgatagagtaacatttattgaggactgtgcagtatttttaaatgccttatttcatcctacaacaattctgagagaaatattgtaaggaaggaaaaataattttccacctttcaaagttttggcctgggtcgctgtaaccagacagattaacaagaaaacaaagaagcttattaacatatacgtctcatatatacatgggagataaccaggaaaattagagatggtttaaaatcgggcttaaatactatctttagctaaaccaaaagaaaagagtggggcaggcaagttaaggaatcatgaccaggaaatgtacggtaaacaggagtggggtttcttatttcttcattgataagtttttcatgatttagagtcattcttcctggtacagaggagacacttttacaaatggagttttgtggggtttttttgttttttgtttttgttgtttttttttttagtgaatgtacgtttcccttacgaaagggtaatatgccatttttagagcatttcctgggtctgctggttctcaaaataattatcttaaaataatctttatcccagggccatatttggggtggcatattctcatctcctacattattattcccattttatagatgaggcttggagaacttaggtaattattgtatatttttactagatcatcgaggttaggttaattagcagcacacttgaatctttttacctatgttaacaggatatggtaaatagttttttgaagctaaattccagagaaatttagaataccagattattgaatccctggaaggtacatacaaaaagttgctgcagtccactgtcaaatttaggtatgtgtggtatcaacattaatcgaacatttacaaaaatactgtgtct

SEQ ID NO: 318396 - DNA, 4001 bp, Homo sapiens
gaaaaactaccatttataaaaccatcagatctcgtgagaattcactatcatgagaacagcacgggggaaatcgcccttataatccaatcacttcccttcccctacatgtggagattacaattgaagatgggatttgagtggggacacaagacctaaccatatcaggtccctatacccgactcgtatgcaatatttttatcataaatgtgaatgtgtatttttctagaaagaagatctttcgctttaaatatgcgttcagaggggaccatagccctaatagagttaaggactacgactgtgaatgagaagagggttaaagccagaaccactaacatctaaagggcaagagaagaacagtcagcaaagaagaggagtcagcaaaggaagtcagaacattagaactatggaagcaatatcacaactttgagaagaaaatagaattagatgccaaagaaccatgaggattggatagaatttggagattaggaggttgctgagacgtttgcttgaacaatttcactggaaagtaaaacaattacaggtcttagtcacagtgggctgaaaaataaatgagagatgaggaaattgaaatagaaaaggaagatacagggaaaagtgcaaaaatagaatggaaacacaggctggaactaaattgtggaaaggaaagttcaactttttccagtgagtatcactgtgcatacacatgttaagtaaactaaatctcagcatgactgtctttagttaagccaattagggaggataaaataagtgcatgtatctgcagcaaggaatggctgcttcactgacttcaaatctaccactgtgataacttggtccatttatatttttattcacttcttccttcaggatttgagaccaggcaggtaacaggggtgggggggggggggtgctgattatttaaaaatgagctagtaagtatggtcagatctcaaaaattgtttcttaatatggacacactgcagacacaaaaaaacccaccgcactcttggaaaatatgctatcttccatctgccctgctttatgtcaacaaggtatgagttatttgaaactctagaacagtagcattttccttactgtttctaggttcagaaacaaaggagaaaaatgaaaactgctttaatgggtggcggacgcacattagttcactacattttcagtagtctctaatccaaggtatcagaaaacaagatcaaaacttttgtgtgcttctctgttgccagaaacataaaataacatcttggtaattatctggctgacagcaaaacaggggtctgggaattcaaatggaacccccaagaggcaaaggaagagcgaattaacatgcaaactagcagcagggtgatgtcgcctgtgcctttcaccaggcctagctgcactcaaggaaaggggcgcgccagcccctccccaaagcagggactagaagcagaggagaaaagccattgcagtaagcaaaaggccataagttttcttccatcaccttccgacccagcctgttttaagaaaaatcttacttaagcacaacagagctttatacatggttattttttctcaacgttttaagtgaccggaacctctgatgacagtaatcgctcagcatccctcactcctgctcacttcctcttcctgcacgcctcggaggggaaactttgggaccttccggcacaacagctgaatcactcgcggtctggggaagagcccagggggaggaaacacgcgccaaggaactttaaatctccctccactactttcgccagggatgcagggacgcaggatctgcccggagcgctgctacccaccgtcgccgctcgcgaccaaatcccgactcctcgctctgcgcctcttagccgcgtcgcagctgcagtgtcagcaagtgcagcctcagcaagcacaaccgctacctagacggcaacctgacagtttcaaactgcagggaggaattaaggaccgccctgggcattggtcctttgtttcagcaatctgccgtttgattggtccgagagctgggggcggggatttgggccgctgccgggagaagccggaattactttggagagccccgccccctggctccgcaggttggtagggggcggggtcctagggagccccacccagcgcccgtggggattaaatattgcgcgtgctcagttctgttcagcggctgcaggctgctaagcggctccgggagctgatttggatagaggctgttgagcagggctgaagttggctaatgccgtgtgctgttggctttcaacaattccggtaacctagatatgagtcctaatgctttcgtctgcataagaacaatccgaaattctgggccaggtgtggtggttcatgccagtaatcccggcactttgggaggccgaagtgggaggatcgcttgagcccgggagttcgagactagtctggggaacatagggagaccctttctctataaaaaattaaaaacaaaaaaaaaatctgcatcatccacagatcccctgcaacagaatcacttggaggtgctttttttttttttgagatggagtcttgctctgccgtccaggctggtgtgcagtggcactatctcggctcactgcaacctccgcctcccaggttcaagggattctcctgcctcagcctcccgagtagctgggattacagacgaccgccaccacgcctggctaatttttgtatttttagtagagatggagtttcaccatgttggccaggctggtctcgaactcctgacctcaggtgttccgcccacctcggcctcccaaagtgctgggattacaggcgtgagccaccacgcccggccgaaggtgttgattccttcggtcatggacaccgtcaggaaatctgaatttttaacacacactgccagtgattctgatgcaggagtctgcagaccaccctttgagaaattgctagtctaggctgggcgcgttggctcacgcctgtaatcccaacactttgggaggacgaggcaggcggatcacctgcggtcaggagttcgagaccaggctggccaacatggtgaaaccccatctctactaaaaatacaaaaattagccgggtgtggtggcttacgcctgtagtcccagctactccgaaggctgaggcaggagaatcccttaaacccaggaggcagaggttgcagtgagccaagatatcgccactgcactcctgcctgggtgatagtgagactctgtctcaaaaaacaaagaaaaaaccaaaattggtagtctagttttaactaatctcaaacgtgtcagacttcaagatagagccttctggtgaagtattggccttagaatcagatcataattataatctagctttaccatctactcgctgtcaccttggataatactactcacatactaaggtggtaggagattaaaggaattaatatatctaaaacaccgaacacacaaacatatagtctttcaacttacattggcaacagataggctagaggtatgaggacccagatggcaaaggtacctaagtagcccagactggggttctgcaatctgaagaacagatactgagatctgggtgagttttcaggctcccttctgttacctccagtataaggtttctttttctgtagatagaaatgacataacctgggtctcacttacttttatgttggcagaaccagacttctacttacacaaacaagtaagaagagcaccagaagtttctttggcataaattatgtttgttctcccccttttttttcatgcttattatagaggacaagttcctattaatagctgcaaattcatacttggttctagtatttgttttttaattgaattgccttttggtgaccccatacactataattgatactgaatcactcttctggtgccctcctgccactaggctccaagtttctcttttctgtcttcctttttggggaggagagatttttatcgcaaaccatttagtaaacaatcccattctcctgtaaaactatagagagaaag

SEQ ID NO: 318397 - DNA, 4001 bp, Homo sapiens
gttggggccctgagagcattaatgtactcatcagaagagacaccaggaaccttgtgcatgctctcctcccacctgcacatactgtactgaggaaaggccatgcaaagatacagcaagaaggcacctgtctgcaatccacaaagagagccctcaccagaaactgacccttttgggctgtgatctgggacttctagcctccagaactgtgagaagataaatgtctgttgtttaagcctatgaatttatggtactttgttatggtagcctgagcagattaatatgatggtgatcttatattgtgaggttcataaactttttatagtgttcctgctgtggtgtcagttgcaactagatttagccaagtcagctctactcagagttagcctatcaccacctctagcatgtaggaacggagggagaagtggaagtcagtggctttcacttgtggcttccctagtctgacttctgctctggataagagaaggaaaaaaaagatccaaacacatatttcaaatcatatacttcatacatattcatatatttcatatattttaccacaattgctatggcttaaaggggaaataaataagtatatgtcaatagtattccatgaccatatattccaacttatttcaagaaaacatttagaaaaaatcagttatttaaatgactattttagagtttcatatatgtagacacaagccaaataagttatttaaaaataaaatttaaaattaagaatcaaaataaacaatattggctttcttaattgccaaacataacctctgttaacattcaaaacttgtaattttgcccccctccccaacccccaagagctgaattgatatgaccctgaaatatagctccacccatgcctcaaccattagagtcagagcaacttggctgataggagctgtggttagaggaaattttcagtgtataagcactatggatgctgcccatccctcagcatttaccaccttctggcttatgaagcattcgcataaaaagagagtaacaaaaaagttccttaagaggaatatttatttatgaggggcttttgtattaaatgtttggatttacatatttactacatatgtaaaaatgtgtattttatgttatttttaagatttttttttgtatttatattttgaagtgcttccagtagtgaaacccaaagtaataacactgtatgtacagggaatatggagaggctttcaacttcagtccaagaaccagtaggaacattagttgacagtaatagactctcagttgagcttacattataggtgggtaaacaataacacaaaataatttctggcaggttcttcttccgtctctctaaaattccactctagagagttattcttttgatttaaagctttatctcttcacgaaatgaaatttgagagctcacaaggtgtttacattttagtataaatgagttaatcagttctatcttcaagtttcaatcagacagcgatgaagggtggaggaagtactgtcacctgaagagaggactacatgggacaggtaccatcaaaagggaaggctagggtgcaaaagctctgccacaactccagactagttttatcctgtaaatattcagatattttcccaataccttccccattttgaaatccataatttcgattaaaggaacaaatttgtttcataaaatattttcctaaagcttttctcatatcgtacagaatcaataacaatttcatatgcttaggcataaacagcctttccccttgagtaatacaactgtaaaatttaagatataccatgtcattattctcatatttaaaatctactccagaaatctaaatccatatttttgatgatgaaatatttagaaataagagaaatttaaaacatttcatgtaaataccacaccctctgtagttaactgacccacttcattttatctgtcaatgtccaggtcctgggcagcagattgtactgaatgttgtgacaacagagaccaaacctcagcaagtagaacacaagggaatcttgagctctagaactttggatggtttgatattgtattaatttgcattaaaagtgaaagtagcattcatgagaggtagctaaaatgaaaaaaatttaaacaaaaaaatgtttcttgaacatttgtttcacctcttactgtgttggttgaagcctttgtacagagtgtatgaagagttcatcaatattttctgaaaagttaaaacaatgtaaagtcactcctaaaatgtgtacagtaattcctgaagtttgatattattataaattgaaaaactcccttgtaaatggatgaaaaaattattaaaaaatcctagttttcccttacattcatttgtttaaaataaaaaaagtcatggtaaatttagaaattttttcctacctgaagattcgaagagacagaactgcctcgactggagtcattttgcacaactggaagtgagtatttctcctcatctgatgacattctgcacaaatgctctaaaacagtagaagctaactttagcttttttccttgatatttaagataaaatcctttccagatatatataagtgcaacagtatccaaatctgcaatcttcctgtgatatgctaaaatcattcattcaacatattgagtacctacaggcaaaaaatcactgggcaaaaaacagttgaagacccagtcccaatattagtgagtttataacgtagtcaggtcttcagaaaaatccccagcggggcctgttgagcataatagattgtgatcactgttcttgagcaatgtgtgacaacctgggtgctgtgtactttcctctaagacacagaaccaagagagaacaaacaatttgtgcaaattcccttcttgggaaacttacctttggaaatattattttaagaaaagtgagcttatacagaacaacagaatcaaatatatgcatagagaatttgttgaaagtcctaatcaaaaaatcattaaaagtacttttagtaacaagtaaccgaattattcaaagaacaaatagtgactattcgaactatctgaataccagtaatatgtaagacattggtgaggaatgtaaaatgaagtcctcattcttaaggagtttacaatctgtagagagggccaggcatgtatattatataagtgaccgactgatgaataaactgctgataggccctaaaataacagatacaaagtagagagataggagtagctatttttcatggggtaagattgcatgactgtaaataagcaggaaaggaggcacagaaagtttttagagaagatgacccaggtgttgagatctgaaagatgagtaggtctcatcctgaaagatggataaaaggtataaacacaggtgtagatattctaggcagtagagcaatataagcaaagacagagccatggacatgtatgccacgaacagcaagcagtttggtaaggacaaagcaatgggtgcaaaggattggctaaggatgaaacaaaaagtaaggagcagccagatcatggaaggtcaaaacttgtcatattaaaaatctgggtgtttattctagacaagttattgaaatattttttaaaagttacatgatcagaaagatcattccagcagcgttgaggatgaatttggatattaagagagatcaggctgggtgcagtgaatcatgcctgtaatcctagcactttgggaggctgaggtaggtggatcacctgaggtcaggagtttgagaccagcctggccaacatggcgaaaccctgtctctattaaaaatacaaaacaattagccgagcctggtggcaggtgcctgtaatcccagctacttgggaggctgaggcaggagaatagctagaaccctgggggtggaggctgcagtgagccaagatcgcaccactgcactccagcctgggtgacagagactccgtctcaaaaaaaaaagagagagagatcaattgagagctgactgcagtagtctaagagataaatgttctctttgatagtaattaa

SEQ ID NO: 318398 - DNA, 4001 bp, Homo sapiens
aacgacagaaagaacatgtgtacatgccaagagtgggcactaatactgttcattggtgtaccgtactgtgtgctttttagactaaaagattttccaatgttatagtgaagcctatgaaataccaactactctaacaagtttttatcccataaaccaaacagataggagtaaaagatatgggaatacattttcaatttcattgaatagtaagaatatttctgcttgaaacattcctagcctggctctcatttctacaataggaaacaggataaaaagggtggcctacacaccctttgaaattccatttctgaaatcactgtcttattctcgaatgttagaactttttatgagatctgacatattctcaagcagctgtgaagtgcattaaggtatcaatgagtatccccatctacctcttccctcccacttttccaaaaatacagctgtctttggagacttaaatggtaaaaatcaacagataaaggagtcctagacagatatgcaaagtcaccttaaggatcaaagctgcagaataagacatggcagtatgagcataatataataataattgatattagtaaaagaactcatcaatataaatggagtgtggatggtcagaaaaagaagaaagtaaaagaaagcaagataaatattggcaatgcctacttaaatatccattgccacgatagggataacctagcttcatgctaccaaccattcagaatcgtaattaatcccccatgcaggaagaaaaaaatatgatactgggatatgggagaaggtcatcaagcctagatttgaaaccaggatataaagagctggagttacaggcacctaccaccatgctcggctaatctttgtatttttagtagagacggggttttaccttgttgcccaggctggtctcaaactcccggcctcaggtgatccacccacctcggcctcccgaagtgctgggattacaggcgtgagccaccacactcggccagcgttttcccttagactcgaaatttcgctcctatcgtcccatccttgtagtaagaaagtactctttctaaggtttaataacaaattttactcttggcaattacaaggaaatcgactatattaaaatagctaacgagaggaaattactgaagctacaaagtcaaagtctcataatcaaagttatccttgacaactgacaagagttgttagatcttctattggtctttctgctaattcaaccctagtcttaaaacaaaaatagcctcctattgcctaatcccttgtacacacaaaaccactgcacttcggtatttctaatacgagaaagtttctatatatccaacctttcctatctttgaggggcaggcatggttaacgtggttctcagtaagatattcatttacaaccaagagaaaatcccaggctatcatctcacattcttgttttactttaaaaacctttctaacgtcatttattctctgacaacctcaaaattactttctacaaagcaaactctagaaatctaaaaatgcgaagtgcgtgcttgtgagaaggtactaaggaaattcttcctttaaacgtcaaatgtgaattctaacttctaatgagtaagaccctcgagatttacagcggtggtctggtggaaagaaaacccttggcactagtagctcacaaaaccccagcccatggttgaggcggaagcggccagatgctcccgggctttcgacaagccgccctggaaagcaggcccgtcatcttcagcggaaagctctctcacgtctgggcccgcaagcccggagggttcgtcataaacacacaaggcaaggatagaagcgaggccgaggggctggtcacgcaactgtcaaacgaagcccacccaccgactgacaaggccccaaggggacaagcgatccccgcgcgggatactcacccgttacctcaggatcgcgactacaactcccaggaggctgcgcgagcgacggaccaacgcccttcccagaatgcagcacagctgcatccctaccccgccctctcctttctccgctcctcctgcttttctacccgtcgtcacccgggagagccggaggtagggttcgggaggaggatcccgaaggctcggcgtgtcgcgtcagacgccgggagggggacggggcggggagtagtgggggagaatgggaggacgaaggggaggggaaaggacaggggaggggagggtaaatagtgggccaggcaggaagatggcggcggtagcggaggtgtgagtggacgcgggactcagcggccggattttctcttcccttcttttcccttttccttccctatttgaaattggcatcgagggggctaagttcgggtggcagcgccgggcgcaacgcaggggtcacggcgacggcggcggcggctgacggctggaagggtaggcttccttcaccgctcgtcctccttcctcgctccgctcggtgtcaggcgcggcggcggcgcggcgggcggacttcgtccctcctcctgctcccccccacaccggagcgggcactcttcgcttcgccatcccccgacccttcaccccgaggactgggcgcctcctccggcgcagctgagggagcgggggccggtctcctgctcggttgtcgagcctccatgtcggataatcagagctggaactcgtcgggctcggaggaggatccagagacggagtctgggccgcctgtggagcgctgcggggtcctcagtaaggtgagcaacccctggtgccaagggacccctggccagactcacctgcagcgaggcaatccgctgaggcggtggggtggggctggcgggaggcgcggaacgtgccggggtgcgaggctgagtgttgctgcagcgactagggatgaggcggggatataggggcactgtccttgttgcccgggggctcgtcgggggcagccgaggaccagggaaagggtgtataaacctgagatccagtttgggaggccagatgcgcgccgtgacttgggacttagggcggcagctgtcccgggtgtaaggaatccgggttgggcttcagcggtgtccgaacgactgggcatgggagcggttcaagtcggacctcttaaaagaggttggtctctctgaggatgccaagccgagtaggttggggggcactgcggacgcaactctttcgacagaagctggagcgactcagcttggtgttgaaatttgaggtgttgaattctgctaggttagatgtagtgagacagatgaatgtggaggactttctccctcaccctgtaccttagttcagaatagagatattgaatcggcacatgatgggtacaggaaatattcatagtaacttggaacatgtgagaatggagactgatctttagtccaggaagagcattacttaataataaaatatttttgcggtaaggggtcgagggtaaggaaaagatgttttatcttttatatattttttaaaatccctgtatcaaaattttagcaaagcagtcattataggactgcaggtggatgatctcttgatattacatagttgtggggattttttttttaagtttttgctgtaagaagattcacgtagcctttttgacttctctctcccttcctgttaaacttttttagacatggctggagctagcagttaacttggagagggggagctgggccagtccctcaacaagctggtcataagatactatgtcatgtgcagccagtggctattaagaaatcaccctgtttccagtattcatatttggcaaatcacttggacattatttgtggaattgtttcatattaggcttttataatgtctagaaagctaatgagaagggggccaggaaaggcatgagtagtcagaactaaggattgcaagtgttgacttttatttgtatagcagcaaaattatgttgtatattgatgctgtgatcattcttgaaatttcagtgcaaggttttcagtaacgagaagctcctcaggatttctttagattaaatgtatcctgtaatttagga

SEQ ID NO: 318399 - DNA, 4001 bp, Homo sapiens
gctattgtggaaagggtggctgaagaagtcctctcttacttggtgatacctgagcataagcctgacaaaagtaaggcaaagagccatgtagagaattaaaaaaggatatccagtgagatgtgggatgcaggcagggggacctggaagtgtgaaggtctccttggaaacttattctcctttttatgtccccattactaacgaaagcctagcaaaaggccaatgattattggataaattattgctgagctcatggcctggtagagatatcactccatttcaccactagtggcttgcttctgcctagagaaaaagtacccagactactgagggccctatattactctgctgagaatgccctaaaagtagtcttttaaggccagctcaaaagccactcctcacgaatcccttccacctgtattcttactgaatctagcttttacttcctctgtggtacataccccgtaatgctttattttgcaagtaattgtgtacagacattatcttccctcaaactcctgagaatccagattatgacctttttacacaactctgttcatgaattacccagctcagcgacttgtgcataaggaaagcccccagctgagtaaccgaataatctctgtgaagattagcaaagtatttagaaaagctgcatgcccaccaaagactttaggagggtaggaaaggagcgtacacctctccttccatgaaggcttattagtagttgtcacagtaaaggttatcataattcttttgtaatgctgtctcatgagtctctttatcatttttcctgactaacttaagaggttagttaagttctcaagggaatttctgaagcctaaatagatgcttctggccgggtgtagtggctcacgcctgtaatcccagcactttgggaggccgaggcaggcggatcatttgaggtcaggagttcaagaccagcctggccaacatggtgaaaccccgtttctattaaaaatacaaaattagccgggtgcagtggcaggcgcctgtaacctcagctcctcgggaggctgaagcaggagaatcgctagaacccaggaggcggaggatgcagtgagacgagatcgcgccaccgcactccagactgggcaacagagactctgtctcaaaaaacaaacaaacaaacaaaaaccctaaatagatatttcaatagctgggaagcggggagtggagacagtgacctgatgttaacagagcggatgatttatgtggctggcggggccacacccagtcattattcacttttcccgtcctcaccaggtgctccttttctttatttgagcctttctaccaactcgctttactctcttccaagggcagacaaaccaaaataaataaataaataaataaataataataaaattaaaaaaagggtggatatagaattttattttttataagaaaagacaaaccatattaacaactcccttccctacgatataaagtgccaacagttacgaaaacagatactgaatagtcggtcctcagctgcaatctgcggcaatgactagtgcctaaaaaatcataaagccatggattttgaaaataacctactatcagtaagagcataaatacccttctaactcactgcaaacagtcctaggagtagagactaggtaagatctggaaattggacttaaaaaattctgaagggagcaggacaaggaggggaggtaccaagctatctccaaacgcccctcaaaccagaggcgctttaatgaatctctacccctgacttcccctcaccttttccacgtgcccctttaattcccctctaccctcaccacccctcccaagtcttcgattgcttcctcggttacctgctccctaagtctcgaagcgtgggcaaaactctgcagccgaagtgccggccggcaaggaaagggtgacggcagagaacgccggcgcttgactgccgcccgttccacctcgggagaagcgcgcaccgacctgcacgcggcaccaggaccgcggagtgagccctaccaactagccccgcccactccctaggaaggccccaccccctcggcaaagaggtttttttgcccttggcaggcgccgtagtcgccgtacaacccgcgaggccccacactttctgcgccagctgggagtgcgcgccctgcagagccagtgggtgggcggttctagctcttcccaccctcactgcgggcctctgctgtcacacgcccggggtggcgaaacggtcgccacctgagtctccattctgctgcagtggcccctgcgttaaagctctctcgtggtgcggctgccgaggctgcggtagctcctgcgcccccgtgctggtggcgcagcctctgcttgctgccgacctggcggaagggtgcgggagcgcacgctacgggcagcgtcggtctgcgtccttcctcctcctattccgacccccgcatcccacgcccccgcctcgctctacgcctcctccctggctgcaggcagaccgcttcacacagccgcagtgccctgtgtgtggacagcctgtgggagactcgcacgcccacactcaccccgcctggctgcacccctgcccagcatgtcggcgctcgagtggtacgcccacaagtctctaggcgatggtatcttctggattcaagaacgtttctacgagtcgggcaaccgtgccaacatctggctggtgcgcggctccgagcaggacgtggtgatcgatacaggcctggggctgcgcagcctcccggagtacctgtactcctccggcctcttgcaggaccgagaggccaaagaggacgcggcgcgccggccactgcttgccgtggccacccacgtgcacttcgaccactccggcggcctctaccagttcgaccgcgtggcagtgcaccacgccgaggccgaggcgctggctcgcggggacaactttgagaccgtgacctggctttccgatagcgaggtggtgcggacgcccagccccggctggagggccagacagttccgggtacaggcggtgcagcccaccctcatcctgcaggatggtaatgggcccccgcgggcgcgcgctctcgttaagggagggtattgggaagagactgtccgagtgccgcatgttgcagacttgcgtggccataaaggggattattttggcacctcgcagagccacttctgtttcacccttccctgagtaaaaacccacttgaccagagtcaaggccatcacagccttccctgccagagaccagctctggcatcgtgtagagattctgagtactcctttgaaagccggcaccaccccctccctagccactttcctgcatcggctgtagcagtaacactacaaagacttgtgactgactagggatttctcattctttccctaagcacctgcccgacatttccaggagctttcgtagtgagcagacttttaaggaatgacccctcacggagagtgcatgtcatgatctgtgcttttgagaattgcagacttcatcagcttggtccccaccgggtatgggcagttcccacctgtagccttagagagtcatcagaccagtgattccaatccgctaatgcgattggaaacctttcagataggtttctgttcttgatgttgcctcacgattgcaaaagcttaatagtaatcataaacgtagaatatgtctgagtcttactttatgacagatatttggtccggttgaaagcaaagcctgagaaagatcaataaggaagtaattttcggtagaggtaaattatgtggactaatgcataggtagccatggtcctctttggctctgtgaaagacaagtatggaattcagagagaaattcatggaatgaaaataaatagggcctcagcccattctccctacgtagggacttaaataattgagctaattcgccacatcagcaatatttggtatattagttttctattttctttttaaaatacttttgatttcattttatcttcacaacacatttaaagtgaggccactgaccccccagttaaatggct

SEQ ID NO: 318400 - DNA, 4001 bp, Homo sapiens
cttatgagaatttacgccaaaccaaaggataaggtgaatagaatttaggcaaggaagggagtataaggctatcctttggaaacatacatgtattttatatactctaataaatctccagtgcatgtttgtgtcccccttagatatcctagactttgtgttattattgatcacttcctttttatcccttcaccctttgcctaatcgcgcttagcaaagtggcattttcaccctagcttcgggcggttgggccaattgactgtcctctgctttggggctcctgctctgaagtcgtgcggcccctgcgcgagggcaaatttcagcaccacggacagcacaagtacactcaggcccgcccttctgcaatattttcccagcgccaaaatttttttggtgggaatagaaaggaaagagagagaaggccggaggcaaccaggcgggacaaagggggaaagtctgtggcttcggaggagagagcctaacctgcctaggaaacgccttggagttcccgataaccatcccccgaacccgggagggatgagcactaggctctcccggctcccgacgctgcgccctgccgcaatcagtggacagccgaatacttcattcgtttctgtttctgtctctggttgcagaaccagactctcaccacgttctttttaaggtccagtttctcagcgatggccgcgatcttctcagatgaaggacgtggctggatagcgaaataggcctcgagtgaacgcttctccggcgccgcgatggacgtgcgtttgcgcttccgttcgctgccgttgaagagctctggcttgctgttcttctctcggtaggcggcctcggcctcctccaaccaggcctggagcaccggcttgagagcgatcatgttgttgtgcgagagagtgagagactcgaacctgcagatggtgctttggctcagcgagcccacgccggggatcttgagattagccagagccgcgcccacgtccgcctgggtcacccccagcttgatgcgccgctgcttgaagcgctcggcgaaggcttccagctcgcgcgggtctgactccacgtcgctgaggcatgcaggcatggcgctatgaggggccacggtgtgcgggtgactcatgcccatggcctggtgcaggtggcccatggcgcccaggtggtgtggatggatctgtgcgggcatcaccgagtgttccggagcgcccaggccgctcacactcagcgtgggcgagatgtgctccagcaggtcgccttcgaggccctggtgcacggcgtggtgagggtgtgaggtgagcgcagctgggtgggagatgggcacggtggacgaagtggacgtgcagggcacgctgctcatggtatggtaggtggcgtcgggcttgaacggatggttcttgccgtgggagacgatatccaccgccgccagagcttcggcgcgtgccagcaggctctcatcaaagcttccaaatatattaccctgcagctgcaagcgagaaggcgcacagcacggtcagtagggaatactgtcaacacaggattaaaacacattttcaagcaaccgagatgcctctcctcaaagcccaggtcataaaaattaatacggaggcagcggctctgctggaacagacgtgtggatcagagacatgaatgagagagagagcgcgccgggagagaacgcgggggagacaaggagaggggttcagacagcggcgattgttctgggcgacatgaaaaaaacatgaagctagtgcctgtcaaaaaatgtgccttagagcggtaattatgctccactacgtacctgcggggctgggagacagactcggcgcatggcctcggagccagagtgcagactggagaatttgggttcttgcagcaccgggtgcatgccgaaaggctgcttggagttcatggccatcatcttcgcgctcctggcagggtggcagcgggtgacatggaatcaggcttgtctagcttgcttgccgctctccaagtgagcgctgctcagcgcccgcgctcccctcgccctctcgctcgctgcctcccctctcccccacctgcttcttcactcatcttacaagcagcctgccaggaagggcccgggcgcgcgcaggcgtgctcacgcgccggggactcgcaggggcggcccgggaggtgaggagagacagcagctagcggcgcgcctttctgcgcccgcggcggccgccccctccacagcctttatacccgggcctggcctggcctctcccagtccgccccgccccgctggctccaacccgccagacctttccgattctttcttcttcgtggacttcccttcccccatgccaccccaaaagtcccaacctctccgtcctgtcccagctcgaactgcctggataaaagggtagccctgggctgagctggggcaggaagttgaccctactccaacttcccctctccaccacacacacacacacacacacacacacacacacacacacacactccgtcggcccggctgccgccaaactgcccatttccagggcgctcctggcctcacgcccaagctgtccaccagagtccggtcccgcggcgcagcgaggaggcgcctccaagcgcccagacgggccctggagagggtgaggggctgccagaacgaggcccaggtgacccctgccccacctccctcaaccgcgctccggggtagaggtaggggcagtaactgccttctcagtccggggtggcttcctccccacgcttgcctttctttctttcatttgagggatgtaacttggcccactcttcctccaaccctcccgtctaaggaagcttgtggagtattttttttagaatagcgactgttcaggatggccctccaggcctgggagtccttcagtgcatttctgctgggcagccagagcttgcaagcccattcctcgtgacaacagctaccgtttaagagttcctaatatgtgctagacaatttagagtttgcccatgggattctcatacccaccgtatggagtaggtgatgttatcccgttttacagatgaggaaaacaaggatcagaggggctaatgattagcccattcactcactcacccagttatccatccatcttacaaatatttactgacggcctgctgcttcccaggcgccttagcctcttggtcttccttctcaaagtttcggaacttgagggctctcgaggttagcactgcccgcctccacctcccctagcctctttttctctctacttccctcttctttcctctcccttgccccgctctagtaaacatcgtgaataatggatggggaatcctggacctcgactacgctgcactccggttcggagagaaaccccgcgcgtgcagctgtaccccctcgtcagggccactgcctccgctgagagagcgatcttcggggcttagagacctcaccctgcctgttattgtgcagggtatgtgcgtgccgggtttcccagaatctgaacgaggtggggtggtgtggtttaggggaacatcccttagtccaagaggacgccctgacagatccgggctccctcttcccctcggcgccctccagttgcttttctccccatccgagccagccccctccgctggttcccgccctgcgatggtgggaaaaagactcagcccaggtgcctagagccaagcgcaaccctttcgctaaagccctctgagcctcggtttcggcggctcttaaatggaattgcactactgtctgcctccttggattctggtgaagacgttcagagttagggtaagaagaaaagcattgagccacgaaattggtgctcagtaaactccctcacaacctggtgccatagcgctcaggccctggcctcagattcaaaatgcgcctctgcctcttgctggctgagaccacgagatattctcaacttctctgtactgcggtgtccccatctgtaaaatgggggtgatcatttatttcccattgattgttgtgaggaatgcactgggataagcacatggcacagtgcctg

SEQ ID NO: 318401 - DNA, 4001 bp, Homo sapiens
gtatatggtgaccaaaattgaccaaagtagaagtggaaaactgaaaagaccaatttcagagatgaaattagaagagttatttgacgtttaatggcaaaaaccaccagggaagtttggataaactattacaaatatcctctcaaaaccattataagagatcaagagaaagtaagggaaattcccagggaaccaaatagaggtgaaaacaggaggagtaagctacagctgggaccgaagctctgaagtccagcttgccaacctcagtaacaaaggagtttagaatacagtgactgtggcaggacaagacatagtcccatgggactacataaagtagggagaggaactgagaccctgacatgaagctggggcaccagaaatgaaaaggtaaatcagaaaaaaaaaaaaaaaaaaaaatcttccaagaaagctcaggtgtttcagcaagggctctaggtgggctctgtgtgtttcttccctatcacattctcaagtcattccctcaagataactattatcctggattttgtgtttgtgtttacacagagttctgcttgattttaagtaaaaaattgtatactaaggtagtcttctgtgacttgagtttttcacttagtattgtgtttatgaaaaaatttaaaccctatgtttactgataaccacaaggaataacagacacaatatttaataaaaaaaggaacaaaatatcgaaaccatctatatactgtaatgtacctttaaaccaatgctagggaaaaacaaagggaaaacacaaaactgcaataaacttcatcttctctcccaggtttttcttgaacaattcccacccccattccctactatgtatccttaacttctttagacagtgaatgagaaattaatactaaaagccctcaaatgaaccctagggacatttcctgggttttcccttcttctcccctctccaaccgtgccgtgaagggcaagcccctcagccctaaaatctgaggaggcccagagtggtggctggggcagaggagtgggctacccctgcagagtagagacgtgtatagtgggggatatccactgggagccccagtcccaggtgaaagcacactggtgctcctgggcaaggaggcccggctgtccccacaatctcccgtggggaagcatcattggttggtcgactgcccatcttgctgcggttatagaaccaaactcgaaccacatccttctgcagctggaggcacccagcaatgtggctgatttgctggggtgtgggcttagggcaccgctggaagaatttctccaggctgtttccgattcgtcgctctctgcttgcccgtctccacttcccagactgttgcaggatcatctccattttgcataagcccagaaggttctctgcttccacttccttcagccactttttcagcagtggtcgcagcttccacatgttggcgacgcttagctgctgggcctcgaagcggcagatggtcgtctggctaagcaccttcccaaacagagctcccacagcgatccccacatcggcctgcgagtaccctaggctcaacctcttctgcctcaactccttggccaattgctgcaactctttcagtatgcccgagatgtcctctggcggcggcaacttcggaatgctccgcagggcaatgtagggccccgggagggcgccttcggaggggcgtcgcaaccagtcccctgcctcactagctccaagacggggcctgcagggtgctatccagccccggaattcgtgtggcaggggacccaggggaatcctccacacgtcagggcctgggcagatccctggcctgactgccggccagaccatcaccctgccaggggccgcctgggtgctcaaccaggtcagagtgtcaacccgcaggggcatcggccctctggggccgcccccaccactgcctggaagggggcagaagtggtttgagggcctgtgtccggccatgggtggaatggcacccgcagcggctctggtaggaactgatggccctcgaggcttcagaacagccaccggccccctcaagccccgccccccagtgggcggagaaggcgttacaagccaagggtgcctgtgcgtaggcggggaaatctggtagatccataggaactcctgggtcctagggttaagggagtgagccccctaccctgacctttgcttccaactcccatagaggtacaaagctcccttgtgggatttgcatctccaagctgtctggagtcccttactcactgcctccatcccctgcctgaatagaacccaggtattttcttatgcctgttcagaaactctggaccctgatccccaggagctacctaacctcttgtcttcacaaataattattaaatatctatatgccagatattgctgggacgacccctcaattcataaactgccccctcactactatctttatggtcacaagtactgccaacagttcctctttgcacatccccagtccctgtgccctaagaaacctaggcaaccctgcttgagtttctagttaacatcagtttactacctcagattctacccccgaccccacccccaaactgccagattccactccctccctggggcagaactttgtaactaattccatgtttcttcccctagccttgaaggtccttttgtttcccattctaacccagcttcttggtccagagtttcctcaaccaacagagatctaggtgtgtgtcttctctttcccactctagagacaggtctctgaactggcctgacccactgtcccccactgaggatgctccctgcaatatatgactcaccaacatcaggctcctttatccttaggcccttatcccaccagaaacccaacaatcttaatttgtccctccatcatgcccctagctcaggcatccagttgtgggccctgtgtgcagaaagctaaggagggagggagaaagagaggctctgacctcagtttcaatgtttcctaggaggaagagcacaatgaccttggctagacaatcatagcccttcattctttaaaccaaccatgatgtggctctgtccccacccacatctattgaaactggtcttcttgaagtcatcagtgatttttcagctgtcaaatccaatggccttttaaaaaatcctcatcctgctgtatctggctatagtgacaactcttcttgctccttctccttttaaaatttacatgaaatggtgataacagccaaatctgtatttcagttctgacttctcttctgatttccagttttgtatttttcactgccccaagtcaaattcattatccacacttctaaacctacctctcatcccgggacttttgaactagttatcaataactcagtcatccaagcttaaacctaggagctgttcttgactttttctgttctccacagggtgtcaaatcttatgtactgggactcctaaaacatctgaagtctaccatctccttcctagcctcatcttcctgggcccttaaatacctcttcctagatgaaggcagcaccttgagactaaattcaacccaacactacaggttgggttgcagatatggccttgaagcaatggtaaaggaaaaagaatcagaaaattggctgccatcgctacaggctgtgtacttagttatgtgtcatctgtatctctactgcaacccttgctagaatgtgtgccggctatgagcagggtcactgtctgtcttgttcactgctagatcctcagcacgtggaactatacctggaacatggaaggaagtcaagcaatatttatttaatgttaaataagtgaatctctgtagcattaatggtaaaaagacttccatatttgccttcaattagattttaagatgacagtctataaaaaacagcttgcaatatacagaagttcatttaagaataactttgctggtatctattctcttgaggtatacttacatgctatttttttcaaaatcacgaagcaatcagtatctgccaaacggaatgaaagctggatcacaaag

SEQ ID NO: 318402 - DNA, 4001 bp, Homo sapiens
caggtaacaaaatgcagttttagggcccagcgctgtggctcacacctgtaatcccaacactttgggaggctgagacaggcggatcacctgaggtcaggagttcgagaccagcctggccaacatggagaaaccctgtctctactaaaaacagaaaaattagccaggcatggtggcggtgcctgtaatcccagctactagagaggccaagacaggataatcacttggacccaggcggcagaggctgcagtgagccgagatcccgccactgcactccagcctgggtgacagagagagactgtatccaaaaaaaaaaaaaaaagataacaaaatggaatttttccttacaacaacaacaaaacctggtaacagaatttataagaattccacaagattgcaagggcctaaatgacccggttggaaactggagagtggaataactaggaactactggattaaaaccgagggaatctcctgtcactgagaaaccattacgcagacttccatccaggtggctaaagccacagatctcccaccctgagaacttgccaatactactactattctgattacttcaacatgagtaggactatccaaacctccagcagctcttgctttgtttttgtttattccatcatatataaatagttcacagcataactgccttatacaatacataaaaagtgaaaactactccttccaacgcccatcccttatccaaatgattccagttctttctcttcaaaagaaaggagtaactggcaaccagaagcctcataactgaactcttccaatcaggaagacaatgcgaaatctgctgcagccaaagaatgtctactgctccttgagacactgtcacaagagatggaaagctacaccatggcaaggtctgggcagacaaggaaacaggtctggggtaccgcatcctcccccacccccaaaacttctttagacctatacgcaaaaacttggcgtgctcatccctacttgcaacctgacaatttacaacctggcacaccttctaattaggaactagttctagccttttatagccgaaatattaaactgcttctcacgataaatcaggcactggcgcctgctactgagaatcccctgtgcatcaaacctccagtttcactactgagatgggccagtgaccaggctcctctaccgtacagaggggaggagcccaccctgctctgctagagtggaactgcaaacagaggacaggagcaaggtatggagcgcagaggcgtgaacagcgtccaagcagggctgggctcatcgcaccggcgggcgacagacagcggcgggcacgcgggagccggggtgcaggctgcaaagcggggtccctcggctgcagaagccgcccccgtgtgtcgccccacagctgcgcacgcgtcaggcaacacacccccgctgcccgtcgcggctctgcgctaaagccctcccgggacagccgcacacgcccctcggacccggcggcgcgtacgtacccagcaacacgcagagcacatcgagggccacgtacggcagccgcgtcttgtcaaacatggtctctgcccgggctgcccggcaagggcgatggactgagctgcgggacggcggccgaggcccttgattctcgagcccgggccggggctggcgacggccccgagctacggcccctcccagccggaggaggagagcagccgagggcgggctgagaccgggcggcgctcccaccgccagcaatggcgcccggggccctcccctcacagcccccgcgaacactcggttagtgccgaggcgctcgtgtgccagccgcggcagctctgtagcctcaggacctcctcagccggcacggcctgccccggttgctccccgtccggatcccggcgctctctcccacaggcggggcgtccagactctcgctttaaggatggggaccggcagggaggaggaacgcggggtccagcccctcccgctgagcagcgcaggaccgggcagcgcgcgggttcgcgggcggggggagtgcagcaggggcggggccagggaaaccccaggccgcggcggtcagccaatcagcgccgtcggcctcatccctcccgacctgcggcatccgcccagaagtgcggctctcggcagccgggcggggcgtgggggcggctcccgttccgatccagggggctttgctctggaccgcaattgctcaggtggtctccgaactcggcctcggtacccccactaggcattgctgctttcagagagctaggctccctacccaacgatcctagagcaccggctgcctgccactccccaccccttccatggggatgaggtaataaacaggtcagattgttaccactgagtttaaggggggaaaagaggtcagagtaggcaggaacagagacgctctcctttagtttggtacctctgagccctttctcacttaggcctcaacgttgacctccctgtgtcctggctgagcccaaatgttagcaagaagcatgctaaatcatccatcctcgatacctgatcaccgttgaattcttgatatttaatatcggattagattccttatattacacctttgttgtagaagcccttgacctgcctttagccagaatccctctacccttgatgtctcctcttagtaattttccatccaccgtcacctccctcacagacacggtgcctgttccttggctataaatcccctgctgtctttgctgtattctgagttgagctcaatttctctctcctgttccaatagtcatgacccttattgtaataatcttgaataaattattcatgtgtttgacaagtgtcaggataattttctttaacagcagcaagcactccccctgccccatacccaggaggaccctagcccacatttagtaatctcagtttcctaatatgtaaaatggggattttttaaataaatacctaatactcagacatcacaagtactttgaatttattgtgaccttgcaatctgaggcccttgtaactctggaagtaaagaaagccacatgataaacaatggcccatctttctcaggtgtaaattgcttaaagcttttacagctttaagctgcccagtgttccagtctggaggaagaagtgaaacccagaaaagattatatgatagtggctttatctagagttaaaccgtctacagatgttaatgattggtatattttctctttaaatatgtaaaacacaaatcacaaaatgtgcctactacttcttcgacttatcctgcaaagcactcataaagccaatggaaagataacattaaacagagtctggagatacagccccaagtaagctctcaaaaacaaaatatacatttgaagaaagatgtttttctttaaaacgaatgctaatgttttattttgcctcttgtttaaatagccgtaaaagctttaagcaatttacacctgagaaagatgtgccattgtttatcatgtagctttctttacttccagagttacaagggcctcagattgcaaggtcacaataaattcaaagtacttgtgatgtctgagtattaggtatttattcaaaaaacatttgttgagcacctattgtgttacagtctagtctcagtgtcttaaacagcttttgaaatatttactttttaaaagtaatttttaaaaacatttactttttaaaaattttttatttttactttttgtgggtacataataggtgtatatattttggggtaatgagatgttttgatacacgtatgcaatgtgtaataattacatcatggaaaatgaggtatccatcctctcaagcatttatcctttgtattacaaacaattcaattatactcttttagttattttaaaatgtacaatttaattattaactatagtgaccctgttgtactatcaagtactagatcttattctttctatttaaaaaaaaaatttactcttaaagtgcgttttcaaaaataagcattcaaaaaaaccttactgattagtgattttttgtttattcacacat

SEQ ID NO: 318403 - DNA, 4001 bp, Homo sapiens
ccgcactcagtgcccgctagccccaagctgtcggctctgggggtactgaggctgggacctgccttcggcgcagacaccggcgcggggcgtgtgacggagcccggcgacgacggcgggagctccaccgcagtttcgtcagaggtaaaggtacgcgcccggcgcgcgcggcgtgtgcacacacacacacacacacacacacacacacacccgcgcgcgcaacccgctcatcacacattcccctcgatctcgagaagcgcaatcacacgccactagcccctccggcctctgccgcgaacccacccgagcgcgcccgccaccgaccacgcggccccgcggctcccctacgcagcggcgtctgcagcgggccaggggcggcctgcctcccgcgtggcgggcttcctctcggcgacaccctgccacgccacgccgtcccagccgccagcccgaagtcgctgcccggagctgaacgtctcggctgcggcgtcccttccaagtcgcgtttcaccgcaaggagtcagcttgcaagcctctccccgcccacccggtcccatgacagctgctgccgcccaaagacaggcagattataacaagaagcaaagtttccctctctctcctcccacctccctcccccaatctccgccttccccctcccttccactgttatgcaaaacgggccggcaccggcgctcccactccaggtaccaaaccagcccccgcgagccgcgcccggttccgcccggccgcccctctccgtgcccaggcgtgtgccagcacccggggctcctccgaggttccgccgcatcctcagcttcccaatgacccgcagccgggcgcccagagaaaaagccctaactctggagccaaactttatgcttgcaacaggcattgggtggggaaaatgggggaaggggtgggggccgcgcacgcctcgtgctgacatttttggtggctgcttgtcccagcagcacccctctcccagtctccaagccaccagcttcctcgctcccccgcgccccggcacaccagagcaccctctcctgtcacgcgcgtgtcgccagtggggctcccgggctcagccagtgcctgggactccgcctcgccttcccttccccctgcatcgtggagcgcgcaccggggccgcgcaccgcagggggacccaggcgcccccagacagtccttccgcccccatccagcctggcttttccccccagggggctccgcccgatagcgaaaccaggaagacgctgtctccgcccgcatgtccacgtgccccgcagacccttatgcctttagccggcaactggcaggaaactccgcgctgcgggcgcgggtagaaagccgcggggggccagcaacagcactctggggactacagcctggaggactaggggactccggagacccgggcatgcacccgtgccggggccacaagtccacgtgaaagtacggcagcaagtgccgggcgctgacggcgcgcctccagcacccagcgccagcctgagggtaccccacaccgtggcgcgcctccacctcccaaaggaagcgcggtaccccccagttttgcccgcggggtggcagactccaagcggccaaggctagaccctccccagcggccgtagcgcccccagcgctccggcacgcgccgggagacctccggctccctgccccggtaacggagcgcatcgcagggcgcctggaaggggggctctgcagcctggaacccccagttaccccagggctcccaccgctgcctcccggcctccgcggctgcagctgcggcccccgcagctcagcacccctggccccgggcccgcagccccagccggccgtacctgcgtgtcagcgagatagttgaggaagaaggaggagagctcttcgtccagcagcgcgccgcagtcgttccccgccatcttccagccgcggctgcagcgtgcggcggagtcaacgccgagccggcccggggggagggagccagcgagcgagcaagggaggagggaggagggagtgaggccggcgggaggcggagggcggagctcgagcccccggctgccgcagggccgctagctgcgggggcggggccgcgcggcgcccgcgggagccgggggtcgctcacccactttcctgcgccgtgtctggcgccgcgaccagctcacgcagccctcagcaaggggtaaagcgcaggcagccaggtggcggtgccccagccagcagcccgatgcctgcgcagcaatgcgggcagcccccggctcctgccagagcgaatcacgttgcgttagcgctgggcgggtcctgcgagacaacctgcttcttctgcacagctggggaaactgaggctcgagaaggaataggacctcgttcgaaggccgggcgcagtggctcacgcctgtaatcccagcactttgggaggccgaggcgggtggatcacctgaggtcaggagtttgagaccagcctggccaacatggtgaaaccccgtctctactgaaaatacaaaaaaaattagccaggcatggtggcgggcgcctgtaagtcactcttcatatccctcctgaaaaaaaaaaaaaaaaaaaaatatatatatatatatatatatatgtatgtatgtgtatatatatgtatgtatgtatgtatgtgtatatatgtatgtatgtatgtgtatatatatgtatgtatatatatgtatgtgtatatatatgtatgtatatatatatgtatgtatgtatgtatgtatgtatgtatgtatgtatatacctaggacctcgttcaaagctacagcgcacatcagttgcaggaagggaaagcttaggtcttactcccctggaggactgtttctctacccaggctacaaggccagagaaggagggagaaataccatagatcaaaagcaaagaaatcaaggaagtctccttggaggaggaggcatttttatcttttacttgaagggtgcgtttgcctatattctgtgctaaacctgatcatatatctctctctgccatcgtccccagcacccttcccccaaaaaactccaatgagttctcttaccaatgcccacaatgcatgaaggggctgggctcctgccagcctccgcaggcccgctcacaacgggcttgccactcacctagtaatctcttcggggcatctttccctattaccccttggactgtcaagccatttcctctccttccacctccaccatcatgggctcccttagctccaccagcaggccttttttctctaaaagctggtcacagttgccgttttacatttgttgcaatgaagacttaatctttgtatctctccttacaagactctaacaccatgaaagcagggcctaaatctgcttttgcacttgctgtatctgccgtttctggcacatagtaggcacttaatagatgatgtgttaactgaaaaagctggagaattttgattctctgccaccaccaccaccacacattatacagataaggaaactgactgtcaatgtgtacatggagtgactgcctgagccagaaccagaactcagacctcctgactccaaccttgaactctcatcatcatgccctgttgtttaccaaacaggagatgagggcactgcctggatgaaggcaagaaggcgggaagctttaggtctgttttattgggcacgcctgcctcctgccctcctcccaccctacactcataagggctgccccaccctgcccacctaacaagggctcccttccagcgggagaaggaaatagagggagagtccccagcacacctgctgagacttgaacaccagggcaaaagcttccttctccagtctgaggttcccagaaccgcaggccgtgatttcactctttgggcttaaggccagtgtgcttttaaggaacaatgcattccaacagagagcctgcatctagcctcagagccctagactaggagttaggagtcctgggttctgtttcagaccctgcatctggatactggaacatcttgttccagtatccagcaattcaggggg

SEQ ID NO: 318404 - DNA, 4001 bp, Homo sapiens
tccagagaaatgccagtggggtgcctggcagcagaggtggggcaggctgagccccgcccacagtccccagttctcatgagagtcaccaacacgctgggcagccagttccctcctgaagtttgcactcagctcccatctgagagggatgggagctgagcctcccccacgcctccaagcgcttcacctcacacatccatttccagcacatggccaccctgccggccccatctcagtccctcccgcggccgctctgcctcccatcaccgtgtctgttagcctcctcacattctcagtgcgtaactacacactgatttggatatgtgatttccatctgtctgtcctcctcctgacccctgtctgtgaaggtggagctgccttttgtgaggagggacctgggagggaccaggctagaacagagcaaccagccaggcaggggccaggctgagacacacctaagagtagacgctgccttgccccactcctgcccacggggcagagcaggagccgcaggtgtcttcccctgtgtaggcagcactggctgaggagggtcagctgccaggctcacccatgcaccagctgcacaaaacatggcagacaggccggcaggaggccggggtcatgcagcagcttccatcaagcttcaggaggcacagctttgtttcctctggaggctgtttggattagtaagagacatgtagctctcatctggctgcacaagacacgaccacagcagtccttgcctcacaacctgaactgcagcctgtggggttgccccaaacaccaagaaggtacagactgaaagcatcagcccagccaacactgttaaccaaaaactctaagcatgggcagagctggtacacgggcagaacaatatctcacaaacaccaagcatcataccccaatagaaaatatctgcaacaaagaccatctccccaaacacctcctgcaacgccaccacagccagcgcctttaccttaagcaccaggtatgttcacagtacaaccactggcataggataccatcatactaaacacacacacaaatatcttcacaaggtcacaaacactgtcacaccaaaccccaccgaggaatcaccaccaccgccacccagtcagcagttacagaaaacacaattgttagaggctgagttgcattgccctaaaattcatatgatgaagccctaaacccactacctcaaaatgtgactgtatttggagccaggctctttaaagaggtaactaagttaaaattaggtcacgacaataggccctaatttaatatgactggtgcccttataagaggagatcaggacacaggcacacacagaccaaagaccacgtgaactcacaggggaaagatgcccatctacaagccaaggagagaggcctcaaagtaagctgactgcccaccccttgcttttagacttctggccttcagaattgtgagaaaatccatttctctggtgtaagtcacccagtctatggtactttattacagtagccctagcaaagcaatacaacagcaaacaccacagcaacaccatgcagcctcctcagccaaataaatccattgtgccacacaccatgacaggagactggctgcatcaccagcacaaacaccgcatcccgagacagccagcacatcacgcacactaccgtaccctaacccaccatcgccacatcacaaccatgtgtctacccaacaccctcccggcagcatgtcacaatcgtcaacccaacaagctcacagaaaaagccttcaccaccaacgccacctaaacaacctctggcccaacacctaccattgctctggtggcggctcctccaagggtcctggggcagccccaacccagatcagagcaggcccctcagaggtccccacctgtgcacagcctggcacgtctaagttggaaaccttcacttctctgagcctgcttcctgcctgtaagtctgggataacagcaactaattcagagttgcttgaggattaaaatgagaatgtaaagcagaatgctaaagcttggggacaacgttcagtgacatcacttaaacaggatgaaattggccatggtggggatatttacttcctggacacctgaaaatgctacaactcagagcctcccacctcaccccacctccagaaccagttgttatgcatttcccagcacaccactgaatgtaaggcggagcaagtggagtgctgcctgctaggcaaacagaaagaacaaggaaaaaggaatacggcttgctctgtctttcatgaaaactggcagaggaaaagaaaatactcctcttgctataatttatgtaggacacggtaacaggtggctcctgttactctatgccttaaatctggcctcacaggtccaagacgatacccagttagttccccatcccctgcccacctctgctgtcacacctgactagaatatctccatagcccttcagacctgggcaatcagggccctgccctcagcttggcccttcaggggcatcactctggccctcctccagcagttccctccccacagatctgggagtccacttgtgtaaggaaacctgcctacctgggctgcagatgcctttgggaccccaatttccccacctaaatggccctgagcctgcttccaggggcctatgcaggtctcttcctgggcccatcatcctcaggatgactgtgcagtgggggttacacattcctagacccaaggtgtgaccaggcagtggctgcctgcagggaaaatggtggccggcacttagaaatgcaggtgcagcatccgcctgcatgcgcacacggccccccacacgcaggcggggagcctccatttgtacgctcaccctgctctcaacaaaccagccacccaattccttcaaggttctagaacatgaagtttggagatgataatgatgaggggccttcaaagcctgaggtcctcgtctgcagagtagccccacccacataaacgacagcaagccctgaccctgtaataattttgtgtcacatttaatcaagtcctatgatggcttcggtatcactcaaggtgtctcatactattccaatcaacccttgtgtttcaatatattctccaatttttattcctttttttttttttaagagacagggtcttgctctgttgtccgggctggagtgcagtgatcatagctcactgaagcctcgaactcctgggctcaagagttctcccacctcagcctcccaagtagctaggactacaggcatgtgccaccacactcagcagatttttttttttttggtagagacagggtctcactatgctgcccaggctagcctcaagcaatcctcctgcctcggcttcctgattttattcttatcacaacccttgggagaaaaggaaggtcctactatttgcacttaacaggtaaagaaattgagcctaagaggttaagttacttgcccaggatgacacagctgataactgcctggaagtaaacagtcttgactttgtgtgggcacccacatcttcccctatctggatcttcaactttttggaggaagcgatgatgtcctgtacgtctttatactttgaggggctatggggcaaaagacacatgattctaggaaggaaacaattagagtgttctcgcctttttttaaacttgaatcctaagaagttgaatagaatttgacagccagagaggaaggcttccagactgaagtggtcatctcctgcacttctccccctgaagaggccagatctggcaggaaggcaggggcttaggcatgatgtcttaaaaataaaaataaatattaaaaaaggatatataaaaggaaggcaggggctcccacaaccctgagggaggacagaggctgactggctgctgcagaggtgagggggctctggagatgatgagtgcaccaccacagcaggcagcataaggtcccccacagatgtccacgtcctgatctcccaaacctgagaagatactaccttacagggcaaaagggactctgccgatgtggtt

SEQ ID NO: 318405 - DNA, 4001 bp, Homo sapiens
cctctccctcgccccctttctaaaccgtcagcaactcctgttagttatatctccaaaatctatttcaagtccttcccttgctccccatttcaatgattaccaccctaatccaagccaccatctggactctggcatggtgccctgaatgacctcccatttcactctccactgagtgaccacataaatttctcgagtatatattgagatcatgccattcttatgcttaaaacccttcagtggctctgactgcagaataacacttcaaattttaagaattgcctcaatacccgcatgcctacctgcagcctctaaggccctgtgtgattccgctgctgctcacccctccaacctcatctcaagtcacctctcattctgtgctgaagccattccgtcctctccacatcctctgaatgcagggagggctttcctgtttgaggacctatgcatatgcagttccctttgcctccttagtcttctctgcgctggtttttctcatttttcagctatttttaaatgtcacccaaagtatattacagtttatttcctccaacatttcataattgtgcgaattttatgtttatggctttatcccaagagaccccgttcagctctgtggccttgcacaaaccatttcccaaagttagacatgcctacaagatcaagaggctgggagtaagatcagagcttctcgaaaccatcaggctgtttatcagccccgcccacaacgtggcacggcctttctgcgacatcagatgctgagctggacctcctcctccccaccccctagtcctccccgtcctcaggtggcgtctgcggtcgaggatgtaagcattctactcgttgattagtatcgtttccattgacaaaccccagactgatgaagaccactttcagctgcagcccgccccctccagcttcagcttcgaagacactattgccagtgggttttctagaagtggtgatcatgggcaccaaattatcccctccctctccctgcattctcccattatcgtctacccttggttaaatacgctgaaaaaagaactgaagcggagttaagtacgaggaagccttaaagacgcactttctggcagccccccgccccctttccccgcagtggaggctgccccaggtctacaggtgccgccttcgcccggcctcgcgtagcccacagcaggggccgcccgcccgccgaagttgaaggcgcacctccccttcccgggaaggacgacggttccccaaaagaggcggagggtagtctctcatctgaaccaggcgctttaatgcctgcctgaagccaccgcggccagcgtggagaccacgcagcgggcgggcggctgcaagccctgggctccgagcgcctctcctgtgcgggtcccgcccccctccccgcattcctctcgttctgctcccgagcccaggccacgctgaaggaagtacttgggcagtctctttcctggagaacgggcccgccggttccggaagcctctcctacccccaggctggtcacctcggactaccgacccgggacaagaagtccaagcagactgcggcggaggtaggctggcctcagcccagctcccccagggtctcccccggagcgccggcctcccagcacgcgagcagccccctcccacccagtcccgcggccgcctccagtccccctgcgcccgggaagcctccacctcgcccgccctgacaccgaggtcccagtatccaaagcgcccccagggccccgcccgcaacaggggaagttgcagcccgccgctctcggtcaccttggccgtcaccgaggggcctcgcttgcggaagccctcggcccccgaagaaaacacaagtgcgccgagccccacgcaaagcacgagaggtagcagcagccgaggacccgggcccatggtgagcggtggcagcggcgctaccggcacgggcgctaccggcacgggcgcgacacaggctctgggacagctgacgggactgccggccggctgcgcctgcgcgctcccggttgcgggggatggggatcgggcagtccgggaagggcggggacccggggcgcgttcctcccaagttcagactcgcgacccgaacttgggattcggaggagcgcgcccacagggcgcagccagggctcgaccgccgcgccttaggcgggtgcggagggcgccagggacgggagggagcccgggttgcccaggcgcggagccgggcgcagcgggctaggctgggagcacctccaggaatttaccgcgtaggcgcggattaaacttggacgggaagaccaggactctcgggcttccgcgtccgcccggcagctagcgctccgcgggactgggaactctgcagccggtcccggtgtgattgctgccgccttgggagcagcctccgccgcggccgccgagttccaatggcccattggaaccttttgctaggttttggacgcttagcagaactttgacatcgctggaggcgtggagccctgttgcactcgaataatggcctctctttgagatgattcacgtctagggaacactggaaaatgctggattcacagtgcccctttgccttcgaaaaacttttacattggctttaagtactttatttggaggatgattctgtgatcttatctacactgttcacaaggcagcacttacacaggcccagaaccatggtcatgtaggattctttcctggggaaacaaagtaaataaactgacttttaggtgtatctgtaggatggattttttacaaacttaagaattatgtttaggaagattaatgactggggaagtaagttcttattatatttttaaatggaaaattcgggttgcaaaaccacaaattctgatctcaaccgtgaaaataaatatatcaaggcacttaaatattgaaagagatgtaccacaacgtttacagtagctatagatagaattgatagctattgatagacttatggatttttgagggtttaaaaaaattttttttacagttttctgatttcccagatgttctacaatgagcatataagtattttataacatggaaagggttattttaaaactcattgctttttgaattagaatttcaaaagaacttttttgttttagagtaacagccctaaaattaactaaaaattagtggtattcgcacataggtgccattttaaggggctggtgccattactttcaagccaagattttcctcggattaagagatggaatttctaaatgtcagatgggattcctaggtgtacctaagtgtagatctaaaatgacattggaaccattagagataaaaggagtaaccactacttctttggggtgagaaaaaggagaaatgcaattctgagctatttttatgattcagtccagtgaaagacctaatggctttcctcttcatccccacccccaataaggaaagagtcccccttgtgtagcaagacaagggtatctctcagagcacttaccctacgaggtgactgtgaggtgattgtatatatttatctgtgttcattaattgtttttgtctgtctgctatcagaagtaagcagggccagggcagggatcaggcctatatttattcccctttgatgacccagatctagtgcaatgcctgatatatagtgatttctcaataactatttgttgaatgaatgaatgtgtccaactactttttatgctaccaccatctcaccctctaggcaaagaaatgaaatctttcccagctccctagaaactcctcttataccctctgccagttacaaacacttttttctgcccaaattaactgcaatcctgacttttcttgtactatagtttaattttgttttaattttatttgaatagggtattaccgtatgtatttctttttgcttaaatttttgtgaaattcatctatatttttgcatataactattttggtggctaatacaaagtaggaagcaaattcatttttttcataagaatattcatttatttcagtacagtttattgaaaattctcccct

SEQ ID NO: 318406 - DNA, 4001 bp, Homo sapiens
tccatcagggttgggttttttcctccccaactttttattatgaaaaatttcaaatattcggaaaagttgaaagaacagtttgttaatcatctatatgcccaccattatactcacaattgccaacattttgccatatttgctatttatacacacagacacatacacacacatacacttgctgtaccatttgaaagtactagatatcaacacacttcaactctaagtacgttagtatgtatctgctaaaaataagaacaccttcctacataaccacaattccttttccacgtgagaaaattaatagtccataacattgtctatattgtggttgcatgggagcttttaaagaatgaggacctaatctatatattcccactacttaacttggttcatagcacttatttgggtaatcaacagatgttctaccaattgttcagtttaataccctcacaacaactactctgaaagtcatatgaatttaacatttaaaacagcaacctttgattttaaaattttctgcaaatcagtttagtcatttgctttaaataaacctgtgctgcagtaagtacagtattctgggttctgcactacttaattctgcatcacaatgctccataaagacagagatcatgtctaacttttgtcagacatataagtaggtacaccaaaattttttaaatgaatggatactttcagacactgaaaatgttagtgaagaaattgaaatcgaggaagaacaggacaggacaatagaatacagattttgaaggcagacagatctggtttttaacacagattcaaacgtttacttataacaaatgtttaatagagcaagttgcttgactgttcaaagcctccatttctaactctgtaaaatggtgataataatctaacatacctcctggaattgttgagaggaataaatgacaaactatgtaaagcactcggcacacataagactcagttaatggcaactatcgttattattttatctatctgagacaaaaaaattatctatttcatttaagaattctcaatagcaaaacaaaatcctgtcccagtgtagagcgaggattttacgtgctaaggtcagctatgcttcccacttccacagttaagccttccagcaagacaactactagccaaaggacaccaagagtcgcaatctcccaggaagtggtcaagaacctcgtgaatgagatccagggatcatcaccctggccccttcttcttcaaggcgcagaaggctgcaacgacctccaaatgactaggtgcggcagtgccctgcagcctcggtccctactatgaaaagctgcaacacatgaggcttttgttattttaaagtgggtgtggggttgacagagagagggataaagactaaggcagaaaattttttaaaaagccacctctacccacagcagtcccataactcgaggctaatcacttcagtggagccaggcacagcgtggggtagaagctcagcggttcccttttagctgatcttcaatttctggcgtctcgaacccaagaaatgaaaaagggaagccatgggggagcaggaggagaaatcaaggcgcgaaaggaccctcaaagctgtactgtcactccacgcccaggctgtcattctctccagcacaagcccctcggtggagcatgtgtttagggtctgcagagcacaggagacaaagcagaagcccagcagccgcctcaaccctggcatgatcaggttccgcatctccggttctcctccggttttgggccctcacctgccacgaatgcggtcgtcacgcgagcagttgtgagatggtcaagcccattcaggtctaggttaccccctttcatcccggaggcaggggtgaggtgtttgtcaagagacttcagttgtaggcgtggacgtaggctacttccttcagtaacagctatagggccacataagggaacctcaggctactacacctcaggaatctccgtcacgcctcttccccgccctcctcgggtctcacgccgaaacctcaccgggcggaacgatttccggcaagagccaaatgatcagtcctaacctttctgaccgtggttccaaggttccccaaaggactgccctctaaaggacccgggtagttccgcttccggcagcgcgagataaatcacgagaggaagcttaaatctgtcgtttgaatttaggaccacctcggtgagtggtcgttctggtgtgctgtgtcatacctactgttttttaaagtgaggcgtaacccgacagtaatttcaaaaccattcgcctcgaccggcctaaggaagggtttaattgagtctgtggggagattttgcgcaagcgcctttgagataggagggccttgggcgttgcgatgtcccgcgctagctgagcagaaagggcgagtgctgtttcgggcctggggaggtgcctactgggtgtaattgagttttaccaaacggtcattttcctgctgattctgagtgtggttggaccttgcccttaagattccgttaacgagtcgcccaaagcttaggaaatgctccctcacagcgtttgagactaagcacttttggccggcgttgaagaattctccccattactttgatcagtcatttaatcagaaattttgccccaaatttaaatacgtggcggggagaaacgtgaggtcaagagggaatcctgtcacgtagttttaaaagaaaaatgtccactttatctcagtgtaggtttttcttaaatgggcatttctgaaccaaagtagatactttttaaagtggaaatgcatttatcccatgtggcttcatgtgaatgcatatggcgatgaaggcatttttttgttcaatgaatttgtactctgaagtgaaccagattacagagaagtgtatttaaatttacaggtccttgacgttgcataaaattgtgcgtgtccattttttggagcttaaaatagaataattcaaatgtcagaattccgatccaagttaacatgttgattgaaaattgcagattttaagatggaaccagcgggtattataaccttttaggggcttaaattggtggctttgtttttaacccttggtgaaacagttaagtcctaatcttgacataatacctaactgccttactttattgaacacaaaattattaaaggaattaagcaatgagttgattttatttgcttttatggaggggacaaagtgtataaagcttaaccaaatgtgaccctgacattcctcttgcaaaactacaagttgtaatcaatcactttcattttttcttattcctacatgtttaagtacattaagtaatgattttaagagaaattcttgaaaatatgagcatatccaaagaagtcccaggacagtctttctttatgtagtagaaaccacttaatcccccttgtaaatgatacctttacttagcaatcagagtataagaagatatttatatttgtctcgaatattacagtttcaagccattttctcatatgtatgggctttgaaaaaaaaaaaacaactttcatttacgttacttttgtatatgaataccaattattagcagtaaaacttttaactacttcaaaggctatgcttttcgtgaactgagttttctttcttacgcattttctatttctccttgtcatctgtctctctacctccagaaccagcagtttgtgaactgcattagactgttatatcgttataaaaggatacaattcgtgagtcttctgattattttcttcttagcactgaagctttataaacattgctataaaacattaacaccattaatgaaaggaaagagattttaaaatattttttcatgtaggtgaagattttgggaaaagaaagggttttatgttactttaaacagcctgatatggatgataatacttagatatgataataattatacattaccatatacaaaggacttttaatcatcctcgtaattgcaaaaaagggatagatattatgtccttttccaaacatagatactaaggcttaag

SEQ ID NO: 318407 - DNA, 4001 bp, Homo sapiens
catgggtagatgcagcttacatgtaaatatcacataattttataaaaagaacttcagcatctgcagattttggtatccacagggagtcctagaaccaatcccccatggatattgaaggacaactgtatatacagcaacgtaaagacacagtaatgaggaagaagtattccaatctgtgatgggaaaaagagcaaagagaatggaaagagtcaatgatgtgaaatctggggagggtttggaagaatgaaaaataattcacaaggtatcccaaaataaggtcatttcagagaggtaaaagagtacatacaatagcaaagacgcatggtatgacaataaatatgtggaaataaaaattttgatgttactaaaacatagagggtagaaagaatgggagagaggtatggatgtagatatagatgagacataaaagcctttacatgtaagaagcctggctttgatctgctagtggtgttcataccatgttcagaaaaactctagaaaaaggggacaaaggtagtagaggctgagtcaatagtgctttctagtttaagtgagccagagacgctctgctttcatgttttacttataggacttctagataaaacttcagatgaagaaaagtttgagctggtaagagaagcctgcctgaaaatctagtttttcaggggcaggaggtagcaaaggtgctctgcgttgaaggttttaaatgagttaacagtagagtttgcatttcagatatgtgtaactccactgtgaaagatattgttaatataaaaaggggcttaaagagtcatctaatcaatatttttggtttgtttttactatttttacaaaatagaacaggtttttctcttaaaactaaattctctttccaattagaaatatatgaaaaacaaacacatactgtaggtctgtattttaaatcagtattcacagtaaagcaatctctacttaaaaaattaaatgatgagtaagaaaaatattggtctaatgtaactatagcaaaatgagcataataaatatatatcattcctaagatccagtatggatagaacatgatatcagaaagagaacaagttttagacacacacacaaacacatagatactttttaggtagcctacccttctagccactcagttttcagacttctgaagttaataaatatgagtatcttcggttcaaccagaactcacattggtaacagaagcttaatgaatctatttaagtaatccttcttcttttgtaactttaaaattatttccttccacctatcttcaattatttgttatgtatttctacatacaagaaagcttttggatttatggcccagattactgtttctctttgccacttttgttacctaacactgagttacactatgcgtatcactgaaagaaactaaaataggcatcattaaacaacataaaggtttgacccataactgtatttattgattcatcatagattcaacaacatcagtcatgaaacaaaatatactttttcagttcaaaaattttccaacaaaaaaagactaacagtgattagtaaaaagcctatactgtattggtcttctctcgccaaaggaaaaacaaacaacttacagaatcatcttcctcctcatcgtcttcatctgcatggtggaagaaatgtcgataatttccaggatttatttctgtatcttctggtccaacgaagaatctgggggcttcactcatttttattttatttgatgtagatataattgaaatgatttatattaaaactgcctctaagtaaatagtatcagaagaaagcattctccatatattagctgacgcacaggtctgtgacagcttgtttctgcttatacaatcacttgatattatgatgactgttggcaaatactcttttgttcttagatatcattgcttcattgttgatatcaaagttgttgttgcaattcaaaatacaaagacagtgaagttactgctttcttgagttgatacagcaatcttcttacctaaaatgcaatgaaaaaactaattttggagagtgcactccaaaaacattcatgtaaaaaataatttttaatgacacttgtaaaatcagcccaataacttgatgtatattgtcaaaatgaaaatacattttctcccataagaaaattacttataataaaagcaaaaaaattaagaaactaaaactgatcttcagtaatatacatcttagcaatttgacaaacatatgaattaacaaaaagactacacattaaattcctcatcccaaaatagctaaactaattaagagaaaattactcaaattataacaaaattatattaaagctaaatctcttagcacatagttatgaaatatctgaatggaatggaaaagaacagacaaatggaatgcagctttaaaagccactgacaaatattaatctgaaattacattaagtcaatttgtaaaagttgtctgtaaacagtttttttagggaacataacaattctatattctggtctcatacataaatgaacaaaaaaagattagagtcagaacaagatttcatttaacagcagctcttaaacatgtagaagtcaaaaactctttaacaaatctaataaaatctatggatctcctccccagaaaaaaaaagtacatgtgcactaaattctgcaagaattttatgtgattcactgacattcaaactcttccacataaccaggcgtccatgagtatcagttaaagaactatcatagctggactcattggctcacacctgtaatcccagctacttgggaggctaaggtgggaggatggcttgagccaaatagtttgaggctgcagggagctatgactgtgcctctacactccagcttgaataacagagaaagactctgtctcaaataaataaataaataaataaataaataaataaataagaactataagagcagtagcatctcaaaatattccttaccatagttgtttacatgtacttgcttcctggtcatattaaaattaattatataccaagatgaaactacataacaaatgcttcatttgattactggtagtacaataaattacttgatcaaatattcttaaaagtcaaacaatatgctaggtagaattaaaagcataactccaaaagttctattcctaaagatctaattccagtataacttggtgactccccagtagacattaaaatcaatttgcccagtcagccttcactttaaccatctttaaaatacagcgttacatttaaaataatttgtaatttaaaaataaaagcagaaataatttactttataaatcaatgccttttgttctattcctctgtactgtttaacatgtaaaaatgtttactgaaaaaaaaaacaacaacaacagaaagtttccagtggctgtaaaacttcatgttggtggataagttgatctcagttctgtttcctatcaaatggcaaatatctcttggtttctttcaatttttttactctttccatctaaaaacagctcaaatatttcgataatggaaggggaatgttctggagtcaggtacatctgttttaatctgtcagtgcttaactagtgacttgtgctagttgctattagtctataaaaaagggagtatagtaacaccctgtaaccctgtaaagactaagtgagatagcataagtgcttggcgtatattaaacactcaataaaccatagtttccatgaacactcctgtaaaccaaactccctactgactctaacatgtaaatctaaaagaatgaattgttcattatttgttgaaatgaatatagttatccaacaaacactatttacttattatagaaggcatagtattaagtgctggttatataaagtcaaagtaaacatggctcttttccttaaggagcttttagtctagtaggaagatagccaaataaattgacattttctgttttagtgtgataaaccaccaataaaaaagataatagaaacatgtaataatgtaataaatgtctatctact

SEQ ID NO: 318408 - DNA, 4001 bp, Homo sapiens
atttgacgtgagagggtaaagaaacaggagattcaatacatcgctaccattaaaaggcatctccaacagatgatgtgccacctcatccactagtagtagttttgttcaggcttgggagaaacaaatctaaatctgacttacttaaattccaattgttcacaacatggtttctaaaaaagcctgtcttggaaacatatacgtcaaactcatgaacctaattttcacatcaaaccagaaacaaatcaggataatagttctccattaattcttttcacggatacaaaatgctaatatgatactccactattctgtactaaagtgacgtgctgcaaagttaattttgaaaagggaagttaaaatgttcacagcagagatcagcattttgtgtactttagaaaactgagttacaagaatttaaaaatacaacacaaagctaatagctaaattaactacctgtttccccaacccccaggggaaaacaaaagggaattagctaatataaagtttagtgttactaagtggactacaacattctattttcagtgtatgtgagacattatttaaacactaagcacaatgtctggaatacaatctcagtcgacagttattatcactactactacttgcagccacaaaatactatcaagtaatttttgcaacaaagatacaaaatttaccgctcttccattttatgttgttcattttaaaaataaacggcaaaatgccaagtgtgttaagcttagagaaggctttgagtcagcatataaatcatattcaaccgacacttgatttccaatccaaaagctccttatgtagtatgactcaccaaattcccgatttcttccaactatgaaaaataagttacactcctcccttatagctaccaccatgaccttcgtaaaaattaggttaagagaataatttaaaaattcttaaagacaccccttaccttgatttctggagaagatcgcttggtgagtttaatacaaaccaccaaggggtactaaagctgtgtgacctttaggtatgttctgggatacggcctaacaagactgcctttgggggatcctctgggcagctctggacctaactaggcctgggtaccagcggcaagactcttactcagcccaccggagaggcccaggctccattcccaagccgcagaatccaagccagctcaccctcaaaaccgtccctgacgatgacccacagggtctccgctccccctgccacctcgtctggcgccaaggccggctgactcaaaagcccaggagtcgagtgaacggcgccattttaggcggcggcggcaaccaatccctgcgcgggaggcagggggcgccgggtcgttaggaagccgccgccggccaggatgggcgccggtctcggagactcggggggcccggaccggcggcctccgccatgttgcaccctcctcacggccgccttttcctcggcgggctcggccccgcggcggctgtccgcagccgtactacagctcaccttctcgcagaggctcttgacctgggactcggacagctgcttgcactcgttcagctgctcgatccactggtccagctccttggtgaacaccttctcgtccatgatgccacccgccccagccggctgccgctccgcgctgctcccgcgccgccgcccgcacacgggcctacacgcacacgccgccgccggttcctcgtgtacttctggcggctgttgaggctggcgctggcccgctggctctcaccgcagtactcggccgtcggccgctgcgcctcctcctccgctcgctgaggctccagagctcggctctctgtaatggcggccgccgggcgtggtgacgtcacgcccggcgtcaggaggcggcggggagcggaggggaaaagggccggggagcaagctgcgcaactgcagagccctccccgggcggccgcacgaccggagttggggcgcaaactgggggtcaaagcgcaggcgcgacgtagccggctggtaactgaagcgccttgactttttgggcgtggctcccggagggcggggtggtgggggaagggaaggatggagctggagcatgcgcagtgcgcacagcggcgaaccggactaatccctgagcactattccaggagaggcgagggcttgggccgcgcgcaggcgcagaccggatggaagccggggccactggcagcctgtaactggttcccctgggaaggccgctctggtgatgaactcagctcctcacctggggcctggcagtccgatcacggaaacgagaattgcgaccccgtggctcatctggggtgctgcggctctgtaatcgtgtgggtttccgtcatctttgggggcaggaacgggcagcgagtggccgcttggattaaccacccccacctctgggcgcggctggcaccttgtaattaggtcactcgtaggtggaggagcgtgtacctaccgggggagtgctgcgcagtgcacctgacttccgcggcacacacccgtccccggacctaggtgtctcgtcgggcgcgatggcgggggcgaggcttgggcttttctttgggcctcggaccgcggctcgcttccacgcgccccgctcctcgccggtggttgctttcctccaagtttaattctctctgggaatgagagaccctcaacccctgcgcgccctggcctactttcaagaggggaagcccagagaagatggatgcacctgtcctgaccgcgtctcggtggcgtgagaagcagctgtgatacgtgcttaaaagagagagctcgtataccctaggattggacctctgtctggttatgaatcgctttggagtttgcgaaacgttttcacattccattgtccctgcttttacataaatatctggttccatagagcgccagctatatgccagatccggaggggtcatccagacggaccagggaccatgccctggagcttgtattctcccaacagtactggctgaagatggtttgggataggcagaagagagatcataatgcccccaggatttgaaagatatagaagctttccaaagaacatttaaccataaagggcaaggcaagagctgaacctgatcgcctgtcttccaggaaccccaccctcagtatcaggcaacccttccacacccaagtgctcagcgatgcttgggaggagactgctcactctgcggctctgagggcatcatccccaccaacaggctgaagaaggcactggaggccccatcagccaatagcaggactgaaaatcctcctttatccaagacaacgtgtttggcaaggccgactggcttggcctccctaggctggaaattgcaattctgctttcccttcacacctcccattagtgtgcacaaaagaaagtaccttaaatctactcttctagaagtcttatcacatacttaatttaccagactgggaaaaagaccctttagcccaaattctgtccctgttttgcagttaacatccccaaacaatagaagggtaagagttaagaccaagtggaatgaataaggaaaaaatcatcacttagtgcccgtgattataaagccatacccagtgtgctgtctaatcttattctttaccgttgccatgaacctgtgtgagaactgtctgatggggcaagaagcagacaggcactcagaaaagagaagggacttgcctaagatagtggtcaggatttaaaactgcacactcccaagtacaaagtctcagccacagtcatgcagttgaccttccaaggtctgacatatggaacagaatcaacattatttctctttgcctagattctctctcttttttttttttttttttttttttttttgagccagagtctcactctgttgcacaggctggagtgcagtggtgcaatctcggttcactgcaaactctgcctcccaggttcaagcaaatctcctgcctcagcctcccaagtagctgggattacaggcacccgccaccatgcccgggtaatttttatatttttagtagagacggatttcgcc

SEQ ID NO: 318409 - DNA, 4001 bp, Homo sapiens
tgtggcaacatggataaacctgaaaggcattattaacatagttcacttaatagtgaaataagccaggcacagacagacaaataccacatgttctcagtcatatcaggaacctaaaaaagttgatctcatagaagtagagaatagtgaatagtggttaccagaggcctgggagggtggtaggaagatggaaagagattagtcaataagtataaagtcatagatctgaggaataagttttgttctatagcacagtagggtgactatggttaacaatatcatatggtatctctcaaaacagctaggagagaggattttgaatcttctcaccacaaataaatgataaatatatgaggtaatggatatgctaatcatcttggtttgatatcattacacaatatacacatatcaaaacatcacactgtaccttataaatatgtgcaatcgtatcaatttcttttaaatataattttatatggatttatttattaattttagtgtgttttctcccactttgtaaacatagagtatttggtttttggtcacccactattagattctctacaaaggaattatagcaagattttaaataaactgcctctttcaaattcctcagattaatctttgcttgaattactttttactcagaattgaagtgctgcagaatgacctgaagttcacatgcatttatgcatgttagtttgagtatagtgttcaatcctgtcaactgttcacttcatcattctttaaaactagttttagacctgtgttataccacatctggaatctaaacctaccatcaaagcagcaaaatctgtttcaggcaagccctactgcattctgctagaagagctaaaccgtgatttaaaatacccagaagtgctattctagttccttccaattgcctatcatccagtgttttgtaacgcagacacccttagggagagtcatggaggtctccaagcccaggcttataaaagaagaaaataaagaaaattaaaaagttcttcaggaggaggaaaactaatgcattatcccaggtaaagggccctggaataggaaagtctcctgagaaccagaaaggcaattatatgctaagattgggattcaatgttctcgtaagtcatatgactagacttgacttcttcagtctccctctgcacttcatgtattgccaatggtcctccacatagaatgaaagggagagaattatggctgaaagtcttaaaatgtctggactcagaattctacagcgctgacagatcatcctgaaacaaggcttgcctagtttagcctctgtctctgcaaatctactttactgaaagttcatttcagtgccgctcattggtaggaataaaataaatttcaacagaaaaaaaaaacaggagagaaagaagttattaaatccatttctagcctagaatgcaattttggggtgtgtggggacttagattcatgaaagtaaagatgaaagtttttaattttgaaatcagcacaaactcccaaggaggcaaggaaaagggcatggggatttctcctaccttctgtggttccaatctcgatagtgcctttcacttggctgaagcaccatagtgtgtcctgggtgagtgtcccaattcctgaaaacaacacaaggagacacttcaggttaggtaagagctcccagttgttcttaagagaccaacaagaaaagaaatatatagcagaatctatgcatttctaaaaggagacttgcacaccaggtatcatctcgtcagagaagagaccctagtgagtcctgagaggacggtcagtctgcaagtaccacgtcctgctgtgaatcactgctctgtctcctccgtttgaccaggccaggaccagtttgaactggagcaattggagtttgtcccttctcaggccctggcagcgtcctggagtggttacgaaggacttgcagtcatcccctgtgtgactggcccttttcacgggaatactaatgcttttgattgttttccttctgtgatggtggggaagagaatgaggcagttcgttaaggggtgagaggaaaagaaaggcaacattttttttttaaactgggcttcacagcttgcatggttgagcggccagtaaggggtcagatacccagagcacttccatctctcttgttcacttcttgactgcttgccaaagtcaggctgactgcagagtagggaaaaacaaaaaaaaaacaaggctggggatggggcggggtggctcacacagagtttgggagtcagtttctgacaaatgtggcctattttgttccaaggttatttttgtttcagatccagttggacatttgatggggctaaatgttctgggtaatagtgactcctggtttctacaaatatatgtagccaatactaatgaatatatcaatacatatattaagagatattctaattcctttacatattcaaaagagtcctttacagaacacttctggatagcaggggtgccagttttcttctcaacagcatgaacattccccttcaattcaactaggtttcaaaattcaagagaatattgcagaatcaaattttgggagatggtatgaatttaagaatgattaaattcagtaggaaaaaaaccacaaagtttcaaaaacaaattgacctttaaaaatgcacagggatctgagtagtcattttcattgtcagccatagatttttattgaattcctatacggaaaccttcatctgcttagccacacgagaggagcattgcctctcatatgctcttctcagtgttgttgacgggttatctgatggaagtagtatagagtcatcattaaaagtagagactttgcaattaggcagggtttatagttgggctctgacttgggacaagtttctaagcataatgagacagtttcctcatcttaaatggcaataataatggtacccatctctcagagttgtggatgttgaatatgattagcacagtcaagaaacttaataatggatattagtagtagtaaagattgattctaaagtgtttcatactaaaaaaaaaaaagaagaacattggctgagaaaatttcaggcactgtggtaagcacttgacttagagtaactccattcttacataaatcatggggagggcattattatcatccccactttacaggggaggaaactgagactcaggaatttttggtaactccctcaaggacacacctagcgcatggctaggttgagatttcaatcaagcctgtctgacttgcagtattcccagtgtgtagaggttggatacccatttgacagtttgggccctttagcccagtaaggcttcacagcaagaatctcatttggaaggctgagctggaatacagtttcagatatcaagtagtaaagtatcaatgtctcctttgagatgacacagggctaaaacttcctaataaaattagcacctagaaggggagaaggaaggcctttagcagcatttattagtgcatagacagacacacccacagtgctgatccttgcttatactttctgttctggccttggattccagcatcagacattctttgacaggttcttaccctaccttgtgagttgtcagtgaccctctctacactgagtcaattctgctgttgagatctgagacacatctgtcttagggaacattagctatagatgagatttctccccagtttttgtcctggcacagttcctatatcaatagttatgattctggatgtagatgctgtttctattttcactaaacatgtactttaaagcaagcagacatatgcaactctgaaacacatacatgcatacatacaaacctaggcatatttaaatatgagcctatgtctagatatttgtactacttcagagaattttagctctaggaggaacctggcttatgtgtgaaattaatttatttcacatctgaaaaacccaaatcatggaagttactgacttggtgaattcactaggaataatgtgaccaattcacataccaatgccagttcctga

SEQ ID NO: 318410 - DNA, 4001 bp, Homo sapiens
actggacattctttctgtctagaacttccagggatgtttatagaagatgccacctttacccccagatgtgtgtgtgtctttttatttctttcagagcttgaactcttttactccccccatcacatttctctagcagtcttttgatttgattaaatattacagaaatgttagcatccaagaataataattttaaattaatacaccttgcaacattgtcctaaagcatttccacatacattttctcgcatggatattacaatgtgataatgcaacactttgtatgagtggctaaggataaaaggcctacaggtagaaaatgaaagcaaaaatgcaaaagttttggcactgggggaaaaaaatgcctctactctctattcacacacaaaaggcagaatgagattccacctgctgactttcccttcctgcccgcacagcactagtgcttatgtcagaacaagctgggagagagggagagacgacaatttcacctcttggcaaagctcagcttgctgaacccttttgctttctgctggctgttgattcagcagaaactactgctgcagaattcataatggtgatttttaaaggccccaccgatcgcgttgctcaccccacgtgtcagcctcattcgctgcccgccagagcactatttccccagccacctttttatttttgctaatgcacttccaaaaggaaagaggttcgcccgtctgcaaagggctttttggggttttgattgtctaagcaggtaacctggccggccggggagatgaatgggcaggaaatgaaaccttgccctccctgcagccactgagagacataacatcgtttcgctcagggaggggggaccaaggtcctactgggcccctcccttcttatctccccccaagacccctgcgaacatctcggggaaggggtcatctgccttcctggggtcatctttctgggcgagagccccaccctgaaaaagcctaatccctgagggccattttaactcccgtgggcgccgggtccacctgctgctgaacgccgagctcgcctcgcggagcccggatggatgcgaggtgcactggggctgccggggccagccgagcccccgccccagccctagggcccggaggagtctccgccactacgcgcccagctgcccaggaagcacagtgatccgcaacttgcgcccggccccaacggcggaatgcggcggggctggcgttaccttcggtcgcatagctgtggtcgcgcaggaaactgttgttgattttgcgggtatcaatgtcctcctccattgacagcaggcttacttgcgtgggaaccagaagccggcagacaagtatccatgatccctccccgcagccagtctcacaggagaggggggcaggggagccagtgggactgcaccatggtccgagcctgaggaggagacggggaggcggagagaaaaaaaataaaaacccggcaatggagctgtcacctcctccactcgggttctgcgaggctgcggcggctcctcccgcgcggtgcgctcactccagctccagttcccagcgaggatgctgcgcctgcctccgctgcctccgggtgccaagatacgccgtgccccgaggggtctggtcccgcccgcccgccccggaggcgctcacaagcgggtctggggagatgcccaacaggttcccctccttggcagccgctccaaaatgcaaaaaagatccctcctccccctgggagagcgggcagccgcgacaaaatggtgcctttctggacccgagctgcagtggcgagatggcagggacaggattcaggcttgcctggccggaatgagggtgctggtcccacgggagggcggctccggcaggcgggggtagggaagctggcggggagctgggcagggcgctgcagccggcgccagcgcactcaccctcacacccacacgcgcgcactcgcagctgctgctgctgctgctgctgctgctgctgcaggaggctggaggcggctggtgcattaaaggcgaggctcctcccaaccgcgtcagcagccccacgactctttcccagcagcagtggtggccgaggcagaggctgcggctgctctttgctgcagtggggcgcatgcagccgcgaatcggcacctgggcagcaagcgactagcttgcaggttcaggtggaacgcatagacgcgctcttccaacctcctcccctctcgcgccactcagctaagggccacgtctacgctagcacccagagcccctagctccctgcctttctccggacgcctgaacttgagaacagcaaagagaagtaggttcctttggatagtcaggaagtctacatccaggtcccttttcctcacccttatatgatgcatgtggtcccttggtgaatttaaagggcgaggtttggggctcgaagcttcagaaaaagaggagaaagtgggaagtgccgctcagagcctatcttaagccctctagtaggaataggagggggatcaggggccagaactttgcaactggttcccccattcctaagagtcaaaataccttctaactgtaggaggctggtgttcaataaagcatctgtgtctacacaggtggaggaaagcaccagactagtaaacaggatcagtctgaaaaagtccactctcccttgcagtttgcacttcgttttggacaaattattgcagcctctccgttaggttttgcttgtgcaggaacaccttctatttgctgtcagcatggaaggtacattgaagcacagaaacataagcataagagccctgtgcccacagagagccactgctaccctgggggaatttcaggagtccaattaatacagaaaagagacctgtcttcctacttcaactaggaagaaaatgtagaattccctccccacccatgttttcccaaatttcaaactctacttttgaaagaaaatgagattactattgttatgaaacaaccaaaaacatttaatgaagcaacccaaatcactagaaagccaatttggaaaagacatcaaccccaatcagtagaaagccaattggaaacgacatttcctaggtttcatcttgtagaaggtattcatttcaatgggtaccactgtagggagagacatcagcaaatgttttgctcagttaagctccacaagtttagctagatgggcccagagggacctatgagttaattatatacatacaatgcttcggctaacacaatttagaaagtatttgaagttcagaaaaatggaaaaacaagtccttaactgaggttgggaattgtcattagatttccatgcagtatggatacttctggtagatagaaaatgacatcttcctcatctccagaaattgactgcatatccctgggagaaaagagcagaaatgttccttgacatagttattttgtgtgtgtgtgtgtgtgtgtgtgtgtgtgtgtgtgtgtgtgtgtggtggggggagttcagttcaactttcaatagattctattttattttcatctagtgcttaagacttatacacttgtttgttcaaaatccacatttaaaattttagtaacaggtgaagacgggtacaagttgatttaatccacttcagtacaagttgtcgtggctggttcttccatgggatgagctgtatctatcaccgaggttccaacattcagtccttttgtagttacacattgcagcttctcttggatattggcacaatttggagtaggagcagagtggggaaaagctaagttcatctcttagtgaatcaaaatgatgagaagacattgtgccttcggttggaatgatcttaaaattgtttcaggaggccttggaatagtatttgggaaaatttcccctgtatctttctgaatcaagggctagattgggacagagctgtgtgatgaatcaggtaggcccaggctcattggccaggctgtgcttgaggaattttccattgtaaccaatggggagaatgtcccttccacagatcgagtctctgggtttatttatttttctttt

SEQ ID NO: 318411 - DNA, 4001 bp, Homo sapiens
tgtagcaggtttttttctatatgatatagaatgtttcgtttaattaatacacaagacagcaactgagtagaccaagtgtttaaattttcaaagtctaagcaggcaggagaggacaggaggaccaatcagaaatacaaaagtcatctaggcagtttctctatggctttagatctttagtatttgaaaagttctcctggagattttagtccatgccattttttcattcctctcatcccctcaatatggataaggacttactaagtttttctccacgaggaagaaaagatttctcagtggaccatttccttttgccaccaataaatttttaaagggaaatgtccaactgtaaaaaaaaagtccatgagatatcaatgtctatgaaaaataccaccctcagtctcaattcaagggtgatcccaaatgtctactcccttccctgaaggtacggataaaaaattaccttatgatataatacaagcttccttcattataaacacacagcccccagtctcaggattctacctggaggatgaaaacaagagtgggttttcagaacaggctggtcgccagctcagttccaagagagtgtggctagacatgagttggagtcacaacacctcagcatcctcaacccttttcaatcaaatgccactagtaggacaatccttaagcctgaaaaatgtccagccagttgcttttcttgaaattgttctttttctaggatatgtcagatctaaaacacaggcacatcacatatagaaggtatacaaccagcttctgactatagaaatgtggaattctgcagtgcttagttgaaagggaattgccagaatgtttacaaggcacacatacacgtatgcatagcatgctaggttagaaggcagcagagaaggtccccagaaaaaaacaggaaatggggaaggtgtagaaggctcagcctaccctctctttaaagcattaacttaggacccccagaaaccacatttcatgtaagtgctgaaagtcagctgtgttcttactgctctgtaacccaagtacagactccaagtgaaccaatccaacaatcaacactccacagtgatgtactaagctaattctactttgctaattgctttcttgggcatgcaccaagttatcaaacagacagtgacaaaacagagagctcggacagatgtatgtggcagcacctactgatttttgttttcttgacactggttccaatgacttgtttgcatgttaaatgaaacaaggaaaattggcaaaatatttctgagttattttctaattagctgtgtcagctttgagattacctctgcaacattattctgttcttcagaaaacacttccctttccttgtacaagacagactgatttcagaagcagatctaagtctgttggatacaagcttttgccaggaatgacagtcacctagtagctacagaaagcagcatcagcagaacccgtgggaagtcagacaccagcccacttttcccacccacccagacactctccctctctggtctgtaccttctgtgtggcagctggaagaaaggatggtgttcggaggtctgaagatgtaaggcaggtaacgagagaagcatttcatcttccaaataaaaaataaaaatctaaataaaaaaacagtctcctgaatccataaggattctctcggccttttaagctggctacatcaccaatatgtttatgtaggttctttcccagatttgcaaagctggggtgcccgaggaataactggagatgggtcccattttgccatcagcgccaggaagcactgccttacatttctgcatgcagctcaaactcagaagcccccaagcaagccgggatatagcctcttcattggctgaagctcctctgaacaggatttgctgagtaagtcagtcctgcctgtaaacacacgctgaaatgctctgcctgaaacctctaccttttcccgtgtggtgagtttctcttttcgcaagagaaatccagcaggatatgggagtagtgaggataagtgaccatctcttatttagctgaaagatcagatgaaacaaagacagcatagtgttctgccctggagagagatggctgttaaaaggagccacccgtaatgccatggatctcaggaatattaaagtacagtgcaatgaaatgggtctctgtccttgcttaatctagatttagttctattttttaaaatactaaagcccaaacaataggaccatttatcatttaggtgaagccaaaagctggattgagtagtcggtgacagagggctaacacagatagattctgtgctccactactgcctctttcttcccctgccagccttaacagtgaagcaataacttagttctgagttattcactctccaaatagaaagccacaacgcaagaatagagactaaacccaaaggaactgacccttcatcaatctgtgaaccctgatggcattaaaaaacatggaaaaactaagttgatacaaggattacacaactttaccaaaactctcactgagatttcaaatgagagagagagagaaaaagagagacagaggcagagacagagacagatagactgatattatttaaggacatgaccaaccacaagatataagtaatttgggatggggaattggtttggttttggtccatgaaataataatgactttggaaaccttatcactggaaggcaagaaagcacagggcttcagtttggggtttataagttctgtcaaagacactattgtatataatgaagagaaagagtcaaatgtccttcatgctgcattcagaggcacaaggaaatgatttaaatgtccataaaagaaaaccaacatttccctgagaaagatttttaaaaataaaataaaagtgtgccttgaaaatctgatggaataatttttaagcctttatgggctctcttccttacaaaaatatttaactcagcattggagaaatgtgctggtctccccaggagggaaaaaacaaagtcattagagtgccaggacagaccatggtcatgtcaatccattcccccaccagtatgccacttctctggcccttggactactatggcatggtgacaaactgctggcagtgtcgggccatttagttctgcaataatcatattacctccttagacccagggacttggcaaggtagggccatcctaagtaaggtgctgtttaaacagtgcctaagtggtctggtttgtttttgtgggtaatttcaaactagtgacagaagactatatgcaggagtgtctccctaagagatacttcatatctaacctctggccagcagtgagggagtagaaggagtgtgggctttgggttcaacctgaccctgacagtttgtatcccagtgcattcacttaatggccaggtagaaatgaacaaattttaacactgcaaacctcagtttctccttctataaaatgggaagaataacaaggttttcctcatgtattcttgaaagaagtgagacaataggcatagagatctggcacattgcaggcacgtgataaactaccaatgttgctgctgttagccttctctgagcttctatgccatacaccaacctaagagtagctgaagaggagatgtgcttaagaggagtgaggctgcagttagacagccagggtttaatcctgcctttgacattgacttgctgtgtgatcttgggcaacttacttaacatattttagcctcattacaggcctaacaaggataataatagagtcttaaacgacactgttgaggatatgataggatagttcatataaagggcttagctcagtgtctagcacattgtaagtgcttcctaattttaattactattgtctataacagtagtatcagcccttaattacagcatattactttatttacttacctatcttatctaaataatgaaagtacaaactcttgagggggagatcaacgtctaattcatctttatatccctactgcctcacctagtgcctgcacaaagtaga

SEQ ID NO: 318412 - DNA, 4001 bp, Homo sapiens
catgtgcaatggaatattactcagccataaaaaagaataaaatcctgtcatgtggcaacatggataaacctgaaaggcattattaacatagttcacttaatagtgaaataagccaggcacagacagacaaataccacatgttctcagtcatatcaggaacctaaaaaagttgatctcatagaagtagagaatagtgaatagtggttaccagaggcctgggagggtggtaggaagatggaaagagattagtcaataagtataaagtcatagatctgaggaataagttttgttctatagcacagtagggtgactatggttaacaatatcatatggtatctctcaaaacagctaggagagaggattttgaatcttctcaccacaaataaatgataaatatatgaggtaatggatatgctaatcatcttggtttgatatcattacacaatatacacatatcaaaacatcacactgtaccttataaatatgtgcaatcgtatcaatttcttttaaatataattttatatggatttatttattaattttagtgtgttttctcccactttgtaaacatagagtatttggtttttggtcacccactattagattctctacaaaggaattatagcaagattttaaataaactgcctctttcaaattcctcagattaatctttgcttgaattactttttactcagaattgaagtgctgcagaatgacctgaagttcacatgcatttatgcatgttagtttgagtatagtgttcaatcctgtcaactgttcacttcatcattctttaaaactagttttagacctgtgttataccacatctggaatctaaacctaccatcaaagcagcaaaatctgtttcaggcaagccctactgcattctgctagaagagctaaaccgtgatttaaaatacccagaagtgctattctagttccttccaattgcctatcatccagtgttttgtaacgcagacacccttagggagagtcatggaggtctccaagcccaggcttataaaagaagaaaataaagaaaattaaaaagttcttcaggaggaggaaaactaatgcattatcccaggtaaagggccctggaataggaaagtctcctgagaaccagaaaggcaattatatgctaagattgggattcaatgttctcgtaagtcatatgactagacttgacttcttcagtctccctctgcacttcatgtattgccaatggtcctccacatagaatgaaagggagagaattatggctgaaagtcttaaaatgtctggactcagaattctacagcgctgacagatcatcctgaaacaaggcttgcctagtttagcctctgtctctgcaaatctactttactgaaagttcatttcagtgccgctcattggtaggaataaaataaatttcaacagaaaaaaaaaacaggagagaaagaagttattaaatccatttctagcctagaatgcaattttggggtgtgtggggacttagattcatgaaagtaaagatgaaagtttttaattttgaaatcagcacaaactcccaaggaggcaaggaaaagggcatggggatttctcctaccttctgtggttccaatctcgatagtgcctttcacttggctgaagcaccatagtgtgtcctgggtgagtgtcccaattcctgaaaacaacacaaggagacacttcaggttaggtaagagctcccagttgttcttaagagaccaacaagaaaagaaatatatagcagaatctatgcatttctaaaaggagacttgcacaccaggtatcatctcgtcagagaagagaccctagtgagtcctgagaggacggtcagtctgcaagtaccacgtcctgctgtgaatcactgctctgtctcctccgtttgaccaggccaggaccagtttgaactggagcaattggagtttgtcccttctcaggccctggcagcgtcctggagtggttacgaaggacttgcagtcatcccctgtgtgactggcccttttcacgggaatactaatgcttttgattgttttccttctgtgatggtggggaagagaatgaggcagttcgttaaggggtgagaggaaaagaaaggcaacattttttttttaaactgggcttcacagcttgcatggttgagcggccagtaaggggtcagatacccagagcacttccatctctcttgttcacttcttgactgcttgccaaagtcaggctgactgcagagtagggaaaaacaaaaaaaaaacaaggctggggatggggcggggtggctcacacagagtttgggagtcagtttctgacaaatgtggcctattttgttccaaggttatttttgtttcagatccagttggacatttgatggggctaaatgttctgggtaatagtgactcctggtttctacaaatatatgtagccaatactaatgaatatatcaatacatatattaagagatattctaattcctttacatattcaaaagagtcctttacagaacacttctggatagcaggggtgccagttttcttctcaacagcatgaacattccccttcaattcaactaggtttcaaaattcaagagaatattgcagaatcaaattttgggagatggtatgaatttaagaatgattaaattcagtaggaaaaaaaccacaaagtttcaaaaacaaattgacctttaaaaatgcacagggatctgagtagtcattttcattgtcagccatagatttttattgaattcctatacggaaaccttcatctgcttagccacacgagaggagcattgcctctcatatgctcttctcagtgttgttgacgggttatctgatggaagtagtatagagtcatcattaaaagtagagactttgcaattaggcagggtttatagttgggctctgacttgggacaagtttctaagcataatgagacagtttcctcatcttaaatggcaataataatggtacccatctctcagagttgtggatgttgaatatgattagcacagtcaagaaacttaataatggatattagtagtagtaaagattgattctaaagtgtttcatactaaaaaaaaaaaagaagaacattggctgagaaaatttcaggcactgtggtaagcacttgacttagagtaactccattcttacataaatcatggggagggcattattatcatccccactttacaggggaggaaactgagactcaggaatttttggtaactccctcaaggacacacctagcgcatggctaggttgagatttcaatcaagcctgtctgacttgcagtattcccagtgtgtagaggttggatacccatttgacagtttgggccctttagcccagtaaggcttcacagcaagaatctcatttggaaggctgagctggaatacagtttcagatatcaagtagtaaagtatcaatgtctcctttgagatgacacagggctaaaacttcctaataaaattagcacctagaaggggagaaggaaggcctttagcagcatttattagtgcatagacagacacacccacagtgctgatccttgcttatactttctgttctggccttggattccagcatcagacattctttgacaggttcttaccctaccttgtgagttgtcagtgaccctctctacactgagtcaattctgctgttgagatctgagacacatctgtcttagggaacattagctatagatgagatttctccccagtttttgtcctggcacagttcctatatcaatagttatgattctggatgtagatgctgtttctattttcactaaacatgtactttaaagcaagcagacatatgcaactctgaaacacatacatgcatacatacaaacctaggcatatttaaatatgagcctatgtctagatatttgtactacttcagagaattttagctctaggaggaacctggcttatgtgtgaaattaatttatttcacatctgaaaaacccaaatcatggaagttactgacttggtg

SEQ ID NO: 318413 - DNA, 4001 bp, Homo sapiens
gaaacaaaaaaggcgtgattctggttcttacttgtttacagtcttagcagtggagagaaacattcatcaatcacatgaataaatatataattagaaactgcggcaagtgccataaataaaatggttactatggaaacatttaataagaggaccaggaagtaaaaatgataatgcactgtaagggtgtcaatatacaacgttcaaaaaaacagcttcttcaaaatttggatacataaaatttgaaggctacctgtaaattcagtattgatatataactacctcagagttatgatcaaagtgcttcagaaatccagtccagactggagaagtcacaggcttcccagagaagatgatagctaagtgctaaaggttgaccaaaagtcagttcagtggaagagttgagggaaattattcccggtagaaacaccatatctgggtaggaatccagaggaaaaaaaagtacaagaccgattctcgagtgattttagaatgggtggagtacaaagtaaggggttgggagaggaaggtaatggaagatgcactaagaaggtaaggagagatcacatcataaagggctttatatgccatgtgagggagtttgggctttaatgaaaataatgagctgggcgccgtggctcatgcctgtaatcccagcacttttgagaggccgaggcaggcagattacgaggtcaagaaatcaagaccatcctggccaacatggtgaaaccccgtccctactaaaaatacaaaaattagctgggcgtgcgcctgtagccccagctactcgggaggctgaggcaggagaatcgcttgaaccccggagacggaggttgcggtgagccgagatagcgccactgcatgcgctccagcctgggcgacagagcgagactccgtctcaaaaaaaaaaaaaaaaaaaaaaaagagagagaaaataatgacaaatcattgaagttttttaagggaaggtgctaaagtacgatttgagcttagaccacatttaaaatgtcttaaatacttaaggaaaacatttcacagaaaaacaagataacaaaacaacaaagacaagaaaacttaatctaccccttttcccaccccttttatttgataataatttgtgattattcctcgttagtgacaaaaagactcagcccatcgtatcaagagcgtgatttcaaaaccacagacttcgggttttggatgaaaacaaatctgtgatctaggaagcttacgtcattttccctagatgcgaaaatttattagtggaagtgtcagagttgaaattatctttacctaccatgattcgaaataagcaccgccttcctctcgcgccccaacacattaatacattaacaccactcctgaactaaagccttaaagagaactggtacccttttgcatacctaaataagagttcgaaattccaacttcatgtggctgctgtggggagtaaatgagaggagccaaacacataagaataggaaaatgttagttttagcatctgtcataacaaatcaatgatcaaaagtgttagatattatcaaaaagacgttgtactacgcttaaatcactatttcgttaagacatgcaagtatggagtagccagaagtgagaggacggccctctgttctgagggcacaaaactccacacatcatccctcttcggatctggcttgaaccctcctactcagcggacgcagcactccaattcgtcccggtactatgtctgcagctacctttcctcttcttggccagtgttgcctccacaggtaaaggtccaacccagcgctcttcgttctcctcatcgttctcctgggacaccgccactgctactgccagctctctttcgctgagttctgttttttccggttcctccgggtcccggcgccttctacgtctctgctgaaaatcgctaccactttccgccgccatgttgttcgcatcgtcagaaaaggcgcgacacaaaactcagctaccaatcccaaagcagcggcgcagtcttctgtcagcgtccgagcgagtttcgggattggctggggtgggaatgagcacatccaatgggcatgcagcgcgcgcagaagtccggggctggcaagcgcttcctgcgcagcgcctaggcgacctggagtttgtgacgctgtgatggtaagacctgggccggggaggttgatataacggttgaatcttgtggagctccagtcctgaaggtgaaacccttatcgccggccaactagatacctgacttcccagccgggctttgagtcccgttcttctcggcttcccgcgcgccaacgcaagctccataacctcaccaatatttagagaaagatggaagggtggggacagaaggaagtggttaactcgcgggtttcctttcagatgcactaaacatgttttctctcctgacctttattctctcacacactctctgaagaaggtggtgagtgcttgttactgtttctgggggtggggtggagaagcagctacttcaaataaccaaaagacctagggcagaacgggtcactcttctttcttctctctggtataggatttcatctcctagcagtcatctgaactctttctcctcctcctcatctgtcttcttcatttttaaaaaattaggtaaaaagcacataacataaaatgtattatcttaatctcttttttaaaaaatcaaatacagcttgtcaaaatgacctccgtaaaacacttcttttttctctgcaattacttttgcaccaacctaataaaatcctcgtcgtaaatctcttctctacttttgccttgagataggcaccacgtacagggaaggaactgcccccccatagtaggcactttattttatttcaaaggttcccattatttgaccattctacctagcaagtctcatttcttctctgccctctgctctcatcagactactttcttttgtgtctcacaaatttcccttgttcgttcttgcctcctactcttatgtttttatgcttgaaagcatctccacagcgatttagccttcatgtttacagcttctcatctttcagagaccaatgcaataatgaggatgaagatgataatgataatgataataataatgtagctagttaacatttattaagcattattatggactaattccttccgggttggtttttctaagcttccctatcctgaattccgatagtacttgcaggcagtgttgtatactttaccatttcatagcacttctgactacctgaaatcatatcatgtatttagttatccattcatttatattgtctgcatgagaatggaagctctacaagtacaaagactttttcatctacacagctaaagccagtgtctgaccaatggcacacattaacatatttgttgaataaatgaatgtattttagaattatgtgggtattttttgcttatttcatgtatattaatcttttcccaattaatagtacgagtttctttaagtatagtattatccctaaataaagagatactgtttttcttcaataaatgattaagtattgtagtcctaactggggacctcaaaaagttgacttgttccctttccaggaagataggtttaaggatacaaaatgtgggaacgggaaaagttcaactcttaagtgtgtgtgtgtgtgtgtgtgttttaattaaacaactgaaatttatttctcacaggtctagaggctggagattcaagatctgggtgccatcattttctggttctgttgatgaccctcttccaggttacatacagcttacatcttgcatcctcaagcggtagagagcaaactcttaaatgtttctatatgtttttattctactgccacattaaatcgccaagccagataatttgttgaatatttatccctcaccctccgcccccaccacatgtgcagagttttgcattacttttgcatattgataatgtattttggtggtcagtaaagaaatatttatgtttgactttttcgcttaaaaatattctaaaattcatgatgact

SEQ ID NO: 318414 - DNA, 4001 bp, Homo sapiens
acaaaaaaggcgtgattctggttcttacttgtttacagtcttagcagtggagagaaacattcatcaatcacatgaataaatatataattagaaactgcggcaagtgccataaataaaatggttactatggaaacatttaataagaggaccaggaagtaaaaatgataatgcactgtaagggtgtcaatatacaacgttcaaaaaaacagcttcttcaaaatttggatacataaaatttgaaggctacctgtaaattcagtattgatatataactacctcagagttatgatcaaagtgcttcagaaatccagtccagactggagaagtcacaggcttcccagagaagatgatagctaagtgctaaaggttgaccaaaagtcagttcagtggaagagttgagggaaattattcccggtagaaacaccatatctgggtaggaatccagaggaaaaaaaagtacaagaccgattctcgagtgattttagaatgggtggagtacaaagtaaggggttgggagaggaaggtaatggaagatgcactaagaaggtaaggagagatcacatcataaagggctttatatgccatgtgagggagtttgggctttaatgaaaataatgagctgggcgccgtggctcatgcctgtaatcccagcacttttgagaggccgaggcaggcagattacgaggtcaagaaatcaagaccatcctggccaacatggtgaaaccccgtccctactaaaaatacaaaaattagctgggcgtgcgcctgtagccccagctactcgggaggctgaggcaggagaatcgcttgaaccccggagacggaggttgcggtgagccgagatagcgccactgcatgcgctccagcctgggcgacagagcgagactccgtctcaaaaaaaaaaaaaaaaaaaaaaaagagagagaaaataatgacaaatcattgaagttttttaagggaaggtgctaaagtacgatttgagcttagaccacatttaaaatgtcttaaatacttaaggaaaacatttcacagaaaaacaagataacaaaacaacaaagacaagaaaacttaatctaccccttttcccaccccttttatttgataataatttgtgattattcctcgttagtgacaaaaagactcagcccatcgtatcaagagcgtgatttcaaaaccacagacttcgggttttggatgaaaacaaatctgtgatctaggaagcttacgtcattttccctagatgcgaaaatttattagtggaagtgtcagagttgaaattatctttacctaccatgattcgaaataagcaccgccttcctctcgcgccccaacacattaatacattaacaccactcctgaactaaagccttaaagagaactggtacccttttgcatacctaaataagagttcgaaattccaacttcatgtggctgctgtggggagtaaatgagaggagccaaacacataagaataggaaaatgttagttttagcatctgtcataacaaatcaatgatcaaaagtgttagatattatcaaaaagacgttgtactacgcttaaatcactatttcgttaagacatgcaagtatggagtagccagaagtgagaggacggccctctgttctgagggcacaaaactccacacatcatccctcttcggatctggcttgaaccctcctactcagcggacgcagcactccaattcgtcccggtactatgtctgcagctacctttcctcttcttggccagtgttgcctccacaggtaaaggtccaacccagcgctcttcgttctcctcatcgttctcctgggacaccgccactgctactgccagctctctttcgctgagttctgttttttccggttcctccgggtcccggcgccttctacgtctctgctgaaaatcgctaccactttccgccgccatgttgttcgcatcgtcagaaaaggcgcgacacaaaactcagctaccaatcccaaagcagcggcgcagtcttctgtcagcgtccgagcgagtttcgggattggctggggtgggaatgagcacatccaatgggcatgcagcgcgcgcagaagtccggggctggcaagcgcttcctgcgcagcgcctaggcgacctggagtttgtgacgctgtgatggtaagacctgggccggggaggttgatataacggttgaatcttgtggagctccagtcctgaaggtgaaacccttatcgccggccaactagatacctgacttcccagccgggctttgagtcccgttcttctcggcttcccgcgcgccaacgcaagctccataacctcaccaatatttagagaaagatggaagggtggggacagaaggaagtggttaactcgcgggtttcctttcagatgcactaaacatgttttctctcctgacctttattctctcacacactctctgaagaaggtggtgagtgcttgttactgtttctgggggtggggtggagaagcagctacttcaaataaccaaaagacctagggcagaacgggtcactcttctttcttctctctggtataggatttcatctcctagcagtcatctgaactctttctcctcctcctcatctgtcttcttcatttttaaaaaattaggtaaaaagcacataacataaaatgtattatcttaatctcttttttaaaaaatcaaatacagcttgtcaaaatgacctccgtaaaacacttcttttttctctgcaattacttttgcaccaacctaataaaatcctcgtcgtaaatctcttctctacttttgccttgagataggcaccacgtacagggaaggaactgcccccccatagtaggcactttattttatttcaaaggttcccattatttgaccattctacctagcaagtctcatttcttctctgccctctgctctcatcagactactttcttttgtgtctcacaaatttcccttgttcgttcttgcctcctactcttatgtttttatgcttgaaagcatctccacagcgatttagccttcatgtttacagcttctcatctttcagagaccaatgcaataatgaggatgaagatgataatgataatgataataataatgtagctagttaacatttattaagcattattatggactaattccttccgggttggtttttctaagcttccctatcctgaattccgatagtacttgcaggcagtgttgtatactttaccatttcatagcacttctgactacctgaaatcatatcatgtatttagttatccattcatttatattgtctgcatgagaatggaagctctacaagtacaaagactttttcatctacacagctaaagccagtgtctgaccaatggcacacattaacatatttgttgaataaatgaatgtattttagaattatgtgggtattttttgcttatttcatgtatattaatcttttcccaattaatagtacgagtttctttaagtatagtattatccctaaataaagagatactgtttttcttcaataaatgattaagtattgtagtcctaactggggacctcaaaaagttgacttgttccctttccaggaagataggtttaaggatacaaaatgtgggaacgggaaaagttcaactcttaagtgtgtgtgtgtgtgtgtgtgttttaattaaacaactgaaatttatttctcacaggtctagaggctggagattcaagatctgggtgccatcattttctggttctgttgatgaccctcttccaggttacatacagcttacatcttgcatcctcaagcggtagagagcaaactcttaaatgtttctatatgtttttattctactgccacattaaatcgccaagccagataatttgttgaatatttatccctcaccctccgcccccaccacatgtgcagagttttgcattacttttgcatattgataatgtattttggtggtcagtaaagaaatatttatgtttgactttttcgcttaaaaatattctaaaattcatgatgactgat

SEQ ID NO: 318415 - DNA, 4001 bp, Homo sapiens
gccagcgaacagctcccgccggttcccccacaaccccgcggcccgaaaatgacccctccagaggtggggtggagagtagcaaaaacaagccctggtctgcgtgctccccagagacgctgagggtccctccctcgtcccggctaaggccaggcagggcctgacccagacaccccctgtcacacgctgccagtacccgcctggccccgggcactgtccggcgggagggcagaggtctgttaggccgggtccacggtagactccggccccaaacacttgggactgtgaagcaggtgaggagagggagggagagggaaccccaaagtgccaccggccgtcccatccgttctctttccttctccaacgccagaaaacttttgtcacagagatcggggaggcgcgggccagcggccaggaccaggtgctccccacccacccggccccgtgtcactcctatccgacccgcctccctgacaggcacccgcgcccgccggcgccggcgccggcgccccgggagagagcgcgcgggctgcggctacgtacggttgttggggtcgctggtgtgctggttgagcgggatgatctccatgcgctgctggccatacaggtaatagtccagctcctctgcgctgcagcggaagcgcggggcgccgcgaccctccccgccgccgccgccaccaccaccgcacttgacgggcccggggccggaggtggcgccgaggcacagttccttggggggcagcggctcggcggcgacggcagcggcggctagaggcgcgaacaccggcagctgcgacaccggcagggccgagagaccagccagcgcggcggcagcggccgcagcagcgcaggaggaggcggaggaggcggaggtggaagaggaagccggcgtggacgaggcggaggagagagaggcgggccgcgggcgcaggctgtccggcggaggctcagcgcgctccgggggcgggggcggcggcggcggctgaagaggctgcggcgcgctcaggagacccgcggcgccgctgcccttgagcgggcctgcgcctccgtgagggaagagttgctgccagtgctgcaggtaggctgggtccactttgaggaaggccgaaccgccggggtctccgggcttcagcatgtccggcgcctcgaactgggggcagagggcagggaagagggggcgcgtgagctgggcgaaaggggccgggaagagggccactgggaccctggagaaagtgcccgagccggtggttcagccggcggccgcccggttccgcggctccctcttcccaactccgcttgggcgcaaagtttactccgaagctgcggcgccgcacagagggagctgtgtgcaccctgctctgcctccccgatcgcagcgtccagctcccatccagcaatgctggggcccgacaggagggcgctgccccgtagaactcggctgcaggacgcagcccccgccctcagccagcgcccggagccgacccgagccggcgtggcgcagcgcccgagccgcgttggcctcaggcgccaggaggcagaacagtctcgccgcccgcccccaacctaggaccaccaaccttcctatctaccaagccctagactcttaagtcccagaccagcctcaccttacctgaaaactcggtgctgccggtgggtgcgtgcgggtgtctcggtgagcgtgcgggtgcgcgagagtgtgcgccctgcgtgcgctacatgcccctgagcagcgcgggaggagagtcctagagattgtgccgcccggaaacctcccgacctgcaagcgagaaaattgggaggcccgcggagggcgcgagagtgcggacggacctgggcgcccgactcaaccgccgtgggctgctgcgcttggccgctgccgcgtcctggctccttggttccacgctctggcagcttcccggctggacacgtgggttttacgacagcacaaaatagagtgagtgtgtgtgtgtgtgtgtgtgtgtgtgtgtgtgtgtgtgtgtgtgtgtgtgtgtgtgtgtgtgtgagagagagagagagagagagagagagagagagagagagagagagagagaacggaggggggaggggaggcaggccagaagaaggggaggggagagggaagaaggaagttctaattcggcccgacccacatcgccagagcgcctttcccgcacaaactcctccgccctcccatcccctgtttttttggcgtgacgtctgccgctagcctgttgtctctttctgcccatgatatgtcttttctgggtcccagctcagtgccctgatcttgaaagcagtggaaatgcggcaacgggaatgcatctccgcacacgctgtggtgtccgcgctggagcaagcccgcgccgccaggaccgggtttgcgcttttgcccggctcagtttttcctgaagtgcttctgggtgccagagtccactcgcccgccacgcaacctctaacataaatcctccggggagaaaagttgggggcggagcgggacgggttgcgcgctgcagtgaaaccctctgtctgcagcccaggagggaggcttgtcggtgcagggaggcgtaggaccgagggtcctgagaccgagagcagctggtcctggagggactcaagcttggccgtggggctgggaggcggctgcaatggagtctgcactccacccagcgctctgctgaccccttctcgggttgtcttctggagggctctttccctctccttcttggggcccggagacaagtatccagtgttacgtctggtggcacaactgctccgggacacgggcgaggctgtttgcggtcagctgcctgcggctgccgcaggaggtcacgcataggtttctctacccaaaacctggtgttagaggggcagggtgggagtgcagccccacctccaccatgtcctctccccagactttgtgccagggcagcccttcgatgcagtctcgcacccacgaaggaggcacttgccccccagctcttcctggcattttcggtagtagatggtagagggcacaggcagggtgtgtgaaattgaccgactcaggaggtactttcccatcgccggggttctggccataccgtaaagagaagaaacggcatttatctttttccaaacaacctaacttatttagcacttgccaatctgagcaattaatagccattctttcctgatttctgcttgtttctttttctcttcccaccactcaagttttctgaacctgggaaacgtgctgttcagacttcatccgggtctcattcaggatgcttcgatgttggttggaagagagttagaccgaaaatgttttgactggcgtcgttatgacaaggtcatccgtcattgttggatagattgatagcacccaagtttaaggcagacaccacgagggaaagcccacggcgctgtggtcccggaggctaaccaggcagtgtccgcagacctccagcaactccatcgggaggagaggatgaagttccaggcccgtttcaattaatctgctcgcagaactgccgaagagtggcttgtcgggccacgggagaagaaacaaatgctctttctcacactctcctggttcattgctgagaaaccaggacactcctctgttccctgggagagacagtgaactccagggatggaagtccggactccggcggcggtcccgtcatttgccttcttgtttctgcccaaacccagctagttccaagcgcttggtccccaagactggaagtccccaagaacctacctctacctgtcccaaccctgcctcccccctaccctttcaccccctgccaccattagaaagtctctggattttgaaatgctagttgcagcagctgcttccgtggcctcatgccgcccacactctgggaagcggaggagggagggttcctctcgtaataagattagctgacctgttaatgagagttttggacgtgccgggcgggggtaggcgctttatgtccatttaatccacctacatgcggagaaggcattatcattaaccc

SEQ ID NO: 318416 - DNA, 4001 bp, Homo sapiens
tgtgcccagcacttcctgttacctatagtaatcagtgcattatagttccttttcacattcctatagcgagttttctcccagtctcccatctctgcccattcttccttggtgaagtatatggaaatgtctttgaaggcatctttgacctagaggaagtaacagattccatcagtgatttactagtacacatcaagctggtccttttcctctaccctgtgtgtaggacatagcctggggcctctgggagtctctgtgaaacataaagatcttccctccttctccagactgtgtcccatttaactgagcagaccctgagcattttcctagctctctgctgacacagagcagtcgctgatgctagtgttcttttctcccccatgtcctggccaggaccagctgcccccattccatgcacattcagatagggtcccccaagggtacaggccaggagtctgcagcactccagagatcagctcctgctaggagtccagcttcgcttcctccacttctcaccatgggcttccgctctgttctctctgtgtcttcttctgggctctcctcttgggacttttcagggctcatggtgctgggactgtctagaaggccctgctccaattctgagtgtgagaagggccctgagtctcccagctcctaggccaaaggctcctgtggaaggagaaggtgctgagagggggcaacagccctgagcactacccagaaccaggctctgtcttctccatctggctgggtgttcagagcaggaagatgtggattcctggtgaggtctcgagcaccccagggagatttgagggtactgatgggatgggaaggcctccactggccatgagctaccacctaatgtaagctggattttgttcttttagttcccctgcagctaggctcatttggagaagggtggcacaggtgcctggagggttgtagctaccggtgtttgaggggagtcctgaggtgtgagagccagaggagtcccaaggagaccttgaggccccccgactgctgagacttgggtcagactgaggggcagagttctgtttcagcgagacaaaatgaacatttcgcatagacaggatttggggacctctacctgaggattctagaaaaatccaggagtaaagcagtctgcatctctaaggggaagctatttctcaggttgagatttggggtccctcaggctgaggggatttgagatgtcttagactgaagaaattggggtttttcaggttgaggaaatttggggtatctcgagctgaggagctttggtatccctcaggctgatagtatctgtggttttttcaggatgagatttggggtcttttaagctgaagagatttggagtgctcaagctgacaggatttgagattcatcaggttaaggggatttggggttcctcaggatgaaaggatttgagatctttgaggctgaggaaattctgggtctcaggtaaaggagatttggatctctcattaaggggttttagggtctttgacactgaggttatttggtccttgaagctgaagggattgagttttcaggctatttaggttatctgaggttggggaaatttggtctgtctgtgggtgagatatttagggttcctcaggctgagggatttgggttgccttagggtgaggggaattgcggcttctcaggctcagaatatttggtgctctaagcattaggagattcgctgttcctctgggtgaagggatttggagtctctgaagctgaggtactttgggggtttcatgctgaggggattttaaatccctcaaggtggcaggatttggggtctcttgaggctgagaggatttggagcttcccagggtgaggggatctggggtctcccaagctaaaatttgaaggtctcgggatgagggtttacaagggtttcacgctgcacgacaaaggctccccatgctcttcacaatctcccgtgctctcctgccgcggcgttcaccctggccgggcgttctctcagagtccctcaggaggtgagatgtggtggagggcgaagtgccaggctgtacagctgccagccaatcagcacggagaccaaggcgagcccgccattcagcagtcaggaggcgctaaatgggcggggagtagggcggagccttgcctgtcagtcacgggcacaacccggtttggggctcaggaggtgggggaggggcctggctcttcccgcccctgaggaaggtccctcccctcccagaggggattgcgtgtaaccctccggcgcgcaggcgcagtttcgagggttttattacttggttttccccaactccggtgtttgcgactgagtcgggcgtcggggctgctcctcacgtccctccgcaggcctgggtcttccaaggggacactgtgtctttttgaattgccagagttcttgcactgattctcatctgggagggttggtgttcctttaactgtggtgtaagttgggtattgtcagctggcttcgtttctggatgcttcagagggccagggttctgtacaggacccttacgtgtgggtgaattgtgcttggtttcacagatgttgtattagctggccaattttggtgttgtagttagggccgtgatccaatagatggtgcttaagaggcacggctgctatctccggtagcaaggctcttttgtactttgcgttcgcaggcgtgctttgcggtgagacgggagagcaatagccctttaccagctcctaggtcttgggggagcctcctgtaatcactggtggctgcctgcgttgcttttgttaggtgttctgggctgcggggctccctcgggcagaggctgcataggtcgccccttttctggactggccctctggagggaggcatgcctcgctccctcgctgcccagtgtcccaaatgtctcacctctctcagtgctctgagagtgggggctcctcccccgttcaagtgctagccacagatctcccccccgcccccggtatccctagctacgtgccacagccctggggacaccaagaagtatggcttgaggttgggctctcgctgtgctggggaatccaatgtactcctgggtcacgggtaaggtactcaggtggagcgatgcactcaggctgggctgcagaggctgcactgtgtgtgcacctgctcttgcagagtggctaggcatgggccctgggaggggccagtgggcaggaggactttcagaacagaggcacccaagtcccacagggaagctgcccctgctgtctcctgggtcagaggtcagctaatgccagagtctcctgcaaggagatacggagcctgggggattggcatctctattagtccgttctcgcactgctataaagaaatacctaagactgtaatttctaatgaaaatagatttaattggcttattgttcggcaggctgtacaggaagcatgatgctggcacctgcttggcttcttgggagacttacactcatggcagaaggtgaaaggggagtcagcacttcacgtggccagagcaggaggaagagagaaaggcggggaggtgctatacacttttaaacaaccagatctcactatacagttccaaagagggatggtgctaaaccattcataagaagtttgtcctgtgacaaacttcacaggcctcccaccaggccccacctccaacactggcgattacatttcaacataagatttggacagggacacaaatccaaaccatatcattccattatatggaatgctaccgtatgatgcattatctgttatcattaactcaaaataaattaaagactgaaatctaacacctaaaagtacagaactccaagaagaaaaaaaataaaatctttataacattggaatgagcaattacttcctggatatgacaccaaaagcataagcaaccaaagcaaaattagatagatgggagtacgtcaaacctaaaaacgtctgtgtagcaaaggaaacaatcaacagtgacaaagcaacctatatagaacgggagaaaacatttgca

SEQ ID NO: 318417 - DNA, 4001 bp, Homo sapiens
cattccttcccctgactgcacctccaagtggcactgacagaacaagaagccataaataaggtcgttttgctctcgaaaacctctcttctgactcttaaactagaaggcaaaaggtctctctcttgagatcaacaaagggccttccagcccatcctgctcctggattttgttttgtgcatctagacgcatgcagtgttttagccgccttccaccagctgcagctctggagcttcctgacagtccaaataaaaacatttgcccggcgcggtggctcacgcctgtaatcttagcactttgggaggccgaggcgggcggatcacttgaggttaggagttcgagaccagcctggccaacatggtaaaaccttgtctgtactaaaaatacaaaaattagccaggcgtggtggtgtgtgcttagaaatccacctcttcagaaggctgaggcacgagaattgcttaaacccaggaggtggcagtggcagtgaggtgagatcatgtcactacactccaacctgggtgagactcttgtcaccagaaaaaaacaaaaaacagaaaaaaaaaaaagaaaagcactgcctccgccactcagcatcactcctgtgagtccaacatatatctgtgccatagatgccagatgggagcgctttgcatttagaacttaggacaactccgtaagataggtacccctcccccactgtatgaatgagtcaaaggacaggtccagagaggatggccagctgaaaagaagaaaacctgaggtcatactctacagctgtcaaccctcagtaacccagacctgcctccggccacaaaagctgccttatggctctctagccacatgtatctgaggagctctctatctcggggggaggggagagggggaggtgcagaatcacaacaggaggtgtctcaccatcagccgggcgtggttgatgttccaggtgaaggtagtcatggtctgattctgtgggtccacaatagagtcctccaggacgtacaccgagtgagcaacattggcaggaaatagtcgctcggcccagcgtggcatcctgttggtcttggtcaggagtcgccgggacagcagtttctggtcaggggtcacctcccggtgtactatgtcttccgtcaagacatgtttgctgcaggtgtcagggtgaaggtgaccctcagaagcttgcccctaagagactgcccgaggggattcccatttggaggctccgggcctagagaggccacgccttcccgtaaccttgcagggtggtatgtgctatggttcaaaccagagttaagggcccatcccagggcaaattcccactcccgccatctgactgacctggattcctgccttctagcaggaatggacctcatgatttattgcaccccaggaaagcgccacgggcagagaaataggatttccaactccaagatccctcccaactcccatactgccgcctcttcttgtctcaccacactgagaaaagaatcttacactaaggtctcaagtaaaccaccacccaggcccaacctcccttcaggaccttgcaggcctggcctggccgcttccccgataaggtctacctaggattcgatatcgagtccttcctggtcccagtacttgggggttacccataattcgatctccagatagcgagatggcgcggttttgctcttccaaataccacgtacctatagggattcgggtaccgctgccagaaggcggcgaacacttggtcccaggaactccggagcacgctctggcccaggaaatacttcaccatcgtcccggccgaagcgggctcagcacccgcgcagcatcaggggtgcggagcctgggaggcacgcgagggccgggccgggccggggctcggcgcacacccgccgccaggctcgtagctcagtcaccaccgcaccgcgcccaagcagctgccgccgccgccgccgccgccatgagttgtccggccgcgcgccacttccggcgcagccacacagtagccaccgcttccggcgcccgcgccacgtgaccttgcggccccgccccctcgccctctagccccctcccgcgggagtcgcggcgctgcgggtaggagccgggttgcgggagaccccaggttcggttgggattcccagccagaacggagcttaagccgggcaggcgagcgaatgacggagtagcgagctgcacggcggcgtgctgcgctgttgaggacgctgtcccgcgcgctcccaggccgccccgaggcttggggtcttcgaaggataatcggcgcccggggccgaacagcgggggcacacggggcgctgccgaagtgcaaggccacggccagagctcgagcccgacgcgctgtctggagtcgtaggttggcgccgtttggggtcggggtctgaggcttgggcgctgcctgggccgagcggagatcggggtttgcctcccgtccccgctcaggaccctgacgtggctgaagcggccccgggagcatgagcgggcagcgcgtggacgtcaaggtggtgatgctgggcaaggagtacgtgggcaagactagcctggtggagcgctacgtgcacgaccgctttctggtggggccttatcagaacgtgagtgcatccggaggggccaggcacggtgggcgggggagtggggggccggtaatctgcacctatggccccgatctcttccctctcgttgcagaccatcggggccgccttcgtggccaaggtgatgtcggtcggagaccggactgtgacattaggtatttgggtaagtcccccggccatctattcttgggagactcattcctgaggaggtgtaggtcctgcctattactggttgatttgtggcctcacagacccatttctcatagacccgtttccttatctggaaaatagcggggtctggagaacgtggccttaagtttgactcaggccttactctttaggacacagcaggctctgagcgctatgaggccatgagtagaatctactatcggggtgccaaggctgccatcgtctgctatggtaaggggggggggggtttgggctgtctcacaagaaaagatgggtgccaggctagccagagaacagcccttgaccacttggttgtctcctgcatgccgcacaccaagacctcacagacagcagcagctttgagcgagcaaagttctgggtgaaggaactgcgcagcctagaggaggtaggtgaacagacctcactagaacactaggggctggggttttgttggcctgtggaggtgacccttgtcttctgcctcagggctgccaaatctacttatgtggcaccaagagtgacctgctggaagaagaccggaggcgtcgacgtgtggacttccacgacgtccaggactatgcagacagtagctgctcctcagccctttggggggtgggggtgtgtggctgtctgggtggatcaaagaaaatagggactgccttggctgccagggcaaggtgctctaggaggtcttcctggcctccttgaactgtggggtccaggagactccctgaactgctagccctcccttttgtctgtttatctaattctcaggtatgaggctttagtcacttctctttacagatatcaaagctcagctctttgaaacatccagcaagacaggccagagtgtgggtgagtgctgtgctggagcctcacagcaggaacatgcaggggcaccagaggaagctgaatagggcacagagggctgggtcactgggagatcccagggctactggcattgggccctcgctgatcatcatttttcctgccagacgagctcttccagaaagtggcagaggattacgtcagtgtggctgccttccaggtgatgacaggtgtgtgcttccccagcctttatggagacttactctaggcccacagcatctagcccctttcctgagttacctgatcccaacagaatggtgctgagctgccacctctctttttgacagaggacaagggcgtggatctgggccagaagccaaacccctacttcta

SEQ ID NO: 318418 - DNA, 4001 bp, Homo sapiens
actttacaaaggagcagtggcttaagggtacccagactccaaagtgccagttctaacaaaaaaattgggtgttggctgttactttttgggcccagaagcctggcctaaggcaaagtctacaacaggtctgtaaatcattctttcattcatttattcattgctcaggtttttattaaatacctagtaggtgctaggcactagtctagatactgaaaatcaacgaacatatcagcaagctgacattccttctaaagaggccccctatagcaacaaagtgttaaccagtgtcctcctcactcctctgtgaccagggccaccgtgtcacctcctctaacggaggctacaccttatcgtttaacaaatgaccttcatcttcccagcatctcccttagtttggcttccgggttgcatatggagttcaatgtcccgtggctgctaaccaaggcaaattgcaactgttgcaaattttgcttatgaaaaccgaaggggaccttcaaagatcatctggtacaaccccttcatcttatagatgtggaaactaaggcctagagaaaagaccctcagccaaggtcacccagagaactaaccacgcatagaaccagatcagagtccaggagtcctgcctcccaggcctgggcgctttcgatttttcaaagacatttcccattttcctattatcaggacccacaatcctagaaacagtctttgggattcagggctcctcagtattgaggaagagttcattatctgtattgaaatcggttgtagtaatacaaacaacaataacattttagagccctaactaaacatcagtagcagtgagaaaaagaaaaatagctcagagcagattgtgtgagttacagtgaaatatgcaaaatcaatcaagcccagagagacaagagtataggactttagtggtcccctcctcacccaacccattcctgggagcaactggttaaaggcattttgttcctgaccagctgccttacccattatcttcaagttcctggaatttgtgatacaaagaacaatgtacagacaatcaatagtttatgttattttaatataaattcttggtaaacaacttaggaagtgcttcttattctcctttaaaaacccactttcgacttctgctcatcagaatgtatactcagggcaccttcactcccaggatgcagccctcaaacttggctcgaatgaactctctttttatattgattttgcctcagtttcttcatttaggtcacaactgtgctaagcactttacacaagttacctcatttggatcctcacaacaactctatgagtcggtactattattttccccattttacagattagcaaactaaggcacaaagagagtaagcaacctgcacgatgtcccacagctgtttaataaggagcagcggatggggcagcagaaccatcatgctgagtaaaccaggatgactgcccaatggcctcccctcgcttttaaggggtcagtgatgaaccggaaagctccacacgtcggtcatctgcaactccacggagctcacgagctgggattcccggaggctcttcctaaaaggaaagcctcttctttcagctggggcaggtgtgaacgtgatgccaagcacggccccttttcccgctccctgtaaagggagtcttcgaggaaatccctctcgacccacacatccctgaagcaaagcccgcagctggaaagagacactggcggtgccagcttccgcgtggatgaaggagaggagagaggggcaagcagcggaggcagcgcgggatacggaaggtggaagcggggcggtacctttcggagaaagctggcgaccacctgctcgaaggggtacttgtacacctggtgcacatccaccgagacccccatccccgcgcgccgcgggccccgcgcaccggccacgcctccgcgagctcagagctgcccagggctccgcagaggcccggaggcgcccacactcggacagccacatgggcgtggcctttttcctccgcttttcaaactttcgaaactttattggccactcggagaaacgcgcagtcggccacgcccacgcccctactgccagagtccggggcctggggttacagagcgcgggaggcgctggagcgctcccagagcacccggggccccgcggtctccacgctggcggcgccagagcggccctggtgccctcccgcggccgcgcctgccgagaaaagcttctctgcctgggagccatcacgccccgccccaggaaacctggaccttgggcttatgcgtttatggtatcaccgcctggagtcacagaataagccgtggttggcagcacgggaaaaaagtattaataaggaaggcctggtgtgacaaaggccagcattactcatgccaccaggcagctgcctctgaggcttgggtttgggcctcgtgtaaggtaaagattgcctcgggaataagaaccgcgttttagtgcaccaaaacctgcaggtaagttcctttgctcgctaaggttaaacaccacggagcaaggaactagaggatacaaaagagttgcgagtattattatttactgcaaccaacagatgttaggagaaccagcacgttaatccgtgtattcagcacggttctgaggcctcctatgccccagcgctgtagtgggcactgcggattccgcagggaggaaacaccagctctgctgatgagccggctgatttcacacccaatcaacaagctgggaaaataaaaacaataatcggttaaagtgacacgggcgcggacatgattttagtgagggtgattatggagggtctctgaggtgatgacttttacgattttgccatctcgctcgcccctgccatacgcagtcacactggtctggcaaaaccctagccttgtgtaaatctaggtctcctctgactgtctctacccaagccaccagaaggggctgaaggaaaatacacacccactgtgcatcttttaagttcataaccactaaccctatggcgccttttaatggtgccagacaaatacactatgaaagtactgtatttctggctgggtgcggtgactcacgcctgtaatcccagcactttgggaggccaaggtgggcggatcgcctgaggtccggagttccagaccagcctggccaacatggtgaaaccctgtccctactaaaaatacaaaaattagccaggcgtgatggcgggcgcctgtagtcccagctactccggaggctgaggcaggagaatcgcttgaacccgggagacggaggttgcagtgagcagagctcgcccattgcactccagcctaggcgacaagagcaagactccatctcaaaaaaaaaaaaaaaagagagtactgaatttctctaatccacttactctcccgcattcctccacacctctgacacctttgttcccagccttatactccagtcattaccttacttccattttcacttagtcaataggtcacatcgctctgccacctctctacccaccagaccaaatgccttgccttcactcttgttcctgtgggtgaactgtcagcactttgttttagcaccagtgtctccatttgtccactgaatcctgaggtgaactgaaaaatgtttaacaaatagctgtcctttaaagtataaatcaagcaaggccctgatttccaaaggttgctgattcctgtggtgtaaatactcctaccatgtttaaagatgccaactcgatgtcactaaacacaagttggggatttagcaacatggagttgagtgaggagtgggagttggggagggaagcacagaagcacaccatcacatagtatttccaccacccacatacgacagccataaagaaccaaaaacataaataatggaaaatgtagcaggaagggatgagttttcaatgtttattactctttggccaggctcctatggttcatgcctgtaacctcagcactttgggaggccaaggcagaaggatcacttgaggccaagagtttgaggccagtgtaggca

SEQ ID NO: 318419 - DNA, 4001 bp, Homo sapiens
attccagctactcaggaggctgaggcaggagaactgcttgaacccaggaagcggaggttgcaatgagccaagatcacaccacacggcactccagcctgggcaacagagcaagaccccatctcgggaaaagaaaaaagaaaaaagaaaaaaaaatagacctgactttattcaagcattcaagtctatattaggggaatgatgaacaccctaatccaggcagaactctgggaagggatgggggcaaaaatgaacatttttttttttacaaacacttgtaaactaaaaagcagtttgtaattgctaacaagaaatatcatagccaaagataaagttaaaacttccatggcacagaaacatcttactggccttatatggacctgtcctaatagctgttattacccaattctggcatttgcttcttacttcctcctgacattgtccgccttgcagattttcataagaaggttcaggcagttgcttccctgtgggatatacaacaattttccaattctatgactcagaaaatggcaagagaaggaagcgttcttctcttctaaccctaaataaaatcagaaactgtttatttagctctggaagagtaaggctcagttgagttaccgtacagactttggcaaactttttttctttcaagtcaaatatttaccaagaacttagtatatgcaagtcagtctattatttatccaaagccaatgcatgaattatttttatcagttccaaacttcctttctctgcatcccttataacaaagtcaaatatgttaaagaaaaaaaaaatcatgccttacaaaacttgcaattaaacgtttttttgccagaattggtggactgtagagcaagtttatttccagaatagtgttttgaaagagtccacacttttcttttaatttcaatagctttaggggtacaagtggcttttggttacatagatgaactgcatagtggtgaagtctgggcttttagtgtacccgtcacccgaatgctgtacaatgcacccaatacacctttcttaaaacaaaagttcgaatgatgtgcacttaaagagtttattagaatacaaataacctttgaaaataagtggaaatgaactgtactaataaagtaataaatactatctggaggcaacatctgaactaacaacgaagtttcgcacggagaaactcctgttaattcggaaacactaaaggcacagtctcattcagaacgtaaaccatgcatcgcaaatactgaaccagtttatactcattaactgctccgaaggaaaccagtgatcctttccgacgacatggtctttaaaaaaaatgatgtcggctacccacaaagaaaccttacttctgcggaaacacatttcgcactcgggaaacagcaggggccggtaaatcgacagcctcctacagaggacggaaataccgacaacgccaaggaccgccaaggaagcgatgggctggccctgagccaagggagcacaacccgggcgcacaagatgccgcctccccggggatcgcgcccggcgccccctcccagcacccagagcgcgccgcgccgcccgcctgccccacctgggaaagtttgcaccttcgcatcccagcccctcgtacctaccagcccctcaggccgcggcgccgtcgccatggcgactggcccctaccccacccccacccccacccggcctgtgctggccgcgccgcagccccgcggcggctggggagagctcccgcaggatccgggacaggggctgcccagccctggaaagaagggacgcagcgggcgggggaggatgaagaggtgcggaaagcggaagtcgtgcggctcctcagctggggccaagcctagtcccgcggggttctcacccttcactttgccgaaggtgccgacccccagcgtgtcacccagaatgtagtggccgatcttcacccgcccgtcgtgtttctgcttctcggctgtcgccatctttctccaggaactgagtctgcgcatggcgctgcgggagggggcggagggggcgggcagggccgcgccgggggcgggcggggagggggtggggacgcgggagggcagccaccgagccgagtcaccgccctgcgccgccagcccaggccccgcagcctacgtcgggcgcagacgctccccctggcggggcgggcgggggctgccaggagaatcaccagtacccgcctcctcgccccgcatcctcgggcctgagcgcccgcccaccggcacgcggaggggcttcctggaacgattaggcggaccgtcgcccccaggctcctttctcccctggcggagtttctgcccgctgcgatcttccctaactaccactctgcggtcgcagaagaccatccagaggggagatgaggactgggaagcccgcttgagtgatgcacatctgtggcttgttacgagagccgcgtgaattaaagcaaggcaggggacaccgccctgccactgctttctaaccttgattttcatctttccttctcggatggaatctagaagccgcaggagttttcacttgcgtctgtgatggagtttcccgctccccgcccccccgcaccaacccgagctcttttttcgcttggagcccgtaagttgctagagggcaccacgatggctctaggagcgctgtcggtgttttcttctggaggtgatcctgaaatttcctccccaaagcaagctctgttgcgaggagcaggctggggatatgtgcaagtgaatgtgtattccaagagggggatgatacgcagatcttttggtgtataggaattaatacttttagattatcagtaaaatgtatactttcactggactgagagagaacaaggcttacggttacatcaaccggatcaacaaatatttattgtacttgtaatgagtaatacttagtctattatataaacataaatggaaccataccatagcataaagtctgtttatttttcataaaatgtttgagtttgttactcaattccactcctctgattagtagtcaaaatcaagtgttctgttttaaaaagtttatattctctcaattttggaatgtcatagcattgggccagtgtcaatggcccaaaaaaacaaaatttaccttcatgaaaagagtataaaaaaagaaaaaaactaaaaatgtcatttttaatcccacaaaaatcaattacccaactctcctgattttctcctctctgtttctgaaatcaaagtaacatgcattaggcactgttttgttccgaggaagatattgcaggagaagcaaaagtttctgcctttgagcttagaattacaccagataagcagggaacagttccagctagccttaatcaagttcctactgtattgaggactgcacattgtttgaagggcaaaaagttaagaaatctttgattactgatgtatttggggggcaggtggtgtagtggttactgttttaacttttggtgtctggctttttcacttttatctgtttgacttttgagtttctacacaaggcatctctgtaaagcagaatttttggattttggatctctgtaaaacagaaatagctctctgga[439 bp omitted]

SEQ ID NO: 318420 - DNA, 4001 bp, Homo sapiens
atcctctttagatggctctccagggttggtgggactgaaaattctaggggtaaggactgtcgccttaggagagtcattaaaaagggttgtgaggaggggtcccctggagtcagaggctggtagagctctggagagagcatgtggggagctcacccatgacaggggagctgtctccttcagcagcgtggctgactccagacccccaagaaggctgtggattactcccacagtcagcccaaccagcagcaaggagttggctgggtggtcttgatacaggaggaggaataagggattgtcacctgggattcaggcatggctttcagggagtatccacaaaccctcagggattgcatgtaaaattttatgtacatgccatatgcattttgccccaggaagaggactcacagctaattctcaaaaggacctatcacccctaatttttaagaaccactgaaattaatattttcatctgctcctctcttgcactattcagcacttccacctcattaaacatttatatatatattatatatatttctataatatatatatataattaattaattccctaaactttgcagaaaaaaaatcgaagcccagagagggtaagtatcttgcccaagtttgcacagctgatggtcaggattgggattagcagcacttccctggtcaagtgaagcacgatttcaggtgggaaatcttgcccggtcaacttgacaaatgaagacaaagtgatccctccagactaataataatgttttgcaaccattttcaagtccagtcatagaatcccctacgttgcttgttttcagggcagtgtgggttgcttccccaggatacaggtagaggtcactaaaaggatagttttctactcaaagagccagaactccagcccttgccttcccctgccgtagcactcgggccggccctccagttacctgagtttgcctgactttaaccaactcctcttcccttccctcctcccttctccagcgggctctccttccagcttcctcccgggctgcaattcctctgcctaggtgcctccgtccagctccggcttctggcccggaggctgctcatctgcccctacccccgctgacttttgggaggagcaacacctttcaggtcagcattgctaaccctaaactttccccgccggatgcccgcgaggctgctgcggcggcggctgctgctgatgggagagtctcgagtccggctttcatcacatcacctgtctgcgccccttccccctccccgctctttttttcttttctttttattttgacgcaaataatttgcattctgagaatcccacaatcaacgccgaaactcatgctcaaggatacaggtgaagatgcctttgacaaaggcgaatgcgagccgagtgcagtttgtaaaagctggggttgggggcagtggtggaggcaaagcaccttaagagtattttttagcccctctgagaagggacatccgggcgggaggcgggcggatcccgggcttccccgccggctgccgactctggctcctggctggcgttctctccaggagcccgcgccggtggccccgctctccccttcagcacgcgggcctcgaacccgcatcccggagagcggccgcccgcgcagcccctgccgcgcgccgtcggaggcggcctcagctcgccatgggtactcacttttgccagggagcaaagtctgccacatcagtcgatgagtacttcctgcacgaggacatgaagctccattgtgtggaaagctgtttcgcgaacggtcggtaaaatccagaaagagggagaaggagtgagtaaggcagaaagcccagcccagaaaaccggcgtctggggatttcagcctccgctccccggtccccagcccggtggctctgtgagaagaagctcaactcggtgcacttgttcactctttcttcatgagaggaggagtcagtgttgcaacatttatgttccttgctggaggcaaaacagtgattttcttcagcatgcaaaacgtccagagcctgccagttttagaaggcgacggaggtagttgggggagctggaatcctgcgaagacctgaagaaacaactgattccccccagatcggttttgcatgattagggccacatatctttcattgagactgtaccagaaaatagacagacaaaacaataataaaaatgacttagtgagttgaatgacctcaaagatgatatttttccaggcagccaagatgtggagtgtctccgtgtcaaatttctttccttatttctgagtaacattgaacagcagctatatttgagaggttctccagggatttgaattgcaccttgcctgaggagtcagatagaaaggagcaaaagaagatagtcagtgacctaagaaggttttgcttttttttttttttaatacccaaagcgcaaacttctagtgtgctgtgtttattctctgccatatgaatataataaacattggcggtgcctaaatagccccacttctgttgttttccacaaataaagaatttatcttttctaatgggctgcatgttgttctgacttttcttcttcttgaaaccacacacaaccgccttttctcttgcaaaaacaaaaaccccacatttaacagtgctgaaacaaataatagcacctgcctgaatcaaatagttatttctgactatgtatgttgctggtgtcatttgatgccataataattaatgcatccgattgttacacaacccagagggccaccaaggaaatactttaaaccaaggttactgagtttttttttttgtttgtttttgtttgtttttttgagacagagtctcgctctgtcgctcaggctggattgcagtgaccccatctcggctcactggaacctctgcctcctggattcaagcaattgtcctgcttcagcctcccgagtaggtgggactacaggcgcgtgccaccatgtccggctagttttttgtatttttagtagagatgaggtttcaccctgttagccaggatggtcttgatttcctgacctcatgatccacccaccttggcctcctgaagtgctgggattacaggcgtgagccactgcgcctggccgtttttttttttgttttgttttaagttattgaaacatgaggctttcccctttgatttgactgctactctggataactgggaaatcacagttagcagtgagcatttgccaagccacaggaagccattgaaaatcccatgatgctttggtgatccttttggactggaatcccagaagcaactacctaggcataataacctaatacttcctgatcaataacacgtccttattaaaacatagactccacctggttctgttagctgatgggagatgcatctttcacgtgcagaccgcacatgcttcctgtgatgattagggtatatttactttcattcatgggtgtccatgaaggtacgcaacttctatttattttcagaaccactgggcgacatgagatcctcagtggcagaatatttctatatgacctttgcaaagcaaagggtcactcaattctacaatagttgttctaatcagactattttaacagttagtgaaatagaagatcactctgggtaactccagactgtcagctcttagaaggcagggacttggcttttcctccttgtggttcccactcagctgcaggcagcttggctcgtctgtactcctggcttacagactggtcgttgcgtggctaatccatacctcactggtaagaagggcagggctggctttctgctctgttgtgtagcacacaggcactgtcacaaagccacgggtactcattgtcagtgagttaccttgccccagctttcctgagatgatgaaatccgcagtgagccactatattttccttttctgccccacagtggttctttgactatctccttctctctatgcactgatgtgctccagcttcacagcttctttactgatgtcctcctctagttcatttctgcatctctgtcttagcgg

SEQ ID NO: 318421 - DNA, 4001 bp, Homo sapiens
aggctgggtgcaggggtcagggaagatcaatcagaggaataaaaggtccatgaggtgcacttaaagatgaataggaagtgtgtgtacaaaccctagggctttggaatttccttttagggccttggtttgccaattggtaccacagataaatctgctactgccaccttatctactttatactatttggttaattttttttaaaaaaggatttctggttaagccactctttagagtggtgacctgtttgctgtaaaaagttaaaattatataaagtgaagtggagaatatgtctcaaatcttttgagcaataatgttgtctatgaatacatgtctatgaataatgaatacacacacaaatacaaagtagcggccaaattttccgggagctttgcaacacagctctgactactgggtgctttctgacctcttcaaactcttaaaggaaaggtccactcagtactcagcattgccctgttctccttcatttgcctttccttccagtaaatagcatgaggcatttggcatgaaggggtagaagccaagacgggagaaagcacagagaagtctgaatgggtcgattcaccacttccaatgttaccagatgctcctgggcagggctattatgctgtggggcactcttgtacccagagcgttttgatgactgatgacacttcttctgcaagtatttgctaatgttattgtgaacactataaatttcagtcgatttccatgaaaaacaaaagcttctgctgggctgaggcaacttaaagcagtggtttttggtaggataattttgtccccacctggaagacatttggcaaagcctggaaacattattttattgttacttctgttggggggagttttgtcctccttggaactgtctggagatgtcattggttgttagagctggggtggggtggtgtccttctggtatttagtgggagacaccaggaatgctgctgagcatcaaatgatgcacagaggagccccaccacccaaaacgatccgacccagaatgcctacactgttgtttgagaaaccctggcccagagggcaagttcaggctcagaacttgacaccaaagcggcatgatggctctcaaggggctatcatgtttcaatgtgggaagactagtaagtttccctagatggccccaagaagtcccaggaaaattttgtctaggattttcttcaaccaataacttcattgttttcctatcttcctggctccttaacttcctctgaatgagagagtacagcctcaaagtcgtacatgtcgagctcatctcagtgggtccagatcccatttgcctgtagtgtagacagagggaagtcagggggcttggtttctccatctgtaaaatggagtcgtaatacttcatgatctatttgctaagcagtcctggcagcctagggtttccttgccactggcagatgagagaagacccagagcctgtcacacatgagtcctgccatgagggctgggaggaaggagacacagcagtaacattacggggcccagaaagttgtggcaagaatttatgtagagttgcttaagaaaataaaagcaagcacaatatttctctctctgattatagaagtaacatagtcattgtcgataatctctcaattacagaaaactacaaggagaaaataaaaatctctcatgattgcaccactaggagatatcagctattaaaagctttggtattttctttgagaaaaacagaaaaggatgaacatcagtttttctgagctggacaggctggggagactgaaacagcctttgaagacagcagaatgtgccagtgtagacattgactggtttgagatgatattctgtaaaccaagatagttgagcccctgccctggatgaaacggacagtggggcagatgggtggtgtgaccgaggggcatgagaacaagtcccccttaccttcagggttcatgtggaaagcatcctcagtgttcgcctccatgaataggagagttctttagctgaaagaggaaatgattcattttagctccaagatgacaaaacgggagattccatttctggctcactctgcagtacgtagcatggctgaacattggcccctcagtgataggcatgagacagctctagtgttctggaatttgttttttggcagctttattttgaagtaattttaatcttacagaaaagttataaaatagtaaaaaaaaaaaaaaaatctcatataccctcgacccacatacctcaattgttactattttaccacatctgatttataatctttcttctctgtatataaaagttacttcctaattatttgtgaactagtcacagtcatgatgcatgtttacccctaaatatttcagtgtgttttcctaagaacaaggacaattctcctacataaatgtagtacaataattaacgtaggaaaattaacatcgacacagtattattacctaatctatagagcttactcaaattttgccagttatcctagttgggattagatttcataaaatttggtcctggagactttaatgaaatttcttaacaaattctgacatagttatagatgaactggaattctgggttttgtataagaactttcagactctggggactgactagcctgagtctcggaggcatgaagggacaactgttagaggtatggatcttttttttttttgacagggtcttactgtgtctcccaggctggagtgcaacggcgcaatcacagctcactgcaacttcaacctccccaggctcaggtgattctcccatttcacccgccccctgccccaagtagctgggactacaggcacatgtcattacacctggcgaagtttttgtatttttagtagagatggggttttgccatgttggccaggctggtctcaaactcctggcgtcaatgatctgcctgcctcgtactcccaaagtgctgggattataggtgtgaaccaccatgcccaacctacagctactttttaaaatgggcttcgatatatatgaacagcaattcataatttaatgtccagttttgtcttgcccattccaagcaaaggcaaataatctaaccagagtagcagacaaaataatgctttttctaagtcttcaaaatccagaatcttcaggattattccttgaggaagccagtgctgaatatcctccatgctgactcaatggacagaggaggaggtgactggcaggaagctgtggttggccactagcaccctcatgccattgacaacctctctctctctctctcacacacacacacacacacacacacacaccactttctcaacattgctgctgttggcatgatcaatcaagagcctggaagtctttacaatcagaggctaccatgtgacaagggccatctgagcataagacagccagccccaaggcatttgataataaggggtctgttggatccagagcctctgacacagatgtctggggcacgtttcttaggagccactcatttttctccatagggtgcagtgacaccaaattttctgtttaaaaaaattttagattctaagaattattttagaacttaaagttctctctttgattagagttgtcctgttctgttcagagcaaatcctgctccgttctgtcatctccaaaataagatccagactgtttttacactcttggcagaaacactgaggggtcagcgagggagtggagaaccaggacaagggctgtgctgggggtgggacatctggaacagcagatagcagcagtgagggcttcggggcaggcgggcataaagggatggcttctgcagttcaacaaacacttattgagtgacaggccctgggcccacttggtccattcatctactattcattcagcatttaggaaatgcttggcttaccacttagcccttgtcatcctctgccctggctcccacgtctattctttacctgctctgtgccctgtgagtctgactcctgtgccctccagcttcaagtagggttctacccacagtg

SEQ ID NO: 318422 - DNA, 4001 bp, Homo sapiens
tgcgcacgtctcgaggccgcggaatggccatgcgcgggcgtcccgaggccgcctctccaggacccaagacttccgggcacttatccgcgtccagggtgcccacagggtggctgccgggcggctcgggtgctgctacctctggggactgctgactccctccaaaggcaagatctgaaatttcccgcgtggatggactctgcatctctgttggttctggagtgccgggtgcggacggtgtaggcggtgccaactcctcctgagttaacccattctgagcttcctgagtaaatgctatcgatgagcccggccccatgggatcccatgtctcttggggagatgggccccaagttccaataggacgatctggagcctcccacgggaagaaggccggcggggacgggctgctacgtggctccaccgcatccgcgactgccgaatgtggaatctcccacagggaaggggcttcgagggacgggctcctttccccagcaacacactgattccactgggaaaggatcggaggggaagggcttctcctgctgacagtttcctcgacggcaggattttgattttcccactcggaggaggcttcagggaacaatgggctactcaccctccgagtagtccgatcccacggggacaggttctggggcgacgggcagcgaggaccccgtacagccccatttggagtctgccgtggcggggacgggctccttggcctcacagccctactcggaacctccgaggggatcctacactcaaaaggcggactccgtgccctctgaacagttcgatccggcgcctctcgcgggaaccgagtcttccgcgcctcctggatcttctcctctgactgaaggaagatgctggaactaacaggacccagcggctccgtcccgggcgcaggcttgtcgcgccgaatcgcgcgctcgcggaggctgggccacggcctcggggccttggcgggggccgaattatctcgtacgcgaagtggccgagacttagccttctccaggaccacgtgggtgctgcgggccgtttcccgggtctcaggttccgaccgccccgtggacccgaaggtggcgctgctcggggccggggcctcggggctcagttttctggccaacgccgtctgcacgaagcccgcggcggcctgcagggggcccagcgactcgtccagggaaccggtgcgcaggagcagccgggggcgcggcgcgccggccgcccttgggggactctggggccgggggcgcagctcgatctgacgcttgggcactgtccggggcctggcgggcgcggcgccctcctccagagccacctccacacactcgaactgcgctggggcggcaggacttggcccacggggccgcagctctaggtaggtggcccagcgggagccaccatcggggacctgggactggcgtgggaccgcggcgggagacgctggccccggcggcaaggggctgatgaaggccggctccgtgaactgttgttgcgcctcgcgatcgtctgcgccggagcagccgaacaggggtccgacgccgaagatgacttccatctcccccgacggcagcgtgcgcagctggggctggggtggccgtgggccggaacctgggcctcgcgggaaacccgagccgggcccgtgccgctggcggctattctgggcgctgacggacaggcgaggctgcgcgcccgccccccgcccaggagccacccagggccaattcgctgggcctttcgcgtccggcccaacgtccgggggctccggagaacctggagccgtgtagtaggagcctgacgaaccggaggagtcctggcgccgcgcgggggccgtgggcagctgcctcgggatcccaggcagggctggcggggcgagcgcggtcagcatggtggggccggacgccgtgcactatctccctcgcattcgcctccgctggtggcgccggcactgtccccgccccgcccgaggatgccgtgggggtcaccgcgccttaaagcggccgcgtccactcctgagccagcggcgccggcagcagaaaagacctgggccctgcacccttccctgtccagcccccatgcccaactaacccccttctcaggcacaagccggagtacctggggtgggctccaagctttggctgacaggcaggtgagggaatggcaggcccaactttcaaagccttggagccaggagttaggcccaactccacctatcacaggtgaggaaactgaagcccagcagggatccgcctgaagtcaggcactgctgtgtgcagttcaggctgtgagcgggtgaaccagaccttcaggccaggagactcaggtagggccagcaatttcatcttcccctcagccccgggtgccttagcatcactgcaggggacccccattgccattgctggcctcagctagagctcttaagggtgcacacaccacctttcttgaccccagttacactcttcctgatccccttcagtagagtgaggagcaccgctagaggcttccctgactcctcagggcctcaggaaggtactaccactggctggacccactgccctcggtgggacctattggaaggagctggagtggacagctctagctttcagtctgcctcagcacctagaacaggccctggataccgatgtggggtcctacaggaagcttcgaagtagcttgtggtcccagctccaaaggcccctgcggccagaacagccctgtgctcccccaggtattcacaaggccctaacttcagcccccacagccttaggacctgccctggggacaggcgctggtggggaggcaaccaccacctgtcattgtcttacaactgtgggcaccacttgcccttaaacttctggcttcaaggtcctgctatgactcaggccccagctggccctggagcaagagcactgccccctcctgtgcacttggcctcaaaccgacccaggacaggctacactgggctaatctgacccctgaagtgggtcctctgcctgggtgtgtccccatgatcacctagggggcactcggtgatggcttctgaaaaaatgttgctgctccatcccatccagccctgcctgtgcaacttgtgcaaattgaggtcccttcccagattgtttctccaccttaaaaccacacacagcattgtcttttctcttcctcccattgtgaagctcccgtttgggggaggtgtcagcaggtgcaaatgcaatttgcaggtataacattattgtcatgtgatggaaactgacttcccaaattccttgtggttctggaacccactgtctttgaagtttctggtcagggcttccggccctgtagtcaagttgggaagttaaatttaccaggacactgggagtggggtggaatattactgggtaaccagggctgtttatataggaagggattaaatacccaaaggaagcggtggtgcctaccagacaacaaagacccagctcctcccctaggctacaagcccccaccttgtggacccctaccactatccaagagggagggaagtagcaggggctagaggctggggactcccagagcagagaaggcagaggctggggattacagccagagaacaggaaagcggcggccattttatttttccctgggatgctggtggctgcgggcctgacgtgtccctgaggctttcttatgcttctggtccagcacctgggccatgtagctctcctgctgcttctggatccggaagtcagacatgtgattcctgcaacggagccggctggtggtgggctgtggacagccaagggtaggtaggggccagaggtctggctccccagtgtcatcaacaacccccagccgggcccagacccctcacctgaagatctgtttctgctggctgataacttgctgcaactctttaatctcattctctttgccattaagtatatcttcttgctttataatgtgagactcaatctctgtgggggagagaggcagggaggaggggtggttcccatcccagggctccttcc

SEQ ID NO: 318423 - DNA, 4001 bp, Homo sapiens
gggagtgcgggcggcccctctgtcctccttgcggggagaaccttgatctcccccctcctgcaccagggagccttctgcagggtggagcactcgagtctgagaacggagagaagggaggggcggcttctgaggaggacgctcctcggtgctggaccacatgtgcctgtcccgggattgcgctcagtgcgtcctgtgctgctccagtctttttttgagacagagtcttgctctgtctcccagactggagtgcagtggtgtgatcacagctcactgcagcctcgaacccctgggctccagtgatcctactgccttagcctcctgagtagctgggactacaggtgcacaccaacatacccagctaattaaaaaaataaaaaattagagatggggtcttgctatcttgcccaggctggtctcaaactcctggcctcaagcagtcctcccatgtcagcctctcaaagtgctgggattataggcctgagccaccgcacccagccctgccccaccgggaatcttttagctgccatagcctggttcctgcaccctgctcagcctcggcccctggttgcctctgagtctctgacaccaggctgtgctgtctacacagggcacaccctcagactcattcctggccctggcactcatgcactgtctacctggcaactctactgtctgcccacttcctattgcactgccagacacatacccctccatgtacgttcacccttctggacacacacgaccacctggggctcaccctgtgggtctgctgtgtgcacctgcaccctaacaatcgtcccagctgtctacggaagaccctagtgcttgtcccctgctggcgaggctcctgttcaacctgtgccttcttcagactgctgccatctcccgcacccctcacctgggaagatgggcacccccctcttccgctcagacacaccctcccctacttacttttcatctcctccctacccctgccctggcccagccaccaggctgcaggaacttgagctcgtgggaaaggcttgccttcctccccacaggctccctaagcccccacactaattagtctgagagctgttggggaggagagaacggggagggaaaggacacacctggaaggcgcacaccaagaaaagatgtctggagccgaggcaccatccccatggggcccaagggcgtggaccctcctagagctcactgtccaccatgggggacacacacacggagcccgccctcccgccctggacccaaagccctggcccctccagctcccttcatcagagaaggcagtggcttgggctaaccaactctgaggtcaggagtgaggggacagaggtaactgtctcacatccccactgcaatgtgagctgttcagccgccccctcctgccaagggctcagttccccagtctgtaaagccaaggggtgctccagtcccttttactttcaaaggttcccacagttttaacatgataggattcgggttttaatttctcctcctaaccttcttcatggagcctatgctttcagcctcacacccgctgcctcctcagggacccacgcacaccgggacggtcactcacccaccgtggtggtcggggtcccagtggccgggtgtctctcaggcaacaggttgctgccgactcgccccttctttggcttctcagcctggcgcctcctttctgcttccatggctcgccacggggaccaagtgtccctgaatctctgacttgagatttctctgcttccgcagctcctctccacacctgttccctccccttctccctctgtgtatgccaccctctgggactctgtctctgaatgtgtgtgtaggtgcaggcagctgtctctgactttttcactgtctttactttttttctaattgtttcctaattcccccttccttggcttgagtgtcagctcaatctcctgcctcagcctcacctgttgctctgtttctgactacttttctctgcctggcccttctccccaccgggatgctgctcccttctgtcagctgcctactttcccatcccacccctgagtcttggaggagtgacctcctcctcgcccctgtgggcccatccaatcactacacggtcaccagagcccccttgctcagggaggatcacaagccggatgagggaaggtgttctgtcggagggtccagggactggggccaagggctcgtattcccagaggaccggattcttttgtcctgttaaatcccctcctgggagcaggcagggggaggaggagaaaatgcattcctcccgagaccccctcctcacaaccccactgtggggagaggaacgaagagcaggggaaagggacccaggagtggagcctgcctggcgtctcagcatgggggtgacactcaaggatctgcttccaggaaactaaaaaaggagaagtcacaagtgcatgctggcccctctcagataccctgatagttcagaacacaccagccagtgctcaggccaacctgaacccactccggagaatgggcctccaggacaccttagctctcaagtactttctgatttcctccctcaaacaccacttcctcattcacccagaacccccaggacaccatgaccttccaaggtcacccagactctccgaaaaccctgacctgaacatctgcattccagctgcatcctgacccccaaacccactccagactccaggacttggaaagagactgagattcccgtgacatactacattctgattcttcaagaaaatcctgacaccgggaatctctgagcagtcaggacagcctggtcccacagtactctgccccttgaggttacttagacctgggaagtacattctgacatccccaggacactctgacagtttaaggatgatgcaacagcccaggaccttaggatcccctgggacacgctgacacccagaacacttcacctctgcttctcaggatacactgacccagtgagaacacatggaccccctggaacacactgtacccacaggacagtctgattcccagggtcatgccgtcatacaggtcctttaaaaacacgctggtgattcaagacaggaaatcagaatcctttaggatttcgatgcttaccgtgtggtccatggatcagcagcagcagcagcaccagcaatgggagcatgttggaaatgcagatccctgggccccacctccattctactgagtcacaatctgccttgtatcaagatctccaggagaaccgagtgcacgtgggtcttagtcagctggggctgccatgacaaaatagcatagactgtgtggtttaaacaatagacttctattgctcacagttctggaggctgggaagtctaagatcaaggggtccgcctatttggctcccctgtgagggctctcttcctggcttgcaggtggctgccttctctcggtgccttcatatggtggagaaagaaccagctctggtttcttttcctctgcttgtaaggacactaatcccatcatggggcctcaccctcatgagctcatctaaacctaatcacctccccaaatccccaccttcaaataccatcacgttgggtgttaggacttcaacgtagaaattttggagggacacaaacgtttagtccatagcaacgtaaaattgggaaacactgctctaattttaacccttctcccctaccctaggacacactttgacctcctggagcaccctgaaccccatggcagtcctaacctagcaagacccagtgacatgcagtcagcttggactcacaagagaacactgaattacaatgcatcctgctgcctggggtacccattctggccctgtcaggtccttgaatgctgagggcactgaggatgcattcactctccaggacacacagaccctccaagaggctctgacctctgtaccttacactcagcacaacatcttgggctcacaatcactctgtgaccctctaagtcacccagaccatgaggacatggtgagatttgggaaattctaaccttttaag

SEQ ID NO: 318424 - DNA, 4001 bp, Homo sapiens
aaacacagtctaccaaagatgtcatataaaagaataacaaagaaagggacagcatttttagaattgaatttcaatgcataaccccaccatctgtcaaccagttgtgaagcaataatcctacagaaaccctgaaaacacgaacaagttttatccctgaatctatgtatactaacagccactctcaggacctcagtactaattatgttctgtctgtggagtaacctacaggaacgacatttaccactggcaaacttaaccctggtgacgaatggcccattttaacagacttgcattaggtaacaaatgcagagttcagttcatagaggtaacgggggaaggggaggaagacgagggggctcttgaaatttggtttggaaattgaatacaggaggttaatctctagaggccagtcatccaaacaaccctcagtctcctccccgttggcttcagaaacaggattacaattttggacctagactacgccccaccccttttcccgctgcagccaccgccaccttcgaagttctagtcttagctctcacgcagcggagctgcggactccctcaccgagaaccgcaccaggaccccattcagtagtgagcggcgcgctgggactctgctaccagctccgcgacgccgccggcagccagcctggctcgggagaccccacccctcccagcccggcccccgcccccgcccggagccgccgcctgagttacgcagcctcagccctgacaccttctctgcttctttccatctggatcacctggggctaggggcgggcgggagtagggctgaaccgaagtgggataggaaaagcggggaagaaccgaagcagtcccagctgcagagagccaggacgccaatggcaagaccccggccacacatacactctcctgcgcgtcctgcttctcgggttcaatgccaagtggcgacagggtggaaggaaggaagcagaggtagggtggcgggaaggcccagagttactggtaacgacgttcggaggagagcaggggatgcttcagaaactgagaaagtgagaaagtcccagaccccctccttagccccaaggctgccagcagcccgggtcgccttccctacagcgaggctcgagagacagggagggtagtctgagccaagcttcctccaggctgccctccctgatctggcccagggcccagaacccggcccctcttcagccctgacttggggaggctgacagataggcagcggacttgccaaaggactctggggaagcaatagggcaggagaggagcatcttgcacgctccagccgggctgctcacgacttcctctgccgacacacccccagctaaccctctcccccgtcgtcacacacacagattcagagacacgcgtgcgttcatccctcccaccagcccaggtccatcgattaaaacactagttgatttcttcctgattaaaaaaaaaaattaaaaagtgcaacaacaactcctctcaggactccaggagcaaagaaagtccgtctgcaggcgccttttctgtagtttcccaggagtttggaaatctggctgtccctgctgaaaatcggaaaggggaccccggaggggtcgaagggtgccgaactccctccccacccctgcgcctctcacctccttaagttccttggccacgtccttcaggtcgcccaggactaattccaaatcctccacgatgatcttgatctgttccttcaccttggttttggaggctgccggcggtccctcggctggacaggacgaggaggggttccccttggacttggctgacattctttgggggcaagcgaggcaggtcaggacaggcgggcgagcggaggctgctgcgtgcccccgtccctggcgctgctacggccgctgccgccccggtccccccacatcttgggcgctccctgggcagcggcgagtggctgcgctccgcgctcggccgggcggccgcacagtggtgctgccatcaactcccgagacgcggcgctcggctcggggctgcagacgggcgagcagcgcgcctgcgcctcctcccgccgccgcccggcgctctcgcgcacacgcgctcgctccccgcccgcggagaggggcgccgtgctgccgcgccagggttgacgcttgcagtcccctcgacgttgcccttcgagatatctcccagatgccaccttggcatcaaggtgggggagacaagtccgtgtcctgcccgccccctcctcttggttctgaaatgtccccatcatctcagcctgcttgctgtatgtcatctcacaactagcctggattctttctgcttcacttgctagcagggacctggatcaattcagaaagaaccacagtgggatcaggagttggagacagtctgtaaagtggccctacagatttatccaaacccaaatgatgtccagaggcctttaatcaatctcttggtgacctgcgagttaagcagacttcttaacttctgcaagaaaaaaggggggggggggtgcacataacagctaatggtcatctattgaaaccatgaaattcaaccagtgttcttgaaagaggtaccctaatcctgctaattccacaaagctaataccggatttattaatttgaagtccccacaccccaaatcctctctgattgtctcagtcatcttggctgtatgtcttatttggcccaactcttttttttttttttaactgtccttcctctttttgtgacctatgctgatttacattttgagtggagtgggggagacatcgtatttggacctcgtgaaggagctgagtaagagattgcctccaacttctctttcatcattttttaaacctccatttcaactcttttgctactaaacaaataggaaacaactttctgactgttctgtcaaaaagacccaagaagggaagttaataggaagccttcggttcactctcagtaggtgtctacaattctcattagctagaattttaacttccttagttgtaaacccatgggctattagctactgacccagcaggctggctctactttattttcttcactgcacactcctccagatcattcttttaataggcttccccttttcgtcgtgccttagcaaggctctctgtttcttgcttctcacactctgggtagctccactgtgctacacataaagaaaagcttggcagctctcctcttcccagttctgtaggctcttaatcaatcactctcttaatcctggacaattcatctttacaaaacctttggaagtcatatgtggaatatagaggaagaaagagaacagaagaaaaaattgaaatttgaaagtggtgtcaaaagaaaaccattgaaaactgcattgaaaaatcaggggaagaaatgagaaaaggtgaaaagcagatgctgctggaaagacttaagaagagattataagaacaagtctgcagcatgcaaactggagaaaagaaaaagagaagaaatgattaaaagtgtgaaataagtaatatgcttgagttctctgaggtagggagaattagatttttaaaacatcctttttctcctcaaattctttattttataaaaaatataacattaaaataattatatcaggtttacagactccccaaaattgtcaaaactagcaaaagctaatggtaggggaaaagagaaagtactattcttctagattggaattatttttgactcttaatagtaggcaagtgtgtaagaaagccgccaaactcaaagttaagtgactttagacaaggatatgggagaggaggaaaggaaattgtgatttccctcacagtgacaaaataatcctcccacaatataagaagatgtccatgctactctgaatctcattcactaaagattaaaaaaaaaaaaacaaaacaggctaggcacagtggctcatgcctgtaatcccagcactctgggaggccgagatgggtggatcacaaggtcaggagttcaagaccaccctggccaagatggcaaaaccccatctctattaaaaatacaa

SEQ ID NO: 318425 - DNA, 4001 bp, Homo sapiens
tgaggcagccctttgctgcttggtctcaccggagaaaatggagggagggaggaagtgaagaagggagggagaaagctggccccatcctataatgcatctgggggagcaagaatgtggctgatttagctggaagaaggaaaaatgtaccaagacccgaaagacagggaatgtcctcactggaggaaagtgaaggaagaaggctctacagttcttctcctgggttacaagagaagttagctagcaggcagagaggagctttgcccccagagaagcctgcagtgtagactcagctctgccacttactggtagtgtgaccttgggcaagtcactcacctccctgagcctccctttagagtcttcatctctaaaatggggataataaacttaccttgcgcaactgttgtaaaaaaaaattaggagataatggatgcagagcactcaacacaggtctcacagagcaggaagggaatgaaaggcacccgtgagtaattccccaggcgcccctgcctgcaggagactcaggcctgacctccagggcaccacccatctaagggcatcttatgccaaggcctccaatgccccagatgccagtcacctctaggatgcctccccggatgggaaaggaaacccaaggacggttgtggtcgctgggatcctggatctgaagcccgcggtcggggctggcatctgctgagtcaggcctgggagagctggcaggagggccatttctctctccagcatgatgcccgctgaggggaggttgggaggggagccagaggtcatttcctctgagtcagaggccattctcctcccagaggagctcccctggcggaccaggcacctccatgtggcgcgtgcctccctgccggccaacctgcatgctactcagtacagttggggcattgtgctcagacaagaaaggggcacttgtgatccagacaatgggctgggtcgctcccatttggcctgggcttcagcttccctgggtcagcaatatcctttcctctgctcctgcccactctgcttccacccctccctggagaatggtggctaggaacacggagcagagactcaccgcgggcccatgcccggtttggcacgtgcctcggccgtgaggaggaggagggatgcaagcttcgctcctctaccctggtaagaaacgtcgcccctggggaacccagctcggctcaggccatgtccagggccggcgcgattaggtggtggcggcggtgggtgggtgggtggggggtctatgggcaaagaccccagcgccagcctccatgcctcctcctcccgtgacaagcccaggggctgggccgcccccacgtttgcagccaccccaggagccctgctgcgacgactgcagccacgtgggagccagctcgtgcccacggccgttcgcccccacccccaccctcgacgggctgtggaggcaggcacacccagccgggccagaggggcgacatgcccccgccgcgcacccctctccccctgcacccccgggctgtgggcccgcgtcgggggaggggggagggagggggagggggcgtcgccgccccgcagtcgtgttgccggggagcgcaaccccgttgctgtggcaaccgtttccaagcgaactggtggcggctcgcgccccgttccggctccctcgctcactggcgctctccctccctccggtgtggactgggggaggggctgctcgcggcccgggcgggggaccggggcggcgacccggggccagggcgctgagccgcccgcggggaagggctcagtcctgggaccatcttccgcccgcgctccgtgcccgcccggcccgcagccgccgcggtactcacgggcccaggcatcctcctcgagctcgttctcctggctcggggcgagcagcgcgggcccagcggacagagccccgggcctgcggggggaggcggcggcggcccgggggagcagacagtggcagcgaaagcggctccgagcgctgggctggaggcgcggggcgcgcgcacgggcgcgtacacggcgggtgctgagcccggcgtgcgcgcgcgcggcagccggcagagggccccgcacccccagccacacgccgcgaggaggctgcccccggagggaaggagggggaggacggtcacccacctgcggcgccgagacccggttctccagcccgccgggctcacacccgccagggcaccctcacaggggaggcacacgccggccgacccggtccacactccaggctggagcccaggccacaccggtcgtgcacgctggatgcacagccaggcagctgaggtcgagaacccggacgcgcacacagctcagctcggagagcacacacatgtccaggtccccgtcacatcctgacaggcgctgcgcacacgcagtgggcaggggcccccgagcaggcaggcaccccaacgtggctccctcccaactcacgacccctctcgctaggtgcccagcaggcgtacaccaccacatgcctactaggaagccacggggaggaggacctagtgccgaacccacagccctggcctccgtggacatgcctcccccctaccccagcagggaacagatgacccctagagagcgccccactgtctaccccgaggtccaagcttgcagaggccactctgaagttggctgtccatcggcctcttaactgggctgtttttcgtccaacttctctactgcacttaagatgatttgccaaaaacccctccaccaccatattagctggaacatttggggttgaagtgacagaactcccaaacaaataggtttgagctgtaccccgtctctaccaaaaaaaaaaaaaaatctgcacgcctgtggagaatcgcttgaatccgggaggcagaggttgcagtgagccgagatcacgccaccgcactccagcctaagggagggggtgagaccctgtctcaaaaaaaaaaagagaaagaagaaagagaaaggacagaaagaaagaaaaataaaagagaaagaaagaagaaaggaaagaaagaaaagaaagaaaaagagaaagaaaagaaaaagctttgagctcaaaggggactggttcatgcaactggcaagtcccagggtagattctagctttggtcacagttgcttccaggtgttcccgcaatggtgtcaggcacgtatctgcttctgtttgcatcactctcaggcaagctcaccccaagaagtagcgaggacaaccccaacagccctaggctcatatcctgccatctatccctggaggaaaacggaaccccaattccttccccatcatttgagcaaaatacaagcaaacaactccatgaatgattctttttggactcatttgggctgagtctctatcagtgaaccaatctaagtgcctgtgtgttaagggagaggatatgtgctccttatgcaaagggaatggcctcccagtacccgctcccttttctttgtatacaggcaccctgatttcaatgggggaatcactgccccacgggtgccatcctggtgaaactgtgaacccaagtgccctgctccctgacagtgcacagcaggcaggtatccagcctggccactcagactccttgagtttgcaactgggctcaaagaggcaaaaccaaatggctctatcatcttggttctggtgggtgtctcctgatgagaatggagcccacaactaagaccccgaagctcctccatatccttggaacaccttctaagttagcgggaggacagttctgtcacttgcaacattcccacctggctctctcactctaggtatgtgtgtggagtatgcgtgtgcagggggtgcaagcccagccccgtctaaaccacatggacagagactgggggtgcttttgtacatgctggagcaaacaccccaacacaaccagtaaaaacccttcagggaatcccctaccttccagatgaggccccatctgggccttaaccctgtgatccttaatctagctttcaaagctggctgtgtctcactgacttcagctccagccattcct

SEQ ID NO: 318426 - DNA, 4001 bp, Homo sapiens
ggctctggggggtggggatggaaaatcccgggcagcaggggcactgggtcacacctggacttgaggctagagctgctggtcttcaagggaagggacaggaactcagagcagggggtgagggctggggggcaggacagactgacagcctgtcctgtgtgccttgcatacgccaggcccactactggtctctatgctagttatctaaggaaaactcaggaggtggctgctgttctctctacagacaaggatgtaggctcaaggagtgggtccagctcaggtctccatagccaggtggtgtgaagcccgggtgatgacaaagtcctcggtcccggcagcaagggcatttcagggagccactggtgacacccttacacccttcccacatcaacacagaggaactgaggccagagaggacttgacaggacttgtctccactcccagtcagccaggcttggagctggccagaaccgccctccgcctaggccagggtactgagtggcaagcacccttgcttgcaggtagatgacctaaccctgacaccaagccaggaacccagggcttgggaaactacaaataagaccacagagactgaggcctcggtgggcttgtaggtggagagccctccctcaggccagtgtctactgcgctcagctccggccctcctcagggcagggttttcagagaccaggttcctcctctgaaacctcagcctgtggctctctgtgccttcatccccgcagctggcatggaaataatgatctgacctcccaggggaggcggccccacgggcgtgatggtgacaccctgtggggggcagcctgggtaacatgcagagtgccgaggggtaggcctgagctcaaatctggcttctgccctcaccgagccatgtgatcccatcctggctactcccatacctgagctggagtttcttcagcagtaggaccagggtgccgaggggacaacagaactccctctgatgagggatcaccctgcagcctcaagaggctcaaatgcagaaagcagcccctggtgtcacagtgtacacagcctggaggcggcccagcaaaacctgcggtccctttcccacggaccagaggtctcagacacaggacccttaggttggacacagttctcagacatgttttaaaaacaatccatgttcacaatccatttttaaaaacattctgattaattgccaacatttaaaaatccaggagattttatataaaggtctggatttctggttcatcttgaaaattggacagtcaggtcataccaagtccacatttcacacagtgacaaagattggagctgagcggctccctggcccgcctcactcattccatttcccccctgatccttggaagcatgtgggtttccaatgcctggagctagactgagcacccacaggctgcagcagtgcatggacccatctttgctaaattttctctcccacagccaagactgcaagctgagcaggccatggagcccatgagccgaggaccagggcttggggttttcccaggggactgaggcagccctttgctgcttggtctcaccggagaaaatggagggagggaggaagtgaagaagggagggagaaagctggccccatcctataatgcatctgggggagcaagaatgtggctgatttagctggaagaaggaaaaatgtaccaagacccgaaagacagggaatgtcctcactggaggaaagtgaaggaagaaggctctacagttcttctcctgggttacaagagaagttagctagcaggcagagaggagctttgcccccagagaagcctgcagtgtagactcagctctgccacttactggtagtgtgaccttgggcaagtcactcacctccctgagcctccctttagagtcttcatctctaaaatggggataataaacttaccttgcgcaactgttgtaaaaaaaaattaggagataatggatgcagagcactcaacacaggtctcacagagcaggaagggaatgaaaggcacccgtgagtaattccccaggcgcccctgcctgcaggagactcaggcctgacctccagggcaccacccatctaagggcatcttatgccaaggcctccaatgccccagatgccagtcacctctaggatgcctccccggatgggaaaggaaacccaaggacggttgtggtcgctgggatcctggatctgaagcccgcggtcggggctggcatctgctgagtcaggcctgggagagctggcaggagggccatttctctctccagcatgatgcccgctgaggggaggttgggaggggagccagaggtcatttcctctgagtcagaggccattctcctcccagaggagctcccctggcggaccaggcacctccatgtggcgcgtgcctccctgccggccaacctgcatgctactcagtacagttggggcattgtgctcagacaagaaaggggcacttgtgatccagacaatgggctgggtcgctcccatttggcctgggcttcagcttccctgggtcagcaatatcctttcctctgctcctgcccactctgcttccacccctccctggagaatggtggctaggaacacggagcagagactcaccgcgggcccatgcccggtttggcacgtgcctcggccgtgaggaggaggagggatgcaagcttcgctcctctaccctggtaagaaacgtcgcccctggggaacccagctcggctcaggccatgtccagggccggcgcgattaggtggtggcggcggtgggtgggtgggtggggggtctatgggcaaagaccccagcgccagcctccatgcctcctcctcccgtgacaagcccaggggctgggccgcccccacgtttgcagccaccccaggagccctgctgcgacgactgcagccacgtgggagccagctcgtgcccacggccgttcgcccccacccccaccctcgacgggctgtggaggcaggcacacccagccgggccagaggggcgacatgcccccgccgcgcacccctctccccctgcacccccgggctgtgggcccgcgtcgggggaggggggagggagggggagggggcgtcgccgccccgcagtcgtgttgccggggagcgcaaccccgttgctgtggcaaccgtttccaagcgaactggtggcggctcgcgccccgttccggctccctcgctcactggcgctctccctccctccggtgtggactgggggaggggctgctcgcggcccgggcgggggaccggggcggcgacccggggccagggcgctgagccgcccgcggggaagggctcagtcctgggaccatcttccgcccgcgctccgtgcccgcccggcccgcagccgccgcggtactcacgggcccaggcatcctcctcgagctcgttctcctggctcggggcgagcagcgcgggcccagcggacagagccccgggcctgcggggggaggcggcggcggcccgggggagcagacagtggcagcgaaagcggctccgagcgctgggctggaggcgcggggcgcgcgcacgggcgcgtacacggcgggtgctgagcccggcgtgcgcgcgcgcggcagccggcagagggccccgcacccccagccacacgccgcgaggaggctgcccccggagggaaggagggggaggacggtcacccacctgcggcgccgagacccggttctccagcccgccgggctcacacccgccagggcaccctcacaggggaggcacacgccggccgacccggtccacactccaggctggagcccaggccacaccggtcgtgcacgctggatgcacagccaggcagctgaggtcgagaacccggacgcgcacacagctcagctcggagagcacacacatgtccaggtccccgtcacatcctgacaggcgctgcgcacacgcagtgggcaggggcccccgagcaggcaggcaccccaacgtggctccctcccaactcacgacccctctcgctaggtgcccagcaggcgtacacc

SEQ ID NO: 318427 - DNA, 4001 bp, Homo sapiens
ctaaaagaaaggaagaaaaccaggagactgtggtgtccaaaagccagagtttcgcagtatgaatgggcaacagtattaatgctgcagagaagccaaataggatactatctgagaagttcaatggatctgccaaactggagatgaatttagggagaacggttttcatataaagagtggagaaagattccagtgtaaactgaatcgagcagtggcaggtgagactaacacgcatgacactttcaaaaagtttggctgtgaacgtaggaaagatctatggcactaagcagagaacagggatccggggaggctgaatcctttcattcagtacctatacatcgaaggtaaataacctgagatagaaatgcccctttggagattttaccactcctcaaccaaagctccctcttttcttcatttaattttttattggtcattcaccctctactacagatgctccccaatccttacaatgactagtagaagtcctattgtaagagaatccctaacattaacaaatgtgtctgcaaaagaaactgtacaatgaatacaaagtcattaagtggaataaataatcaatttctttgtctttaatggctttttatatgaaaactgccgtaatggcaatactgaggtaaattttacatgcataaacatagtgccttctactaaaaaaacctattatgataaaacaatactgaagtgtcagagttggtaactgttttagggctcaagtcttgtcacgaaaagtactattcatatatcaacactaaagaaaaagtgaagaaaatggtttggaaaactgagttctcagtccggctagaccctgttgttccaatttgcttgtgccttggtttttctgttaaaaaaaaaaaaaaaaagtggatgtctatttacaagtttacaagaaatggaagagtgaagctctgataaactttaaagcattaagagcaattattgctgacctactcgtgccacaagattgtctctactaccaaacagtgagcgctagttagagcctaatctgaccccgaaataaaattttataaattttcactgaattaaacactggctgcacaggagaaagactgaatgccaagatgtgtcacgatcgcagaaatgcacatgttgtctctcaaaataactacttcgaatgacaaaaacactattggctataaattctgtcaatctaggaaacgtgctatctgcaaatttgcctgaagcaggtcccaagaccaaacaaagaaacgagagaatgcaaaaactctcccaagcggcgctaagcaccgatggggtaacctcagggaaaataagcttcctttcattgcaggtcctggtgtgatgactctcgagcctcctgggcctctccagggccagagcggccgaaatcctgtttcaggagacagcggcttcccctcaggctctgccacgtctccaggccagacagggccgggctaaggtccgccggcgctcccgccagtctcccctaaagtcagcgccctggaaggtggggccagagcgctcctgccttggtccttggacaggagcaaagtgtcgcggggcgagaccctcgaaccgcgcccaccgtgccatccccagcggaaactgctcaccttgcgatgtgcactcctgcctgctgcaccccgcacgccgccacagctgagcctggaccacgggactagggggctcgcaaacgacatcggcgtccagtggcgccggccggcccgcccaccttccagggacaccgtccctcggggtctggctctggcgcctgcaagccatgccatgccatgccacccccctcatacacgcccctcggagccacctggcgctcacctggggaccgggaaagtgcctgcgtggtcgctgaagagtgtggtatgatagggaggtcgggacgtagaactacagcttggagaagacaacgaaggcgcaccctggaagttacctcggcgtgtccccgcctacaagatggccacgggcggcgcatgctcctgcggctgccacgtcggccgcgcgccgcaccgcgccgcgcgtcgccgccccgccccgctccgccccgcatcgcatcgccccgctccgcctccgcatcgccccgccccccctgtcccatgcgctgtgaacccggccgggacgctgcaagttaaactttggagccaagatcttcctaactaccgagacttggttctgcccacaccctctagaaacatcttccaaagggctggcctcctttctacttcgcagcccccttacacgagagtggcactcttgttaccaggcgtagctcactcatcctgtgccacagcggcccaagggataagatcagttagccaaggtcatctggttggcggtcatctagccaacatcagctagtccagtcagcacctccaggaaggacctcgcggcagatacaggggacttagcctgtatagtcaaagatttccagataacagtgattatatcaggagagagggattaggagaagagggagaggggagaagagtagcagttactgtactgaatttttccccaagtgcatgtattgcacattctttttttaattgtaaaatagacagattatcaactttcttattatatgctgcacctaacacagtacctgaaatagttggtgttcaataatgtacattaaataaattaatggagtgcgatagaggaaaataaggaacttcaaatcagaagtcttgatttgagtctgagactactctaatgccagttgtacagttgcctgcccttgtacaggtcacttagtctccataagtcttcatatttctacctgcaaactgagaataatactatccaccatccctaaatcaggcaggtgacagactcaaataaaatagagcatatgaaaattttttaaactttttgtctttttgagatggtgtcttgccctgttgcccaggctggagtgcaatggcgccatctcggctcactgcaacctctgcctcccgggttcaaacgattctcctgcctcagcctcccgagtagctgggattacaggcacaggccaccacacccagctaatttttgtacttttagtagagacagggtttcaccattttggccaggctggtctcgaactcctgacctcggcccgcctcggcctcctaaagtgctgggattacaggcgtgagccaccgcacctgtccgaaaacattttttaaattgcttagcattaaatatataaaaaattgtttttgttgttctcaattttttttcaggaactcacttagagatttcacattaatctatctcttgagcttcacagttgtaagcattccaaaatacctcactgaaaagttaatactatgtagcaatactctgacttcagatctcactgtgcaactaccatgggcggttttctttggcggtggctcctatcctctaagaatgtgtgtaggtggagatccaggttactgtccggatcgtgctgtttggggtggtgctaaagacagataaccatcttcatcctctctgatcaacacccttaatagctataaggtatgttggtttctccatcctttcagcaaatatttattagtggctgcaatgtgctgagcattggtactggaaatgcagtaacgaacaagacagacaaggtcttgatacctagggagcgttctttataataggagagagggtaggaacaggaaaataaagtaagtactgtttgtgatgtgcagtttgaggagtcaacaaagagtgatgtaatattgacagtaattggagtagaccacttcagataggatgaatgggcaaggcttctctgaataggtgagatgtgagcagagacgtgtaatgcagcaggcctgtgcttatccggacagaaagaagggcatgcaaagacttaaggatggagtgtgctcggcatgtgcgcagacaacagggaagcaggactgtgagaatggtaaagaagacaggacagggagtggggccagatcgtgtctagccttgtaggtcatgggaaagcctttgattacact

SEQ ID NO: 318428 - DNA, 4001 bp, Homo sapiens
acagttctggccaagtgcaaatcctcactctgccacttactaaccaggagactttgaacaaacagctctaccacaaaatgggaataagggtagtgcctccctctaaagactgttatgagggtacttagcacatatgctccatatgtggaagctaggtgaggtaataccccccagccacactctctctctcagtcctgtctagagcaggaagtcattccttccagctatctttgctctctcccttcagggaagaccctgggaggcactatttgtcaggtctgcttgtggagcgtgcaccccatagttgtcagaccaggacaagctgcagcggggaggcctctgggggcatccctgggctgcagggtgcaattcacccaagcattgagacttcaaccttgcaagaggcaccagtgagggaggccttccaaggacaacccagtcatcctcctttagctgggccacacccacctactcaccccactgcgtgggaatcttttgggggctctggccaaaccctagggacctgctatgtttccaccaggaccaaactttgcagtagccccactcaaaagcccctgttccctgcttcccgcatatattggggaaaggggctgctgggaggacagcaggcacattttactgattcggagatcccaggccccagaacttgtagcttccctgggagacaggttcctaaagtcctggggagagggtggaagaatgaaagaacgactgcaactgccctgggccacgggttgggtttggaggcagtcccagcccagtgaacccccccacccccaaccactattaagcagctcttgtttgtaggatctagaaaaaggaactggggaacccaggaaagtccaaacccaggctgcccacctgccctggccaaatcctgagccctctcgctgatccccatcaaattcagcctggcttatccccaggctgccaggagtcttaggccctcttccattgtgactgctgcttctgctccctgttctcttcctggcccccccaagatggccccaagacaaaggggtgggcttgagacagtggccccctgggcctatgcaaaaacaatgcccccagtgatcattccggggagtccctgcatcctctaggaacagctgaatacctcctcctccgagggggcccgctgggcagggttgtccccagtctggactccctctgcacccagccccagcagcccgctcctgggacccctccctcccgctgccgcctcggccattatgtgcctcctcagccctgactgccacgcccccgtgcgagcccccgctctagctgcagagccggggaggcctggccgccaagcagggctgtcaaagttgggaaactggaaacagaaataaatcctcaaagctgcagcctcgtgaaggtggctgccggcaggccccggtacccaatgccccgatccccgaccaccaggctgccactggcaccccccacgcacacgcgtacccccagattatacaaaagcggggagagggtagtgggtggcggagccgggagacaatcggcccggcagcccccaccgtccctcaggctgggctcgggctttcccgcggcgccccctctccccggcccagacccggccagcccgggcttcctctctcggccccatctccatgacaaccgtatccttcggatgctccagacgccgcggaattgatctggaaatgtagctttgttagcggacccgggtgggcaccgagggcgagggcgacgccccccacccgcacgcggccctctccccggcccgtcccgccccggcctggccgccagcggggaggggcgggtcccggagccccgcggccccactcaccgctgctggtccccgccgcgggtccggcctctcacggcggggccatcggaggccgccgggctgcctgtcccgccccgccgccgccggtcggagctgcccgcgcccgcccgcgtcccttcaggtgccggagccgcgatgtggagaggctgagcgagggggacggacggcaggagggagggagcggagccgtgagctggaggaggaggaggagggaggagcgggaagggcggggaagggcgggggcactgcgggcgcgcgagcggcgggcgcggagcccggagggaagcgcggcccccagccctgtccgcttgcagcgcagcgctcgccccgggaccccgagcgtgccggggagagcgcggcccaccttgtccccctctgccccgcgcgggccctttaagaaagggggggaggggagcgcccggggttctgccccctcctagccacgctgggcccctgccgtcctcgaaccctcgggcagacccaaccacctccgccctccaggcaggacccaccggtctagaacctgagctctcgggacccgccaggccctggaggtgaaggagggggcgggtcctggccctcctcccgcggtctgttcagggagtgacccctgcccccagccccccgacacacacgccagcccccgggagacgccgccaagggaggagcagggagtgcggggggccaaggtgaagaatctcagagagggagactgagcccctgagacctagagtcacacgggacgggacggagacctgggctgtggggtgagaaggagcctcgggacagagtgggatgggaggaggcaggagagaggagaaagagacaaaggagaaagaacctgagggaggcgggaggtgaggggtgggtccaaccaagaatccacatccctgtgccaggtcaaggggaagcctccctgggcagatataaggagacagagagagacagagggtgccctgggcagaggaaaccatctcccaaggcacctgtcccacggtgtctccccaagggcaagtcaaggccctgaagccgcccccctcagcccaggactctaactgaagaagagggttgactggctgtacctgggctagacattaagaacttcctggctgtgaggcacctgcagagtaagagtccgcctctcagagaggcattaaagggcccccacccacagggatctaaggagggcgtggggagcaggcccagtgcctgggagaagggaaatcaggatagagtcaggccctgccactggaggccactttctacccctctcccctactccagcccctggggggttcaccacacccagttgcttccatctccagacctcagcagatgatccacactctgcccggtggggccttgatcctgctgtgctcagtgaactcctactgaaccctcaaattcctccttaaatgccccttccttcatgaagtcttctctgaccttctttccacccatgaacacacaaacatggactcttcttagggagcaggaagaggatttgctgacctcttagggtggcagtaattggaggtgtggaatctgagctgtgcgtagtctccctcccttcaagctgggcaacagcaggagctgggacttcatcaaccatggtgacacctctgacaaccaagcatctaccaagtgctcttcatgtgtcatatttaattctcaaaacaatcctacaacccgttttacagatgagaaaactgagacttggagagcataagtcacttgctcatgatcccaggagatctgaatctgtgagcacagctggtcaattaagagggcactcagaccacatccttcactgcccatcaaaccctaggacattaccgcagagcccagaaacaagggagccactctctgtgcaggtgcccaggatcttaaagggcacagagggagcttggcttccctgctgtcctgcattctacccccctgccctctgctacctgtaggcagagaagggtggcgaccagcaggggctgtggagggaagtgctcatggcagggcttagataccacattccccacccttggcacccatgccctcaagtcacagctggaccacctttctgggctcctacttcctcatctgcccaatgaggatggtagcagtccccctctttgtgaggctaggatggggaccgaaagag

SEQ ID NO: 318429 - DNA, 4001 bp, Homo sapiens
ctaaggcataataaagtcactgaaggagacactgaatagggataaagacagagaaacttaaatgacagataaatgacagaattaacaaaatagattctattacctttagtgccagaaagattacatgcaacagccactttcttttgttgaaattcttttaatttcaccacattatctgtaagtaggtatcttttagctaaaaatcagagaaagaaaaaagtaaagtcattttgactgttttagaagttagcaaataacatgaatagagctggattacctctaacatctattatagataatccattagacaggtacaaatataactgtacaaactgtacaaatataaatcctgggaaaaacaatttctgaactaccagagaatgcaaatcctcagcaaaacaggttttatttgtgtgtgtgaaagaagctagtgattaaccgtagctagtgataaacctgtgtggggactggttgacaggaagttgggatttgaagtacaaatgggcatttgccatcggttaagggtatcaagggcatttaaaaaaaaaactaataacatttaaatgcaaaacaggcatatttagttttggtttatccagggagaagcacagtgtagtggaaaaagctgcagcatgaccactggaactcccagttttgtcctctgtgaaatgagggggttaaggcctctcagatgtggactcaaaatacatttgagatacatggaaatcattgatcacagcttagtagatttgggaaacatcatcctttctttaggatccttggctgtgcatgagataaaacggaccaagcgtggccgaagaatcacgcactaacagagttctgtgagctgcagtaacaaggtaacaataaaagttgctatttatttacagaaaggcagtccagtgaagtggttaggagcaggtttctattgttgggtgtgttcaaatcccacctctaacagttccctctgactttgggcaaattacttaaccttgttcctcctctgtaaatggagaaaagaatggtacttctcttgctgggtgttgtctagagaaaaggaattaatgtatgtaaactacattaaagtaatgcctgacaaacatttttactatcactcactagcatcttcagatttaactctcttcatagagatgttagaggatagttttgaaaaatgaagaaacgtgccgttaagtcttttagattgttagcagaactgagactccataagacctctgcttccaaactctgcagaaaagaaaaaggccgggcgcggtggctcactcctataatcccagcactttgggaggccgaggcgggtggaccacgaggtcaggagttcgaaaccagcctggccaacatagtgaaacccgtctctactaaaaatacaaaaaattacccgggcgtggtggcgcacgcctgtagtcccaactactcggaaagctgaggcaggagaatcgcttgaacccgggaggcggaggctgcagtgagccgagatcgcgccaccgcactccagcttgggcgacagagcaagacttcgtctcaaaaataaataaataaataaataaaagtcacccaaggcgggagggatgttcctgaagacgaacgtcgccccatctgagggagcactacagccccaaggtcaataccccagcagtccttcgatttgcaggcactgggggtatccacgacccccagtggtcaccactgcacccacgtgcaactagagggcgagggtgcgctccaggccagtgagtgacttaggagctgtggctgctccacagagatgctagctgggatctaacactcccttctctcccatccctcccctccttccctaggctaaagccgcggatacctccgagagggcagcggcagctgacagagccggagcctcccaccccaggatacaccaaaatctgcagcgcctgcaggagaactcgattcgagggccgaaatgcagcagccatactgtctcggaccataccaactactggaaccggggcgaggaggcggagcgtcggtcctgtcgtcgagagcgacaaaagggattcgtccaattctgggcgccccgagaggtcgagctgtaaccccgccccttcctctgtccgtaacccgttggctgttccttttggtacgctccaagatggctgcctccatagtgcggcgcgggatgctcctggcgcggcaagtggttcttcctcagctctctcctgcaggttggccggacagcttcattaggcccctgattattctgttttttgggtgaagggagcggtgggctttcaagaggagaggaaacgtttctggaatctgattgctagggacgccatttggggtgtttggtagtgcagaagaaggagacaaggtatctgatccatttccttccctaaaataacagtatgttcctgtccaaaggtacgaagagcagtggaaggttatatagcatgagggaatttgcgtatgattcgccagatttatgtgttggggtggtcgtgcttttgctgaccacgaaaaacccaaatgtgcgccgggcgcggtggcccacgcctgtggtcccagcactttgggaacgcgaggcgggcggatcgccaggagttcgagaccagcctggccaacagggcgaaaccccatctctactaaaaaatacaaagaaattatctgggcctggtggcgcgcgcctgtaatcccagctactcggggggctgaggcaggataatcgcttgaactcgggaggcggaggttgcagtgagcagagatcgcgccactacactccagcctgggcaacagagcgagaccctgtctcaaaaaaaaaaaaaaaaaaaaaaaaggaaaaacctaaatgtgtccattcctggggctgggacatttttctcccatctgaggtttctttagagggacgtcagataaacatttttcccaccaccacacatttagctggacccctggtcttcgtggaagaatttttcagtattaatctcattttatctgatgacctagagcacaacttttgattgacctttctttgctatagttttccacgtgtagataataaatgctattagttacttgtaaaatactttgatatctgaactaaatggcagcccactcaaagcctgcatagtggatctgataatgaaaacattggaaaaaagttttaaagtatttatagaagccaaatttgcagtgattctaaccacataatccagacagacatatttgataaaaatgcaataatcacactcgatttttccattgccgcttatcttccctttccaacctacctcccatcctctatttttttaaaaagcacgcacttctttaggaacagccattaaacgtcaatgtgaaacctcagagttggccaccagttttctgaagattaagtggctgacctggtgaaaacgtttaatgtcacacattaggcagtgttatgcacaacgcttgacaccttagtaagaattagctgttgtagctattttctgtttatgtggtttccgtgaacaactacacacagagggcattttgggagacctgtctttccccacaatcacctccccagccttttttttttttttcgggtttcgttcttgttgcccaggttagagtgcaatggcacgatctcggcttactgcagcctctgcctcccgggttcaagtgattctcctgcctcagcctcccgagtagctgagattacaggcatgcgccaccactcccggctaattttgtattttcagtagagacggggtttctccatgttggtcaggctggtctctaactcctgacctcaggtgatccacccgcctctacttcccaaggtgctgggattacgggcgtgagccactgtgcccagctggcccagctttttaatctcccagttcagaactcttgagcaatgatctagatattgtcctgactccagaatgtagaaaggtgattacttatgctagaatgaagcatatgctagaatgaaggcatagagaataacagataataaatag

SEQ ID NO: 318430 - DNA, 4001 bp, Homo sapiens
gagcggggaatggacgcgggaggtggatgcgagaaaaaggccgagtagggccccagccccggtcactcaccacgagcgggatggagcagatgagcaccaccagggaggtggcaatgagtaagatgaccatctggatctcggcgcccgcgatgcggcggaagctccggcggcgccgaaagtcgctgaggcgcggcaaggctggggaggcagcggggtggccccgggaggcaaccgaggcggccgcggccgcgtggtgctgctcggtgcccagcgaggtgcggcgcatgaactggcggtgcatgcggagcagcgcgccgcacacaagcacgttgcagaggacggtggcgagaatgaggaaggagctgaagcccgcgtacatgtaggagtaggcggcgtgcgccgtcacgttggtggtccagtcgatgaagcaccaggtgtctgggtactgcagccgcgagctaccgagacccatgttgggcagcgcgcaaaagagcacgttggacgcatagactgcaaagagcgtgaggcccgccaatcgcttgtccacgtagtggctgtagaaataggcatggttgatggccaggtagcgctcgacactcatggcgcagatgatgctgaggccggacaggctgaagaagagcagaatgaaggtgctgtactcgcacagcggctggcccccgggccattggcccttcatgtacgtggcgatggtcaccgggctcaccaacaaagtgcccaacaggtcggtgacagccagcccacataccagcgtgtagaaggtcgtctccttctgctccttgcgcgacttgcacagcaccacgatggccaccaggttgcccaccaccccgaagatgaacatcaccgccgggatggtcactgggctgttcagccggtcggggctcaaggaggcggacgaattgaccccgggagtggacatgatagtggctggcggtgcgcagccttggagtgcaaggctgggtctggggatggtagaagagagacaaagctgccgtgagcggaaattaccacttgtaaggtgttagacccgcgcccgagaaacgatacactgataagacaaggggagcaactcgatcctactttctggattgtagccacttaccaactgcggccaccaaaatctccaggctcgcgatacgtcctgccaacagcacactcttgctgacattaatatttataaactgattttcccattcctcttcctccccacaatccaactcactccattgccaagatgaataagacccatctcaagggaaaagtagctcgctagtgctattctcgatagattctgaatcaataaaatgctcactgaaaacaagttacaaaagcaatttggagagcgcgctcttcccttcttggctctcttcggcgagggccgcatccctgcgttctctacccgttgaccccaacgtcagcccaacgccatctcacctgtagcggcagcagcggtggcagcctcacgagcccccagggtcagccctcagatgtcctggacccgcctccaacctgctttcaccttgtcctgctcagtctggaaactgccaaatcttcggcttctcaaagccggtctcagtggctgtcgatttttggacaccgaggtcagagttgccagctttcaaaaacttgggaaacaagaggtgcagcgggatgggtcagtgaagaatggtgctggatttcttactcgctattttttttccttcaaagacgagtcccagctttgcagtgcccgccggtctcgtctgcgggaggacagcgttcaggtgtgaggctgtgcgcgcaggtggcgcggagccttggtccccagctctggctgccctccgccccagccacgggcagcacgggcggctactggagtttgcggctgccgctgaggccgctcctggctacctgggggcggctcggggtccactctgccagaggctctggcctggggctgttcatcttcctctcgggctgccgggcttggagctccgctctcgcctttccaccctctgtacaaacttttctcctcctccaagtttccctggcggaggcggaggcaaaccgcgcgctgcccgggcgcccattggccggattggaagggggcggagcgcgtcctccctgggcgccgcagggaagactggcggggggcggtgtctgggctggggcggggctgggcgcgcggggtggggcggctcccgtggttttcacgccctcggaggtgcggagtgggaactcggaggggaccctgggaagccccggtgctttccccggcgaccgcttagccgctcctgaactcggcttccagtggggccaccactgaaaccggcgaccgtttccgcctcgctgcctgccgctcggagtgtactatttcttgaacctcctgtccgcgggccgcaacatctagatcgtggaagagagggcagttgttttaggattctacctagggttggccgagaaaggagaagaaatacggtgtctgcgctagcgcgtgcgccccggggttagacttgggtgcgcccagcggacgtggtaggtgggtgggtgggtgggtaccagattgggcggggaaataacgaagaatccatcctctcaccataaaaggagttggagtcagttggcagtgcccagactgcgggctgcgcttggtcgggcaccccaggcaaaaaagaaaaaaaaaaaagagaaagaaagaggaggagacagtgattgcagcctctcccggcgcaggtggcagagccttgcggctttggagagaggtggagccttggtgaggttgggaggactgcctaactgcgatctttttctccattcttcctcctgggaacttctccgccctgaaagggtagcgtgagcttcatgccttcggccggccgtgttatactcgttagacccaattcaccatgaatcctttgaaagactagtggagagtgagaagggggtttcaaagtcactggagtaaaggaattctccaagcaccacctcatgattaattcttggaaaagcctgtttgcgcggcccttagaatcattttgacttcttgtctaatggtgaagtttttctctgtaatccttctactctgttttctaaaaccagaactaaaaacctaaaaaattgtaaaacttcatggtgtaattaaaaccccttcaccattttttttaagtaagattgtgtggccttattgcacaatttaaattcctggaaaaacctcttcccatctgcagtgtacaagcattctaacatattatgtctcctcacagggtaagtaaataactggattcttttatgtgataagcaggtacccatttcttaaatgttatttcgtgaacgaacaaacctcctaactggttcttcagttagtctcagcaacacatgggtaataagagaaactaaaagggctttccgatttcaagtaattacaggtcataaaatatccagaatcatatttacttgcaaaaggcactatatggatatactaataaagaattattctgtttatactatttacttaataatatgagaaagaaaaatacacatttgttagccaatattaagattgatggtgattggtcattttcttaaaaatcttcttttaatcagtactctaatcacttctgttgtcgatgcttcctttgaacagtaacctctaggattgtgtcagcacagaaaacaaatcaacattagaaaaaaggaaactgcacactctgcgccattcctcactaaccacattgctttgctatcactcatgtcagttgcttgtcagtaaatatatggaggggaggttgggaagtcccttatattcactttctgctaatacaaattttttttttcaattttctttccatatgaagcttgtaaaagagaaaacaattggttgctatttattaatttaagaatgatgaagaatatattaaatataaaaactgagacacactgctgagataattagtaactgttacaggtattagcatgtcattgacaaaccagacttgttatcaatt

SEQ ID NO: 318431 - DNA, 4001 bp, Homo sapiens
catttttggcttataggagtgtgattttttccacaagtgttaccttaaattatttgcttggttaatattaaaaacaagtttgtgttcctcaaatacacacactgagtaagaggcagcaagacactgtcaaggactttagaataaacaccatgggcaatcttctagtctggagttgacaggtctactacagtctactatagaagggtgctacaatggaagccggcatgttcctgctttatctcacctcacatatgcatgcctagaattccctatggggttctcacacttcggttctgtgtctcattgtttttgccatgtctttgcaattcctgtatttaatatttttctttaagttaattcactttttaaagaagacatctttgtcctaagttgcactatatgtaattcactagttgtttcctaatgcaaattaaacaaaacagttattcaaataaagtgttaatccacatgctaatgtcatctttcacagcaaagtcctctcatctgggatacacagacctgtagcttgtgactcacactcacacgaagatcaacatgctagcaaattgtcacctaacaagctgctgcttgccctggaaggctaagagaatggcagcacctgtgctattaaagcagcaacagaacctcttaaggcaccctctctctcagtatgtatctgtaagtggataccaccaaccagtttctcttaaggcaccctctctctcagtatgtatctgtaagtagacaccaccaaccagtttcacgacactagtgaaggacaggtgaggcaaaaatatgcatgaggcaaaaatatgcattagctgcatctgagatttccaatctcaaggtaccaagaagtccacaaggacaatctgagtctcctccactactctgcttgctaacctctatttcccttctactcagagggaagaaagctacgtaggatgatgccaatagtcattttaagagtcaaaagtgcttaagtgtttaaacagtgtctttatagccaacacttacctttttggcagaaaagcttggctgtttttgtttgaggggtcccttggtctttacagacttttctgtagctctgttgacagttcccaaagcctttctagtagctttaggtaaggctggtggggcatcgaacgttttgccaaaacgtggtgttgaaacttgagatctcccatctaaggctttgattgctgaagaaaaagtcttaccataagaatattccagcagcaaaatacctgtacaacttaaatactgtgtatataaacttgacctctcacccccaaacccaccccccacttttggtagtggcatggctatgataggcctaatagcagagattcagtaacttccttaaatcatctcattaagatattaaaaatgaaaaaggaccaataacaaacgactccaattgcccaaaaagtacactaaatgtctcgtccagctccaggccacgtccacaataccagtgtatccgactgcagccttgtatacttacaaggtccagaccccagcttcagcccatccttagcaaccacacgggtgcctggttctccattttccttatcaacatagatcagagtagccattctggattattctaagaatgagaaatacatattagatattggggaaggtgggagaagcaaaggtatagcaacataccaaactttctatcctaggagtgtccacacaaaaaacaagagctaaacagcggaacagtcacgggcgtgagccaacaagtacttaatccagctctcaaatcttccagcctgagtcagaggctctaaggtcccgagcagcgcgcggtttggggctggcactcatcagacagttgccgttggtccagttagcagtccgagaccacgctcaaacgggctcggagccatctaagccccgggcagtcccccaaccccagccccagcttcagccccagccgcagccgcagcccgcctccttccccgccggagccggctcaactaaccacccgcgaccctcccattcactcacgcaggtcttaacagccgcattcatctgaggccgcggtgaacggacgcggcgcactcctggtttaaaccacaactcgcggcccaattggctcttccgcccaggaggcggggccgtgggcgtggtcaccaagtagaaccaatggaaaggacctaagcagccagggctccgccccaaaagctctttcttgcaaactttgtggcacgttttctgggaagaaaaaactaggatcgtgtaatattaaaaaataaatcgagaggctttttttttttgctctccatattattaagctgcatggactgaggtactgactcaataacaatggtttattgctttaagatatttttatttagatgaccctgtaaaaaggatggaaaataaatagaaatattgaagaaataggggaaacaaccaatgttgggtctaaagaatactagcagagaagaatttaaaattaagaagaaatgtaagtacaggtagatcaaacagcagcgtttgagtcattctcttatgcttatgattaagaacgaactgatcgttccctaatcttaggactatcctcaatacttcaggctaagacactgtttctattataccatcacgaatctgtcttaggaacaaaattatgattctaatgaatacataatttagtcttcccttaaaattctatcctttgatagtgatttattttaaacctctaacatctcaataatatattaaccaaagttgcctggaagggcttggccagggagcaagagaatatcagagagataataaagatataaaaaaggaattccaatttcccagatatgaaaagaaattttgcttgaaaaagttgacgaccttttcctgtttctatagtaaaatggaatacattgaacaactacaagatgaagatataaattaaaacataaggctgacctgtgtcattcaaactccgcttcccacagttcaccatatatgcattttaagctgcagatcagctgagagagaggagttgattccatattactctttcacgaaaggcttgacactatacctgacatagacatggttctcaatatatgccagttcatcatctctttttccctggcatttcaggaccaatattgattgaatgattcattcattcacaaatatttattgaatacctattaaatgctggacattatactaggttataagaaaagagcctaacttaaggtgaagaaaagaggaaagacagaaaaatatgcatacctttattgtcccttcactgttctttttcctttatccccatcctttatttcctcctgtatctcctaaattttacatcatcatattatattatcagcactcaaagtgttaatttttaagactaaatctgcacaacacctatagcttccaagtggggattctctatctacagaggttttgaggtgcaaggtttgtcttaggatgtcttctttttttcaccaacagaaagcattgtttctcctaaggtcatgcagcagctgtaaaccataaccaccctctctgaataaccactgttttcttactaatgatgccctcagaccagctttgctattcctattactggaaatactcaattgctaaaccaccctcactcataacagcacttagtccctaatcagtttctcccaatccttctttacaaacagcaacccatccagaaccaatcccggctttcctagaccttcctcagaaccctccagagggacctcaagtcttagaaaagattcaactgtcttgtcctgcgctttctgattcctcttcgagatgcgctctcctggtggttttggctaattaggccttaacactcctaagcaaatttcaggaatatttttaagtggaaaaaaacaaagcctgagtgattcatagactctattcactttcacgctagtctctgacactgtttcttcatctactgccctgtaaaagcaaaattaatatttatgttcctaaactccaggtattgcaaattc

SEQ ID NO: 318432 - DNA, 4001 bp, Homo sapiens
gagtaagaggcagcaagacactgtcaaggactttagaataaacaccatgggcaatcttctagtctggagttgacaggtctactacagtctactatagaagggtgctacaatggaagccggcatgttcctgctttatctcacctcacatatgcatgcctagaattccctatggggttctcacacttcggttctgtgtctcattgtttttgccatgtctttgcaattcctgtatttaatatttttctttaagttaattcactttttaaagaagacatctttgtcctaagttgcactatatgtaattcactagttgtttcctaatgcaaattaaacaaaacagttattcaaataaagtgttaatccacatgctaatgtcatctttcacagcaaagtcctctcatctgggatacacagacctgtagcttgtgactcacactcacacgaagatcaacatgctagcaaattgtcacctaacaagctgctgcttgccctggaaggctaagagaatggcagcacctgtgctattaaagcagcaacagaacctcttaaggcaccctctctctcagtatgtatctgtaagtggataccaccaaccagtttctcttaaggcaccctctctctcagtatgtatctgtaagtagacaccaccaaccagtttcacgacactagtgaaggacaggtgaggcaaaaatatgcatgaggcaaaaatatgcattagctgcatctgagatttccaatctcaaggtaccaagaagtccacaaggacaatctgagtctcctccactactctgcttgctaacctctatttcccttctactcagagggaagaaagctacgtaggatgatgccaatagtcattttaagagtcaaaagtgcttaagtgtttaaacagtgtctttatagccaacacttacctttttggcagaaaagcttggctgtttttgtttgaggggtcccttggtctttacagacttttctgtagctctgttgacagttcccaaagcctttctagtagctttaggtaaggctggtggggcatcgaacgttttgccaaaacgtggtgttgaaacttgagatctcccatctaaggctttgattgctgaagaaaaagtcttaccataagaatattccagcagcaaaatacctgtacaacttaaatactgtgtatataaacttgacctctcacccccaaacccaccccccacttttggtagtggcatggctatgataggcctaatagcagagattcagtaacttccttaaatcatctcattaagatattaaaaatgaaaaaggaccaataacaaacgactccaattgcccaaaaagtacactaaatgtctcgtccagctccaggccacgtccacaataccagtgtatccgactgcagccttgtatacttacaaggtccagaccccagcttcagcccatccttagcaaccacacgggtgcctggttctccattttccttatcaacatagatcagagtagccattctggattattctaagaatgagaaatacatattagatattggggaaggtgggagaagcaaaggtatagcaacataccaaactttctatcctaggagtgtccacacaaaaaacaagagctaaacagcggaacagtcacgggcgtgagccaacaagtacttaatccagctctcaaatcttccagcctgagtcagaggctctaaggtcccgagcagcgcgcggtttggggctggcactcatcagacagttgccgttggtccagttagcagtccgagaccacgctcaaacgggctcggagccatctaagccccgggcagtcccccaaccccagccccagcttcagccccagccgcagccgcagcccgcctccttccccgccggagccggctcaactaaccacccgcgaccctcccattcactcacgcaggtcttaacagccgcattcatctgaggccgcggtgaacggacgcggcgcactcctggtttaaaccacaactcgcggcccaattggctcttccgcccaggaggcggggccgtgggcgtggtcaccaagtagaaccaatggaaaggacctaagcagccagggctccgccccaaaagctctttcttgcaaactttgtggcacgttttctgggaagaaaaaactaggatcgtgtaatattaaaaaataaatcgagaggctttttttttttgctctccatattattaagctgcatggactgaggtactgactcaataacaatggtttattgctttaagatatttttatttagatgaccctgtaaaaaggatggaaaataaatagaaatattgaagaaataggggaaacaaccaatgttgggtctaaagaatactagcagagaagaatttaaaattaagaagaaatgtaagtacaggtagatcaaacagcagcgtttgagtcattctcttatgcttatgattaagaacgaactgatcgttccctaatcttaggactatcctcaatacttcaggctaagacactgtttctattataccatcacgaatctgtcttaggaacaaaattatgattctaatgaatacataatttagtcttcccttaaaattctatcctttgatagtgatttattttaaacctctaacatctcaataatatattaaccaaagttgcctggaagggcttggccagggagcaagagaatatcagagagataataaagatataaaaaaggaattccaatttcccagatatgaaaagaaattttgcttgaaaaagttgacgaccttttcctgtttctatagtaaaatggaatacattgaacaactacaagatgaagatataaattaaaacataaggctgacctgtgtcattcaaactccgcttcccacagttcaccatatatgcattttaagctgcagatcagctgagagagaggagttgattccatattactctttcacgaaaggcttgacactatacctgacatagacatggttctcaatatatgccagttcatcatctctttttccctggcatttcaggaccaatattgattgaatgattcattcattcacaaatatttattgaatacctattaaatgctggacattatactaggttataagaaaagagcctaacttaaggtgaagaaaagaggaaagacagaaaaatatgcatacctttattgtcccttcactgttctttttcctttatccccatcctttatttcctcctgtatctcctaaattttacatcatcatattatattatcagcactcaaagtgttaatttttaagactaaatctgcacaacacctatagcttccaagtggggattctctatctacagaggttttgaggtgcaaggtttgtcttaggatgtcttctttttttcaccaacagaaagcattgtttctcctaaggtcatgcagcagctgtaaaccataaccaccctctctgaataaccactgttttcttactaatgatgccctcagaccagctttgctattcctattactggaaatactcaattgctaaaccaccctcactcataacagcacttagtccctaatcagtttctcccaatccttctttacaaacagcaacccatccagaaccaatcccggctttcctagaccttcctcagaaccctccagagggacctcaagtcttagaaaagattcaactgtcttgtcctgcgctttctgattcctcttcgagatgcgctctcctggtggttttggctaattaggccttaacactcctaagcaaatttcaggaatatttttaagtggaaaaaaacaaagcctgagtgattcatagactctattcactttcacgctagtctctgacactgtttcttcatctactgccctgtaaaagcaaaattaatatttatgttcctaaactccaggtattgcaaattcttaatacgaaaaaaatagattctattatgttgggctattttattgaggcaggaatggtagctacttttacttttacattcaaaaaggatacacgttatggggg

SEQ ID NO: 318433 - DNA, 4001 bp, Homo sapiens
catctcatatacacaataatgacaaaacgcctactcagtcaaagcaaacagatgcagaaaaatattatgggagatctcctttttctttctttttccttttactatttgaataactttggttccaaccataaaaatcacaacttagcaaatttcatttaaatgccttttttaataatttcttcatgttcacagaagtttcactgaccatttttataagtttaaggtccagatgcaatgcatattgtataaaagagagcacttattgtttaccttgcatgaattaaacctacgtacctttaactctacaaacttctgcataacatttagacaaagctcagacacacagcatgcctagccctcatatatatacacatctctaatcacaggtatatagggtgtcaaatatactataataacctccatgtaaggtttgaaatttggtaacaaaatgagaaaaactaaaaatattattttacgtgttctaaaatatctcttttttgtgctaaagtcaaatgttagctcaacatgaaaaggacttttatataattcagcaatattataatcttgaccattttgcaaacactttttaataataatagcttaaacgtgtacaaaagttcttggttaattagggaaataaacactcagttctttatattttttaatcaagtaggaaacacagttcatataatgttattactttttgtattttttttgtttttagcagctgcttactgttttatatggtggataaagtggacaacatccagcgatgggtggcaagtcaagaagagaaactgtcagttggtggaggttctgtgggtggtgctcccttggagttaacaggtttttttttttttttaactttttaactttttattttctctctttctttacagtatattttctgtgtgtgtggctgtgtgtgtgtgtgtatgcatgtgtgtgtgtgtgggggtttcattcagtttgatcaatcttcttccccttcttcctcaccctgcagtagcagggtggcagcggcggtctcctcctgctgctgctgttgctgctggtgaagctgctcacaggcagcccgcttctccctctgcttctcttgaatcttcttcatctcctccgagtacttgcagaaggtgtgtccgaacttggcccacaccttgtagggcacggtgatggagttgcgataggtgggcttcacctcgctcactcgcataaacacgccgtacttgttggagcccacatcgaagaagaagcgcttgttgtccacagtcaaggaggtgccctcgggcagctcggccggctcctcctccactccgtagtcgtcgatgagcttggccagagcgtcacggaactcgatgagcccctgcgcgggcagcgcaatggtctggccctgcgtggagcccaggccaggcccccggttgaccgtctggcggatgcgcaggaagcggccgcgctggttctccttgagatccatgtagtacttgcggttctcgcgcaccaggaactcgcttttgagcgcccggcgcggctcgtcctgcgcctgggccaggtccggcggctggctggggcccagctgcgcgtagtgctcgatgaagtcgcccaggtagtcgcggaactccacggccactgacatggagagagtaaggcggctcttgttgccgcccgcgcccacctcggcgatcttcaggaagcggcccttggcgttctgcttcacgtccaggtagaagcgcttgttctggatgtccacccgcttggaggccagctcctgcgtctcgtgctgcagcccccctggggccccgccgccgccgccgccactgccgccgccgcccccgccgccaccaccgcccccgccggagcctgagcccgagccggggtgccccagggagccgcccgaacccagcgccgcaccaccctgctcgctgccgctgtctcggtccgccatgatgctgcgctccgctgccgcgccgccgccgcctgccgctccgcccgccgcctcagtcgcctcagccgccgctgctttccctccccggctccgcctgctgccgccgcaacccccacagccagtcagccactctcgcgagatctgcgggagagacgagacagacgagacccggtaacagggcactgactccccagtacagtagcagggcgccctactgtacgcgcccacccgcccgccggcacgtgacctgcgccccctccccgctgccagccccccgtccgcccgcccgccaggcggcgcccacccaccggccctcaccctacaaccctggctgggtgggggagagggagcaggacgcgcagcgtcgcagctgctgctgccgctgctgccgccaccactgctaccaccaccaccaccaccaccaccaccgtggctgtcgctgttgggcagaccctaggcggcctcggcctggggagttaggggactaggggtgagaaggagtctgccatactaagcacagagagtgggcctaagctctgctttccagtgaccccccaaagaggatgtaggaggaggggcctgcgcggcgcagcagagccccctgcaaagaggggacaccgagtcacggccaccccctctcatgcgggcctcagcaagacccaaacccaaacctagacaggcccacccgccacccggctgggttgtctcctaccgcagagccttggccgctgaggcaggcaaagaagagaggtggtgcggtggtaacccttagctgcagagggggctgctggggatgaggtcggggcgccggcagcagtggcgtggagcagcagacacctagcctgtccctcccctctctctcccgccgctccccctccccgcacacacggcagtggctctggcctcagatgatcccgctcccccctccccccaaccgcagccccgcacagtcgggcgggcgggcgcactcaccgatggggggagccgagcagaggacagtagacgcaccagggctagggtgcccgcagtgactgttcccgtcgactctgcccttccccacatgcaacaatcaaaaagaaactccacactcacccaaaaacctgcagccagtcccccttgggaccacgactgactgcctgcccgcccgcctccccctcctccttctgagatttggggaaggggggcaccctgctcagggctgagcccagcctgagttgctggccagctctgcggatgaaccaggccctgtgagcattcagaccctagcccactcttcttcctttctggaaggacccagaatggaggagaaaaccaagcaggctttcggaaattcatgagctaaaaatgtcaggaatttcctgggaaacgcagttccttacgggattcattaaagcaggttcgcttgccccttttactcttcccagaaacttgtgtcaaggagagatcccactcccaaaagtaacatattaagtggtcgctggtttttatgcagacagctaagttgctgaccattaattaaccagtgagtctttggacggtgatagctaaaaaggatcttctctggtattaggggctcaggagtagaggagctcagagatacctgatttctcttttactagacctgacgtataacctagggcttatttccagataggtattgagtgcttgtactctctcactgcagtctgcagccctggcactctggggaaagctaaggcctatctccaggggacccccccctgccaatgcgcccactctctcccccatcaccttctacaggcagctgagagacacagatcacacagctctgcccctggctttctcaagcacagatcgttgcctctatcctgagaaaagtatacctattccatttgtgggttctattcccattgagcatctcccgcttcccccaaaagtaaggagacttgcctccctcactcttagcccgagggacaactgggaatatgattgcccagcttcctagaaaagagtggactaacgatcaagaaaccaagagcaggctagggaataagccttgctgattcctgaaccctcaaag

SEQ ID NO: 318434 - DNA, 4001 bp, Homo sapiens
ggatttcaagaccagcctggccaacatggtgaaatcccggctctagttaaaaaatacaaaaattagaccagcatggtggcgcacgcctgtagtcccagctacttgggaggctgaggcgggagaatcgcttgaacccaggaggcggaggttgcagtgagacgatatggcgccactgcactccagcctgggtgacagagtgagactccgtctcaaaaaaaaaaaaaaagatatttgagattaaataatacagaataactgctctcatctttcccctcaaacaccatacttcaatatgaaattttaaatggcttttttccccaaatgggaaagaaggattcctgggtcttgatgggagagcaagcaagtttaagagtaaaacatactaataagccattgcaaacaggtgagatacgatcagagcgtgtgctgttgcaggaaacagaatggaaagccgtgaatgggagtctctgcacttcatatctgcaaaagaagagaataaaaaggttaactccagacttagaacaggttctcttcccctgttgaaagcagagcccaaaaacattttaaatcaaaaaatgaaaatgtggttaagccaaatttgtagatgaactcaaccttcttgtccttaatacataaactgaatcccaggtgttagaagttacttgaacatttttatgctacaccaccttgacattaaaggattttttaaaaatctccaatctcttctttaaacttttcttaaactatcattaaaattagcaaaatatgcttctctgttgaatggttaacctaacgggaatgacttctaaccgtaagaattacagttaaaaggttcattttaacaaatgctcttccccctgtaaggagtgacaggtaaccttttgggaaccccaatgtacacacccctttctccaatcccgctaaagttaaacgttagaggacagacaagtgcctcctcgcaagcaatgccccccgcccccccgtccccccgtccaacactccgttctctgcaaaaatccatctgcatcttgcattaacccacccgcccagtgacggtgactccaggccaagtcgcagaagaagaccaggcgtgaggggtgagacctgtgagcccatctgcacctgcaccctcccacctggtggcacacctgccccgcaggcgcccacctggggccgggaccgccctctcccggtctcgcgcgcctgccccactcggagcgcgcgccacgcgccgcgcaggaccagagggcggggccccgggcagcggggaagcgagggctcggggagagggggccgcccgggctcactccctccctggggacccagcggaccggagggtgctgggggcgggcgcggtaccttttggacagatccatgaggaccccggagaagagcttctccccgaagcggaacgacacgacaagcgcgtcctcaatgatgtggtccagcgtgacccgcacctccgagcccgggatcagttgcgacaccgtggagtccccgcccgccggcggcacgagcgccggggctacgggctgaggcagcggcggctcctcgcgctcctcgggagccgggggctgctccggcggcgatgcaggagaaggtggaagttccggccctccctgaggcgcggctgccgccgactccgccacccgaacggacagtttctcctcagcctccagctccggccccaccgcctctgggctgcgggcgagctcccccggcggcggcggtggcggcgggagcggcggctcgtcggcctgaggagcggattgctgcccgtcagtctcgccatccggcacagacgcttcagtggccgtgaccgggagggggtcagtgccggcctcactgccggggatgggctccatctccggctcggcctcgccggcgcccccctccccgggggacgctgcagtcgctgccgcctctgcagccacggccgccattttcttcctagcttctccctcctccaactccggctgcagcggcggcggcgacagcgctgcttggttccctgggccttcccctccctcccgcgaacactttcgtcccgccctttccctgatgctcgtttctggcacctcgccattggttgcattctacacccctcccgcacttttgatattccattggccagggatggacgtctatcatctagtcagtccatccttcccacgcagagtaggaacttctcattggccagatgtgttgtcaagtgtggaatctgagtggaggaatagggggcggaatcaaagggggcgggggaagtcacaaaagaggagccatatactcatcgcctcttgctattggctggaagaggaaataaagttttatggttggcctacgctcctgcccattatcagccaggtctttggaggtgggagaaaggatggaatcatgtggcgtgccacttctttcaaaggcggccgaggggaggagtaacaagggaatgcgggaggggaaccgcttcccaagaatctctgcgcagagatccttagaataaatgttatttctaggcgcggacttcttgcggccgcgtgtgggcacgacaggcttctttgggaaagacaactaaagtttgaaatacaatcctacagacactttttgagtgcctactatgctagtcactgcactaggtgctggggaatggaatgttcaagacgttctccataacctcatagcagcgggctccagcggccatgaggagtacgaggagtattttccttgacttctaggagtatgatgagtattttccttgacttctctccacttcctaggaacaaagcacctatttattaatatttcagaaataggaaaatgctcatgaaagaagagagacaccatcctcactggattaaactgatgactgttccaggaaggagtcttgagacattgctggactgatatgtgaacactgcttgttctctccaaatccacttgcaaagtggacgcacctggtccctgctaaagcctttttctttcctggcttctccaatgccacgagaacaaaagatctctcacttcagtgtcctgacgcccctacttctcttacttccacatcaagtcttttcgtttgtcatctctggaagaatctactgaacctatttctctcaaatggcaccacagagtcagccttttttctgggagaatgcctgcaggagagagggtagaaaaactgctagcaatgaaagtaaaaaaaataaagtcctgaagaataattacagctagtgtcttttgagtaccatgtaccaggcactaatacaaacactatagcatatcatctcaatccttaaaattttgaggcacaaagagggtgcccaaggttactcggctggtaaattgcatagtcagaatttcagttttacatggaaaagactgaaaatagcaataaacaaatatcaccatatgctctgcctatttcaaaccaagtggctcgtggggaaaggccagtagaagatcccaatcagggaagtttcagaatatcatttaaaaatacagaaagaaacaaatgtacttagtgttcattttgtaccagagattttcccaaaactctcacttaaaatcctgtgacttaaatcttctcccttttttacagatgaggaagccaagccttagccatgttaaacatcctaagcgggccaagcgcggtggctcaagcctgtaatcccagcactttgggaggccgaggcaggcggaccacctgaggtcaggagtttgagaacaacctgaccaacatggtgaaaccccatctctactaaaaatacaaaattagctgagcatggtggcgcatgcctgtaatcccagctacttggaaacctgaggcaagagaattgcttgaactcaggaggcggaggttgcagtgagccgagatgtgcccactgcactccactctgggcaacaagagtgaaactccgtatcaaaaaaataaaaataaaaagataataagatcttaagggtcatacagctagctagcagcagatcctatctaacctgggtccttccaa

SEQ ID NO: 318435 - DNA, 4001 bp, Homo sapiens
agtgatgacaacagctgtagaagtaggggtttggcttctggcccagatccacgcccttgtcctctgtcaaaaagagaggtggcagctcagcaccattctgttgggatcaggtaactcaggaaaggggctagatgctgtgggcctagagtaagtctccataaaggctggggaagcacacacctgtcatcacctggaaggcagccacactgacgtaatcctctgccactttctggaagagctcgtctggcaggaaaaatgatgatcagcgagggcccaatgccagtagccctgggatctcccagtgacccagccctctgtgccctattcagcttcctctggtgcccctgcatgttcctgctgtgaggctccagcacagcactcacccacactctggcctgtcttgctggatgtttcaaagagctgagctttgatatctgtaaagagaagtgactaaagcctcatacctgagaattagataaacagacaaaagggagggctagcagttcagggagtctcctggaccccacagttcaaggaggccaggaagacctcctagagcaccttgccctggcagccaaggcagtccctattttctttgatccacccagacagccacacacccccaccccccaaagggctgaggagcagctactgtctgcatagtcctggacgtcgtggaagtccacacgtcgacgcctccggtcttcttccagcaggtcactcttggtgccacataagtagatttggcagccctgaggcagaagacaagggtcacctccacaggccaacaaaaccccagcccctagtgttctagtgaggtctgttcacctacctcctctaggctgcgcagttccttcacccagaactttgctcgctcaaagctgctgctgtctgtgaggtcttggtgtgcggcatgcaggagacaaccaagtggtcaagggctgttctctggctagcctggcacccatcttttcttgtgagacagcccaaaccccccccccccttaccatagcagacgatggcagccttggcaccccgatagtagattctactcatggcctcatagcgctcagagcctgctgtgtcctaaagagtaaggcctgagtcaaacttaaggccacgttctccagaccccgctattttccagataaggaaacgggtctatgagaaatgggtctgtgaggccacaaatcaaccagtaataggcaggacctacacctcctcaggaatgagtctcccaagaatagatggccgggggacttacccaaatacctaatgtcacagtccggtctccgaccgacatcaccttggccacgaaggcggccccgatggtctgcaacgagagggaagagatcggggccataggtgcagattaccggccccccactcccccgcccaccgtgcctggcccctccggatgcactcacgttctgataaggccccaccagaaagcggtcgtgcacgtagcgctccaccaggctagtcttgcccacgtactccttgcccagcatcaccaccttgacgtccacgcgctgcccgctcatgctcccggggccgcttcagccacgtcagggtcctgagcggggacgggaggcaaaccccgatctccgctcggcccaggcagcgcccaagcctcagaccccgaccccaaacggcgccaacctacgactccagacagcgcgtcgggctcgagctctggccgtggccttgcacttcggcagcgccccgtgtgcccccgctgttcggccccgggcgccgattatccttcgaagaccccaagcctcggggcggcctgggagcgcgcgggacagcgtcctcaacagcgcagcacgccgccgtgcagctcgctactccgtcattcgctcgcctgcccggcttaagctccgttctggctgggaatcccaaccgaacctggggtctcccgcaacccggctcctacccgcagcgccgcgactcccgcgggagggggctagagggcgagggggcggggccgcaaggtcacgtggcgcgggcgccggaagcggtggctactgtgtggctgcgccggaagtggcgcgcggccggacaactcatggcggcggcggcggcggcggcagctgcttgggcgcggtgcggtggtgactgagctacgagcctggcggcgggtgtgcgccgagccccggcccggcccggccctcgcgtgcctcccaggctccgcacccctgatgctgcgcgggtgctgagcccgcttcggccgggacgatggtgaagtatttcctgggccagagcgtgctccggagttcctgggaccaagtgttcgccgccttctggcagcggtacccgaatccctataggtacgtggtatttggaagagcaaaaccgcgccatctcgctatctggagatcgaattatgggtaacccccaagtactgggaccaggaaggactcgatatcgaatcctaggtagaccttatcggggaagcggccaggccaggcctgcaaggtcctgaagggaggttgggcctgggtggtggtttacttgagaccttagtgtaagattcttttctcagtgtggtgagacaagaagaggcggcagtatgggagttgggagggatcttggagttggaaatcctatttctctgcccgtggcgctttcctggggtgcaataaatcatgaggtccattcctgctagaaggcaggaatccaggtcagtcagatggcgggagtgggaatttgccctgggatgggcccttaactctggtttgaaccatagcacataccaccctgcaaggttacgggaaggcgtggcctctctaggcccggagcctccaaatgggaatcccctcgggcagtctcttaggggcaagcttctgagggtcaccttcaccctgacacctgcagcaaacatgtcttgacggaagacatagtacaccgggaggtgacccctgaccagaaactgctgtcccggcgactcctgaccaagaccaacaggatgccacgctgggccgagcgactatttcctgccaatgttgctcactcggtgtacgtcctggaggactctattgtggacccacagaatcagaccatgactaccttcacctggaacatcaaccacgcccggctgatggtgagacacctcctgttgtgattctgcacctccccctctcccctccccccgagatagagagctcctcagatacatgtggctagagagccataaggcagcttttgtggccggaggcaggtctgggttactgagggttgacagctgtagagtatgacctcaggttttcttcttttcagctggccatcctctctggacctgtcctttgactcattcatacagtgggggaggggtacctatcttacggagttgtcctaagttctaaatgcaaagcgctcccatctggcatctatggcacagatatatgttggactcacaggagtgatgctgagtggcggaggcagtgcttttcttttttttttttctgttttttgtttttttctggtgacaagagtctcacccaggttggagtgtagtgacatgatctcacctcactgccactgccacctcctgggtttaagcaattctcgtgcctcagccttctgaagaggtggatttctaagcacacaccaccacgcctggctaatttttgtatttttagtacagacaaggttttaccatgttggccaggctggtctcgaactcctaacctcaagtgatccgcccgcctcggcctcccaaagtgctaagattacaggcgtgagccaccgcgccgggcaaatgtttttatttggactgtcaggaagctccagagctgcagctggtggaaggcggctaaaacactgcatgcgtctagatgcacaaaacaaaatccaggagcaggatgggctggaaggccctttgttgatctcaagagagagaccttttgccttctagtttaagagtcagaagagaggttttcgagagcaaaacgaccttatttatggcttcttgttctgtcagtgccacttggaggtgc

SEQ ID NO: 318436 - DNA, 4001 bp, Homo sapiens
gcatttggaaattttaaatttcaaaaacttagtccaacgactaaaaatacattataaatatgacaataactccatccacaagcaaattaatttcattttaccttatttttattttagttcttcattaaagttttgactaaaatagaaaatcacagtgcctactacatagttggtgaacacaaaaaataattttaactgtttcctgaaacattaatacagttctgtaatattttaatgacctttctgaacattctaagcaactctgtaagaaagcaaaattgatatacagtgtggttaaatttttcgtaatttattttgattgaaaaaatatcagtgcatacatagtttactttaaatattaacaatctactttatttttcaaaaattcttggaaatcttttttattgtgtaaatttaagatgtacatgttttaatatacatatacatagtgaagtataatgatctacttttaaagtctacaattagtgtttacttataattaaatatgattaatttagccagttggctcctggtagtatctccagtaatagaaaattatcataaaccaatatatcttgattgcaacagcctgtacctttattgtctgttcagattcttttcacatcaggtctataatgaaaagctaagtcacaaatagaggtattagaagacacacaaaggggccactgttccctggaacaaatcaaattttcaataactcataggtaatttgaggacttcccttatataatcacccaacaaacaattaaattctatagatttttcatctaacagtccagtaaggggttcttaatatacataacccataaaataaattaaaagtaaatcaaagcatatgtttaaagtccttgattcatgaagaaaccagttggaaaacgctgaagtccgaattaatgtcaaatatttatactcttgggtttggcagcagaggtgggttctcaggagagacagcacattccaaatgatgttttctattcttctctcaaccccactcataaaatgcctttctgttacacagtaggatcactgcttgattaataaacacaagctgatgtttaacgttaactggtagtacatagagacgagaattatcactcatctttacttaaaaacaaaacttaagcaagatgcttaggcagtggtacttctgcaccagagtcctttgcatttctcaaaggaaacaaacctaagaatgtgattgaaatggggaatcggagaacaaatgggcacataacacaggaaagctcagagggggctgtctccaaaacagagtaaaccagttgtgtggacagtgatgctggcatagctcagggatatgccaagccccgatgtgtttgctattttttgctgatactgggagcctaactgaagaaaggggactttgaggagcctaacattggcttctctttatttaatgcgcctttaaccaagcggaattcgctctatgccgactccagtggggagccttcaaccccgaatctgatctatctgccttaaatccgtgagttttcaccgcgatctcaaaccccggatgccaagagaggagatcaatgccaacacgagattgcatgctcctctgacttttgtttgcttgggttttcattttagacagacactcttatcctctttacagagcctagaaagattgcgaatagcccgatccctcatcaagacagccccaatcacagccacacagagcgtaaagaaacccaactctgttcccagggtcatgtcacagagccgcatctccgcgggtgaccgcctagacctttccttacgttgaactgcttgtgcgcggagcaaggggaaaagcatctctttcaattcctcccgaggccactctttctttatggacccacctgcatgggcgcttcgtgtctcattgttggcaaatgtcctttctctctggctaggaccgcactggtctgggcttccggtcaagcgtgcacagtcccggcgctccacgctccacactctgcactcttggggttcgctaaccggctccaacatcagcactggagctgtcctctcctggcgccgcacacgcgtactgccgaggagccccgtgcactcctgggagctgtagtctcgccctccgggtgttcccggcaaacgggcgagcggtgaactacaactcccggcaagcaagcaaaccattaaacaggctcgatccgccagtcgggctcggccgcggagcctccctactcctttccaaacgctcctgggttacctctcccagtctcccctgctcttttcctcgccaggggcaggcgaatgtgaccccagcttatctcagctggagatttttctttgctaactatcgccttcggaagtagatggtgattttctgattaggaaacaacactaccttgtgctaatttccaatgcaaacgaagccagagctggtctctgggactctccgccctacccctccccatccgaatcgggaaagtttctacgtttccttaggcagagtggggcagttttacaatctcattcaccaaacgtaggggagaaagacgattaacggtacacacataaggaaagtggtttatccgcataattgcactgagaagtcgcgcgcgcgtacatagtcacacacacaacccgcacaccgaagtgcgtgaaagcgagatttctggctaagcaccccaaggaactcctttcgcctgcttacctttccatacagctccattacaactcgaggttcagaaattctcaagtgccctcgctacaaaggaggttagggctctacgtaggaagcggggctaaaatgaaaaggcacaacacaatagaaggggtaggggtggcgtctggcggagagaaaaaggagggatgtggagaagacagctgatttagatggagggcttctttcctctggagggaaagcgtggaatccaagctgcagctgcagagaaagggctcagtctcttaggaagtgccaggggcgcgatagcgctggccagcccctccccaggccctcccccaggcaccttccgccgtcattagcgcgcacacactgccgctggccgcgggctgcagagctgatagggcactgggttatttacccagagcaagccacataaaatgaacacattcatcaccggaacccaaaagcaccgtgacagaatgagatgggagacctctattaagttatcctgtcctttctttaacacaaagtcattccttatattacaactatactcctcccagattagttcaaaaaaatggttttgaaatctaggaactgtacttttgttagacttatccttttcctgtcagttgactgataggtatgactatccatgtcctctgtaactatctagagacagccctctctacttaaaagtaaacgttgatcatccagcaaatcagccctgccttgtcatgaagtcaaaattataacggaggcagagtgaaaaaggaatgattgtgatattggcatggaggtatggaaggaataacttgaatcagctttaaacttcattgcagcagtagaacagaggttctgaaacttaaacgtacttgaaaatctgttgagacggaggttaaagttaaaatttttaagccacaggtagagattgattcactagatcttttgagaggtctggaaattagcattttaaataaacactccagcaattctgatgcaagtggttcccttgccataatttgagaaacattgtcttaaaagaatctatgtgtaacactttttcaaaggtgcaaacctcaaaaatgtcacggtatggactcaataatgcaacagtctaatattgggaacctaccatattcaatatttccattaattttagttgattgtattatttaacaactctataatctgtcttctaatcttgcaattagtgagaatgtaatgcgatatcacctaggtaagtagtttttataactattcagaaaatacatttaagccaggtgtggtggagcgtgcctgcagttatagttaccctaaaggctgagtt

SEQ ID NO: 318437 - DNA, 4001 bp, Homo sapiens
ctgtgctaatcccatgagaataatttctgattagcaatcaaaacatcttagagacatcctttgaagcatccttatctccattcctggatctaaaactatccctctgtgactctcccttgtctcgtttttgtgcctatcactactgctaaggtcacttggaaaatagacgaatgacttgataatgcatgagcaacattagtttcaacttttattatgattttttattgatacgggggtctcactatgattacccaggctggtctttaatgcctgagctcaagcgatcttcgtgcttcagcctcggtctcctgagcagctggaaatacaggtgtgagccaccataccatgcccctgcatgaggacaagaaccgtgtcttatttacctctctatccctgagatcatgctgtgcacttacgtgttaaaaaacgcttagttgaacttgcaatcctatctgaaccacacaaatattactttggaagaacaaaaattctattacaaccagtaaaggaaaaaaatactctttagtaatagcatatcgcagtggaaaaaagagcatatattctggaaacaaatattcagcgttcttatcccaattcagccacttaccagctgtgggactgttggcaaatcacttaaaattgtgcctcgtttccacatatataaaacgggaataataacagaacctaccttacaggactattgttaagattaaataagttaaacaataagaagactgtagcctagccaatagcctagtttaataaactttagtcattactaaccattatctctgtaaaacaagatgggaaaagaatttgttaccgggagagaaaaaaaattcaagtaatgacgttttgttctctaacttaagactattatttatttattaagttatttattatgactattgacaagttattatgactattaagttattttgtctactgaaaccttccgatttcattaaattacatttagagtatctatggcacaggcttaaaggcgcctacttccatacctgaataaaagcatttgcttgcacacactttgcattttccactgttactttgataccatttttagttgcgaaacacgtggcatgttctcggaaatgaatagctttcaagatagtggagagattcctaacgttgtcaaggctggccacaaggctgtactgatcatcctcgtcttggatctgttgggtcagaaggggcatcgtccactgcgcattcggccccgagggatgctcctggggccaacaacttctcggcggatcgccaaacacctgaagggattagacagtaaaactcccatcagtgctggcgaggtccggcgagctccacctgcgctgagaggtggaaaggggctgggaggctgaacacggctgaccaggccgaaccccacctatgtcacttaactatctttgtaattctggaggaaaattatctaagctacggtttcctcgtctccgtaagaggacaataacgtgaaaagttgtgaagaatgaagacacgcaactgacacggtatctcccggccaaacaggagctacaaatccgcggggagtcggttttgtgcagcccgcgccaccagccccgcctccaacaaaacaggcgatggcggggcgggcccggagtgtccagataatcctccaagagtcccagacaaccccattcaccagcccgcccgcgggacagcatcgcttactagtctcggggtccccgagtgcggaaaccctacctttgcggtggggtctggacgcccgagagcccttctcagcaaagtccctgaagaggagcgaggcggctccgaggaaccgcggaggaagtgaagccagtcccgccactcttcagaccggccctccacctcggccaccgtcaccacagagctgaaggaggcctagagagccgcgcgtgccgcgccaccgagaccggaaggaggcggcacagacctggaggacgaccgcggagctgagcgcttagagccgccgaaccatagagatcggaaataggagcgagcggcagcgccggaaaggaggccaagagcgcgggcggcgaggcaagatggcggcaaccaagaggaaacggcgtggaggctttgcagttcaggcgaagaagccaaaaagaaacgaaatagatgcggagccgccagctaagcggcacgccacagcagaggaggtggaggaagaagagagggaccggatcccaggccccgtttgcaaggtaggaggggatgtccccgggctacacctgcggcggcggctctgtgcgccttttcttgggttacttacttgactacagccttgcttaatttcagagtagcccgggtgttaacggtaggtcggttttagcaattctcccggccagactgggcacggagtttgcagctaatccttgtgcacgtggccgtcttcctggaggcggcgggttttaaaacctttacccggcccacggggaagcgacttacagggtgctcagatccagcgttctttcttactagttgttcagttgttttttttttttaatgtttttggagagtagtgcttttccttggttatttctcgctattatttctccagtgattagtatgcccatatactgccatagtcagccactctcagtcagggatcctgaagtacgttaggggagcctttaaaaagttgttgcccttgggactgtgactctgacttgttaaccaggtcattaactcaagagatactgaaaaatagactaggtagtatgagctttacttgtattcaacagacattgaatgtgccatgcactgtaccaagttaggcttcctttgggtttgagattgcaaagatgactagaatgtgacctcttcctcctgaaatgttggagtttaggaggaaacttaagaattcaaataagttgatggtttttattcaaaagaagtgcacacaagttgttagaattagctttcattcaactaagaactcttcttaagctagacagaatactgtgaacaaggattatctttgacattaatttttgcgtcctccgcacttagcatagtactctagcgcggagtaggtgataagtaaatgaccccgtgtggtgtgatggcaagctctaagaaagaagtgagctctgtggaatgaaagataagtgtaaattctagccccgttattaacagcaacattctgtgctcttttctgacctgcagattggggggcagggggagggaatatttactttttatgaaaaataagctggacttgtacacttccagtaaatgttagtgttctcactcttcccttgagctaggtagtatctataatctgagccatacttcgatacattctatggaagtgcaggagatatagattatttttaccctagtataataagataaagaatcatgaaggatttagcccgtaagctgcatatcagaggaagtgtagaattttgacattcaaaaaatgagagggaacactccaagggagaaaaaaaaaccgatgaaagactttgaagtagggaaatgctgaaaaatgtaaaaaatagagccagattggattgcattaggcttcatttggggcaataatgatgtagacgtgaaaatctattttaaaattcagtgtcaaagctatgtcatttgaactttgtttagaaaactctgggaagtaaggatgtgatggaagtattactttaaaaatggtccagcgtggtggctcacgcctgtaatcccagcactttgggaggccgaggcgggtggatcactaggtcaggagttcaagaccagcctggccaagatggtgaaaccccgtctctactaacactacaaaaaaaaaaaaatcagccaggtgcagtggcgggcacctgtaatcccagctactcgggagtctgaggcaggagaatcgcttgaacccgggaggtggaggttgcagtgagccgagatcgcgccactgcactccagcctgggtgacagagtgagactccatctcaaacaaacaaacaaaaaaagtaaactgttgaaaaagc

SEQ ID NO: 318438 - DNA, 4001 bp, Homo sapiens
tcttacataaatgtggactcccatatactgaaaaaaagagaaagataaacagcaaagttaagtaacttacttaacatcaaagaaaatttagagctaccacttagggaaatagctaccctgcatgcatgaaactgtctgacccccatcccaccttaacccctatcttgctgagaactcacacactgaattacattacttctaagaagcagtgcttttggttaagctataacaccaactaccactcatatttctctcttctatgttctttcattcaaatgttttcagcctttgtgactgggactgtaaaacactttttcaaaattaaggttgtgcttttagagaacacttgtttcacaacttattaccagacttgcttaaatcattaattacaatagatactcggctctattactttgatagcagtaataagttattaagaatatatataaaaatttataattattttaaggcaattattacatggccattccagtgtatcatacctttgtggaagatacctttggtctaagaaaagtttttgacattataaactgtaatagttcccatccgtagtttaggacttgcagtacattaaactataattcacctgggggggggggggggaagaagccctcaaatgaagaaaaactgtaaatgcccaattatagtaataaatgtatactgatataatcaacaatacaataaaggctcaagaactagtgaaaaagaacagtaaatttaagtgatacaagaaatcaaaattctaaaataattttaatgactataactgtatcaaataatctacttgtggtgttaagagtttttcacatgaactcaatgatgtattagaaaaaaaaaaacaaaaaaaccacacatactatgtacttaccttttgtcattaaaatcaggcaattctatttgagcaatttttatactgaaaattaaagttttccttatttcaaattacagttgcaggtcttcatttccagtatttcccaaaaaagtaaaataccatgaattcacttgctgtggacgaagaatttaagtcttaaactgtaaaatttttgtcttcatttgaacatgttattacaaaatttcttggtaacactgtttttcaaccgtgttttcaaattcttaaatgtttatgcaaactagtgaattcaacgattttaagttagccagaagaaaagtttaaggtctacaaacttatacattggaaagtatactggactactttacagtttggaggcacacatagcctataaacacctcgacacactagaaaacacattgttcagccctccgccccaaatcgttcacgattagagactgtgacgtttcaaaaggtatacaggtggaaaaaaaacacctatttgagtaaatatagtttgtagctcgaaataaaagatgcagaccaggggccggacgcggtggctcatgcctgtaatcccagcaccgtgggaggacgaggcgggcggatcatctgaggtcaggagtttgagaccagcctggccaaaacatggtgaaaccccgtctctattaaaaatgcaaaaattagccgggcgtggtggtgggcgcctgtaatcccagctactctggaggctaaggcaggagaatcacttgaacccaggaggcggaggttgcactccagcctgggcgacaagagtgagactccgtctcaaaacaaaacaaaaacaaacaaacaaacaaaaaaaggtgcagactgttgtcacggtcaggtctctattcactcttgaaaacaagattgacaattacctcctttaaaaagcagataactgtccctgaagatgcgaggttactgaaatgagatgtcagaggtagaccttcaagactattcctagccgacccaccaccaccccacacagtgaacagggaatactaagctcaaatattcgtccaacgtaatcctgtaatcagtggggtgccgggttgagctcgcaaatccccgctgcaggacagggctctgcaccctcaatcttctcatccccagatgggatgggcgggtcgggaggaggagcgacgagagcccaggaaagcttgaaggcagagatagactcacgtctctaagacatatacataatatagccgcaaccgcggcggccttactttcccggagctgcatccccttttaggcgaagagcggaggcgaccagggactaccctaggtgaaagggcagccacctggccctacccgggctcaacgccgagcctctcggaggtacggcctcccggggaccttccagactggtcggcgcaagcgaagggcggggaccaccgaaggagtgtgtgacttaggcatccagcgcactgcctgacccgaagtaccgacccgagttatgcccaccctccaactttgcgacggaaatgtgtcatcgaaagccaggtaaccagtgggccgcggctgggccgccggggcaggctaggggcgccgcggtgggcttcggggcctttggggccgtgggcttttgctgccgcccgccccttccggctcctccctgtagagcaaagggcacgtgagcgaggcgcccgaagccgtcgcggcggggaccatgttgcttccgaacatcctgctcaccggtcagggcgcgcggccgggagggactgggctggggcaggctgggggcgcagagtgctctgggcatcgggcgcccaggtgggggcccctcactgccctcttcagaggccggccgagggccacgaggcggttgtcagcgccccgggagccgaccctcgcgggcgttgcgggaggcgagggaggggacgcggaacgttaattccgttggcctgaggctccgggggggggcgggggggggtggagagaggtcggcagatccagctctccagcttggcaacctgcttagtctttctgaatctggtatttcgtttgtaaaatgggttgttgattctttggcagggttggccttgggatttttagcgaaataacgtaaggccatatctgcttcccggtagagtcattaatggtggatgcctcactccttaggcctccgtgggccgtattttattttttctttgcttctgataaacgcctcagattagatttcggtaaacgagttcagatgtttgtgacgtgacgaaattgctgtatgcttttgttgagttacatcaaaggatccccccgccccttaaaaggaaggcatatagagcatttcgggtcgtttctcgcgtaggagtgggtctttgaagccatactcagggtgcatgttatcagtgaagggaattaaaatgctgcataacgactttaacgaatatttttgctagccgtttagtcctgaaagtgtttatcaaattgtaggccattcgtggaaaaatctaatgcatgtagattttattgcaaggtacagaaaaattaagactctttgtgggaacagtaaagttacatcattcacccaaaggtaaaattgttggcagcgcacaagacatgtctgtttctgagaggtgcagattaaccaccccacaaataacgtttagaattttagattccttaagcggaagattttacatctttttgcatggatcaaacatagtgccctggttattaagtcattgtcaaaactttaaagtgaacattttattgaaaacatgttgagtccagggttcagacttggtgtattatagtggacttgaggtgaccgttattctcctgggtatgggaactggattatccctgttatctttatgcttaagtttaatttcagggatgttaaatctgaatagctgaaaattatgaatttgatgatcttgaaatgtaattttaataggtatcagaaggggaaggtaaagaacaatgtatatagtattgtcatttatgtaaaagggaatatgtgttgtatttatataacaaagagtatgtacatatatgtacatttacatgcaaacataaatagggtttctttgggaaaggaaactggtttacagtggttatctctagggaagggcgcaaggggtcagtagaggtaatt

SEQ ID NO: 318439 - DNA, 4001 bp, Homo sapiens
cgggaggtcaaggttgcagtgaaccatgatcaccccactgcactccagcccgggcaacagagtgagaccctgtctcaaaaaaaaaattttgctaataattagaaattattagctaataattacaaataattagaaattagaaatttttactagattttttaacactctaatagcataaatctagaaaaatatagcttcagatctggttgtagaatctactgcctggctaacaaaaagaaaccaagttatatatttctttcaagaatactcagccacagttgagctatttattagacaatgttcctctcttgaagaaaatgaaccagaagttggagctgaaagtaggcttaggggagacaatttggggcttataaatactttacgaatgctaagtcacacttcactcttcttttaagacagagttaggaatattatcggcagtggattaaaaaaggaagaccactggaaaaaattttagtcatagctacctgattcatttcgtcctcatcaaaagattgtgactggtactataatcttggcccctttcctctatatttttgagagtatgaaaatatctttcattatagtaaaactttcgacagcaattctgatttgcaaattatttatacattttatagtttcatttcttacataaatgtggactcccatatactgaaaaaaagagaaagataaacagcaaagttaagtaacttacttaacatcaaagaaaatttagagctaccacttagggaaatagctaccctgcatgcatgaaactgtctgacccccatcccaccttaacccctatcttgctgagaactcacacactgaattacattacttctaagaagcagtgcttttggttaagctataacaccaactaccactcatatttctctcttctatgttctttcattcaaatgttttcagcctttgtgactgggactgtaaaacactttttcaaaattaaggttgtgcttttagagaacacttgtttcacaacttattaccagacttgcttaaatcattaattacaatagatactcggctctattactttgatagcagtaataagttattaagaatatatataaaaatttataattattttaaggcaattattacatggccattccagtgtatcatacctttgtggaagatacctttggtctaagaaaagtttttgacattataaactgtaatagttcccatccgtagtttaggacttgcagtacattaaactataattcacctgggggggggggggggaagaagccctcaaatgaagaaaaactgtaaatgcccaattatagtaataaatgtatactgatataatcaacaatacaataaaggctcaagaactagtgaaaaagaacagtaaatttaagtgatacaagaaatcaaaattctaaaataattttaatgactataactgtatcaaataatctacttgtggtgttaagagtttttcacatgaactcaatgatgtattagaaaaaaaaaaacaaaaaaaccacacatactatgtacttaccttttgtcattaaaatcaggcaattctatttgagcaatttttatactgaaaattaaagttttccttatttcaaattacagttgcaggtcttcatttccagtatttcccaaaaaagtaaaataccatgaattcacttgctgtggacgaagaatttaagtcttaaactgtaaaatttttgtcttcatttgaacatgttattacaaaatttcttggtaacactgtttttcaaccgtgttttcaaattcttaaatgtttatgcaaactagtgaattcaacgattttaagttagccagaagaaaagtttaaggtctacaaacttatacattggaaagtatactggactactttacagtttggaggcacacatagcctataaacacctcgacacactagaaaacacattgttcagccctccgccccaaatcgttcacgattagagactgtgacgtttcaaaaggtatacaggtggaaaaaaaacacctatttgagtaaatatagtttgtagctcgaaataaaagatgcagaccaggggccggacgcggtggctcatgcctgtaatcccagcaccgtgggaggacgaggcgggcggatcatctgaggtcaggagtttgagaccagcctggccaaaacatggtgaaaccccgtctctattaaaaatgcaaaaattagccgggcgtggtggtgggcgcctgtaatcccagctactctggaggctaaggcaggagaatcacttgaacccaggaggcggaggttgcactccagcctgggcgacaagagtgagactccgtctcaaaacaaaacaaaaacaaacaaacaaacaaaaaaaggtgcagactgttgtcacggtcaggtctctattcactcttgaaaacaagattgacaattacctcctttaaaaagcagataactgtccctgaagatgcgaggttactgaaatgagatgtcagaggtagaccttcaagactattcctagccgacccaccaccaccccacacagtgaacagggaatactaagctcaaatattcgtccaacgtaatcctgtaatcagtggggtgccgggttgagctcgcaaatccccgctgcaggacagggctctgcaccctcaatcttctcatccccagatgggatgggcgggtcgggaggaggagcgacgagagcccaggaaagcttgaaggcagagatagactcacgtctctaagacatatacataatatagccgcaaccgcggcggccttactttcccggagctgcatccccttttaggcgaagagcggaggcgaccagggactaccctaggtgaaagggcagccacctggccctacccgggctcaacgccgagcctctcggaggtacggcctcccggggaccttccagactggtcggcgcaagcgaagggcggggaccaccgaaggagtgtgtgacttaggcatccagcgcactgcctgacccgaagtaccgacccgagttatgcccaccctccaactttgcgacggaaatgtgtcatcgaaagccaggtaaccagtgggccgcggctgggccgccggggcaggctaggggcgccgcggtgggcttcggggcctttggggccgtgggcttttgctgccgcccgccccttccggctcctccctgtagagcaaagggcacgtgagcgaggcgcccgaagccgtcgcggcggggaccatgttgcttccgaacatcctgctcaccggtcagggcgcgcggccgggagggactgggctggggcaggctgggggcgcagagtgctctgggcatcgggcgcccaggtgggggcccctcactgccctcttcagaggccggccgagggccacgaggcggttgtcagcgccccgggagccgaccctcgcgggcgttgcgggaggcgagggaggggacgcggaacgttaattccgttggcctgaggctccgggggggggcgggggggggtggagagaggtcggcagatccagctctccagcttggcaacctgcttagtctttctgaatctggtatttcgtttgtaaaatgggttgttgattctttggcagggttggccttgggatttttagcgaaataacgtaaggccatatctgcttcccggtagagtcattaatggtggatgcctcactccttaggcctccgtgggccgtattttattttttctttgcttctgataaacgcctcagattagatttcggtaaacgagttcagatgtttgtgacgtgacgaaattgctgtatgcttttgttgagttacatcaaaggatccccccgccccttaaaaggaaggcatatagagcatttcgggtcgtttctcgcgtaggagtgggtctttgaagccatactcagggtgcatgttatcagtgaagggaattaaaatgctgcataacgactttaacgaatatttttgctagccgtttagtcctgaaagtgtttatcaaattgtaggccattcgtggaaaaatctaat

SEQ ID NO: 318440 - DNA, 4001 bp, Homo sapiens
ttctctcttctatgttctttcattcaaatgttttcagcctttgtgactgggactgtaaaacactttttcaaaattaaggttgtgcttttagagaacacttgtttcacaacttattaccagacttgcttaaatcattaattacaatagatactcggctctattactttgatagcagtaataagttattaagaatatatataaaaatttataattattttaaggcaattattacatggccattccagtgtatcatacctttgtggaagatacctttggtctaagaaaagtttttgacattataaactgtaatagttcccatccgtagtttaggacttgcagtacattaaactataattcacctgggggggggggggggaagaagccctcaaatgaagaaaaactgtaaatgcccaattatagtaataaatgtatactgatataatcaacaatacaataaaggctcaagaactagtgaaaaagaacagtaaatttaagtgatacaagaaatcaaaattctaaaataattttaatgactataactgtatcaaataatctacttgtggtgttaagagtttttcacatgaactcaatgatgtattagaaaaaaaaaaacaaaaaaaccacacatactatgtacttaccttttgtcattaaaatcaggcaattctatttgagcaatttttatactgaaaattaaagttttccttatttcaaattacagttgcaggtcttcatttccagtatttcccaaaaaagtaaaataccatgaattcacttgctgtggacgaagaatttaagtcttaaactgtaaaatttttgtcttcatttgaacatgttattacaaaatttcttggtaacactgtttttcaaccgtgttttcaaattcttaaatgtttatgcaaactagtgaattcaacgattttaagttagccagaagaaaagtttaaggtctacaaacttatacattggaaagtatactggactactttacagtttggaggcacacatagcctataaacacctcgacacactagaaaacacattgttcagccctccgccccaaatcgttcacgattagagactgtgacgtttcaaaaggtatacaggtggaaaaaaaacacctatttgagtaaatatagtttgtagctcgaaataaaagatgcagaccaggggccggacgcggtggctcatgcctgtaatcccagcaccgtgggaggacgaggcgggcggatcatctgaggtcaggagtttgagaccagcctggccaaaacatggtgaaaccccgtctctattaaaaatgcaaaaattagccgggcgtggtggtgggcgcctgtaatcccagctactctggaggctaaggcaggagaatcacttgaacccaggaggcggaggttgcactccagcctgggcgacaagagtgagactccgtctcaaaacaaaacaaaaacaaacaaacaaacaaaaaaaggtgcagactgttgtcacggtcaggtctctattcactcttgaaaacaagattgacaattacctcctttaaaaagcagataactgtccctgaagatgcgaggttactgaaatgagatgtcagaggtagaccttcaagactattcctagccgacccaccaccaccccacacagtgaacagggaatactaagctcaaatattcgtccaacgtaatcctgtaatcagtggggtgccgggttgagctcgcaaatccccgctgcaggacagggctctgcaccctcaatcttctcatccccagatgggatgggcgggtcgggaggaggagcgacgagagcccaggaaagcttgaaggcagagatagactcacgtctctaagacatatacataatatagccgcaaccgcggcggccttactttcccggagctgcatccccttttaggcgaagagcggaggcgaccagggactaccctaggtgaaagggcagccacctggccctacccgggctcaacgccgagcctctcggaggtacggcctcccggggaccttccagactggtcggcgcaagcgaagggcggggaccaccgaaggagtgtgtgacttaggcatccagcgcactgcctgacccgaagtaccgacccgagttatgcccaccctccaactttgcgacggaaatgtgtcatcgaaagccaggtaaccagtgggccgcggctgggccgccggggcaggctaggggcgccgcggtgggcttcggggcctttggggccgtgggcttttgctgccgcccgccccttccggctcctccctgtagagcaaagggcacgtgagcgaggcgcccgaagccgtcgcggcggggaccatgttgcttccgaacatcctgctcaccggtcagggcgcgcggccgggagggactgggctggggcaggctgggggcgcagagtgctctgggcatcgggcgcccaggtgggggcccctcactgccctcttcagaggccggccgagggccacgaggcggttgtcagcgccccgggagccgaccctcgcgggcgttgcgggaggcgagggaggggacgcggaacgttaattccgttggcctgaggctccgggggggggcgggggggggtggagagaggtcggcagatccagctctccagcttggcaacctgcttagtctttctgaatctggtatttcgtttgtaaaatgggttgttgattctttggcagggttggccttgggatttttagcgaaataacgtaaggccatatctgcttcccggtagagtcattaatggtggatgcctcactccttaggcctccgtgggccgtattttattttttctttgcttctgataaacgcctcagattagatttcggtaaacgagttcagatgtttgtgacgtgacgaaattgctgtatgcttttgttgagttacatcaaaggatccccccgccccttaaaaggaaggcatatagagcatttcgggtcgtttctcgcgtaggagtgggtctttgaagccatactcagggtgcatgttatcagtgaagggaattaaaatgctgcataacgactttaacgaatatttttgctagccgtttagtcctgaaagtgtttatcaaattgtaggccattcgtggaaaaatctaatgcatgtagattttattgcaaggtacagaaaaattaagactctttgtgggaacagtaaagttacatcattcacccaaaggtaaaattgttggcagcgcacaagacatgtctgtttctgagaggtgcagattaaccaccccacaaataacgtttagaattttagattccttaagcggaagattttacatctttttgcatggatcaaacatagtgccctggttattaagtcattgtcaaaactttaaagtgaacattttattgaaaacatgttgagtccagggttcagacttggtgtattatagtggacttgaggtgaccgttattctcctgggtatgggaactggattatccctgttatctttatgcttaagtttaatttcagggatgttaaatctgaatagctgaaaattatgaatttgatgatcttgaaatgtaattttaataggtatcagaaggggaaggtaaagaacaatgtatatagtattgtcatttatgtaaaagggaatatgtgttgtatttatataacaaagagtatgtacatatatgtacatttacatgcaaacataaatagggtttctttgggaaaggaaactggtttacagtggttatctctagggaagggcgcaaggggtcagtagaggtaattttcagactgcttaattttaacatgaacagttttgtttttgttcttgtttttgtttttgtttgagacagagtctcattatgttggccaggctggtctcgaactcctgcgcttaagcgatcctcccgccttctcctcccaaattgctgggattacacgcgcgagccaccacacgtggccatgaacagtttttaaatctttataagttaaagcaaataggccaggtgggtggctcatgcctgtaaatccca

SEQ ID NO: 318441 - DNA, 4001 bp, Homo sapiens
gagctgggattaaaggtataagccaccatacccggcctaaaaatcttacaaattaactctttttaaataaaactctgtctgtaatagttgtttttctactttacagtaagtgcaagtgcatacttgtctacttgaccttaaaggagtaaagaacacaaacttatttttattaattgtaaccttcccagcataaacactagaatgatttttttaaactctctgtaggattgaaacataaatattaaaattacctattaaaaaaagcaaaacaaaataaacaaatgataatattttaacagaaacagcaataagagtaatatatctgccttggccaggttaatacattcacaaactaagaaccatttcatacatccaaataatccgtatcagcttgaagacttagtgaagatataggccaaagatcataacgtaatctgtaattatgactggattatatttttcttcagtgtatgaagcaactaatatttttataattgaggcaggctttccagagggggaactgtcactcagaaatgcctgggaatggttgggtgtggtagctcacacctataattccagcacattcagaggcagaggcagtaggattgctgagcccaggagtttgagaacagctagcataacatagggagaccccaactctacaaaaaataaaaaattagccaggcatggtggcgcacgcctgtattcccagctacttggggggctaaggtgggagaatcacttgagcgcgggaggtcaaggttgcagtgaaccatgatcaccccactgcactccagcccgggcaacagagtgagaccctgtctcaaaaaaaaaattttgctaataattagaaattattagctaataattacaaataattagaaattagaaatttttactagattttttaacactctaatagcataaatctagaaaaatatagcttcagatctggttgtagaatctactgcctggctaacaaaaagaaaccaagttatatatttctttcaagaatactcagccacagttgagctatttattagacaatgttcctctcttgaagaaaatgaaccagaagttggagctgaaagtaggcttaggggagacaatttggggcttataaatactttacgaatgctaagtcacacttcactcttcttttaagacagagttaggaatattatcggcagtggattaaaaaaggaagaccactggaaaaaattttagtcatagctacctgattcatttcgtcctcatcaaaagattgtgactggtactataatcttggcccctttcctctatatttttgagagtatgaaaatatctttcattatagtaaaactttcgacagcaattctgatttgcaaattatttatacattttatagtttcatttcttacataaatgtggactcccatatactgaaaaaaagagaaagataaacagcaaagttaagtaacttacttaacatcaaagaaaatttagagctaccacttagggaaatagctaccctgcatgcatgaaactgtctgacccccatcccaccttaacccctatcttgctgagaactcacacactgaattacattacttctaagaagcagtgcttttggttaagctataacaccaactaccactcatatttctctcttctatgttctttcattcaaatgttttcagcctttgtgactgggactgtaaaacactttttcaaaattaaggttgtgcttttagagaacacttgtttcacaacttattaccagacttgcttaaatcattaattacaatagatactcggctctattactttgatagcagtaataagttattaagaatatatataaaaatttataattattttaaggcaattattacatggccattccagtgtatcatacctttgtggaagatacctttggtctaagaaaagtttttgacattataaactgtaatagttcccatccgtagtttaggacttgcagtacattaaactataattcacctgggggggggggggggaagaagccctcaaatgaagaaaaactgtaaatgcccaattatagtaataaatgtatactgatataatcaacaatacaataaaggctcaagaactagtgaaaaagaacagtaaatttaagtgatacaagaaatcaaaattctaaaataattttaatgactataactgtatcaaataatctacttgtggtgttaagagtttttcacatgaactcaatgatgtattagaaaaaaaaaaacaaaaaaaccacacatactatgtacttaccttttgtcattaaaatcaggcaattctatttgagcaatttttatactgaaaattaaagttttccttatttcaaattacagttgcaggtcttcatttccagtatttcccaaaaaagtaaaataccatgaattcacttgctgtggacgaagaatttaagtcttaaactgtaaaatttttgtcttcatttgaacatgttattacaaaatttcttggtaacactgtttttcaaccgtgttttcaaattcttaaatgtttatgcaaactagtgaattcaacgattttaagttagccagaagaaaagtttaaggtctacaaacttatacattggaaagtatactggactactttacagtttggaggcacacatagcctataaacacctcgacacactagaaaacacattgttcagccctccgccccaaatcgttcacgattagagactgtgacgtttcaaaaggtatacaggtggaaaaaaaacacctatttgagtaaatatagtttgtagctcgaaataaaagatgcagaccaggggccggacgcggtggctcatgcctgtaatcccagcaccgtgggaggacgaggcgggcggatcatctgaggtcaggagtttgagaccagcctggccaaaacatggtgaaaccccgtctctattaaaaatgcaaaaattagccgggcgtggtggtgggcgcctgtaatcccagctactctggaggctaaggcaggagaatcacttgaacccaggaggcggaggttgcactccagcctgggcgacaagagtgagactccgtctcaaaacaaaacaaaaacaaacaaacaaacaaaaaaaggtgcagactgttgtcacggtcaggtctctattcactcttgaaaacaagattgacaattacctcctttaaaaagcagataactgtccctgaagatgcgaggttactgaaatgagatgtcagaggtagaccttcaagactattcctagccgacccaccaccaccccacacagtgaacagggaatactaagctcaaatattcgtccaacgtaatcctgtaatcagtggggtgccgggttgagctcgcaaatccccgctgcaggacagggctctgcaccctcaatcttctcatccccagatgggatgggcgggtcgggaggaggagcgacgagagcccaggaaagcttgaaggcagagatagactcacgtctctaagacatatacataatatagccgcaaccgcggcggccttactttcccggagctgcatccccttttaggcgaagagcggaggcgaccagggactaccctaggtgaaagggcagccacctggccctacccgggctcaacgccgagcctctcggaggtacggcctcccggggaccttccagactggtcggcgcaagcgaagggcggggaccaccgaaggagtgtgtgacttaggcatccagcgcactgcctgacccgaagtaccgacccgagttatgcccaccctccaactttgcgacggaaatgtgtcatcgaaagccaggtaaccagtgggccgcggctgggccgccggggcaggctaggggcgccgcggtgggcttcggggcctttggggccgtgggcttttgctgccgcccgccccttccggctcctccctgtagagcaaagggcacgtgagcgaggcgcccgaagccgtcgcggcggggaccatgttgcttccgaacatcctgctcaccggtcagggcg

SEQ ID NO: 318442 - DNA, 4001 bp, Homo sapiens
agatcataacgtaatctgtaattatgactggattatatttttcttcagtgtatgaagcaactaatatttttataattgaggcaggctttccagagggggaactgtcactcagaaatgcctgggaatggttgggtgtggtagctcacacctataattccagcacattcagaggcagaggcagtaggattgctgagcccaggagtttgagaacagctagcataacatagggagaccccaactctacaaaaaataaaaaattagccaggcatggtggcgcacgcctgtattcccagctacttggggggctaaggtgggagaatcacttgagcgcgggaggtcaaggttgcagtgaaccatgatcaccccactgcactccagcccgggcaacagagtgagaccctgtctcaaaaaaaaaattttgctaataattagaaattattagctaataattacaaataattagaaattagaaatttttactagattttttaacactctaatagcataaatctagaaaaatatagcttcagatctggttgtagaatctactgcctggctaacaaaaagaaaccaagttatatatttctttcaagaatactcagccacagttgagctatttattagacaatgttcctctcttgaagaaaatgaaccagaagttggagctgaaagtaggcttaggggagacaatttggggcttataaatactttacgaatgctaagtcacacttcactcttcttttaagacagagttaggaatattatcggcagtggattaaaaaaggaagaccactggaaaaaattttagtcatagctacctgattcatttcgtcctcatcaaaagattgtgactggtactataatcttggcccctttcctctatatttttgagagtatgaaaatatctttcattatagtaaaactttcgacagcaattctgatttgcaaattatttatacattttatagtttcatttcttacataaatgtggactcccatatactgaaaaaaagagaaagataaacagcaaagttaagtaacttacttaacatcaaagaaaatttagagctaccacttagggaaatagctaccctgcatgcatgaaactgtctgacccccatcccaccttaacccctatcttgctgagaactcacacactgaattacattacttctaagaagcagtgcttttggttaagctataacaccaactaccactcatatttctctcttctatgttctttcattcaaatgttttcagcctttgtgactgggactgtaaaacactttttcaaaattaaggttgtgcttttagagaacacttgtttcacaacttattaccagacttgcttaaatcattaattacaatagatactcggctctattactttgatagcagtaataagttattaagaatatatataaaaatttataattattttaaggcaattattacatggccattccagtgtatcatacctttgtggaagatacctttggtctaagaaaagtttttgacattataaactgtaatagttcccatccgtagtttaggacttgcagtacattaaactataattcacctgggggggggggggggaagaagccctcaaatgaagaaaaactgtaaatgcccaattatagtaataaatgtatactgatataatcaacaatacaataaaggctcaagaactagtgaaaaagaacagtaaatttaagtgatacaagaaatcaaaattctaaaataattttaatgactataactgtatcaaataatctacttgtggtgttaagagtttttcacatgaactcaatgatgtattagaaaaaaaaaaacaaaaaaaccacacatactatgtacttaccttttgtcattaaaatcaggcaattctatttgagcaatttttatactgaaaattaaagttttccttatttcaaattacagttgcaggtcttcatttccagtatttcccaaaaaagtaaaataccatgaattcacttgctgtggacgaagaatttaagtcttaaactgtaaaatttttgtcttcatttgaacatgttattacaaaatttcttggtaacactgtttttcaaccgtgttttcaaattcttaaatgtttatgcaaactagtgaattcaacgattttaagttagccagaagaaaagtttaaggtctacaaacttatacattggaaagtatactggactactttacagtttggaggcacacatagcctataaacacctcgacacactagaaaacacattgttcagccctccgccccaaatcgttcacgattagagactgtgacgtttcaaaaggtatacaggtggaaaaaaaacacctatttgagtaaatatagtttgtagctcgaaataaaagatgcagaccaggggccggacgcggtggctcatgcctgtaatcccagcaccgtgggaggacgaggcgggcggatcatctgaggtcaggagtttgagaccagcctggccaaaacatggtgaaaccccgtctctattaaaaatgcaaaaattagccgggcgtggtggtgggcgcctgtaatcccagctactctggaggctaaggcaggagaatcacttgaacccaggaggcggaggttgcactccagcctgggcgacaagagtgagactccgtctcaaaacaaaacaaaaacaaacaaacaaacaaaaaaaggtgcagactgttgtcacggtcaggtctctattcactcttgaaaacaagattgacaattacctcctttaaaaagcagataactgtccctgaagatgcgaggttactgaaatgagatgtcagaggtagaccttcaagactattcctagccgacccaccaccaccccacacagtgaacagggaatactaagctcaaatattcgtccaacgtaatcctgtaatcagtggggtgccgggttgagctcgcaaatccccgctgcaggacagggctctgcaccctcaatcttctcatccccagatgggatgggcgggtcgggaggaggagcgacgagagcccaggaaagcttgaaggcagagatagactcacgtctctaagacatatacataatatagccgcaaccgcggcggccttactttcccggagctgcatccccttttaggcgaagagcggaggcgaccagggactaccctaggtgaaagggcagccacctggccctacccgggctcaacgccgagcctctcggaggtacggcctcccggggaccttccagactggtcggcgcaagcgaagggcggggaccaccgaaggagtgtgtgacttaggcatccagcgcactgcctgacccgaagtaccgacccgagttatgcccaccctccaactttgcgacggaaatgtgtcatcgaaagccaggtaaccagtgggccgcggctgggccgccggggcaggctaggggcgccgcggtgggcttcggggcctttggggccgtgggcttttgctgccgcccgccccttccggctcctccctgtagagcaaagggcacgtgagcgaggcgcccgaagccgtcgcggcggggaccatgttgcttccgaacatcctgctcaccggtcagggcgcgcggccgggagggactgggctggggcaggctgggggcgcagagtgctctgggcatcgggcgcccaggtgggggcccctcactgccctcttcagaggccggccgagggccacgaggcggttgtcagcgccccgggagccgaccctcgcgggcgttgcgggaggcgagggaggggacgcggaacgttaattccgttggcctgaggctccgggggggggcgggggggggtggagagaggtcggcagatccagctctccagcttggcaacctgcttagtctttctgaatctggtatttcgtttgtaaaatgggttgttgattctttggcagggttggccttgggatttttagcgaaataacgtaaggccatatctgcttcccggtagagtcattaatggtggatgcctcactccttaggcct

SEQ ID NO: 318443 - DNA, 4001 bp, Homo sapiens
gtgcttttagagaacacttgtttcacaacttattaccagacttgcttaaatcattaattacaatagatactcggctctattactttgatagcagtaataagttattaagaatatatataaaaatttataattattttaaggcaattattacatggccattccagtgtatcatacctttgtggaagatacctttggtctaagaaaagtttttgacattataaactgtaatagttcccatccgtagtttaggacttgcagtacattaaactataattcacctgggggggggggggggaagaagccctcaaatgaagaaaaactgtaaatgcccaattatagtaataaatgtatactgatataatcaacaatacaataaaggctcaagaactagtgaaaaagaacagtaaatttaagtgatacaagaaatcaaaattctaaaataattttaatgactataactgtatcaaataatctacttgtggtgttaagagtttttcacatgaactcaatgatgtattagaaaaaaaaaaacaaaaaaaccacacatactatgtacttaccttttgtcattaaaatcaggcaattctatttgagcaatttttatactgaaaattaaagttttccttatttcaaattacagttgcaggtcttcatttccagtatttcccaaaaaagtaaaataccatgaattcacttgctgtggacgaagaatttaagtcttaaactgtaaaatttttgtcttcatttgaacatgttattacaaaatttcttggtaacactgtttttcaaccgtgttttcaaattcttaaatgtttatgcaaactagtgaattcaacgattttaagttagccagaagaaaagtttaaggtctacaaacttatacattggaaagtatactggactactttacagtttggaggcacacatagcctataaacacctcgacacactagaaaacacattgttcagccctccgccccaaatcgttcacgattagagactgtgacgtttcaaaaggtatacaggtggaaaaaaaacacctatttgagtaaatatagtttgtagctcgaaataaaagatgcagaccaggggccggacgcggtggctcatgcctgtaatcccagcaccgtgggaggacgaggcgggcggatcatctgaggtcaggagtttgagaccagcctggccaaaacatggtgaaaccccgtctctattaaaaatgcaaaaattagccgggcgtggtggtgggcgcctgtaatcccagctactctggaggctaaggcaggagaatcacttgaacccaggaggcggaggttgcactccagcctgggcgacaagagtgagactccgtctcaaaacaaaacaaaaacaaacaaacaaacaaaaaaaggtgcagactgttgtcacggtcaggtctctattcactcttgaaaacaagattgacaattacctcctttaaaaagcagataactgtccctgaagatgcgaggttactgaaatgagatgtcagaggtagaccttcaagactattcctagccgacccaccaccaccccacacagtgaacagggaatactaagctcaaatattcgtccaacgtaatcctgtaatcagtggggtgccgggttgagctcgcaaatccccgctgcaggacagggctctgcaccctcaatcttctcatccccagatgggatgggcgggtcgggaggaggagcgacgagagcccaggaaagcttgaaggcagagatagactcacgtctctaagacatatacataatatagccgcaaccgcggcggccttactttcccggagctgcatccccttttaggcgaagagcggaggcgaccagggactaccctaggtgaaagggcagccacctggccctacccgggctcaacgccgagcctctcggaggtacggcctcccggggaccttccagactggtcggcgcaagcgaagggcggggaccaccgaaggagtgtgtgacttaggcatccagcgcactgcctgacccgaagtaccgacccgagttatgcccaccctccaactttgcgacggaaatgtgtcatcgaaagccaggtaaccagtgggccgcggctgggccgccggggcaggctaggggcgccgcggtgggcttcggggcctttggggccgtgggcttttgctgccgcccgccccttccggctcctccctgtagagcaaagggcacgtgagcgaggcgcccgaagccgtcgcggcggggaccatgttgcttccgaacatcctgctcaccggtcagggcgcgcggccgggagggactgggctggggcaggctgggggcgcagagtgctctgggcatcgggcgcccaggtgggggcccctcactgccctcttcagaggccggccgagggccacgaggcggttgtcagcgccccgggagccgaccctcgcgggcgttgcgggaggcgagggaggggacgcggaacgttaattccgttggcctgaggctccgggggggggcgggggggggtggagagaggtcggcagatccagctctccagcttggcaacctgcttagtctttctgaatctggtatttcgtttgtaaaatgggttgttgattctttggcagggttggccttgggatttttagcgaaataacgtaaggccatatctgcttcccggtagagtcattaatggtggatgcctcactccttaggcctccgtgggccgtattttattttttctttgcttctgataaacgcctcagattagatttcggtaaacgagttcagatgtttgtgacgtgacgaaattgctgtatgcttttgttgagttacatcaaaggatccccccgccccttaaaaggaaggcatatagagcatttcgggtcgtttctcgcgtaggagtgggtctttgaagccatactcagggtgcatgttatcagtgaagggaattaaaatgctgcataacgactttaacgaatatttttgctagccgtttagtcctgaaagtgtttatcaaattgtaggccattcgtggaaaaatctaatgcatgtagattttattgcaaggtacagaaaaattaagactctttgtgggaacagtaaagttacatcattcacccaaaggtaaaattgttggcagcgcacaagacatgtctgtttctgagaggtgcagattaaccaccccacaaataacgtttagaattttagattccttaagcggaagattttacatctttttgcatggatcaaacatagtgccctggttattaagtcattgtcaaaactttaaagtgaacattttattgaaaacatgttgagtccagggttcagacttggtgtattatagtggacttgaggtgaccgttattctcctgggtatgggaactggattatccctgttatctttatgcttaagtttaatttcagggatgttaaatctgaatagctgaaaattatgaatttgatgatcttgaaatgtaattttaataggtatcagaaggggaaggtaaagaacaatgtatatagtattgtcatttatgtaaaagggaatatgtgttgtatttatataacaaagagtatgtacatatatgtacatttacatgcaaacataaatagggtttctttgggaaaggaaactggtttacagtggttatctctagggaagggcgcaaggggtcagtagaggtaattttcagactgcttaattttaacatgaacagttttgtttttgttcttgtttttgtttttgtttgagacagagtctcattatgttggccaggctggtctcgaactcctgcgcttaagcgatcctcccgccttctcctcccaaattgctgggattacacgcgcgagccaccacacgtggccatgaacagtttttaaatctttataagttaaagcaaataggccaggtgggtggctcatgcctgtaaatcccagcactttgggaggtggaggtggggagatcgcttgagctcaggagtttgagcttagcctaagcaacatagccaaaccccgtc

SEQ ID NO: 318444 - DNA, 4001 bp, Homo sapiens
ctaaaataattttaatgactataactgtatcaaataatctacttgtggtgttaagagtttttcacatgaactcaatgatgtattagaaaaaaaaaaacaaaaaaaccacacatactatgtacttaccttttgtcattaaaatcaggcaattctatttgagcaatttttatactgaaaattaaagttttccttatttcaaattacagttgcaggtcttcatttccagtatttcccaaaaaagtaaaataccatgaattcacttgctgtggacgaagaatttaagtcttaaactgtaaaatttttgtcttcatttgaacatgttattacaaaatttcttggtaacactgtttttcaaccgtgttttcaaattcttaaatgtttatgcaaactagtgaattcaacgattttaagttagccagaagaaaagtttaaggtctacaaacttatacattggaaagtatactggactactttacagtttggaggcacacatagcctataaacacctcgacacactagaaaacacattgttcagccctccgccccaaatcgttcacgattagagactgtgacgtttcaaaaggtatacaggtggaaaaaaaacacctatttgagtaaatatagtttgtagctcgaaataaaagatgcagaccaggggccggacgcggtggctcatgcctgtaatcccagcaccgtgggaggacgaggcgggcggatcatctgaggtcaggagtttgagaccagcctggccaaaacatggtgaaaccccgtctctattaaaaatgcaaaaattagccgggcgtggtggtgggcgcctgtaatcccagctactctggaggctaaggcaggagaatcacttgaacccaggaggcggaggttgcactccagcctgggcgacaagagtgagactccgtctcaaaacaaaacaaaaacaaacaaacaaacaaaaaaaggtgcagactgttgtcacggtcaggtctctattcactcttgaaaacaagattgacaattacctcctttaaaaagcagataactgtccctgaagatgcgaggttactgaaatgagatgtcagaggtagaccttcaagactattcctagccgacccaccaccaccccacacagtgaacagggaatactaagctcaaatattcgtccaacgtaatcctgtaatcagtggggtgccgggttgagctcgcaaatccccgctgcaggacagggctctgcaccctcaatcttctcatccccagatgggatgggcgggtcgggaggaggagcgacgagagcccaggaaagcttgaaggcagagatagactcacgtctctaagacatatacataatatagccgcaaccgcggcggccttactttcccggagctgcatccccttttaggcgaagagcggaggcgaccagggactaccctaggtgaaagggcagccacctggccctacccgggctcaacgccgagcctctcggaggtacggcctcccggggaccttccagactggtcggcgcaagcgaagggcggggaccaccgaaggagtgtgtgacttaggcatccagcgcactgcctgacccgaagtaccgacccgagttatgcccaccctccaactttgcgacggaaatgtgtcatcgaaagccaggtaaccagtgggccgcggctgggccgccggggcaggctaggggcgccgcggtgggcttcggggcctttggggccgtgggcttttgctgccgcccgccccttccggctcctccctgtagagcaaagggcacgtgagcgaggcgcccgaagccgtcgcggcggggaccatgttgcttccgaacatcctgctcaccggtcagggcgcgcggccgggagggactgggctggggcaggctgggggcgcagagtgctctgggcatcgggcgcccaggtgggggcccctcactgccctcttcagaggccggccgagggccacgaggcggttgtcagcgccccgggagccgaccctcgcgggcgttgcgggaggcgagggaggggacgcggaacgttaattccgttggcctgaggctccgggggggggcgggggggggtggagagaggtcggcagatccagctctccagcttggcaacctgcttagtctttctgaatctggtatttcgtttgtaaaatgggttgttgattctttggcagggttggccttgggatttttagcgaaataacgtaaggccatatctgcttcccggtagagtcattaatggtggatgcctcactccttaggcctccgtgggccgtattttattttttctttgcttctgataaacgcctcagattagatttcggtaaacgagttcagatgtttgtgacgtgacgaaattgctgtatgcttttgttgagttacatcaaaggatccccccgccccttaaaaggaaggcatatagagcatttcgggtcgtttctcgcgtaggagtgggtctttgaagccatactcagggtgcatgttatcagtgaagggaattaaaatgctgcataacgactttaacgaatatttttgctagccgtttagtcctgaaagtgtttatcaaattgtaggccattcgtggaaaaatctaatgcatgtagattttattgcaaggtacagaaaaattaagactctttgtgggaacagtaaagttacatcattcacccaaaggtaaaattgttggcagcgcacaagacatgtctgtttctgagaggtgcagattaaccaccccacaaataacgtttagaattttagattccttaagcggaagattttacatctttttgcatggatcaaacatagtgccctggttattaagtcattgtcaaaactttaaagtgaacattttattgaaaacatgttgagtccagggttcagacttggtgtattatagtggacttgaggtgaccgttattctcctgggtatgggaactggattatccctgttatctttatgcttaagtttaatttcagggatgttaaatctgaatagctgaaaattatgaatttgatgatcttgaaatgtaattttaataggtatcagaaggggaaggtaaagaacaatgtatatagtattgtcatttatgtaaaagggaatatgtgttgtatttatataacaaagagtatgtacatatatgtacatttacatgcaaacataaatagggtttctttgggaaaggaaactggtttacagtggttatctctagggaagggcgcaaggggtcagtagaggtaattttcagactgcttaattttaacatgaacagttttgtttttgttcttgtttttgtttttgtttgagacagagtctcattatgttggccaggctggtctcgaactcctgcgcttaagcgatcctcccgccttctcctcccaaattgctgggattacacgcgcgagccaccacacgtggccatgaacagtttttaaatctttataagttaaagcaaataggccaggtgggtggctcatgcctgtaaatcccagcactttgggaggtggaggtggggagatcgcttgagctcaggagtttgagcttagcctaagcaacatagccaaaccccgtctctacaaaaattaaccagggcatggtggtgcatacctgtggtcctagctaccggacaggctgagatgggaggattgcttgagcccaggaggtaaaggctctagtgagccaagttccactgcactccagcctaggtaacaaagagatatcttgtctttaaaaaaagaaaaaggtaaataaattattgtaattgattcgaggtggctaatttttttttttttttttttgagatggagtctctgtcgccaggctggagtgctgtggcgcgatcttggctcactgcatcctacaactacctggttcaagggattctcctgcctcagcctcctgagtagctgggattacaggcacgcgccaccacgcccggctaatttttgtattttaatagagatgtagtttcactatgttggccaggattgtctcaatctcctgacc

SEQ ID NO: 318445 - DNA, 4001 bp, Homo sapiens
taggaactttttgtttaagagacagggtctcattctgctgcccaggctgcagtgcagctgcatgatcatggcttactgcagcctcgacctctcgacctcctgggctcaagcaatcccccagcctcagcctcccaaacggctcggattacagtcgtcagccaccatgcccagcctgtagaaacttttttttttttttttttttttttgtggggggagagagtctccctctgtcacccaggctggtgtagtgcaatggcgtgatctcggctcactgcaacctccacctccccggttcaagcgattctcccgcctcggcctccccagtagctaggattacaggcatgcgccaccacgcctggctaatttttgtatttttattagagatggggtttcgccacgttggccaggctggtctcgaactcctgacctcaggtgatccacccgcctcggcctcccaaagtgctgggattacaggcgtgagccaccgtgcccagctgtagaaactatttttaatctccattttataaatgagaaaactaaggcacagagcagtgaggtcactcgcaaacaatcagacaactaataaatgaagcgaaaaagctgtattgaggcagccagtcctcataaacactatacagtactactctcccttctgctagtatttagtacaatcctaagtacataacaagcattcaacaaataacatttttacaaaaacaaaagtaaacaagtttggcattcaattctcaaccttctctctttctacactcttcacaaatccttcctttagactcttctccctgctatactgacatcgtcttgctttttcttaagccactattcctgaccagaatgcctcttggttattctttccattcaaatttataaatattcccacggctttaaaaaaaaaaaaaagtcagtcgtgcaccaacgttaaatttttgactgagttttaagaagagaagttttccaagttaagccccactacatcagttacattttgaatttatttattttccatgtattatgtctggacagttggcatacttggaaactctttagtcatgtatgtatcattttataacttttaaaggaattcttgtatgggacaactactgggaagtgaatgctatgctttgaaagcaaggagacagcgttaaaaacatcaatacagaccaaagggcatccagtgggaactgaactctgagtgagcggcgacagctcccggtatcgtgggattcttaagtaaaccttgtccccaggccaggtccggacatccttccgagactgcttcaggcaaactcctaaggtcgctgtagcctgcaggccacaccctaaggcactttaagggcctacacctgtggagccctagggacgcttctgctcctaaggagagttctcaacttcccattttattctccgaaagatgtagcgacctgtaaactgaaggcggctactgaagacttaccgtctttcccgccccattgggtccaaccaaaattgtaagggggctgaagaaagtgataatttgcttatctttgtcctctattccaaaactccgcacgcccagaatgctcatcttttcgatccgggacatgtttgcaaacgtttctaatctcaccagggacctggagcccacaaaggcttaactgaggccgaagcaaggcgtgcacgggacgtgagacccgcgaatctcagggtcaggaggatccgggcggggagcgaggccacaggactgccaaaagatcctgccagccaacagcgggagagagggggcgggggatggagcctttcctcccacaccagctgctttccccgccggtggggagagcggaggcggggaccagcctggggctgcccgccggggacgcaaagccgtagccacaatgcgaccccgcaaccgcgcactcacagcttcctgcctcggccgccctgcggatcacgtgggcctctaggcccgcacgcgtccacgccgctctcctggggcacgccgggaaatcagagtcccgcggtgcgtgcgcagctccgacttccgggtgcggtacggcgaagcagagggctaggtgctgggtgctgttgccaggggcagcggacttccggatctttgctggggatgggcagcctggagaggcactgacttttggaaggggagaccaagacctgtgacggatggcgcttcccaaagcttgatcctgggactcctggaatgggggtagtggtggggtggattggagacccaggaagcggggtcagttcgtgtcaaaactattttccttttcattctcattctctctctaacgttcgtgtagtaatttccagtgatcacataacatgtgatgacgccattgcagtggcggttaatggaatgtgcgcatgtgtattcttgcgcttagaaataccaattttaatttctaattgagtaaatgttgataattataactcacgtacacgctctttgaggtcccccgtaattttttagtgtaaaggcgtctttaagaccaaaagtctgggaactaaaactaaaagcagtctgcaaatatgaagaatgtagaggtaatccattccgatcagtgctcccagcaatagatatctttaaaaataagggaaagagaagttacctgtctcagaagtaactgagaatattgctttcttggaaacaaacttaatggagggatatcacatttaagggcctagagaaacatacataaaaattactgaaacaatagtggaggacatttaaatgaaacacaaatttggaattactgtagtggtataatttgcctctgcctgccttggaaaaatgtaggaaatgtttctccagtcatacaatcccaagcaaataatttacagaacctaatacataaatgtatgtgccaaaggatgcaagtggggaagaccagtgagaaatagtctcttgctgtaccaggttaaaaaaaaccggaaagtgtcagttattacaaaatagttaaaataactaatggaacaaaacattaaaattatataggaatgtcttacttggcaaagcaaatgtaataaaacaatgggaaaagacgaaagacctttttttattttaaaaattgtaaaatacacataaaatttactgtcttggccaggcgcggtggctcacgcctgtaatcccagcactttgggaggccgagacgggtggatcacgaggtcaggaaatgaagaccatcctggctaacacggtgaaaccccgtctctactgaaaacacaaaaaattagccgggcatggtggcaggcgccgatggtcccagctactcaggaggctgaggcaggagtatggcatgaacccgggaggcggagcttgcagtgagccgagaccgcaccactgcactccagcctgggcaacagagcgagactccgtctcaaaaagaatttactatcttaaccaagtgtacatttcagtggtgttaagtatactcacgtacaaccgtcaccacctttcaacctctacaaatcttttcactttgcaaaacaaactacccattaaacaataaccctttcctccccacatcctccaaaccctgacaaccaacattctacttactgtctctataattttttactaagtacctcatataagtggaatcatacagtatttatctttttgtgactggctcatttcacttataatgtcctcaaggttcatccatgttgcagctcagtccccaacccctgggtcactgaccagtatgcatacctggcctgttaggaacctggtggcacagtaggaggtgagcagcaggtgagtgaacattaccacccgagctgggcctcagatcagtgggggcattagattctcataggagcacaaaccgtattttgaactgcccatgagaaagatgtaggttgccccatgcaagggatctagcttgcccattccttatgagaatctaatgcctgatgatgtgaggtcgaacagtttcatcccaaaaccatcaccccactcctgtctgtggaaaaactgtcttccgtga

SEQ ID NO: 318446 - DNA, 4001 bp, Homo sapiens
atgaaaaaaaaggaaagaaggaagggagggagggggtggaggaaggagaggcaaaagttgtccactgcattctattaattccaaggcccagttgttcttaacctccaaatctgcttcttcacttttaaagcctaggtgatagtacgtgtacctgcctagaacatgctttgaaaactagcagactggagagagaatttcactgtcaggttcactactggtgggcgggacactacatcattcccctacggaatccctagggggctcagcatcctttctgtctcttcaattcagataacagtaataagattttccagcagggttataatcacaccaccaccaccaccatctccaaaaagccataaaacaataaattcattactgaagcatctcagtgaatggagatgaaaactgtgcaacagcccagcacgggatagctctcccaatctctgttagacaagcactggctaaaatataagaactggatcaatctcctcacataaaatcaactgtcttacaaacccaagggggaaaaaaatcacacttgttaggcatcattaagaaaagattatcagattatatacatcagtaataaaattccgagccacagggcgaacagggacctgcaggctggggacagagcagccaaaatccagcctccctgtgattcccgacctcttctccaactctgtgcaaagcccgaggaggtgagactctcttcgctaaggcgagcttcggctatgtcctagtgatggacagttcctctctgccaggcccctgcagccttgagaccacattccccagagatccggcaacgtttccccatcccaggcagctgggcattctcctctcccggaaggaagacggaatcccaccccgatcatgcgtgagctgcggcgaagagaagccgctggtcccgaggcgaggggcctcgagtccgcagattcccctcaacatttctgggagtaaagttgggcttagctgggctcctggcaaataaagaggagcctggaaagacagccatgctcaggcccccgtgaggccacttcggacccctccacgctgtgctgggctgcatctgccttaattccccgtctgttgcttctccaggctctgagccccctccacaaaagggggatgcgaaactcaaaggagttaggatgtcaaccctgcaaaccgcagaaactaaaccgacaccaacctgcccaagaaggcagcgaaggtggttgaggacgacaccccaccccccaccccccaccaggcaggggtcgcgggagatggcgggcgcctttctggtggctccacgtcctccttactcccgaagtcccggcggccccgagtctgccccaactccagcatccgttctccccgagctgcggcggggaaaacaaggtagggggcaggggcaggcccagaggggtctcgcccccgcccttgggccggccgaggggctccctggagtcagaggaggaacaatagcggaccccgcgtcctgggagccacccggagtctcccgctcgcacctccctccccacctcctccaagttcagccgggaggcggattgggctcagcagcaccgacgcgggggcagcgaggcgccgcgcggggcgaaacaggtgggacccggcgcagactccagggtgcatctccgggtctgctcattcattcccacccgcgctccctccgccgcggcccctgccccgcgccccgccccagccggcctgcgagtcgcggaggacccgggaagaacccttctcctaacttggccgggtcttcccgctctaccctcatctccaccttcctctccttcctcttgtccccagatctgctctccgcagacagtgggctgccggcggtggaccagggagaggtggcgggaccccggctgcagcccgctcagccgctccgcccgggcgccgtccccagcgcctcccgcgcccgagctccagacacaaaggcggggacacgagcccgggaccccgcgccgggagcctcccaactccgtgccgcgcactcaccccatcgaggcggcggcggcgctccccggacccagctggctgctccaccccgcccgccgcttccccaggaaaacgcggccgccgggctcgcttcctgctcggcttcctgcgccgcagtccctcctcctcccccgctgcgggggtcagtgggcgccgagctcccgggctaggccggcggggcgggggcagcggcagcaccaccacgtggccgccgggcgccggcccccgccgacctggatccagtgggagcgggaagggaggcgctaaccattcccctcccattccacccctcgcggccccaaattccgcgagtcaggtgacccggccccgggctctggccgggacctgcggggggtgctctccgccctccagcccccggcgcatctccccggcccgcgcgtcccggctgttcgtggcttgcttttagtctccagggatcgtgggacccttctccgcggatctgtttcatcctcttaacctgaagttagtggaagccccccacgctctgacccctgggtttaggacggatgagatcccagatactgtttatttctgattaacttccaaagtcgtttgtggtagtggcgagtgtttcaaagtcacggatccaagccccttctgaccagaatctaaaaggttgttttccaaaatcattgaacagaaagtaaagtagaatgtgctcacgttctccggactgaaccaattggttgaagtgactgttttctagcactcattgggtggcaaggcaagactaccaccgttcagtgttgttctgctcaggagttagaaaggagaaacctacagcctgaactgacaggcgagattgcgcatgggaacgccttcaaaatagtgtgtgagaagccacggggtacaggctcactgccccaggtccccgacagcttctctccctatcccagcccactaaggcccgacctttcaattacgatggactccaccattaattccaaggatttcaaagctctctatctacccactcatctaatttgggctggcttttccatgcattctagtcatgctaaccagctgtgacttcagttctgttcacctaagctcctcccttctcctcgttagctctgcctcctttgctcagggaagaaagctttctagaataaataacgtattgagttctttctgggatctactgtaagtcaattgaacttaagagggaaaaaaggtcgattccaacaaaattgaaattcaccctaacagctcagtttataacgtgtcagctacatactaatatttatatggcagatattacctgttccctccccccgccccatccccctttccttcctccctctccctactagggaagagcctatctcccctttaacagttgaacttgacaaacaagcatcaaaagccttgtaactaggtgcagggtcttcacttcctacagcaaaagttccttagccaagtgaggaacagctaaagcaagatgtacactcctcttcctgtcctttatccctctcaaacaaagtcacactgtaaaagaaacatgaactgaccaacattcttttggtttaatgctggcaatttctacaatagtgtttcatcgtgattcttgttaatgacatattgtagggtatttaaggggaacattactgcctgtgagttttctgctctatttttgcaggtcagtctggttcaagtaggggcagctgggaggatgggatttggagcatggtacaggtagatgatgctgtcttggaaatttgacatgtgtgtattctgtaggaacagttgacattttgaaggagttaaaatattagacaacattaaacaatgattgtctaaggcaggcacatctgactttgattcacagaggtcctgtccctcttcttttttctctgtcccagccacctccaaagagcctaccagcctatcacctcttagattcccataggtggtttgtatatgattctccttagtttacactcccaccctctaaagtcagcaag

SEQ ID NO: 318447 - DNA, 4001 bp, Homo sapiens
gtgatgagaacactctaaatctactctcaggaatttttcaagtatacaatacactaactataattaccatgttgtacaatagatctcttcatctattcctcttaactgaaacgctgcatcctttgaccaacatctccccatccacctcccccaaccccccactcccacatccccacccctgctcctggtaacttccattctgttctctgcttctctgaactggaccttcttagatttctatatcagtgagttctcaaacattaaaagtagagcaagtctaagttactgcttaactgtcactgtacaaaatgctgtatctctatgttcaagtcattcctcaacatatcttctgtgctgcaatcatgccatccacctccttgtgaaaagtgatgaggaaaacagttcatattccagatgccactcattccctatttatttttctcagtgtttgttcccgtctcccctccccagaatgcacagggcagttagtgaaaaatgccaggaacaacaaaacctccctcatcaaatagctcattcctcagggggcctctctaaacaatgcaagactctcagggtcttgtgggactcagcaattctgagttgagctgaatcttaagcaatcacttcatttaacatgggtctgtggtcccctggaaatggaatgtaattatcttttagcaagtatacatttacatttttcagggaggaaggttctgagttttcactggattctacaaggtagttgccacccttcaaaagtcaagattgctcatctagtctaagtgcctcatttcacagaagtagcaacagagcctcagacaagtttagaaacttgcctgagtcacaaagcctattcatgatgagattcagaaccagaccctaaggcctgactagtggctgaatgttttcactgccctatatagtttttttttttttaatttcaatagtttggggggtataggtagttttttgatacatgaatttcttagcaatgaattctgagattttaatgcaaccaatatgttgtcttttatccctcacctctctcccaacctagtcctgacagtccattgtatcactctgtatgtttttgcatccttataacttagctcccacttacaagtgagaacatacggtatttggttttccattcctgagttacttcacttggaataacggcctccagttccatccagcaatgccctatacagttttacaactaaaaccaaaaagccaaatcctgtgctaaaacatgtatagactttatcttttttttttttccttttttgtggcgaatggggtctcactatattgcccaggcaggtcacgaattcctgggctcaagctatcctctggcctctccctccctaaaagctgggattacaggcatgagccactgtgcccagcaaacatgtacagactctacctttttcattaaatttggaaatgtacaagatgtgaaaacttcgcatgtagctaaaaaaaaatgaaaatacacttaggtcaaaaaggcaagataatctatgtgaaagtttccatcacatagtaagtgctaaataaatgtcacgtcaagcccactgcaagtgagaacaggtgacctttaacagcaccatcccagaggagaactgaggaatagcaggcacacgtttaccacagttaaccactgttttcagaagccttgccaggtcctctcacattcccccacatcctaattattctaaacaaaactgacttgagaggatgggtggggagtgcaagccactgaatgccttcttcatgagcttgttgctacctccaaaagtcacccagtgactctctagcttccaatgtgtctactttcattcttgctgctgccattgactagggcccttggataaatggtgtgaaaatccagtcatcatgaagcactttgatgacatgaatctggaggcctcattgtgactgcagcctctccatggcccctttcaatcttcccagcctcagcgggagtgacagatgcatgttgccttggaaacgacacacaccataattatacattgttaactgccaagcatttagtcacagaaaaggctgggctggtacctgaatagcaagtgcacattccagggcagtgtttctcaaagtcagcccctagttaatccacatcagaaggacctggggactaaatgcaatcttttagcccctgtcctattaaaactgaatctcaaggggtagagcccaggaacttccttggttgaatcttctgcacactgaagttagagaacctagaactgatgtaggcggaacaggaacacacttgtcagagttgggctggttcataaaccaaagttgggttgtttttttcacgtcaaaacagaatcaccttttgaggaatcaaagtagaaataacgataaacagatattccccaactgtcgctggctaactgtcgctggctgggccagggtttctacgccaactgttgctagaaagtggaaatcgccggccgggcacggtggctcacgcctgtaatcccagcactttgggaggccgaggccggcggaacacaaggtcaggaaatcgagatcatcctggctaacacggtgaaaccccgtctctgctaaaaatacaaaaaattagccgggcgtgatggcgggcgcctgtagtcccagccactcgggaggctaaggcaggagaatggcgtgaacccgggaggcggagcttgcagtgagccgatatcgcgccactgcactccaccctgggcgacagagtgagactccatctcaaaaaaaaaaaaaggtgggaatcgcccttcaaatttaattccttcccccttcttgtggaagtactaataactaaggaaacaggacaaatcagtccagcaggaaagggagaaaagaaggccatatattggataacccaaaactgtgcagttccccacagcagagccactcaaagcattccttcgttcacatattcagagagcacaaagtcttaggcaacagtgggtaagatttttgtttgaggtcatgggggtttcgtgggtgttgtgttagtttttctgtgtatttgtctttggcttttcttttttttttttaagcatgcagtgaaaagtatacaaactcttatttgaagaggattagataaataaagtgataattccaaaagttcccaagggaagggattaaccgccaaactgagtgtcttcctagagtccgtggctttgggtgtgtgagagctgggtggcccatgggcataattccacaatgataaagataagtgtcaaaggaaaagaagttctggaaatccacacaatggtaactctagaagcatgaactgtagctggggtaaagttattaatagatcactgctttcctggtattcatgaaaggatctaacacctggaagccatggctggcggaaagtaatgtggcccctggaataacgccaggtgccagctgtctcagcatctcttcttcctcaagatgaatcatgagtaaacggactcgccttccttgggccaactgggatcttacagtctcattttcaatcccaaacttctaaagcccaggctgagctacaacctatgttgagtaaagtgacatctatcaggttagcaaggccacactaaaggcagtccttggaaaagccattaaatcaggatgcttacttcaaaagaaatacagcaaagctgaattagctgcacaacagcctaattcgagtatgtaccaaaaaggatcatgcatctatggaaaaagttctctgaactaagttctcccatttcaaacagaataaagcacacctacccactgagcagaaatattagtcagtttattacccatttaattcaaaataagtccctgaaatatggcatccatcactggccaccaatcatcactggccaccactcatcacagaatggatgttacgttgataaatgaggatggagcaaagcagagatgtacatgcttgtttccatctcatttgaaagactggatgtaacattgtttattatcagttcatt

SEQ ID NO: 318448 - DNA, 4001 bp, Homo sapiens
tgctttgaaaactagcagactggagagagaatttcactgtcaggttcactactggtgggcgggacactacatcattcccctacggaatccctagggggctcagcatcctttctgtctcttcaattcagataacagtaataagattttccagcagggttataatcacaccaccaccaccaccatctccaaaaagccataaaacaataaattcattactgaagcatctcagtgaatggagatgaaaactgtgcaacagcccagcacgggatagctctcccaatctctgttagacaagcactggctaaaatataagaactggatcaatctcctcacataaaatcaactgtcttacaaacccaagggggaaaaaaatcacacttgttaggcatcattaagaaaagattatcagattatatacatcagtaataaaattccgagccacagggcgaacagggacctgcaggctggggacagagcagccaaaatccagcctccctgtgattcccgacctcttctccaactctgtgcaaagcccgaggaggtgagactctcttcgctaaggcgagcttcggctatgtcctagtgatggacagttcctctctgccaggcccctgcagccttgagaccacattccccagagatccggcaacgtttccccatcccaggcagctgggcattctcctctcccggaaggaagacggaatcccaccccgatcatgcgtgagctgcggcgaagagaagccgctggtcccgaggcgaggggcctcgagtccgcagattcccctcaacatttctgggagtaaagttgggcttagctgggctcctggcaaataaagaggagcctggaaagacagccatgctcaggcccccgtgaggccacttcggacccctccacgctgtgctgggctgcatctgccttaattccccgtctgttgcttctccaggctctgagccccctccacaaaagggggatgcgaaactcaaaggagttaggatgtcaaccctgcaaaccgcagaaactaaaccgacaccaacctgcccaagaaggcagcgaaggtggttgaggacgacaccccaccccccaccccccaccaggcaggggtcgcgggagatggcgggcgcctttctggtggctccacgtcctccttactcccgaagtcccggcggccccgagtctgccccaactccagcatccgttctccccgagctgcggcggggaaaacaaggtagggggcaggggcaggcccagaggggtctcgcccccgcccttgggccggccgaggggctccctggagtcagaggaggaacaatagcggaccccgcgtcctgggagccacccggagtctcccgctcgcacctccctccccacctcctccaagttcagccgggaggcggattgggctcagcagcaccgacgcgggggcagcgaggcgccgcgcggggcgaaacaggtgggacccggcgcagactccagggtgcatctccgggtctgctcattcattcccacccgcgctccctccgccgcggcccctgccccgcgccccgccccagccggcctgcgagtcgcggaggacccgggaagaacccttctcctaacttggccgggtcttcccgctctaccctcatctccaccttcctctccttcctcttgtccccagatctgctctccgcagacagtgggctgccggcggtggaccagggagaggtggcgggaccccggctgcagcccgctcagccgctccgcccgggcgccgtccccagcgcctcccgcgcccgagctccagacacaaaggcggggacacgagcccgggaccccgcgccgggagcctcccaactccgtgccgcgcactcaccccatcgaggcggcggcggcgctccccggacccagctggctgctccaccccgcccgccgcttccccaggaaaacgcggccgccgggctcgcttcctgctcggcttcctgcgccgcagtccctcctcctcccccgctgcgggggtcagtgggcgccgagctcccgggctaggccggcggggcgggggcagcggcagcaccaccacgtggccgccgggcgccggcccccgccgacctggatccagtgggagcgggaagggaggcgctaaccattcccctcccattccacccctcgcggccccaaattccgcgagtcaggtgacccggccccgggctctggccgggacctgcggggggtgctctccgccctccagcccccggcgcatctccccggcccgcgcgtcccggctgttcgtggcttgcttttagtctccagggatcgtgggacccttctccgcggatctgtttcatcctcttaacctgaagttagtggaagccccccacgctctgacccctgggtttaggacggatgagatcccagatactgtttatttctgattaacttccaaagtcgtttgtggtagtggcgagtgtttcaaagtcacggatccaagccccttctgaccagaatctaaaaggttgttttccaaaatcattgaacagaaagtaaagtagaatgtgctcacgttctccggactgaaccaattggttgaagtgactgttttctagcactcattgggtggcaaggcaagactaccaccgttcagtgttgttctgctcaggagttagaaaggagaaacctacagcctgaactgacaggcgagattgcgcatgggaacgccttcaaaatagtgtgtgagaagccacggggtacaggctcactgccccaggtccccgacagcttctctccctatcccagcccactaaggcccgacctttcaattacgatggactccaccattaattccaaggatttcaaagctctctatctacccactcatctaatttgggctggcttttccatgcattctagtcatgctaaccagctgtgacttcagttctgttcacctaagctcctcccttctcctcgttagctctgcctcctttgctcagggaagaaagctttctagaataaataacgtattgagttctttctgggatctactgtaagtcaattgaacttaagagggaaaaaaggtcgattccaacaaaattgaaattcaccctaacagctcagtttataacgtgtcagctacatactaatatttatatggcagatattacctgttccctccccccgccccatccccctttccttcctccctctccctactagggaagagcctatctcccctttaacagttgaacttgacaaacaagcatcaaaagccttgtaactaggtgcagggtcttcacttcctacagcaaaagttccttagccaagtgaggaacagctaaagcaagatgtacactcctcttcctgtcctttatccctctcaaacaaagtcacactgtaaaagaaacatgaactgaccaacattcttttggtttaatgctggcaatttctacaatagtgtttcatcgtgattcttgttaatgacatattgtagggtatttaaggggaacattactgcctgtgagttttctgctctatttttgcaggtcagtctggttcaagtaggggcagctgggaggatgggatttggagcatggtacaggtagatgatgctgtcttggaaatttgacatgtgtgtattctgtaggaacagttgacattttgaaggagttaaaatattagacaacattaaacaatgattgtctaaggcaggcacatctgactttgattcacagaggtcctgtccctcttcttttttctctgtcccagccacctccaaagagcctaccagcctatcacctcttagattcccataggtggtttgtatatgattctccttagtttacactcccaccctctaaagtcagcaagtctaactctggatgagggatcgttgtgaaagtattcttatttttttgggctgtgccaagatccttttccagatccccacttttgaaactcaaagcaactttgtagtctgtagactgagcatggcagctaagttctgccaactgcagggggattagtggggaag

SEQ ID NO: 318449 - DNA, 4001 bp, Homo sapiens
cagtcttacggggctaatatcatttcctccacttttctagtgaggaatctgaggttcagaagagtaagagacttgtccagagccacaaacctaggtccgagtttaagtcgcttttaaagctactccctagattgttcagtttgtttttgttttttgagacagggccttgctctgttacccagactggagtgcagtggcgtgaacacaattcactgtagccttgacctcttgggctcaagccttcctcccacctcagcctcccgagtagctggaaccataggtgtgccccaccataggcggctaattttttaattgttttgtggagatggggttttaccatgtttgcccaggctgctcttgaactcctggactcaaggaatcctcctgcctcagcctcccaatgtgctgggattacaggagtgagccaccgtgccagcagattgcctagtttcttaaaatagactttccacccaaaattcctctttcaggaaacatgggctcttgaatcagactgccttagtgcaaaaactggttctagaacgtaaagttctaagaacccagacaaatgactgcatgtccctaaggccttagtttcttcgtctgtaaaatgagcttaatagtaatacccaccacataagatttgtggcaagattaaatgaatttcacatgaaaagcttagtatacctctggacatttggttaatacttcctaatggttaattattattagcattattatcatatggttgattaacaaactaggctttgaaatgtttttgttgttgttgtcattttttattccctccatttagctgtacggttctgtgcttggggaaacaatttggatgtggagagccatttgaaattgttgggctccattataccaatttcctcctccccaggctctcctcccccaggtctgcttctcaacatttcttctcttagcactaactgccaaaatcatagccttttctgctgccaaatcccagagcttttactagtgttattacagtggatttttttaaatcatggaaatatttcagtttttctaactagattccagcaacaccctccctactgccaccagtttttgatttttaaaccaaaagtttatgtgcctatcattcctctgggcccctgttcatatatatatggaagtctagactgatgaaattttgctaaaaataatcttaacctatgtaaatgaaagctacctagattcccttggaatagaaaaagacatttgttaacctggtcacaaaatttagaaacccctatctgctgaattgggcaacattttccatttaattgcctttttctccttagctgaaagccacgggagatatgtaggctgcataacatacagccagcagacgatgaggttgaaggaggtttctcggaagtcggatgaccaggactttcactctggccaacagctagttttctgtctttgtcgaagtctctttgcactctatgagttttatttaatttacctaaaggataagaaggtaagatcaacttttttcataacgcttcccagttctttctttaagtgggtcggtattttaccatcatcccataagcatctcatctagcctgggttttatcagggcagtaagttacatgtcatgatgcagcctcaggagataagcttcagccagaagtaggtatgcaagttacatatcagccataaaagacacagcctccatttattgcaaaaatgcagctgtgccaagctgtcaaaatataattcacggcaaagcaataaaatccaggttcatctttaattacctcgcctgaaatgatagctgaacaagcccattttgagagtgacataccttggcttccatctaattcccttccattaatttctcccactccacaactctgctcaaagtatctggaatgcagctaatacaagactgggatcatagaagggtttatggggtgaccttttaaaaaaatattatcgtgtacaacccctctgctatgtttttctccctcttctcctgggggagactttatttcataactctgacatcataactgcttcctccaatccagagtcttttatggattggttagataacaaatgagtacgagtccctggaattcggggggaggaaaggtacgggcagcagtagataccattttaccacaaaacccttaacagagagttgaacacgtttcctaaagccaaagatgaaccatgctaatatgtcattcctaaaccacccgcatgagagagactagcttcttctaaaaacgacattctgaatcaggatttctggcaactttagaaatgttgaggtttttactgattcttcctttgaagatgtttaatgtgacggttcctttctctacaaggcacagatccccaaaattaaaaataaaaataaaaaaacattgtttttgaaagctatgcacacaaacagcaaggaacctagagcatgccatctacagaagctaccctgagctggggccaagagcacttgagtgtctgtagtttattaacccaacagcgccttatcaaggtggggaggagcgtttctgcagctccatggagaagaaggaacagccagactgtgagtcaccgcatactcacgtcactcttcctgaacttcgctttcaagctcttcatgtttagtgcattcagccttccaaagctctagaggagacttttcaacacctaagcagagaaaaaaaggacatatgtaggtttccaaataaggtattctctcctgattggattacaacttgggtcatgggaaggagacagagcagggttgcgttgggaaggtggtcagttaacagctgaggagtggtaaataacatatttccacttacgatatacttcctagaagcttctgacattttcaaattaaccaaaaccttaattttttccttcttattaatatttattttaattgacaaataaaaattgtatatacttttatggtgtaaaacatgacttttgaaatatgcatatattgtagaatggctaaattgagctaattaacatatgcattgcctcacatacttattatttcactgtgatgagaacactctaaatctactctcaggaatttttcaagtatacaatacactaactataattaccatgttgtacaatagatctcttcatctattcctcttaactgaaacgctgcatcctttgaccaacatctccccatccacctcccccaaccccccactcccacatccccacccctgctcctggtaacttccattctgttctctgcttctctgaactggaccttcttagatttctatatcagtgagttctcaaacattaaaagtagagcaagtctaagttactgcttaactgtcactgtacaaaatgctgtatctctatgttcaagtcattcctcaacatatcttctgtgctgcaatcatgccatccacctccttgtgaaaagtgatgaggaaaacagttcatattccagatgccactcattccctatttatttttctcagtgtttgttcccgtctcccctccccagaatgcacagggcagttagtgaaaaatgccaggaacaacaaaacctccctcatcaaatagctcattcctcagggggcctctctaaacaatgcaagactctcagggtcttgtgggactcagcaattctgagttgagctgaatcttaagcaatcacttcatttaacatgggtctgtggtcccctggaaatggaatgtaattatcttttagcaagtatacatttacatttttcagggaggaaggttctgagttttcactggattctacaaggtagttgccacccttcaaaagtcaagattgctcatctagtctaagtgcctcatttcacagaagtagcaacagagcctcagacaagtttagaaacttgcctgagtcacaaagcctattcatgatgagattcagaaccagaccctaaggcctgactagtggctgaatgttttcactgccctatatagtttttttttttttaatttcaatagtt

SEQ ID NO: 318450 - DNA, 4001 bp, Homo sapiens
ttaagctgtctacaggaatgtactgtgaagtacttatgttggaatgtactgtgaagtacattcctgcaaaaccaatatgggtagttttgacatcagcagctaacttttccaacactgtgcctaaatatgaagaagtcttccagggcttggtgatttaactgtacatcacctttccatgtatgaaaaaattccaaagttccaccataccttttaatttactctcaagatttactcgggctctgtgaacatctgattacctatttacaatccataaatcctccttgtaagattcttcctgtgaaaatttcccagagggcatatttactaaagtggtaatacattattttgacctgaggacccttagaaatggcatgaagtcaaaaggtaatgtgtcgggcttactacataacattctagaactgtcgattatcagacagtaactggttttaaaaaaaagaccctttagaagaatcaataaatcagccaagttataaatcagtgtgatcacagggggttcaaaagagtctacaaggggaatgagattcttagatacactgtcaccatattatgaaattcccttccctccctggggtcatctcctgccacccactgcctcccctgatcccatccctttgtcccaaccagactcaactttctgcagtacaccatgttcttccacaattctttgccttggctcacacgtccttctacctccatatccttcccttcctcttcacctggcaaacaactacgactctttcaaggaccagtagactgcaagttccctgagagtagaaaccatagttttgttcagagctgttgtatcttcagcgcctagcatagtaggcgctcaataattaataaatggaagaatggaggctcaaagaatcttaaagcatctctcagctaagagcatagcagctctgcttcactccttctcaacatacacatttggctggctacccccttttctgtgctatgatactgtgactatttctaccatacatttttcacttgtactgtaattctctgttaactgtatgagggcgaggatagtaagatgtcatcctttatccccagaactttccacaatgcttgagacacagtggggagataataaatgtttgctgaataactgaacggggatgtcagagcagcccgaggatatacaagcacgcgtcccatcttcgtagcctctgcgatcctcgcgtccgcgcccgcgcccgcgcccggcccgggtttcctcctccgaagaggcggccgcgtagccctccctcgcaactccccccagacgcagcccctgtctcctctggccaattaaagtccaaccgctgccgccgctccttcggtggatcccaagcccccgctccggctggggctcaactgtgtggagggaggctgacgatagagccgcgccggcgacgcggcgggaaggcgggaaggctgctccaccgctcggcagccgcgcgaggcgcgccaaagccggcccagctgggactcccacctgccctggcaacactaaagccgcggtcagcgagcgtgctgccggcgtccgcaccttccccgggacgagccctgggcctgtcccccgccccctccacccgccgcctccaacccaggctcggccgcccctttctcgggctccggcccgggcctggggtgtgcagcccagaccagtgtcccggtccccggctaggggcagaggcaggggctgggactccggggacaccggcccacggccctgcggcctccgccgctgtcctcggccctcggtctccagacgcgtcccgccgggttcccagcgtggcggagcgcgggcccgcggcgcagagcacactgacctggaagtgcagcgccatcttcccaggaggcggcgccggccagccggccggtcggcacccagcgcccgaggggagggagcagaggcgggcgccgcggaagccccagacgcccgcggggtccctgcgccgctcgtccttcgcagcctcagccaggcttcgcgtccgcattcgaagcgctggaggggcggggctgggagggacggggcggggctgggagggacggggcggggcgacggaggcggtgcacggggcggggccgataggggcgtgtcctccgggaatctcaaccgtcccttgcgctcaagtttcaaccggcgtgtgttggtgggtcatgacctccaacctctgccctttgacacaactaccacgacccacccgtcagccgtggaccctgactcataagtcttccaaaggctctcttgacccctgaccctcaaaatacaactatcgcccatggctcccgacacctgcatctccacagattttcttgtctcctaacagccaggaaccacagacacacacagccataacctttgactcccacatgccagctgttgcccttgacccctgactcccagggcccaaattccattgttgcttaacaatgtttttaacttgattttggttaaaattaaaccgcccatgtctacatgctgttaagttgtaaaattcaagctttacctcattctttgtctgcattttgtttaatatgaacttatattttacaacaaatgattccactgcaatgagaatttattggagcagaattgggtcaaagttgctgctttctgatgttctccgttttttcttcaagttcagcatttccatttgggagcactgtgctgtagtatttaagagggaaactcccttaagcacttcttgtattcaggtctgctaacaacaaagtctctcagcttttgttaacataaaatcatcttaattcaccttcattttttaaaggatagttttgctgggtatagaatttcacattggctttttttttaatctttcagcattttaaaaatgtcttctcattgtcttctgcttgtcattgtttctattgagaaatcagccatcagtctaattgttgctcctgtcttttggccccctcctcaggtacttgaacatttttctctttttttattttttctttttgtcttcagcactttgtgcttgatgtcgctaagtgtgtgtgtgtgtgtgtgttgtatttatcctgcttgggattcataaagctctttaagtgtgaatgtaatcttttttatcaagttttgaaaaatcttggtcactagttctttaaatattgcatctgtccccttctctctctctacctctccattctggaactccagttacatgtatgttataagtttttgctatattccttatttctattctgtattttttatttgcctgctgtccattccatagaaactctgttctgctgtgtctgagctgctatacatcccctctattgaattcttagttttagttataatattttcagttctagaattttcatttagaaagttgaaattttcatggttcctcctcctctcccattttaaaaatagattccaaggctttgatgaaattctttgtctttattttcttaaacattttaactgtattatttaaagcccttatctgttaactccaatttctgaatcatctgagtcttcctgggtttttggtgcttggcccttggcccttttttttctttcttttttttttttttttttttttttttttttttacatatctcatgatttcttgttgaattcaaaccatgtagaagaaaatttgtagaggctctggatgataacaggtttctccaaggagggctaagttttcttgtggtaggcagacaagagtactagtggatcattgagtctttttaattctggttaacttcagttatgaccttactcctaggccatggtccttactaggtcttacaactaaaagcctagaatgtggctgggcatgatggctcatgactataatcccagcacgttggaaagccagagagggtggatcgcttgaatccaggagtttgagaccagcctgggcaacatggtgaaagcccatctctacaagaaatacaaaaaattagcttggtgtagtagcatgtgcctgtagttccagctactcgggagg

SEQ ID NO: 318451 - DNA, 4001 bp, Homo sapiens
taaaaagcaagcaaaggaataatccatacaagtgcatagaagaaaagtctagaagtttatacattaaaatgttaatagcaattatctttgggtggtggggttacaggtgacttctttaggctcacccccaccaaattttctattaaaattatcatattagcaattgaagtggggggaagtcactttaacatttcatacaaagtcaacagaaaacaaaaacctctgataaactagaattgtttactaacagagaagcaagagcattttacagtgctatgccttaaccctgacacattccaggactttacattctagggtacttggttcaaaatttatttgagcactagtagtaaagcatggtctaaaagttcacattgttttcatttaccatgaagtattttctgccgacactatgctaagccttgtagagcatgaagtcatgttatacagctccaggaaccgatgcagagaggtggcctgacacattcatgtgactgttagcacacagattccatcttggaaatgggaggttttggccctttagccaacactctccacaccactgaaatctaaaactgcgtctacagaaaaataattaaagagctcattgcctagacctacacataaaaagatctatcctaggttattgaggagaagttagaagtgtctggtgaatccttaacctctgtggagtgatgatgtcatccatgagagacccagcctttcccacaagtgtcatttgctgtccctgacagggtggattggagggatcatcttgtctattcatgtcaaccatctgacactaactcagctggctggagagtggatttgaaaatttaaaaagactgatggtgaaaatggctgggaggtagatagtttagtttgaatgagtgcccagcaagtgaaatgtgacacttttccctgactgtctccagatgtccctggaccataaaaaggaaagagtcaagaatatatttatttttcccacaatgaatgagccagagatccagacaaacttaggcttaaacaaagtgaaaaaagtgtcccaccagtggtactatggtagagaaagctccaggctaacttaaagctactctcagctgaaatcccccttgtagctgactcagccttgctcagatgggtgttttgaattagacaaaatctagcatactctaaaaaacacagtggctagaagtttaagcatgtaagtttcagaatgacagctccaaggaatatgcattcttgacagtcttccatagtcctctaaaaatcaatagtgaatccaagttaacccacccttatgcatcactattatgtcagagcttccccgggtccttcaccagcccaccattcttcctggaatgcaaatgcacagaaggtcacagaatatgcaactcatgagctggacggactcaccttgctgtcgccggtcctcctgcagcttcagtttacaggtgtgcaaactgccaggcaggtggctgctgccttttcttggtatggtagtcatggtcctagcagtatggctgtgactcaaggatcactagggcacctccttctctggccagtcacctaaagtggccttcaccagacacccagaaatacatagattcatgcagatcttgtctttgcatgtacaacatatactcctctactaaacttccaagctttttccagtcatgattcttgaaataaataatcaccaatgttacttctcctaaatataaagatgccaattcatttggttaaaaacacaacttaattccttcatttcaaaacaaattgaaactaaacctccttatagagtaaaattctacaaattaactatttctaacagattacacttttgtcatttttaaattccttttggcgacatgaaatccaatgcctccagtatttagagaaggctgctaaaataatacagacacaaagaaaagaaaaagtgctgctgagttaagtcaagtgatttctaagcctgatctgagttaccctctgtgacagctgaaagtgtacagttcttaagggactctggaaggaggaggagcaaagtgggctaggatgattagcataaagaggcaggcaagacgggcattggagctgctttgaataatagtgaacaaagcacagattctaaagatgccctgcccttatgttacagtaactgagtacctgatttctgctactttgtttgtaattaaaatgcaagctgaaagcaggagtttatactgcaaggacattcatttgtgcatgtgaaatctaaaaggtataaatggaactggtaatgagctcatggaaatgtactgctggaactttcaatttctgtaaacacctcctagtcttcggaagggagcagttagagggcagccttcctgccaaggcaactatttggagttctggaagaaaaataaacacacaaaacattatctttccagagtcctatttctgtttcccacttagagttcttattgctacttctaggtcataggagaaagtaatttccagttttactcgttggctatttccttactgtttggaaacataaaccccaaacaccattaatttaacttgagagcttgccataactgaagtcataatgaatgctggtaggtcctgcccttcaagagtcacagctcttcgcagattcagaaagaaggtagtgggcaggactaaggagaaaggcagagctgtttagcctcgaagtctggactctgcagcttcttatgtgcatttggaaattggtgttaaacttgacactgtaatgaatttacctcctaaccagatctgggtggctgccctcattttactttgaggcaattaacaattccccaagtatagtctggtttatgaaaatttttatgaagtaggtgattgatcttttataattcttgaatgctttaattgtttcagtagtctatctactgcagttttaggctaatcacagtgtaacagatgacagaagtgttgtgctactttgaaagagagtcttgttattggagagtcatagtttctactttaaatgtctgctattcatctcatcttccacaaaagccatggtggagagacaaggtgatttttcctgaatatgtaaagttattgttattctatcaagttatgtacctcactaataagcatattattatacaggtaagttaaataacctacaaaactgtaagccagcccttttgagaaatacatttaaaatgttttatgatgaaaaaatttaaaaatacatgaataggagagaatagcacaataagccctgcatactcatcacttggcttcaatattatcaactcatagacaatcgtgtcttaaaactatgtgtttcattatagctgttctcccccttattacaccactggagttgaagcatccagacatcattgcattaataaatatttcagtgtatatttctaaaatgtgaggatttaaaaatagataaccataataagatagtcacgcacataacaattaaatatgattatttgatgtaattaagcatccacacagtgttcttattttcctgattgtctcataaacttttttatctttacattttttgcaaattgggacccaaaggtccacacattgtatttggttgatatgtttctcaagtcttttttaatctataggttcatctcagagagaaatgttgcttggagatgaacatctacacttaccctaatttatgtctgattttttcaaggaagccccctagatgcctccatttttcttactcaggaaaaaaagagaaaaaaaaagggtggtcatctggccatggaggctaagacatccagctttcttgccatggtgttctcattcatatacagtgcaaccttgacccagccacttaacatttctgggtttgtgtcttcatttagcatatgaaacaaatgtttgctaagcaatgggataaattattcaacactcattctatggatataaaggcctgggaaagggaggagtatcctactttgtctctgactagagcctaaggagaaaga

SEQ ID NO: 318452 - DNA, 4001 bp, Homo sapiens
cagaactacttgaaccgggacccaggaggcggaggttgcagtgagcagagatcgtgccactgcactccagcctgggctatagagggagactttgtctcaaaaaaaataaaataggcaatttcaaaataaataattctgctgttaaagagcagtaggatttttccattaaaatgtgaatttagtagcacaagtaatgttgaaaattaaaagcagccgggcaacttggctcacacctgtaattccagcactttgggaggccaacgcgggcagatcacttgaggtcatgagtttgagaccaccctgggcaatatggtgcaaccccgtctctactaaaaatacaaaaaattagccgggcgtggtggcgcctgcctgtaatcccagctactccggaggctgaggcagaaaaatcgcttgaacccgggaggtaaaggttgtagtgagccaatatcgcgccattgcactccagcctgggtgacagagtgagactgtttcaaataaaaaataaaataacattaaattaaattaaattgaaacctgcaatacacatcgtaagccttgtataatactttccaatgctataaaggctgtaagataattcgcctactgaaattcataaatcagctcacattgacttcaagaatcatcataaggaaacaaacactcatcgaattataaatgtatatctcaaaaagagaactctggaaagtggtagaatttgtgttgttcctatgcaaacatcaggatcttcaataacataatttgacctatcatggcttccgttgtgacctgaataattgtcacgacccaaaaggtcagcccaacgttactgagactcagtatgcaaaacactacatatctgaaaaactccaaagtgaagaattaaccaaagcatttcatttcatttactgcaactttaaacaaaacaatccaataatccactcacactgtttagtgttttgtttagaaaatatgtcccacttgttatagaaacctccaaatcaaggaaaaccttccccaaaaccttagcattctaccgggataagcaaagctaacaggttttagttatatgcctgaaaactagccttcatgaaggtcgaatgaaaaatcttttaagctgatgccataactgttaactcgacacagcaaattttggatccaagtacaaaatactgtaaaatttcccagtgacagtctgaaaaagtacctacagtggtgttctttaaacatgcatcatctactacagaattcaccatttgactggatgtaaacttttaaactaactttgaaaactttatcttttttttaggcaactgtacaatatttcagagacctttaaagaaaaactatttctaaattacatggctgagatacttcccttacaatttccatctcgtttttcatagtctacttaaacgaatgggcatctaactgcgaaactcatattacccaactcagaaaatacgacttagtaatggtgctttcttaacgacactcagaagcccccggcaaggacgggtacgcgggttaagaccgcatcacaggcaggaagggcggtcggcaccctgctggcgacaagggcctgggtcagggaagagactcaagcgaacagattcccagtagcaggtgcgagactctggcaagagggcagtcgccgcggatttcggacagacaggaggatgctgtctactggactgtgagacgcacataaaggtcaaccagcctcacctcgggagtccgctcgggtggcttcttcctcaacgcctgcctagcgccagggtccacgggtgagttcatggccacggcccgggtactccgcagcctgcccttagcagcccacgccacagttcattcacactaggtagcgggtgcggtacctttcccccgccccaaggagggaacttcgcgccgtaacaaggtccgaactctagcaaacaacccttcgcaacgcccgcctaaggcctctacccacgcgcgactggccggagacaagtctgcgcgggggcgggggagagtaagtgcgcatgcgcagcacgcacgcgcacgctaagaaacgcccaagggagtaactccactgtgacgttaaaattggggcggtgcgagtaagtcgtttcctgctgtcgtcgtgagatttaaagacacctcgcgagacctcacctaaatcagtcacggggtctgccttggcgttgtggttccgtcttctccatccgttggagacaccggaaacgcgctgaggacctgagcaaaaatagcattttggggcagaaccgtggggaggcgttctgactggagagaactgttgtgcccaaatccggaagcccagggtgtggccaagtccggctttgcgctctcctctgcaacttctactgccgactttgaatatgcggaagtagaagccgccattcggcaaagaaggaattccacgcacacctcatatctctttaaataaaacgagatctcttgtgaaagctgccgacagagaagtgcttgatctattcgaaacggacgtcctgagaccagggcagagaaagcaaacattcacggccaggataggcagccggtgccgcggccagctcacgattacctttgagtcaaaaaactagatttagactgcgttcttgtaactaaatgcccggggcagccctccctcaggcaactgcgtttagggttgggactcgagtggcaacttttgcaatactttttacattctagtctgcttcccaacagaccgaataaagccagttttgtttcactgctcccttggtaagaaaaacagaccacccttaggagcagccagagagctgctgaggccgtttcaacaataagctcactgacaattccagaatccatcgttctaggatactccttaccctttctcataagttcataggtaactaactttggcgacaccacctttccactgaattttaagctccttgatggctgtaactacatctaggtacaccttggtatttctcacagcagttagcatagttcactaaataacaaggtgatttatgattatgacatgctttccaattaatgactgcttcacagtaattttaatgacgtaataagagttaaaattatatttgaaaacaatgagagttcaggctacaacaccgtttctgggaccggcaatgacttaaggactgttttctgttggtcctggggcttgcccaaactgggagtttacaacatactattagcatttctctttttcaggtatagatcaaaaactttaccagcgaagtgtggcatagccattgtagaaataaagtaattgtggaaaaaatcacaggatgttgcagacgatccgttttcctcattttttgtacaaatataacctctcaaagatctgcccaggatcacaaacaaaagttaacccttccattcttcaaggatcaattttcagagtcacatcaatattttgaaagagggagaaagaactataaagcatgatcaccatgaacttgaactttaggggcaaacagacctagaatttgtgtctctaatattagacctcttctagttaagtgacttgaagttatttaacatctctgaacttcattttccttatgttaaatgggaatatagtaaaggacctattgcttcagaattttcttaagattacgcgagaaaattcacatgaagcacttagtatgttgccttcattttccttatgttaaatgggaatatagtaaaggacctattgtttcagaattttcttaagattaagtgagaaaattcacatgaagcacttagtatgtcacatgaagcacttagtaagattacgtgagaaaactcacgtgaagcacttaagcacttagtatgaagcacttagtatgagaaaattcacatgaagcacttagtatgctgcacaatccgagcactccttattatttccattattttgcctctaggaagtgattttttttttttttttttttgagacggagtttttctcttgttgcccaggctggagagcaatggcgcgacctcgg

SEQ ID NO: 318453 - DNA, 4001 bp, Homo sapiens
gttagcatattatccttaataagaaaatattggccaggcatggtggctcacgcctgtaatcccagcactttgggaggcctaggcaggtggatgacttgaggccaagagttcaagaccagcatggcaaacatagcgaaacgctgtctctactaaaaatacaaaaattagctaggcatggtggcgcatgcctgtaatcctagctacttgggaggctgaggcaggagaattgcctgaatcccagaggctgaggttgcggtgagtcgagatcgtgccactgcactccagtctgcttgacagagcgagactctgtttcaaaaaaaaagaaaaagaaaaagaatatattaaccacacatacatgtgttttgggagacaggaatcggagtaagtatataatgggatatgcctcatgtctcatatccctagttcttttctttggctcgataaacactctgatttagcaagagtagttaagtttcaggttgaccaacctgcttttattcccaaatcctatgacctgggactcttaaaaaacccaaatgtcctttgtcacattcaaaatagctcaagggtctgcctttcaccctttctgggactaaacaattttcccatttcttcctgtttccagtgtcttaggtcctagactagaccagaccaggctttgtagtttaacatctaaaactaaagacatgtcaattcagaaagaaataaagcttccaacttaaactgcaaaactcagggggagttcctcacctgaaatttcagaatacttactgggagatagctacagccaaaaccaaattgccaaaaatgagcatacattatgttccaggagctgagctaaaaacacttttcagaaattaccttcatgattatcacaaccaagtgaggcaaagataaatacataccgataaataaatggctcagaaatgtaaagagcttgccaatttacttgactaacttgtactttgtgactgctgattaagtatacagccgtaacaggacagagtactgtgaactatcttcctaccatccctccccacctgggcataaaaggtaatggaactgttccgctttcactttttttttttgtagggggacggagtctcactctgtcgcccaggctgtggtgcagtggtgtgctctctgctcactgcaagctccgcctcccgggttcacgccattctcctgcctcagcctcccgagtagctaggaatacagggaccccccccaacacagccggttaagtttttttgtattttcagtagagacggagtttcactgtgttagccaggatggtctcgatctcctgacatcgtgatccgcccacctcggcctcccaaagtgctgggattacaggcatgagccaccgcgcccggccgctttcacttttatatggtgtggctgctccttcccgacgaatgctgagggcacagagcaagctccgctggtctgataatgaatcaccccatgggcttattaggaatcctctcgctcagtaacccgggaagaactgcggctgagctgcaaaccaagacccagagctctgaatgtattccccccttgtctatctccccgcatcccctaaatcgcgtgtgtatgcagaagaggaggtggattgtagggagagaactgttctgaacatgccaggctccagcccaccgaagacgctggtttgggggaggcctgggagagggtggggaccctccattccgctgaaaatcacagtcacacgggctttgaaatgatgggtgcttcctctctcaacccttcctgttcccacagggaccgtgccgctccactctgagaggaccaggatggtcctcgcctagctgtcccgcccccgaagccgcttgggcaggagtcagagcctgctccatctctttcaggccttcccgccggtctcctgcgtccaaacctgctgcagcagccgcgcggagcactcagacaccagtacgtccatcctcccatcagcgtctcactcgccaagtggacggaagcggaaacggtcagcctctcccggaagcggaaaccccctccggtccgctgtcccgtcggactgggtgctggcgcctctgctgcctcctggcgggatccagtagacactgcgaggagaacccgcggggatttcggtcaggagcgaggccgcaactcagggacgtttgggcgaggggagaggaattgagcagacactaaccagagctgctctgtgcttggatagactaggacagtcactgacctagagcttctggctctcaaaggcctcactttgcccctttgtgaaatgggcacaaaactaacaaatccattcatttattcaacaaacatttattgtgtactttaaaatgccagacagtattctaggctctgggggcacaaagaaaacaaaacagacacgatctcccctctcacggcagacacattttagaatggagagagaaaatagaccaaaaaaggcaataatctcaggtagttttaattgctaggaaggcaatgtgatagagtgacttgggtgagagaagacatctctaagcaagtgacatttgagttaaaatcttatttatttttccagttttattgaggtataattgacaaagattgtatatcataacgatgtacaacgtaatgttttgatatatgtatacattctgaaatgattaccacaaccaaaataattaacataaccttcatctcatacagttatcatttgcatgtgtgtgtgtgtgtgtgtgtgcgcgcgcgcgcgcgcgcgtgtgtgctgtgaacatttaagatctattctcatcctgggaaacagctaagacctcgtctctacaaaaaaatggaaaaatagccgggcatggtggcatgtgcctgtagtccctggtatataggaggctgaggtgggaggatcacttgagcccaagaatttgaggctgcggtgagccatgatcatgccactgtactctgcctggatgacagagtgagaccttttctctctctatttaaaaacaaacaaaacgaaacgaaaacgaaaactgcaagtatacaatatacattacatctctagaatctattcatcccgcctaactgaaactttgtaactttgagcaacatctcccatctttcctacctctgaagccctgacaaccaccattctatgctctgcttctatgaatctgaattttttagattacacatatacatgggctaatgtagtatttgtctttctgtgcccggcttattgcaccaacataatgttctccaggttcatctatgttgtcacccataacagggttttcttttataaggctgaataatatttcattgtatatatattgagttaaaattataaacagcaaacctgggatatatgttctaagagggcagggaccttaattatcttgttcactcttctctatgactccagaacttagaaagtagcactctaaacgttttcgcttccgtgcctcataaaagtattttaaaaattcatatcccagtgtatacttttaaaagttgacatcgagctaggcacagtggctcatgtctgtaatcctagcactttgggaggctgaggcaggcagatttcttgagcccaggagtccaagaccagcctggaaaaaatggtgaaacatcgtctctaccaaaaatacaaaacattagccaggcatggtggtgtgcacctgtagtcccagctatataggagacttaggaggcaggattgtttaaacccaagagtttgaggttgcagtgagccatgatctggccactgcactccagcctgggcaacggagtgagactctgtctcaaaaaaaaaaaaaaaaaaaaaaaaaagacatctaaaaactcttttcacaacttctgggaatggattattttctggcatgatgtttcataagtgctctcactatattttcgtcaaaactgtggatttgcaagtttagcttgtccaatttatggaacatgtcggccatattgtttcattggcaaagccagtcctctttgtccaattaaataatcca

SEQ ID NO: 318454 - DNA, 4001 bp, Homo sapiens
ttttttttttttgagacagagtctcgctctgtcacccaggctggagtgcagcggcacgatctcggctcactgcaacctccgcctcctgggttcaagcgattcttctgcctcagcctcccaagtagctaggattataggcgcgtgccaccgcgtccggcttatttttgtatttttagtagagacagggtttcaccaggttggccaggttggtctcgaactcctgacctcaggtgatccgcccacctcagcctctcaaagtgctgggattacaggtgtgagccactgcgcccggccggttgttaaaattctaagggtcaattaagggttatatgagaaatctataacaagttttgcctaataacacttcccatctcaacattttcatcaaggtccacctttaagaataaacacctaagttcaattaagacaagtgaggaggaggtattaacttacattttaaaaaagtcattgtcctgtatattttacagactgtaaaacttaatttttaaatagaatactatactggccaccaacaaaaaatgtttaagggaagctctattgattttgttttgcctcactgttgtacttccaaagtctccactataaaagcagtgcgttaatattaagtggcaagcctatggaagaagatacattgttggaatataggctcttaatcacacctataatacacaggattcctttcctttctctctgacccaagttctcattaagtgacccaaagactcttctgcatcactatgctttctctaatcagaagctgggctgtgcactgaaataaaaacattctaaccaatacatttttcaaattattactatagtactcgtttaaacacctgtattcaaagcttctcactaatcatctagctttatcaagtaacacacacaagttaatatacactatgactgccttggtagccgcagtttgactaaattctgggacaccacctcaacttggaagggacagaactatatccggttctcattagatacacattttctcatgctttccatcttaaagactttacactttcccagaggagcaataaatgtaggaagacgccaggtagtatgcctgtaaggaagataagtgatcagattaaattcctacccaagaaacctgaaacttcaaaaacttttcctaacaaaccacagatgaaaaggacaaagtatgatttaccccttcatttccacttcttttctggagccagcttcccaaattcctgaacagcagtcttaacttactggttagttggaggagcggtcaacggtatggccacctcttcctcctcgtattctggtccatccagagagtcaccttcgtccactgtcccgaggcccgcccccaaagggggcaggtaagggggagggggcagagggggaaaaccgccgcctggcccgagagtctcagcaagcaacgaagtgggcagtttggtgagagccatgtctccactaggtccagcaacagcagcaccggccacgccagcagcagcaccagctacgccagcagcagtacctccccctgtcagtccagctccccccagtgcccctgccacagacccggctcctaggaactctgaccccaaagcggctccgccacccagagttccagccactccggtctccaccagcccaggatagggggcggctgccacaggcagggccgcgggtatcttcacccgacacactgcgggataggcactggagcccgctgccgcgccgcctcctccagctccggctgttaccgggccgccctcctcactgccggcctcggccgccatcatgttgaagcccgctctactctgccctaccctgcccgcccgggagccccaggggccaccaggcccgggctccgagcagccccacccagacgcgtctccccttcagctccccaggctgaggaaacaacaacaaaaggagagagcccgccgccgcgccccctcctagggccacagcccaggctccccagctgcctgggttacgggaagccaagtgggcaaaaaacccaacgcctgcacaaacgccacccaaacctcaccgcacacacccacactcacgcacacaaacacatgtacagaagcgaaaacttcctcgctgcactaaagaggaaaggaagcacagggaaagaggctgaggctgctaccgctccttcagccgccaccaccgcttcttcaccaccccagttccggccacccacaccgcagccaccgccggtgccgctgctgaggctggggccactgcagccgcttcatcctccaccaggcagatgagaggggtgggggggcaagagaaaggggggcggggtaacgaggaaatcgactgaactgctcactacctggagctctcagtgagtgaaacgggagagagagaaaggaaggcggggcaggggaggagggacggagggaaggaagggcggagaagggagagggcagcttgtgcgcaggcgcgttcccggagcgggggcggggggccgggccgggaggaaaaggaagagtccagagggaaggaagcggcggggacgcgcggtgcgtggtcgcgcttgctgtcctcctccggttccaagcgtgtggcggcgcggccgcatctcctgttggcgtggccggcggcgcgcgcctgtctcccggggctttgtttgatgggcgggagaagagggaagggtacctgagcacgcgggtgcttggcgctgttaaagccggagagaccagagggggaccaggaggcggtggagaggaaggagggggaaagggaaaggaaaatgcccagaaactagttccgtacttcctgaccagtggaaaaaacagccttaaccagcagcgcagaaaccgggcaggggtcaggtagctttgaagatcggggcagtactattaatgttttctttttcgttgcatgctataaatcactatgactatctcacacacacacagttaaaatagattctgaaactccaaaacgaaataaagggcaccatatgagaagggtgaagaatttgagtagaaatagtggttatgaagtaagatttctaccagtatttgcatacgtttttctttatcaactgtctcatatacttacctatgccattataagtctgttggatactgatgaagaggaggaggtgccacagaaaacactaatcaatgcacttttgtcctggtttgtgtgcaaaagactgcaggacgtgatccacaatgcaagcaccttcaacaagtcaaatgtcaagaatgtcccagaatgctagttataattatatatcgtttcaaaagtagcaataaactgaaaactcatttttaatacaattaaggagaagggtgttattttgtcttttacactaaaatgtatacaaactatgcattcatgtagagggagcttcccatggtttgaaattaacaatattgttaaattctcccaggagtgatcccacattaaataccattggatattgatctttgagatcaatattttctgtgctaaggatgatcaaactaacactcaggatggcaagtggctgtgatagaaacccaggaaaaagagaaaagaccactaaaagacgtgacaagatacaggcaatgcattgcctttgtaagtttgcacaggcctatttacctagtcaatgacaacaatccaacttgattaggagtagtcctggggcctccattacgcatatctcttagcagtgtgctacctgggagaaggaagatggaccagtcacaggagctagagttctcaaagtgaattcaggccgcaacatcctaggaattcagaaatgccacctcagaccttctgaatcagaaaatatgcagcgatccattttaacaaaccctccaagtgattgtttgcacacttaagtttgagaaccactatattaatgtatagtatactaatcaagaaggaggtatgcaatacctaaaaacggttctgaaagaaataataaatgtcattcattaggtgggtaggtaaaataggcgggttttgagttgccaagctct

SEQ ID NO: 318455 - DNA, 4001 bp, Homo sapiens
gggactctgcattacaaagacattaaaatatgaaccaaactctgacgaaagacttgaatcctttattgaggaatataaaaagtggaatactacatcccgttggctggcataaatatgactaactttacttttcccctttaagtatcaaaagatgtagccttaagtcaaaaatggattagggtaacagaatcttttcctaattagtttcagaactttctaaatgctccaaagaagcttatccaaaaaaaaaaaaaaaaaaaaaaaaaaaaaaaaaaaaaggccgggcaccgtggcttacggctgtaatcccaccactttgggaggctgaggccggcggatcacctgaggtcaggagttcgacatcagtttggccatatggcgaaatttcgtctctattaaaaatacaaaaattagccagacatggtggcatgcgcctgtaatcccagctactagagaggctgaagcaggagaatctcttgaacccgggaggcggaggttgcagtgagccgagatcacgccactgcactccagcctgggcaacaaggcgagactccatctctggggtggggggaaggaaaaaaaaaaaaacctctgaattgtccagagtgactgtcaacatatgaaccaaatctttttttcttgatattcaacaaagttgtcaaaattcttttttttttttttttgagacagagtctcgctctgtcacccaggctggagtgcagcggcacgatctcggctcactgcaacctccgcctcctgggttcaagcgattcttctgcctcagcctcccaagtagctaggattataggcgcgtgccaccgcgtccggcttatttttgtatttttagtagagacagggtttcaccaggttggccaggttggtctcgaactcctgacctcaggtgatccgcccacctcagcctctcaaagtgctgggattacaggtgtgagccactgcgcccggccggttgttaaaattctaagggtcaattaagggttatatgagaaatctataacaagttttgcctaataacacttcccatctcaacattttcatcaaggtccacctttaagaataaacacctaagttcaattaagacaagtgaggaggaggtattaacttacattttaaaaaagtcattgtcctgtatattttacagactgtaaaacttaatttttaaatagaatactatactggccaccaacaaaaaatgtttaagggaagctctattgattttgttttgcctcactgttgtacttccaaagtctccactataaaagcagtgcgttaatattaagtggcaagcctatggaagaagatacattgttggaatataggctcttaatcacacctataatacacaggattcctttcctttctctctgacccaagttctcattaagtgacccaaagactcttctgcatcactatgctttctctaatcagaagctgggctgtgcactgaaataaaaacattctaaccaatacatttttcaaattattactatagtactcgtttaaacacctgtattcaaagcttctcactaatcatctagctttatcaagtaacacacacaagttaatatacactatgactgccttggtagccgcagtttgactaaattctgggacaccacctcaacttggaagggacagaactatatccggttctcattagatacacattttctcatgctttccatcttaaagactttacactttcccagaggagcaataaatgtaggaagacgccaggtagtatgcctgtaaggaagataagtgatcagattaaattcctacccaagaaacctgaaacttcaaaaacttttcctaacaaaccacagatgaaaaggacaaagtatgatttaccccttcatttccacttcttttctggagccagcttcccaaattcctgaacagcagtcttaacttactggttagttggaggagcggtcaacggtatggccacctcttcctcctcgtattctggtccatccagagagtcaccttcgtccactgtcccgaggcccgcccccaaagggggcaggtaagggggagggggcagagggggaaaaccgccgcctggcccgagagtctcagcaagcaacgaagtgggcagtttggtgagagccatgtctccactaggtccagcaacagcagcaccggccacgccagcagcagcaccagctacgccagcagcagtacctccccctgtcagtccagctccccccagtgcccctgccacagacccggctcctaggaactctgaccccaaagcggctccgccacccagagttccagccactccggtctccaccagcccaggatagggggcggctgccacaggcagggccgcgggtatcttcacccgacacactgcgggataggcactggagcccgctgccgcgccgcctcctccagctccggctgttaccgggccgccctcctcactgccggcctcggccgccatcatgttgaagcccgctctactctgccctaccctgcccgcccgggagccccaggggccaccaggcccgggctccgagcagccccacccagacgcgtctccccttcagctccccaggctgaggaaacaacaacaaaaggagagagcccgccgccgcgccccctcctagggccacagcccaggctccccagctgcctgggttacgggaagccaagtgggcaaaaaacccaacgcctgcacaaacgccacccaaacctcaccgcacacacccacactcacgcacacaaacacatgtacagaagcgaaaacttcctcgctgcactaaagaggaaaggaagcacagggaaagaggctgaggctgctaccgctccttcagccgccaccaccgcttcttcaccaccccagttccggccacccacaccgcagccaccgccggtgccgctgctgaggctggggccactgcagccgcttcatcctccaccaggcagatgagaggggtgggggggcaagagaaaggggggcggggtaacgaggaaatcgactgaactgctcactacctggagctctcagtgagtgaaacgggagagagagaaaggaaggcggggcaggggaggagggacggagggaaggaagggcggagaagggagagggcagcttgtgcgcaggcgcgttcccggagcgggggcggggggccgggccgggaggaaaaggaagagtccagagggaaggaagcggcggggacgcgcggtgcgtggtcgcgcttgctgtcctcctccggttccaagcgtgtggcggcgcggccgcatctcctgttggcgtggccggcggcgcgcgcctgtctcccggggctttgtttgatgggcgggagaagagggaagggtacctgagcacgcgggtgcttggcgctgttaaagccggagagaccagagggggaccaggaggcggtggagaggaaggagggggaaagggaaaggaaaatgcccagaaactagttccgtacttcctgaccagtggaaaaaacagccttaaccagcagcgcagaaaccgggcaggggtcaggtagctttgaagatcggggcagtactattaatgttttctttttcgttgcatgctataaatcactatgactatctcacacacacacagttaaaatagattctgaaactccaaaacgaaataaagggcaccatatgagaagggtgaagaatttgagtagaaatagtggttatgaagtaagatttctaccagtatttgcatacgtttttctttatcaactgtctcatatacttacctatgccattataagtctgttggatactgatgaagaggaggaggtgccacagaaaacactaatcaatgcacttttgtcctggtttgtgtgcaaaagactgcaggacgtgatccacaatgcaagcaccttcaacaagtcaaatgtcaagaatgtcccagaatgctagttataattatatatcgtttcaaaagtagcaataaactgaaaactcatttttaatacaattaaggagaagggtgttat

SEQ ID NO: 318456 - DNA, 4001 bp, Homo sapiens
cacacagcactctgcctgcacacccgtggaaatcccgatgctgacctagcaggttttggttggcttcggtgtggatgcagtcattctgaaactctttcggggtgcattgtggagctaagtaaatgatgaaatatattcatgtttgggggaataaggttctcactgcaggagaaagggaaaggaaatattaatttttagtaaaaaaggggccttggcttggtccactgacaaggcctagaggcggcgagtgcacgccccacactaagcccgggtcccacgcaaggaaccaaggccccttggacaaatggctgactctggatctgggtccaggtacaagtgagagctggaaccacctcagagactggcggggacatggcaggagggtgcagaccccggcctgaaaagggccaggtcccgggcagggccccacctctacctggtggcctgcgggctccccctcgccagtcccgccctgggctccgcagcccgtccctctctcgcctgccctccctctcctgccccggcagtgcgcccacccgccgccacgggcagcctttcgacgcccaacctgcaaaccgcctgggggctgcccaggacgtccagaccctgtagcgtctcagctccagctccgccccctcctgccctcagggatctcacccgcgctgttcccccgggctacccgtccatcacaggctgggctccccgctcaggacagcctccctgaccagacgaaggctccgccgcgccctggtctccctctgccccagtcaccctactgcatgttcttcccagcacgcataagatcttggccatgtccttgcttttgcctttgatttcttgtttggtgtcccctcccacaccagctagtgagcacttacgggggcaggcagcaggcggcacacagtaggcgctcaatgaatgtggccagtgagtggacaaccctagcccccctccaccggtcgcctgcacagtggctgcactatggctgttggagccagtcttaccagaggtgggaccccagcgttgccactccatggtcccgcccctctctaaacctcagttactccacctgcctggcaggcagagcttcccaggactcttctcaggctcccggggctcagaacttctgtctctcccacagccccaggaggcaggagatacgggcccggaagagctccaccagcaccccaacttcccagctctgtctttcccacagtttcccacgcccacgctgagcatggggcggcgtcgccagcacccttccccaagtccccccaagcatcgctttcccaatctaaatacaatgagtggaccaggtggtcccttgatgccgtccgctgtcactgcgtgagggacacacccaggactcccagcagaccccactgttctcgcaggccctctgatagtggcgctggtcctttcctcaaatccgatcccatcctcaagggtgacagcaccctcttcccccaggcgcaaggccctttcccttctgcacgtgcaccggcaggtctgctttcccgtccccatttcatagacggggaaactgaggtccggtgcgggtggaggctttggtctaggctggctcttcctgccactctagcggctgaaagaagcttgctcctcgcgcccagcaggggctggcggcgcgcggcagagctgggtctcccgccaggtggccgggggtgtgccctcagggtaccctacccgctacccccgcgcctccagtcccggcggccgcgcggaccccgcccctgctgaccccggcgcacgctcccgcgccgcgcgcagcctcccgcctcccgccgaccccgccgcgccgccggcagccctccccagcccccgcgagcccgcgcccttgcccgcaccgccaggtgtccctcggccgcgcaccactcaccggctcccggcgcgccggaactccgggcccggcccatgggcagctcccggtgcgagcctcggcgccgcggaccggggcgccgcccgccgccgccgccgccgccgccgccgccgccgccgccgcccgaccgcccggctcccagcgcagcccgcacgagcgcctggcggcggccccggagcaacgcggcgctgcgccccctcgtggcactcaggcagcgcggagcgggcggggcgcgggggtggagctgcgggagcccgcgggcggcgctgcacaccagggccctccgtgccccggccgcggagccaagcgtcccgccctgcgttcaggcctccgcggcggctggccccccgcgccaggaccacccgctcgggccgtcagacgctgccctcccgcgcgcggaccctggcggactctgcgccccagctgccccagcctacacctcacctggtgggcctctggcgccccaaaacccagttcaccctctctcctcaagactgggcccggcccggttctctggactggccacctaggttgtctgtgtcccccaatgggacatccctgggtggacaccccccctccccaaccttctcggcgctctcccgtggcccccagggagggtggacaccactttgaagacaccggggttctgggaggatggcgatgcatgatttcacttttagaaagggagaggggctctaacaggatccagtggcctccttgaactgggtcttcagtgaaaagttccctggttggtcccagcatagaggtcaggacacctgtcctcctgtgtccgcagtttgtcccttccgctgggttcctggtctggctgacttcaagaatgagccagggaccttggcagtgagtgttacagctcttaaaggtggtgcgacggtgaaaccctgtctgtactaaaaatacaaaaaaattagccaggtttggtggtgggcgcttgtggtcccagctattcgggaggctgaggcaggagaagggcgtgaacccggggaggtggagcttgcagtgagcagagattgcaccactgcactgtagcctgggcgacagagcaagactccatctcaaaaaaaaaaaaaaagaaaagaaaagaaaaaggtggtgcagacccaaagagtgcgtagcagcaaaatgtcttgtgaagagcaagagaacaaagcttccacagcagggaaaaagaccacagccggtcgccgctgttgctggctggcgaggggtgggcgggcagcttttattcccttatttgtccccacccatgtcctgctgattggtccgtttcacggagtgctgattggtgcgtttttacagagtgctgattggtgcatttacaatcctctagctagccagaaaagttctccaagtccccacccgacacggaagttccagctgccttcacctcactctgctttagtcaggacctgcctgatgagatgtggcccaaaactcaacccaaccagcttgagcaaaaagctggtttgtggatcataaaaagccaaggtttactgcttagaggaatggctagatccaggtacttaacctatgtgcatagaaactggcctcccctatctcccagtctttctgtggcagaatggccctgggttgacacctcagagagggcacagctgcctgatagttgcaaggacagcctgcggctgccacacacaggctccgaggagctgagctcaggccatttccaaagacctagggagcaggaatagcaggcctgggtgtcgtctcactagagctgaggcagagttagtcctgtgtcagctttgaggatggagtaaggtgctgttccaagcttccgtgaaggctgttcctggaagaatggacaggttaagaacaacagtccagcccatttcttgaacagttagggaaactgagtcctggagagagcaggcagctgcctagggcatacagatgtattagaatgaatgtgggccaggtagctaggcagggagacagcagggctggggccagggccagggccagaggctggccctagggagggtgacatctgagaccaagggtcaggtgtggggaaagggaggaggaacagaggcaggcacttggtcaggggtgagcagtgtgctcc

SEQ ID NO: 318457 - DNA, 4001 bp, Homo sapiens
catataacattagcaagtcagagagccatatgaattgtaacaggtaacaactccccacccctaactgaaaaaaaaaaaatcaaaagtggttatcttatattaatataaatatgaagaaaacaaataatttgagattaagtaaatgatatatatcctgagtaatttaaaataccctattctactttagacataataacatttagaaacctattcattttggttcctgcggggccttggaacacataccttaaaaaaaatcccaccaatagaatgttacttatatatattcctgaaaaaaaatgtttcctcaaaactcttctcccaatttaaattctaaaatgcatgacttgaaatttatgtttatatttctagtatctatatctataaagttggaaatcagtttttcaaatgactctgaacaagccctcagaaactaaagagcatatttaaactttcagatttataagtgttataacaagtttaatcacttaagtctgttaatgatttatagtgaaaacaactcaaacttccggtcggtctagttttaactcctcttaattttacacattgttttatgagccccaaagggttaggtaggcatcttacggatcactccattgctagcacctcccacagcctctgtggtgtgcggtagatgctgtctgatctgaactcacatggaaaattcagctgcgaatatttttacgcaacagcaaaaacaatcagcctttttcatatcaaggtggggattgagaagctaaatgagaacattaggggcataaaattagtctgctttaactttaataaccaaacggtgattggaaacatacaaactttgtgtttgcaggaatgaggggctgggatcactaagacttaaagggtttttctcccccaccccgcgaccatgagcacacagcaaaactaataaaattatgacccagaattaaaaggtcgcattcattttcaaagcattcatttaaaagtacagaagcgttctttaaaaatgcccacatttttaaacatagcaagaatgtggctaccaaatattaatcctgaggaatatgaatacacatttaccttcataattacacccagcaggtcaaatgttagcaaggccaactgaccgaaatcacaaagactgattgaaaatgaccaacagaaagtgtctgtccggcttgggagccccgcttgttcccagcccaaccagtggtcaaacatctgcaggcaaagaaatctacacgcgccagccgggtatggcagaaatcaaacttttccaaataagttagttccgtcttgccaatctacacccaacaggtgtcaatacatgtcaccagacaaaaatctggcgagccaggtctagagaagcaatagatggttggcagagaagctgaaacgactcgacctctaccagggtaatgaaagcaagtcgggccactattctgactgatcacttggcagtggggtggaggggtatggagatgggagaatccctggatgaagatcggaaggagcgtggagatgtcccgccactggtgacgcggggggatttcggagcatagtccccgcactctttcacgacccccgacccctgatccccggattaggacggcaagggagtgcggcgatcaaggctgggagaccgcggagagaaggcgcgcggtacctgcttgtccagcgcgtctcggacgcctccctgcccggcgccggccctgggtggcgcgggcgttcgttcgcagctgcagccctccaggaggtacatgcccgccgggcggcagctctgctcgccctcgaagtagaagagcacattctggtagagggcgaaccacttctcgtgccagcggctcgcctcggccgtcttcttactcaggaagccgcgcttggtgccctccttgcgcgccagaaaggccaggtacagggcgtgcccctcgttgtagcgcacgctcttctgcatggtgcgggtgcggagggctcacgggtggccgccggtctcacccctgcctcgcggccatggcccagctggctccctcgagggcgcgaccgctcaggtcccggccggcgaagggcgccccctttccccacgccgcgcgcagggcaccccgcccgctttcgggaggccgcggcgcgcggtggcaggggcgcgggctggggccgaggcacgctctccgccctaaccaccaccctcccggccgagcccccggagccccccaagcccccaacgcccgcgtggagcgcggccccgcgagggcgcccgagccggccgccgcttcgcccaaagttgcgggagccgagcccccgcggcgggctggggcggcagccggggaaggactgtcctcgggcaacgcgctccgggagacagaaggtaaaacgtcacgtgggagctcagctgtaatcggcttggagaccgatttaaagggcaaagtcggcgcggcgccggcggtggcgcagcccgcttgccccggctcgcgtccctccctcgcccgccccggcccgggccgctgcctctgctcgggcgcccgccgggatggggcggatcagggaggtggaggcgcccggccgcaccacacacccgctcacacgcgctcgcacactcgcgcacaacgcgcgcacacacacacgcacacccacacacacgcagaccagtacattcacccagatccacaatgcacacactcagacgcacaaaaatacactcacaaatgcacacaaacacaatgcgcgcacatatgcacaaaaacacacgcgcacacactcatgacacacaaatacacattctcacaacgctcacactcaacacacagtcacaacgcacaaatgcatatagacaaatacacccacaatgtgcgttcccgcgcacaaaaataaaacccacattcagatacacacttaaggagctacacacatgcacgcagtgatatgctcacttacacacacattcacacacaacccacacattcactcaaacccacattcaaacatacattcatacacacattacactcatacagtcacacaaacagcacacatatactcacacgttcacaatcatacagactcataagcagataatcaaacacacacacagatgaacacacatgtacattcacaaattcatccaaaaatacacacaaagcactcacacacgtattcgcacgaatccacacactttcacaaacccactcacacatacacacacactcacatgccacatccataagtacgttcccatggcagtaggtagagtcacagagtggctttgcatagcccgcatccttggcttttctgcttgtacctgcattgtagtatttaaaactgccggtaaaggttaaggagagtggcccaagtgttcccggaaaggcatcagatgccgaagttctttcggaatgcctgttatttcacagtggtaagatgctaaattttaagtgccgagttttcaacctggaaaaaaatacccaaataagggacactttgctgcccagggcagaatccaaccccaaaggccagctgtcacaggctcatcgtttgtaggactggattcatttgattaacaaatctgacaggtacaaccagaaaaccaagagccacccccccgccccaaccccatgctgtaaaaatgtaagtggaaaagaaataatgtagccagcagctgtgagagaaagccagtgaaacccccggggagggcctatatttgattctgctatacacattttttattttccccagtcatttatcactaaaacggagtgccatcataaaatgtttattgttaaaagtaaataataatgcttttctgggtgatgagtctacgacaatacacctgtcttgtactgccagttgtgtgttcatgaattggtagccccaggggttctgcctgtttcataagtgctgtttctgcagaatattttaactctgcctcactgagcagctgagtggggtttttttttccttttacctttttaaaaaattttcacttttaacaagtatatagtagggaaattgccatt

SEQ ID NO: 318458 - DNA, 4001 bp, Homo sapiens
tatcagtaatacataaaaagttgtatagcactgatttttactggaagacctcaaaacttagtaagctgaaggctaatttggtagagaaaagaaaaatgaaacagaaatcattactctttaacagacatacttactttgcattccttcccatacttttctttggtctataatagaaaaaaaatagaaaagaactggagttacagaaagaaaaaagccagatgtctactctttccttaaacataacccaagaaatgtgtctggaaatccctggcatcctagagagagaaaaacagcaacaacaaaacccaaaacccaaccttttttgggaagagggtagggaacatactataacaacatattataagtgataacatctcaagagtatatggatctgggctgggtggcagtggctcacgcctgtaatcccaacactttgagaggccaaggtggaaggattgcttgagcccaggagttccagactagcctgggcaacatagcgagatgctgtctctacagaaaaaagaaatagagtatatgcatctaatgctaggtaagtgagtgtctttccacagccacaactcttaggttcatttttggctcccaagttcactcccaagaactaacattcctaatgctttccacaatccctaaatcagagaggatacagctgtggcccgcccactttacaaagtttagtcaaaaggtagctactgtagacttgtcctgtgccaatgcccggaatatagtaaatgttctgtttaaacagaactattcaaacatcttgaaccattcaaacatcgtgaacatactaacatatcaacacctctacgactacacaataatacagccctaaccttattattgttaactggttctaattttaccctagtttgtaacaaagggggaatgcttactttaaagagataaagtacactggccaaaaggcatttgaccaggattcaggaaacctagtttctagttctggttctcctcctatcatgctgacattcctagagccagaatatgtgaacttaaatcccagctccattccttactattgtatgaaaagacacaaacgctctcaccttctggtcaacagacctatttcctaggtaaatgctcaacaaatactagctatcgttattacccctacattacaggagtgttaccggattcgtaagagaatacacatgacagttctttgcaagtcgtccagcacttcgcgttagtaaaagagcatcattttttctgcttgtctaagagaaacacttcacagtgtgcaagtaccacaacatcgacaggacatgaataactcgtttcacacgcgatcactcaccattcggatatatgggttttctccaagacatgtctggcacagaatggggaagtcctggtgaaaatgggaaatctggttgaggaccaccctccgaagaccctgacacctcagtgacacttggggtggcgagggggcgggaagcgagggtggggaactaggcacggcaggaacccgaagtccatcacgacccgatcgcgggagggggcgctgtctgcacttccggcaggcggcgggagaaaagaaaaccagctctaataggctggagggggcagggatggaaagggtgctggtcccgggaccctggctaagccccctcccttcaagcccgcaggaggatcgccctccgccctcctgctccggccaagctaggccgccgcgctggctcctccccggtattccttcggccgcgccgcaggccctgtcctgccagcttgcaaggtgcgcggcttcgcctcctccttccatcctcctccggcaggcacactcaccgcatcctcccagttctgcctgttgtaggtgttggaacccagagaggtcgccatcttgagagcgtccggaggtagctgtagcttccgaattgggagagaggaccgccacaatcccgtcaagccccgaggctagcgccgcgccggtcggcgtcttatttacgcgtctagggcttcttccggggcggggcctttgcgtcatgacgtcgcccgctcttggaatttctaagcttaacaattggggtcctggtataatgcacctggatgcttccttcgagtttttgcctgcttggaatgaagggccacacgtacagttgattcatttaacaattgggcgaaagaataaaggaagacgtaatgcatcagaggctggggttaaaatagcgttcgctaccactgaggcgcttattatgccaaactctgggcgaacgtcttgcggttccagtgtcttatttattcgcataacctctctgtagggctctctgtagggctgccagattctgattctgtctctctctctctctctctctctctctctctctctctgtcactcacacacacacatgcacacacacacacgcacgaattacagaacgtctaaagttgaatttcagattaacggcgaatcgctttttaattataaatatatatggtacctactcgtcctaaagtaggattcgtggttgacctgaaattcacatcacttaaccaatcgtcctgtattttatctggtaactctaccctgtaggcaagtatgatgatccctcttttatagaaaagaaaacaggtttagagagattaacctaatctctcctgatatagctcctggttgtggagctaaaaagtggtgaagccacaaattcattagtactgtttcatttccagcttctgaaatgacaagggtcttacgaatcaacatatgcattatttgatttttggaataactcataaccactctgccaatattttatgagtttcaagccattctggtaccactttcatacttaccgtgtcatcaagctacctaacacatttatttaaatcacctcattaaaaaaaaaagttgatttaaagtataatttacataaagttttatcctttttagttttgaattttgtacatacattcacttacagtcaaatatggaattgtctgtcatccccaaagttcccttgtttctgtagttagtccacttatcccatactcaaaccatggcaatcactaatttgtgttctgtccctagttttgccttttccagaatgtcacataagtggaatcctatatatccttttggatctgatattttttcacttagtattttgtagttgagattcatccatattattacatgtatcaataatttcttcctttgtattactgagtagaattccattgtatggatatatcatacaattcacttgccagttgctggatatttgggttgttcccagattttagtgaatataaataaaaccattataaacattcacatacagatcgttgtatggacattggttttcattttgcttgtgtaaatgccttagagtgagattatttgatcatatggtaagtatatcttttcctttataagaaagtccttgggtttatctgagcttcttggatctgtgatttgttgtcttttattatatttggaaaattctcaagtatcatctcttcagactgtcttctgcctggtttctacatctgtgactccaatttcacatgccttgtgaggagtgcaaggtcagaaataacagagtccacgtacatttgtgtttttccacaatgccagacttttactgatgctatttcaatcacaaaagccacgaactacatggagtttccaagaaagcaattctccttagtacttcccactcactcagcactcagagtcttggacacacaggctcaaggcactccacaggtcaatcaatattgcaaatcatgcataatggtatacttaatcaacatatatattatagagtgaacattccacaaacaaaataacatttaacattaagagaaaagagataggacccttttctcctttaagtctggagccctcagaatcatctcctttccttcctttttccctctttcctcccccaatttattttttaatctttgtgggacatgacttctaggaatgagccttcctagcaacatggaacatgacttcc

SEQ ID NO: 318459 - DNA, 4001 bp, Homo sapiens
ggagttaaaaaaacccctattcaagagacctatattcttctacaaaaccttcaagtgtgttcagtcattttcactgaaagagatcaacagggaagtagcttgacactgtcccccagaagttcctttaccatgcctccacacctcccaaactactccctattttcacctccgaaaaacactcaaattttccactaatgcaatctgacctaatgaatcaaagcctgcccatctcttcttctacccctttctttcaagcagaaagctctaaccttcaataagagaataataaagcagaagcaaggaggaggcaaaacatgattctttcccttccagtaactagccataccccattcccccaaataagcactccacaactctaccctttaaaatggttatcaaacatggccgggtccagtggcgcacgcctgtaatcccagcactttgggaggccaaggcgagcggatcacctgaagtcaggagttcgagaccagcctcgccaacaaggcgaaaccccatctctactaaaaatacaaaaattagctgggcgtggtggcgcgcgccggtagttccagctactcgggaggctgaggcaggagaatcgcttgaacccgggaggcggaggttgcagtgagccgaaatccagccactgcactccagcctgggagacacagcgagacattgtttcaaaaaaaaaaggttataaaacaaaatgttgatacatctgttacctctttcaagcctcccaataacatttctactaacaccacccaaaatatttttaaaagacaggtctctcattcttttcggtccctcatactacaccccaattatcttcaggtgtcctctcaatcttacaaaaacatttacaaaactgtcctctcaatggcacaagaatacttacaaatctcttattctttctaccgctccttttattcctccaacaccacctgtatctaaaaatccctacatactgttaggtatactcctccaccaattaatgctgcataccagtgtagccctttcaaccttcaactaaacttacagaaacctcttttttccaacctctatgtatctaaaagtcatcagttcccctagcactatcaagccctcaataatactttaaaatcccttaatatccttgctatcacacttatcacctccccaataatttctaaaacccttcaatgcccacacatccttttcatctactccatagtatttttcaaatccttcaatattcttgatccctcagaacttaccaataatcgctatacagtttcaatgtccctgctatccgcttctgccctcatatttcgaaaatgccctcgatattttgcttctagacctttcagtcccggaataataatgtttatcaaacccttgatattctgctattcccttcgacatctcaatattcacattttaaaaatccctcaagagccccgttacctctctctcagttctcaaacagcaatgttttaaattccctcacggcccctgctaccccttccagcaccccgatatttgcgtttgaaaagccttcgctgtccttgcctgcccccccagtccccatattcacggcgcctctccgtccccagcgctcctctcccaccctcacccccaccacaatggtgatagtactacagggaaggcgtcgccgggacctcccggccgcggcccctcagcgccgccccccacgccacctcccctcccccacgcccccgcgagcccccaacgcccacgttcgccggccccggcccagcccggctcactcacatcggctccagtaacttggccagccaggacttgagggcatccacatcctctatgagcatggtgcagggaaggcgggctcggccgccgctcttcttcaggcctgccgtgggtctccactacgccgccccctcacgttcccttcacagctcccggtgccccagcccaccgggcatcttaggagacttcaacctactcccccggccggggcctaacaggaactaacccaagagccctcactcaacctagcccgaaggctgaggtgggcgggagacagtgccgagtggcaggcctgagaaccagtaagagagagggggccctgagggcaagaccaatgaaaaggctcgctcgccccgccggcaggcggtacccagtcagggaggagagatatagcaaggtaggtggagagcttaagtgaactcctggtgcaagatggtatcttggaaaaggtgctttgcctcttaaaggggcagcggcgcctttttttgaccacgccgccgcccgccgcggaataccggtgtctgctgctgggagtgcctgggggaacccggcgagcccctcagcctggttccttcctctcgtttttcttggaaacacacactcgtgtcccgaaatgactcagctgtagtaaatctgcaacacaacgtgcaatacgttcacgttcgacacattgcacagaatgcaaaattttactttttttctttacacactcatgttgattggcactcacgtttgtattttctgctgctctgctttaattacgcagaatgtttctgacaaccatgccttggaatccagtaatcgtcatttttaaaacgtggcgcacggatgtaaaaggctgaggccatttcaattttgctagtactattaataaatgttgctttatttaggaagaaaaatgactccaatagtttgtttttaattatcttttcattgtatatctaaaattcagtggttgggggacgggaagggagaattttaatcagcaaagaaggattacaaaaaaatttttaagacaaattagaaactactgaaatagtcaacttactttctagtaggtgagaaattctttctggagttttgaaatcactgatttagcactgatgttaaaatgtttacccaataacatatactgagtccctgcaattgccagcactgagtaaggcactaggagtccaatgctgagcaaaacagagcttctcctcttaagatgatgaacagtttatggggttatgcattgtaataacattttgaaaaatacctaatgagcacgcacctcatataaaagaaatggatcaacctcaaataaacagacatcctatatatacatagaacaggtataggcaaacttctgcaaaggatcagatactaaatattttggttttgtgagccttgaggtatctatggcaactactcgtcatacaatgtcttggcttaaaattaaccagggacaatatgtaaatggaatgattgtggctgtattacaaacatttattaaaattatataaaattttaaatttatataattttcacataccatgaaatattatcttttcatttttttctccatttaaaaatgtaggccaggctgggcgcggtgcctcacacctgtaatcccagcattttgggaggccaaggcgggtggatcacctgaggtcaggagttccagaccagcctgaccaacatggtgaaaccagtctctactaaaaatacaaaatttgccaggcatggtggcacacgcctgcaatcccaggtactcgggagactgaggcaggggaatcgcttgaacccaggaggcagaggttgcagtgagccaagatcgtgacaagagccaaagaaactccatctcaaaaaaaaaagggggggcttggcacggtgactcatgcctgtaatcccagcactttgggaggcccagacgggtggatcacctgaggtcaggagttccagacaagcttggccaacatggtgaaaccccgtctctactaaagatacaaaaattaaccgggcatgggacgggcgtgggccaggcgcagtggctcatgcctgtattcccagggctttgggaggccgaggtgggcggatcatgaggtcaggagatcgagaccagcctggccaacatggtgaaacctcgtctctactaaaaatacaaaaattagctgggcgtggtggcgcgtgtttgtagtcccagctactcaggagactgaggcaggagaatcacttgagcccag

SEQ ID NO: 318460 - DNA, 4001 bp, Homo sapiens
atggttactgggcctctcagccaagggcagtggcctctccctcccagctccgcatcagcccctgggtaagtaatgggaagagagacagaactccccgctggactgatgaactcaggtcaggggttaaggtcaaagcagcatggaacatgcccagccaggtagggtgatgccccctccccgctccactgttcagtttttctctagccccggaggcagggaaaggcccagaggccagagggtccaatgtagtcccttgcgccatgatccttggttacacacaaatatgtcatggagactgggagtcaggtcactgccacagggtgtcttccttcttgacctcatgcccattcacacccatctgcccttaccctccacctccctcagagccaggctctgcgagggaacctgacaccacctaacagggcaccctacctggcaggcagaggtaccactgtggccctggggccctagggaacagagggcacaggggcaggaggccctgagagaggcaaagaggcttattcccccatgtaaacaccacagggacagggctcaggggagggccccgctggtgatccaagtacagaatgcagacaagacacaggccgggaaagaagaggaccgatgccctttggggcttgcccaggcaagagagaagcagccaccctgaaggccacatggaggcgtgaggcccctccattccccctgggatgggtgggggaagagaaggagtctagagtaaaccaggacagaagcacttggccggcccggctgtaccgaatgggaagaagggagcagggtggggctgccggtgtcagtccccaacggtggaggccgaggggcagtgtcctcattagggcaggggatagctccgagaaccacgaggagcccctgtcaggctcagccccttgacaatgtgtggctgtcgcctgtttccacatggacaggagggatacttccaaaccggctggtgcaagtggagtgcggagcagaatcctcaaggacaaagtctgggctcgtggggaatggtgtgtgttccctcctggggcccggggaggtgccagagacacagctccacagtgtggctggcagcctggaatgaaggccacggagcgtcctcccccagcggggtccacaatcccaggctgagcacacacatcccctctcccagttacctctcacactttgtcctccgagcatttctgcttcccgatacccagacttcctccctagggggcctaagggcatatgccctcgtccccagtctcctgacagtgagtggaagggagagaccaaggggcctggtgatggctctgagctgcggaatgatgatgaggccctgccttgctccactctcttccatcaccctgttacctcccccagagggacagggcccgggtctgaggatctcctccagcccagacctgctaggtgggggaggggacgcgcctgcctccccttttaaatcaagccgtgctgctcagcctctaggatgggcgcaggagcaaggacggtagaaataaaagaggttattaataaagaatgtgggtgaggtccctgggaagccaggcctgccacgctcccctaatattcccccctccagtcctgggtgccacatctccatgtctctgggggccccaaataaggacgcagcgcctttaggtgactctgctgcacgaagcttcggagaagtccacccgggctttaacacccccgccctccatcacagcccgcatcaccccccgccgccgccgcactcacaccaccaggcgagagatgatccaggacaccatggcggggccgggcgcggcgcggggcggggacccggcccggccgaggatgcagctgcctgaggccgagcggcggcggcggcggcagcaggagccgcagtagcagcagcagccgctgcagcagccgccgcgggggcagcggagcgcccagcgccgccgttaaaggggaggtccctgccgcagcggcgggccgtgggcggtggcggctcttaaaggggaggccgggaggccgccgcggcggcggcggcgcgcccccgccccggcacctgctgtggccgggcatgcgcctccgaccctcagtgccctgccttcctcgaatcgcttgttcatctttcttgggtttcaagccctaggctgttgtcgtggaggtctccatggttacatcctgaaatcgacccctgcccacctcctgccctgcccacaccaggcgcttactgtgtgccagcccctgtgctaagagcttcactgcgttgccagtgaatcctcttgaccaccctataaggcaggcgctataaaagccctcattttgaagataagggaatgagaagcttaaggctcaataatctgttgagagtcacaaagccaccaagtcatgctgctaagatgaccccaggaagcctactttaaacaggttacatcccccaactgctgactagcaaactctcctcattacaggccctgaagacatccacctgagctcctgagtcacaggtacagccgcacctgtccaccccactccttctcaccccgttgaaagaggatctcccctgaccagatgatgttttgtttttttgagacaggtcctcactctgtcgctcaggctggagtgcagtggcacaatctcagcacacctcctgggcttgaatgatcctcccgcctcagcctcccgagtagctgggactacaggcccaaaacaccaccagctaattcctgtttttttgttttttgtttttttttgccaagatggggttttgcaatattgcccaggctgatctccaactcctgagctcaagcgatccacccgcctcagcctcccaaagtgctgggatcactggtgtgagccaccgggctgctggtctgcttttttaggttgtcagctcctaagctttgcagcggaacagagctttatgctctcaatgtggttactgacaacaaagggtcaaccttcttttcaaacagaggggctgcgagagggtcctggggctccagttccacccccatcagcaagcactagtggcagtgaatgtcctgattctaaagacatttatatccagaatgtaggctagcctgcctcctgatcttcaggaaagcaaccaacctccaaccatccaccaacacccccagccctattgctctcctttcctgtcccattttagagcttctgcattcctctaccctttatgttgagttgtaatccttcgggtgaccacagcatcaacctgtgcccatctgggctgaaaggacacattcagaactgtgtatttcaaagagtcatggtcttattcaagctcagtatccctgaacaacacaatggtctatttctaacctggtaaattatatttccaggttcaaacactttggaagatgtttcccaaaacgttccagaaaagcagcctctgataacccctcttgctattctttacaacttcctctccagaaaacatctcctaattggaatgcagtctgttatcaccccacaatgaaacactttaattactgcttgataaatcccacatgagtgtctcccaccatctctaaggtggatctatggccacacgtttcatgtaggcagccaggctgcctgcttaagaatcccaccacagactgtccaactttgctgaggccacacaccatgacccttccccccagactctgccacaggaagggaggaccccaactttcccactccattcacaaagcataaagtatggggaaacatgtctctctttctaccctctaattcatgtggccccttccccttacccccaattccccaaaccatactgacctcaccctggcactttccttttttctaacatggcacagtctcaacaagcaaagaaaaatatctgggtgtagcacagtcatgaagacctggaaatgaatcccccacctccaacccaactcccaatctgatgttgattttagaagggttggtacacgaataatttagtccactccaaacagatttgttagatttttaataagaac

SEQ ID NO: 318461 - DNA, 4001 bp, Homo sapiens
tccctatggttgaagaaagtagcagagaccaactgaatgaaggtaaaaaccactggctttcttaggaagaactgtagagcaaaacaaaattcatttctggagaggaataattcctacttgaacgaatggaaaaataaaatcgtagaattaaaaaaaataaacacattgtagaataaaaacaactttggtaataaattcagatcctaatcgtaaaaattcattttttaagtagctcaattatataaatgactcacttatataaccaaggagctatatcatggagcatttttaaaggtttttgtttttacactagggtaagcatttcccaagtttgtctgtaacatgtggctttttcaaaataaaagaaaatgagaaaattctccctactgtctcaattaacgtaattatgaattaaggaagacctaattgatagggttttactctctaggtgcataaatatatggtgaaatactcattaaaataattactagacagaagtgctcagctccctgtaccttctgagatcctcccaccagtaaagggaggacgacagagtggtagcgctttcctgttagtgtgccaaagagaggggacactggtcaccaggataatctaatgaaaatacctctgggctaatcgtcaagagatagggattaagttaaggttccaaaatggtgaatactatccccaccccttatgtccaacctcatccctccccgccgagctttcacttttctcccgggaattgcggatgtgcagtctactgcagcagccctgcggggaggaatggaggaagggaaggggacggctgcagggtgtgtcacttacgagatgtaggctgggtagccaaatcctatcaggttgcagaggagagaggctccataaccgaacaccaggtacaaggccaccagtccgatgacacctggggaccacaaggagagaagtgggtcgggcagcatgagagccgttcacgcgggacagccgccgcccacaccgcgaggctgggcctgttgtaggagttttcctctcgactcgattaaaggagcgagaaaaacaaaccacacgaaagctgggcctgcgcgtccgctgggctatgccttgaagtctggggataccaggcagccccaccattgtgcctctcctacctcccgcagggggccccggcgctttgcgcagcaacccccggcgcccgggacggtcccaggcacccgcttccgccctctcgcagggcctgctgggcagcgctccagcctgggaagctgcgctcagcggggagcgtcccgagaggcccggactcccgcacacgctgcagtagcagcccccgcccacccgagaggcgccctctccgggcggagctccacggagggtcgggtaggaccgggtacctccgtcaacgcgcccgcccgcaggggccccgccgtccgcgcccaccgcgcaggacagcaggaatagggcgccgggccgcggggcagacatacgtcagcgctggcccttccagctgccagcgcccggcgccgcagctgccctccagccccgcgaccctcagcctgggcagcccccgcggggtcctccgatgcccacgctttccgggaggccagcctgatccctgaatatgctgcttgtcccgtctgtctccgactccacctttcccgagtcctctccctgcttccttccccagcagctggggcagcggcggctcccgtggccctaccagcggcggcgacccccggccacccaccaagagcgatgaagctcctgttcacgccggttttggcctcgagcttggccagaaggtcagtcatgcagttcttctcgtgcaggaaccggtcgaacctctccctcatggccgcagacatggcggggaccgtctcgccgctcggggctgttcctagtgccggatagactggagcggcgactgcggcggagcagcggcaggcggggaccgcggcgcgtctacgcgtcctccactcgcctccgctcgccccgcccggccgccgcgcgcccctcctcggccgccgcgcgcccctcctcccccgcccagcgccagggggacagcgccacaccctggcgggggcgggcctgcaactccgcggacgctgcgaggtggcctgcctgttgacagtcttaacccattgcggggtaaaaaggatgtggcgtgggggcgtgcattttgtgtctctcgtgggtccccttctcaaatcggactattgcaaaaagcaggcagaaaggaggcaggcgtccttgttgctcccgcctgcaattcactgcgatgagtttggcacctacattgctgtgctaaacctaaggcatttttgacctaaaaaattgaaatgtttgagcatcgtgaaagaactctttggaagcagtcctgctttctccctctttgccttaacttggcagtttttctcacctacagacaatcgttgccttgtaaagacccttgaagaaatctaacacatcctccctggggtacaccttttccaagcaaaaactgcattaaatcttttcatggtgggcttgcgttgtcttggtgtctgatactgtggcaagtgtccaaattctctctgtggagccaatatactctgcacttcctacagtcaaaatactctgaagaagacggagattctaaggtccaagccttagggcaggagctcatttttgcttccttcagaatgagttggccatgctcttcctccacctaaacctaggctcctcttatctcacccatatgacttccagacactcctaaaattactcttgttgactcctattctgcacactgctgcagaatttttgtccgaagctccgtattattatcctaacagactagagctcccattccttggcagagcattcaatgccctgcccacaactggccccgaacattctgtcttggtcctacacaacccctctgtgctttcaaatctacttaattaccctactgccttccacttctgcaaaaagttatcttgcccacgcctagctttttccttttatgctaattctccttcctcctttcttcctcagagcttcttagctcagctttctcagctgttcctaccaccacccagccaaatcagtgaacaagtgaaacaacctgctgtctacttctgtcttttcacctacagttaattctcaatgtggcagacagtagaatctgttttaaaatgtgcgtcaagttgtgctatgtttttgttctcaaccctccagcaacttcctatctgcctgaaggagggcatcagggtcacaggtgacatggttcatccctcccctttctgatgtcttcccttactgcctccctccttgctgtgcctcagacaaggtaagcccattcctgcctctgggcgttcgttcacttttcttctatttcagtggttctcaaccaggagcacttcctctccccttcttcctcctggggggaggagtagcaatgtctagagatactttcgttgtgaaacagattgtcacacaaggagagcaggaggtggcaagtgcaactagcatctagtggttagagactaggggtgctgctaaacatcctgtaacacacaggacagcccccacaacaaagaattatccagccccaaatgtcaataatgtgacagtccagaaaccctcctctatctgaaagtatctttccccagttaaccatttaactgtccccttccattattcagatatttgttcaaatggtacccctaatctcaaattgcaacccccagtggtctctagcttgatttttctccatagaatttattactgtctggcattatgttctacttttttttttttttttttgagactgtctcactctgtcacgcaggctggagtacagaggcgtggtcacagctcaccgcagcctcgacctcctgctgtgctcaagccatcctcccacctcagcctcccaagtagctgggaccatagccgtgtgccaccatgtccggctaattttttctgtttttagtatagatggggtttcactatgttacccaggccagtct

SEQ ID NO: 318462 - DNA, 4001 bp, Homo sapiens
gggaagaaggaaaagagggagtcagtggaggtggaggtcagggcaagagaaggttggagaagagggagcaaggggctatgctagacccaccttcattctggatgatgcagcgaacaatcctctctactgtgtcctcattcatgtcatcgtcctcagctgaaggatgaaagagattggcaaggaagcaggaatgagtcagctttgggggaatattacctggtggctcccatcatttattgcttaggacatacccttttacctacttgctatcatgctggacctcagcatttcagggaccagaaaagatggggacaccaatgcaagcccaagactaccatccagaggaccgttcctgcccatgctgctttctctagttttgctttcagagtggtgtcaccccacttgctaactcaagagtgcatcactaggcttcctgagcaggtttgatcaggatttggcctgggtctgttggtcagggaggcagaggtgtggggagaagggtgaaaggtgactgagccagggttccaggctcctcactcacggggctgaagctgggcatcgtcaggctcagagcccctcgacgtgcggcagcggtagcccttcttcttgagcacgtggcagatcatgaagcctaccaggcccatgaggaagaagaccagcacaagcaggaagagcatatatagcccatgttggggcggttccaggtcaggctgtggttccgacatgaggccctggggggcgagcgcgggccagggcgcctcctgggtttagggggctgcagctgggaatgggggaggggtaggaatgccgtcctcaggatctgaaacaagcacgtctaagacgtccggctgaggtccggccccaccccctacccaaccagggagctgtccgggccaggagtgctgtttcgcctttcggcaagaggtcagcggcaacgcaagctctctaccacgaccctggtcccgcttccccgacgccccgagcgttcccctttccagcttgttcgcgcttctgtccctcccaaggacactgcagcacgagatgggacggcattcttaggcggcgggagcagaaatcctgcctgagtcagcgcccgcacctcctccacgccggcctgagccaggcctctgcagccccttcctctcagtactcccgcacccctctccctttttggtttctcccaccctgaccacctggccgacccggtaccggtgatttggttctggttccggcttctgctggggttccggctccaggggcgtcctagtgcggctcagggcccccgacgcccttccggcgctcatcccttgattcctcccctcccccttcgccgcctcaccggccccgggctgtggctgcggatacccgcgccgtggcaggcggggggagggaagaacagagaaggatgcgggctggctgagagcggtggcaggctccgggcaactccggccctgggtcagggagatcgcctccgcagccgccctggcttcccaaatgccttcacccgtcgcgggcccaggaccagggggcggagcgcaggtgtgcggggcggagagcgtgagctctgcgcgcgcgtgactgcgccgggcccccccggggcaatgtgcggcgccgagtctgggtccgggtaggggacaggcggtccggcgtgggtgttgtccactggtctatccggtacgcctggcgcagctcctgccctcagatgccccgaccgagcggagagtcaggaatcttctccgagggctgggggaagccggctttccgcacctttgagggacggagtggcgggatcttcggagcttcctagagaagtgaccacggcctgcgcccggtttggggcaagcggctggatgggatggctcggcttcccgaggatctgacccccggccggagacaaatggccctcgcatcctaggagctatgctgccagttccctgcccaacccgggacgctcaaagccccagataccgggagagctgagccgggcgaggggcggagctcccctgggggcgtggcctgggtgtggatggaggcggggccgcaacgcccagttccgcagaggccggctacgtgcttgcgcagcacgcacggccggggaggggctggcggcggccgcgggcggcgggcggcggaggtgcggggcctgctcccgccggcaccatggccaagaccgtggcctatttctacgaccccgacgtgggcaacttccactacggtgaggaaacagggatatgcatgaggggttgggacacggaggttttgaggcggggttgcaactccaggggtgagagctgacgaactctcttctccccacccccaggagctggacaccctatgaagccccatcgcctggcattgacccatagcctggtcctgcattacggtctctataagaagatgatcgtgagttccgccgcctcggccgggggttggggggtggggcgagctgtggccgtagggataggtgggctggactgagtgcatgaagtgcgacccgcccctagagtatcggggagctggatagaagtcaccaggagtaccttgaaagtgcagggtgttgggggtggcgtcctctgcttaatggaaagtactttctcacctcaggtcggccaccctctgactgtaggcacactagcccttggcctagggttagcgtgatgtggggctggtttgaagacagaaggtgtgttcctcctctgcattttagagtgtggatagggccttggcctcaggaattagggttaggggagcggatatcactgtatcagggtgtgaggtttaccctcagttcccactcctcttttaccacctttctttacctccaaggagctagggctccagggtggaacgatgctgccgtctttgtaaatgtgtatgtgcgtgtggaacagaggcgatattttagatattcctttttcagcctggaatacctctacatggttctgcttaatcgctatccagtttttcatctaccagacatacacatgctgtcttcccagcttggaatttatggctgtgatatgggatagtaacagttaagccacgccaggcgtggtggcccatgcctgtaatcccagcactttgggaggttgaaatgggggggatcgcttgaggccaggagttggagaccagcttgggccacagtgggacccacatctacaaaaaataaaaataaaaaaagtagccatgtgcggtgggtgtgcctgtagtcccaactacttgggaggccgaggcgagaggatggcttgggcccaggagtttaaagttacagtgatctatgatcagcagcctgagttgacagggaggaccttgtctcaaaagaaaaaataagacaaaacagctaaacccaggctttatgtgttgctagggaaactagtgaacaatatgaatgaatgttcattgcttgtgccaaggcacagacaaatggactggtcatagaaaagactgaggtgatgttagtgcaggaatctatatcccttgagattgtttgcctgtatgtacctgtgtgcattttctgggagaagaaaagctctttcttgtgcagttttcaaagaggtgtgacacatccccctgaccttccaaagataataaatctttgattttaattagaaagttgacatatatcccatatatttgactccagaaagaagaatccagaggaaagaggacagaatcagagcttgggggaggagatgagcatggagagaactgggaataggagattccaaggaacagggcaggtggatcagggctcaaagttgagaaggtacgataggctgagctggaggtggaaaggaaaagaagtggtcttcagggggctcatttgtaataacttacctggttaatcggagtctctctactgacttaaggattgtgggatgaggggaatgctatgtttggcttcatatagtctccaggactgggttcagtatgggtggtctgagcctgtggagtggggctgaccctgcctgggttcatcttgtgtctccatcccgaggtct

SEQ ID NO: 318463 - DNA, 4001 bp, Homo sapiens
aaagtaacgaaatacaagagatgtagtataatatcaaaagttaattatgttttcccaactcccaaataaatgagaaccaaatacaggtctttctcaaatttgagtcactacaaacttacagtttttgcaaggtttgcctccaacccgacaaactggtgaacttttacgggactgataaaaaaggagcagagaagactggggctaaatgataaaggtttcagagaactatgattatggctgtgcattttgcttagaaaagtataattttatatgtcaaataatagtttcctctatgtatcttaaatggtactatttatactatttgaggactttttacatttaacacccatattattcttactattgtgaatatcatgatccattcacacaatagggaaagcccacgtgttcaccttaattatcgttattttgatgaactattcataaactcccaatatgtttcgattttaagtctactttaagataatagaatcttaactgaatgaaacagaaaattaaacaactcatacagtttgacggctagttgaaaacatccccctgaaaaacttagtcgttgtgtttcatgttctcttcgagaaaaatttttggcctgtccctaaaattggtttctaaaggtgctaactccatataaaattacaaattagctaaatggatactcggtcactattagattcctttccaacaaaggaaataaattcaagtggaatttaaaaaaatatttagtgtaactcaaatttccacaagacacgggagataaaagaaacatgaagtgaaacgtacttacttgtcactcgtcttgaaccatgactaagatgcttttaccaagtgtggaaactttgcctacacattatcagaatgcttatctcaagtatgacacccttgcttttacatgcagggaagagaaatgccttagagagtagttttggtatctctctgaatggcagaataataacagataaaactagctgtcctttagtaaatgcctactgcttggaccctttgaatataatagttcattagtcttcacaaaaccgccaacgggtaggcattagttttattcaggtagcacccacgtttttataaaaacatgaggcttgcaagtaaactatcctgaagacacagaaaccttttagcaaagcaaatatgtatattggtgatatatatagtattgatatttatatttgtcaccaaagatggtcctgaattaaaaaaaaaaaggaacgctaatgtgcaacagctatgttcacgaatgtttacaattgaacgcttgcccaataattttatataaagtcacagagctgctctggaaatcagcaccatcgtatgatgttgaattgtgatcacgagtgagctagacctgggtttgcatcccagttctgcgtgatttggggcaagttgcttaacttcgctgtgctgcagtttcttttactttaagaagggcccgccacataggggtgtgggtaaagcacataaatgctttaacacatgtcaaatgtttagagcaggcctaaccgcagaaaacgctcacagcgcgttagctggcacctctaaggtccatccagctctggcagttatcctgcctaacttcaagttgtgtttaacatttcggtaaagaccgcctgcagttctgagactgcacgtggctgtccaggtgctgcaaattctcgacacagactccaggaggcgagtatctccaggacggccggggctgcggaagccctggagcagcttctatactttagagctttcatggcacaaatgccatgaaagcttgttaaaaacgacccgcgtaccccccttaggtggcaggtctcaggtgtggcccaagtttcaaggtgaacaagctcggtgagtctcctgtgcctgggcggaagcccgccttggcgggttaaccgttaactaacgctgaaccaaaacccaagagggcctcaggccccgcagcggcgcggccacagccggaatgaggagtccacgcccgcagcccagccggaagcagctggtcccgccagcccgccccctgcgcggcgagaacagaacttactgtccccgagtcctcgctccgcctccgcgtgacgctactgcacgagccagagctccagacgtgcgcggcgcctcgacgggggcggggcgaggccgtccacgtgacccaagaaggcccgcccccgggaccgcctctatggcattgccggcagatgaccctggttgatagagatctctggccaacagcgccgcgccagcaccttcaaactggcaggcatactcgtgtacttgacaaatgtggatagcatcagtttactttttagttgtttgttgatctcattacatttattcaaattttagatgcgcccagcgacttcattcagttatttaccctataaaaatatttgcagaaggtcgtcgcgatgctggtaacccatgtataaggatgttaaggccgggcgcggtggttcacgcctgtaatcccagtactttgggaggccgaggcgggcgaatcacctgaggtcgggagtttgagaccagcctgaccaacatggagaaaccccatctctactaaaaatacaaaattagccgggcgtggtggcccaggcctgtaatcgcaggtactcaggaggctgaggcaggagaatcgctttgaatccaggaggcagaggttgcggtgagccgagatcgcgccgttgcactccagcctggacaacacgagcgaaactccatctcaaaaaaaaaaaaaatgtttattgctgtgaagtagtgaaaatagctgaagtgataacacggaggaatggttcaataaaacacagcacaacagtacagacatgtgaattacttcgtagctgtgtactgtatactcaaaggacaggcccatcatgtaatgaatattaaaggcaaagcgtagaatactatatatggtgtcctctctttaatgtaaacaattattttttgaaatacaaacatgcaggtatgtacataaactttttctcgaaaaatcaaaagaaacaatagtggttgctttgggaggagatggagagttttcactttcatattatgaactttgcaattttgcttttttctcattgtacttccctgaattgacaacaacaacaacaaagaaaaccaccaaaaccctcatatttgtgttccgagctgggaaactagatgagcctaagtttttaatttccttgactactttccagtgcagtgattcttaaccctggctatgccttagagtcgcttgggagttttgaaaagtcgtaatgcccagtctgtatgccagaccaacaaaataaaacacagattatttggggtgggaagggagtgggcagattcaatgtatgtttttaacttcctgagtgattccagtgtgaacccaaggttgaacactacaacttgtatttagtatggtgacatagtgatctcaggctctagggtggcccaatgaactggggcagccgaaacccaggaactttgtccatttacctcagtgtgctatataaatgccattttttaaatgagcctcaacatgtaagaagttgaatagctcagaataatttgtttccagtgctagtttcttctgttttttttctcttcaatacagttttatggtgatcaataatattttattgggtcatttcccttttggccatttttttcactgacccaaacacaaattaactatctagttttgatgtatcagttatcaaagatataaaatatattttgatttattgtaatttccattatctgttagtcatcccaaatgattttattggcacatggaaggtgttagtagtccccagcttgtcatcgaaggattaaataaggtttgccattttagaaatccttttttgctttgtcatattctgggcattaaaaaaggacacatcttagatccatcgaccttaaatttgatattgaataaactgaagacctcagtagttatacatgcatatacacacaagtaggatgaaagaagagaaactttc

SEQ ID NO: 318464 - DNA, 4001 bp, Homo sapiens
agtcactacaaacttacagtttttgcaaggtttgcctccaacccgacaaactggtgaacttttacgggactgataaaaaaggagcagagaagactggggctaaatgataaaggtttcagagaactatgattatggctgtgcattttgcttagaaaagtataattttatatgtcaaataatagtttcctctatgtatcttaaatggtactatttatactatttgaggactttttacatttaacacccatattattcttactattgtgaatatcatgatccattcacacaatagggaaagcccacgtgttcaccttaattatcgttattttgatgaactattcataaactcccaatatgtttcgattttaagtctactttaagataatagaatcttaactgaatgaaacagaaaattaaacaactcatacagtttgacggctagttgaaaacatccccctgaaaaacttagtcgttgtgtttcatgttctcttcgagaaaaatttttggcctgtccctaaaattggtttctaaaggtgctaactccatataaaattacaaattagctaaatggatactcggtcactattagattcctttccaacaaaggaaataaattcaagtggaatttaaaaaaatatttagtgtaactcaaatttccacaagacacgggagataaaagaaacatgaagtgaaacgtacttacttgtcactcgtcttgaaccatgactaagatgcttttaccaagtgtggaaactttgcctacacattatcagaatgcttatctcaagtatgacacccttgcttttacatgcagggaagagaaatgccttagagagtagttttggtatctctctgaatggcagaataataacagataaaactagctgtcctttagtaaatgcctactgcttggaccctttgaatataatagttcattagtcttcacaaaaccgccaacgggtaggcattagttttattcaggtagcacccacgtttttataaaaacatgaggcttgcaagtaaactatcctgaagacacagaaaccttttagcaaagcaaatatgtatattggtgatatatatagtattgatatttatatttgtcaccaaagatggtcctgaattaaaaaaaaaaaggaacgctaatgtgcaacagctatgttcacgaatgtttacaattgaacgcttgcccaataattttatataaagtcacagagctgctctggaaatcagcaccatcgtatgatgttgaattgtgatcacgagtgagctagacctgggtttgcatcccagttctgcgtgatttggggcaagttgcttaacttcgctgtgctgcagtttcttttactttaagaagggcccgccacataggggtgtgggtaaagcacataaatgctttaacacatgtcaaatgtttagagcaggcctaaccgcagaaaacgctcacagcgcgttagctggcacctctaaggtccatccagctctggcagttatcctgcctaacttcaagttgtgtttaacatttcggtaaagaccgcctgcagttctgagactgcacgtggctgtccaggtgctgcaaattctcgacacagactccaggaggcgagtatctccaggacggccggggctgcggaagccctggagcagcttctatactttagagctttcatggcacaaatgccatgaaagcttgttaaaaacgacccgcgtaccccccttaggtggcaggtctcaggtgtggcccaagtttcaaggtgaacaagctcggtgagtctcctgtgcctgggcggaagcccgccttggcgggttaaccgttaactaacgctgaaccaaaacccaagagggcctcaggccccgcagcggcgcggccacagccggaatgaggagtccacgcccgcagcccagccggaagcagctggtcccgccagcccgccccctgcgcggcgagaacagaacttactgtccccgagtcctcgctccgcctccgcgtgacgctactgcacgagccagagctccagacgtgcgcggcgcctcgacgggggcggggcgaggccgtccacgtgacccaagaaggcccgcccccgggaccgcctctatggcattgccggcagatgaccctggttgatagagatctctggccaacagcgccgcgccagcaccttcaaactggcaggcatactcgtgtacttgacaaatgtggatagcatcagtttactttttagttgtttgttgatctcattacatttattcaaattttagatgcgcccagcgacttcattcagttatttaccctataaaaatatttgcagaaggtcgtcgcgatgctggtaacccatgtataaggatgttaaggccgggcgcggtggttcacgcctgtaatcccagtactttgggaggccgaggcgggcgaatcacctgaggtcgggagtttgagaccagcctgaccaacatggagaaaccccatctctactaaaaatacaaaattagccgggcgtggtggcccaggcctgtaatcgcaggtactcaggaggctgaggcaggagaatcgctttgaatccaggaggcagaggttgcggtgagccgagatcgcgccgttgcactccagcctggacaacacgagcgaaactccatctcaaaaaaaaaaaaaatgtttattgctgtgaagtagtgaaaatagctgaagtgataacacggaggaatggttcaataaaacacagcacaacagtacagacatgtgaattacttcgtagctgtgtactgtatactcaaaggacaggcccatcatgtaatgaatattaaaggcaaagcgtagaatactatatatggtgtcctctctttaatgtaaacaattattttttgaaatacaaacatgcaggtatgtacataaactttttctcgaaaaatcaaaagaaacaatagtggttgctttgggaggagatggagagttttcactttcatattatgaactttgcaattttgcttttttctcattgtacttccctgaattgacaacaacaacaacaaagaaaaccaccaaaaccctcatatttgtgttccgagctgggaaactagatgagcctaagtttttaatttccttgactactttccagtgcagtgattcttaaccctggctatgccttagagtcgcttgggagttttgaaaagtcgtaatgcccagtctgtatgccagaccaacaaaataaaacacagattatttggggtgggaagggagtgggcagattcaatgtatgtttttaacttcctgagtgattccagtgtgaacccaaggttgaacactacaacttgtatttagtatggtgacatagtgatctcaggctctagggtggcccaatgaactggggcagccgaaacccaggaactttgtccatttacctcagtgtgctatataaatgccattttttaaatgagcctcaacatgtaagaagttgaatagctcagaataatttgtttccagtgctagtttcttctgttttttttctcttcaatacagttttatggtgatcaataatattttattgggtcatttcccttttggccatttttttcactgacccaaacacaaattaactatctagttttgatgtatcagttatcaaagatataaaatatattttgatttattgtaatttccattatctgttagtcatcccaaatgattttattggcacatggaaggtgttagtagtccccagcttgtcatcgaaggattaaataaggtttgccattttagaaatccttttttgctttgtcatattctgggcattaaaaaaggacacatcttagatccatcgaccttaaatttgatattgaataaactgaagacctcagtagttatacatgcatatacacacaagtaggatgaaagaagagaaactttcttttatctctaccaaaagtattcatatggttagtcatgtgatgtttggaaagctataatggaggtcagaataaactacccttctccacttcccaagtgcaca

SEQ ID NO: 318465 - DNA, 4001 bp, Homo sapiens
ttatgttttaatcagaaaaaaaatcatgaagtggctgatgacttgtgtaattcacacatccaccctgtttcttgccactggtactctttctccctttctctttgttttcagaaaggaaggaggagacctgaacagtacatccggagaatccagcaaagcatactacggcatgaacgtgcaagtggacagaattaaaacacatgccagaaacactaatggattctaaacaagatgcagtttcatttcctgagcctatacgtgatgtttttaactgttctccagttaatatgtctccatttccagaaatctaacaggagaatctctgactgcttaacagatcacctaagcttgcgatttgtgcaatcctttctagagtaagggctccccggctgctccccggccactgtgtacccaaagcagcggctgaaatagcccggagtccaacagctcagcgtcaagcagctcgtggtttgtacttacatcattttttttttcagagcaagagtgaaagtttattaaaaagcgttagaacagtaaggaaaggaaaggagagaaaataaggaaagtacaacttggaagagggccaagcgggcgacttgagaaatcaagtgcctgtacttacatcattcttaaccctttcgctcctggagggggctcagcgggatcagggggcccctgaacttcggaacacgcaggacctgggtgtgagagaagagtcccaaagcttggcgtgagcaatgcactcgcggagggagagagcccggggcttgcggggggctcatcacccgctcgtagacaacgggcccccgcaatccctgcgggctccgccgctgctctcaccgctcaaaacggcaggtgcaaaaagcatttgggagccgcttgccagcgcgcggaggtaatgcgcttcctgtccatttatctcaggaaaccagtgcagccttcccttcgaaacaaaattaacctctcattagccagccactcgctcccaagaaggccttaaaagctttaccagctcgctaatgtatttaggcttttcttccaggcaaacgcagccgccggtcttgactgccatcgcccaaggggttcctctgggctctcccgcgagccaacagccgacctctctccagcctagtctgggaaactccagccaacccaggatcccattttgtagtcccgggcagacccgaaacccctgaaagaactccactccagaagacgccagaacaagttcccacgaatttcatgggcgcccttcacatgaaaacctcagctcccctatcctcaaggaacggggaagggcgccggggagggacttcggtggccagctgtccctgggtcgtgggcgctgtttgctctgcggagcgccagccctgcacacagcgggtgcgggaagcgttgatgggaggctggagggcggggtgagcgtaaactaggatctagccggttccaggcgtggagaatcaaatgtggtcctagatctgtaagttgcgaaaaggggcttttgggagcgtcagagctttctcactccggtcccccgccgccttgaggctggcagatttataccccacaggtggatggagacctaaacaaaacagtcccggccgctgcctgccgctcgccccccacgtcccccgggcccaccgcaaacttcaacaaaataaacaactcaccacaggcattcccttgtctgcagcgcgacgcttgccagctgggaaaataagccgcaagccacgcggccgaggcgcggagggaaggcagcgcggcgcccgcccctctcccccaggtggggggcagcgcgactcggggcgggagggaggctccgcctcgggggccgctctcccagttctccgactccagaatgagctctgggagaggagctgcgcccttccagctagcccgatttctccgccatctaggggagagggcggggagccaaatccctcagccccccgcaccccagcagcttcctccaggcagctttctccccagtcagcctcaaatagaggtgaacagagaccctcctctccccccggcaacccctatatcgccacactgccccctgccggcgctatccggctcattccggcactgcggacggctgggggcgtgggggcgtaggggcgccgcagacccccgcgtccaggtcctggatcagttctctcttcgccttccccccaccacactcaatcttgcacaaagacgcctttcacgccgccagcgccaccctccgcgccgccctccgggccggcggcgctgccttcgcccacccgcggcaccagccgattcctggtgggcgattgtgccactcgtcgccaggcagggcggcagcggacgcgtgcgggctgttcccactccgcgccccggccaaggcgccagatgcgctgccccccgccacgttctctagctgcccgccggcagccgcagaatgcacacctttctctccgtaaatgatccttaagggtcttccaagtgtttctaaaatgggtacagtggcgggaatggtccgctggactttcgccgaaataaggaatccagcgatcttacctgaccacctaaggtgccagtgtgcctttacagcttaagaaagccaaagataaagatttggaaataaagaggggagagagggtttaaagagacacctaaggcccagagcaagtgtgttacaaagaatgagcccacgaaatgttcgagggaggacggtcgcttcgatcagcgtggaaggcgtggagggcaagaagaaagggattaactttctaccttacattgatcttccaaagtagaaaaacaaacaaacaaaaaacatcccagatactcagcggcagctaattggcgcgttcaacgcctggaactagcgggctacttctcttagtcaagtcaaatgctcaagtatcctgactcagggaggtcacttcttgcctccttaggcaagaatctacgaccctctccagcttttctttgccttctcctcccctaacccctccttacagtttctccggctaacgctagaggcagcatagggcagtgtaaagaggacgagtgggaatccacagaggaaggtctagtcctgactttctgggtctgggctttaggcaactgatttaacgtctttggaccttggggtcactatcaagaaaggatgtgtaagaggcattaattagtaaaatttacatatccttctctttcttaaattcgatgacaatgaacgcccttcctccaaacctctgcaggttcctccttagtatttttttcaccttgctttatcttctccaagtgccagtcaaatggaaaaaaacatactgagattgtttcaaggtaaatgtaagacacattgaaacatacccttttgcatctgagaatttaaaaagaagaaaaaaaaaaccccaactcagctcctggtttacaaaagcaaggaattttaatgtccccacttgttttgcttttgaaaagccactccagcagtcagcaaagcacagctttgatttagaaactaaaggctagtctcttgtgtttttcttttcccttccaccaacacaaagacaagctgcagcataaaataatgatgaacaagagttcaaagcaagcccagtgagccagcccagaggatgttttttaatgcagccccagttcttcgtccctctcctgctaagctgaacggtacataaatagcaggcacaagctgccagaattccctgtctcctccactcctttcccataaatattgctcagtggaacctagaggctaacttgtcaatcatcacataaatacattcatcagatcatacgtttaatttttctttagtttcataatatttttcatgattttcaattcaccacccactttggaaacttgaacattagttctccctctgggtaagcttgtctgttttctgagaactttctatgcaactaaggcaaaaaagggtaaaatctcataatgaagcactaacttttaaattacaaatctcttgcttcaatttcaacaacagaattttagaatggct

SEQ ID NO: 318466 - DNA, 4001 bp, Homo sapiens
tgtcccccaggcgcccctccatccacatccgcacctcagatcccagtgcctgtctggccctccctgccctagctgtgcagggccacgggaagctactcagtgaccagcaggcagccaatctgtgaccctcgggattctaagaggtggcacagagagtttggaacaggcccaggaagggcaaagataaacctgtgtgtgacagttctgagaggagccggggcgtctgtgggcttgatggaactgggggcagaccttggggcaccctccctgctctaggtgacttttgagtagagaagtcacaggctgacacagaaggggcaggggctgggtctgtctctgggccccctctgctgccctgtagttctaggcactgtcccagaagcatcaatccagttgccctcccagggtgggcctggggttagcctccttggcttcctggcccggtcgcctaggcaaggacgagcgaagtgtcatgcctgtgacatgggaatgcaagggaggtgggttttctttttgcactttcgttgtggggtcggtactgcagacagtgagatggggggctgagctggctttgaagggtggcctctctcccagccggccagcccggggctgggcaggaaagagatgctggaagaagaagaggtagaggcaggttttgggaactaaggggcaggagtggtgatggggctgcctcagcttcttggtgaggcaggagatctttgaattggggctgaaaatgtagggggcactgggctgacaattatgcagcccccacaatgggtcaaaggcctcatatgcattatttcactctatcatctcaacaagccttgaaattcattccaacctcctcattttagggatgaggaaactgagagctggcgaggaccctccctccagtaagagagaatagaaccaggactggaacccaggtctctatagagccactggctttggcccgtgatactaggctggggcctggtggtgggccaggacactggccttcctgaggttgttaagagggactcttccaagtgaggggggaaccctagggagagaagggaggcccagcacagcttgccccatctgctgaatgaatgagaagagccagatcctctgagggcagctctgatctggggctaagcagccagggagagggttaaggggtggggcagctgcagccagggggatcttagtgctcagcccttcctggaagctcaggaatagaacaggcagaagctgcatcaacctagtctgaccctgctgccccatcccgggctgcccaaacaatgctagttctggcaggaagcctctggagtagctccggctggaggacaccgacccagcaagagctgccactaacatgaccttgggcacctggagcagggggtgaggaggggaggactcaggctgagcgggatgtaggggcttgagccactgtggggatgggcagggggcaaggagcacatcgagtgtccctgagaccctgggatgcagccccagatgcagcaggtgagggagtggtgggggctggaccagaagcctgtgcccgctctggcctcactgccagggttgtaccaggctcccggctgggccatctggaagggtctaggggtgagagcaccaggtcctaccacctgctgctgtctgtacccaacttctctcgcctgctggcagcccgtgggctcttgcctggccctgccgggtgtgcctcctgggctccaccctgggtgtgcccaccccctcctcgtggccctggcccggagcccacactcaccatgcgcccgttggggacgcccaggtgcttgggcttccctggcatgccgctgccgatcaggggtccccgccgcgggggctgcccaccatggggactgtgggcagcgccggccagagcttgcacggtggcgggcaggcagtggagagagcctgactcggctcctgcgggccctcacatcctgaaacaccgctcactacctcttttctctgccacaggaagtgtctctatagaaaccaaaccacagaaagaagcaaggtctaagagagcgaacgcctcttcctacacacacacgcgcacacacacacacgttcacgcacacacacgccaccaacacactcctggcagcatcccgcacgggcaccaacacaaggcagaggcttccgtgtgcccagcaaggagcccagcctggtctggccaggaccagggagctctaagttcatgcctgggctcacagcacacgagtaaacatacctaggcacctttgtccaccctgggggcgttcctgtggacatgcacacacgtgcactgggacctgtgtatccacacgtgtactttactcggcacacacttacctcatacctactgtgtgccagacaaacatgtgctcagtacccctctccccggcagctgcacatatgcagggtacctctagccccagacacctacaggctccttccatgcatgtggccaggtgtgcagacagatggataacttgcccgcatggctgtgcacacacagacattcaggtatgcgtgtcataaacacatgggctctcccttacaagggggacttgggtgtatagtcatgtgcatgcacagtcccctgaagaggtgcatgtgacaggcacacctgaacataggacatatgtattccgacactccagtgacatatgtgtaagcagatatgatgcacacgctcacctacctaggtaggggactggatcacctatatctgtggccaaagacttgagcgcattcatactcactcagaaatcctgccttagtcaactcaggctgctatagcaaaaataccatagaccaggtgggttaaacaacaaataagtatttctcacacttctggaggctgagatgtccaagggcaagccgctggcacatctggtatctagagagggccctcttcctggtttgcagacagctgtctttttgccatgccctcacgatagcaagtggagataaaggaagccagctccctcctgtctctttttataagggcactaattcctaatcccaccctaaggggttctctttcatgacccaattacctctcaaaggccctgtctccaaataacaccttgcaggttagtgtttcaacgtatgaattttgggggatataaacttaatttgatagcatgtagtgttggctgaagggtgggcatcctgccctcggccctgacctggccccagatgaactccagttttaaaaattttagctagggtccttggtttgcctctttctcacacatgcgtgtccccactgcaaggacttatattttcttctaagcgtgggctcactaagacccctcaacttgcccaccattctgatttgagctcctctttctctctttttctttcttttcttttctttacttttttttttttttttttgagacagagtcctgctctgttactcacccaggctggagtgtagtggcaggatctaggctcactgcagccctgacctcctgggctcaagcaatcctcccacctcagccttccaagtagctgggaccacaggtgcatgtcaacgtgactgtgtaatttttttttttgtagagatgtctcctatgttgcccagactggtctcaaactcctgggctcaagcaatccacccaccttagcctcccaaagtgctgggattacaagtgtgagccatcgtgtccagcctcagctagtctttctgcagggacaaggtgatagccacttctccatattctaccctctgccccactgccccttctagggctgtgacctgaactcttcagtggcagaaactgaatagctcttcaccacaaattcatgtccttttttcctgggcacgtggctaactttactttcccaggttcccttgcagtcagatgtggacatgtgaccacttcttgccaattgaaaatgtgtgggatgacatgtgtcatttttgagccaaggctttgaagaagtaagtgtgtgccctgcaccctccctctttctccttcagctggatggataga

SEQ ID NO: 318467 - DNA, 4001 bp, Homo sapiens
actaccataaaattctgtcagcatccatgcatcatgtatatggattaccaaataatgccgagtctcctaccctgagatggcagccaatttttggtgtgcctgacgggccatttcacagcctttggttcttgtcttgtgcatttccgcccggagtgaggggcagctgaccgagacatccccaatagaaatgaccagctctcggtacagggccacttgtgtgttgaactcttggacaagctggaaaagaagtgagtttttttttttttaccaaacatttctcatcagaaagtttcctgtttcggagtacataaacaggggctttcactgacccctgagtcagctccccagatctccagctaaggaacctaggaattgtttaaagcagaaggcaccaaaatggcaagtctctttgtccaaggcaagtatttatttccataggcaagcctggccatggaagctctatttccagacctacttcccctcaccctttcagactcagtttctgaagagcaagagagcatatttggagcgctaccatgccactcccaggccaacagagaatgatgctggggactcctacatagacggtcccctctcctactgctaggacatggcttttaagttgcacggcgggaggggcgggggaggcgacaggtagggtgtaataggcaaaccattcaccttttgctgggccactgaacctctcggcctgacggcctgacgggaagaccagctacagcctctgcgctggaaccttcgacccctccgcagcgccccgtgcgctgtatttgggtttgtttgctactctgtccccagaaagcagcatccccacctcctcatccctccctcctccgtgagcgagccagttcactgtgtctttcgcatccaccattcttcgagggggtacaggcacaacctacagccgctgatccccaagacccttgctgtcacacttctttctgcagggttattacgaccagggtgtcaccctgaatttgggggactgcagatttaaaaatagtgcatgtgccacgtgatcggcattgaggagctgagggtgggggagtggctggcactcaggcaaatgattaacatacatgactccccccaccccctctcaattaaaaaaaaaaaaaaagaggcgcagttttcacccaccatcttgcagtcgtccagggctcgttgggttttgtgggcgctctcggagccgctgcccctgcgctcccaatctccgctctgcagcgggggcttgctgatctggaagatcgaggagcgggtggaccggctggggcgctttttgcgcccattcggtgcagaactcatgcatacacatccaccaagccgaagccgctggtgcagtgcgccccggcgcgggcggcccggttgttgccctgggcgccgccgccaagcagccggagcccggacctgaggcgcgcagctcacagtgctggggctggctgcgcgggtcggtaaccttcagcttgaaggagagccggggaagcgctagctgtgccgtgcagcatcgcttccactagcagcgaggaaggagcgcgatcaagttctgctcagcagcattgccgaccctgtcccgggagctgggcgctggcgcgggctcgcactgccttcctctcggcatggattgcaaggctgggcgagaaggaacgcgccgcccggcggttccgagtttccattcaggtgggggagcagctttcaaagcctgcgctgcaaggtggggggcggaaaggggtgtcgctcttgcttcagtgtcttcccgcagcggcactcggttcgtctttcccctccctccactgtcgccaggcctggaaggactggccgtccccaaagcaagcaattggctctaatcggctgccttgatccctcgtctctaagggcttgtctgtttgaagatcccagatgaatctgtggcgggactggcagacgcagagaatcggtccggctgacgttgttcgcgggcccgcacattgataggacgggaatactaatgtgatctgtccatgcaacccccttccccctccacagtttatgcacttatccaatcaaatccccgggaacatcaattgcaatattacttcatctgctctattattagaaacgaaaagtgtcatcagagtggagcacatgccacatgctgggacctaaacatggatttcaaataagccagtgtgggcttgaggccctcaccaactgagactgagacaggggccacaggagggagtgaggttttgctccaaatggaagacctcttgataacctaaaaggagagctttgtttccctgagttgttttgtttttattttgtccttgttcatggagggggaaagaggagagccagtgaggcagaatgcacagaggcattcactcagattgggcctcatccccatcccatttcaagtagtaaagctcttggtcttgcattgcagggtctcaggactcagctcctagagttcccttccggagacttgaacaaataagagccaagagatctccctggacactcaaaatgaccttcttctcacttatgggatatcagtaacccagaggccaacagaggtggcccagaaaatcggggatgattcttgtgtgaaaggagtgggggtgaggccctcagccatttaagttcacccttcccactgacatcttcctaaggttcttctgggaggaagagagagtgttgtggcattcaactctaaggctctaaggatgcttgttctcctgaatgatttgtttggagagggagataaaggggtctcccataggaaaactagttatgtattagtaatcctaataagaacagattagaggttcctggtcagtctgttaaagggatatggagagtacatagaaagagaaagcctgaaatagccaggaaggttaatatcctaaggagggtggctttacaaccttttctacaagacaagtaaatataatggggtactataataagagagttatttggtctttgtccccagtccctagggcagaactcctaaaacccttagaaattgcctgagttattatgataagccatcttgtcaccagaaagaccaagccttgattagttgcttgcaactttcagcctcatcccccaatctcaggggataggagaggagctagtgactgcgttcctcaccaatggccaattatttaatcaatcatgcctacataaagaaacctctgtaaaactcctaaacaacaatagagtgtggggagcttctgggttgtggaagacatctaggtgctggaagggtggtacaccaggaaagagcatggaagttccatgtccttttcccataccttgccctatgtttctcttccagttggctgctcctcagttgtatcctttagaatagactgctaatagtaagtaaagctctttcctgagtgctgtgagtcattctagtgaattaccaaatctgagaaggtggttataggaacccctgaatttgtcgccaagatggagagaagagttggtaacctgtggatcccatacttgtgactggcctctgagatgagggcagtcttgtgggactgagcccttaaacctgtaaatctgacgttaactctgggtagttagtgccagaaatgagttgtaggccacctaattggtgttagagagttggagaagtgctattggaaaagacatcatgtatttgggtgggaaggaaaaaaaacctaacagatggatcactgagtggatatttggctacattttttttttttctgagtcagggtcttgctccgtcacccagattggaatttagtgacaccatgagagctcacttcagcctcaacttcctgggctcaggtgatcctcccacttcagcctcccaagtagttgagactacaggcacatgccacctaatattttgtaaagacagagttttgccatgttgcccaggctggtcttgaactcctgagctcaagtaatccacacaccttcacctgccaaagtgctgggattacaggtgtgagccactgcgc

SEQ ID NO: 318468 - DNA, 4001 bp, Homo sapiens
tatcaaggagctaatctctcttatattaataacagaagtaaagatggaaacccttgcaaaatcagccttcagaaggcaaaaggagaaagatataatattcacatactgggaaaaatgttctcctgtctctggagcaatgtagtaggatcttgtttttagttcacctgtgtgcatatgtatatgtgtacacaagattttttatttttttttcgagatggagtctcactgtcacccaggctggaatgcagtggccggatcttggctcactgcaagctccgcctcccaggttcatgccattctcctgcctcagcctcctgaatagctgggattacaggcgccccccaccaagcctggctaattttgtttttgtatttttagtagagactgggtttcaccgtgttagccaggatggtctcaatctcctgacctcgtgatctgcccgcctcagcctcccaaagcgctgggattacaggcgtgagccaccgtgcctggccaagatttggtttttacaagtacttcatcatgtcctttagtttcctccaaattgcaatgcttatttgatttttaaatctttcctttaattgcttcctcatatgaaatatctttctttttccttccgtaactgaaccctaccttcagaaccctaaacttttccctgagtatttctaagttctctggccttttctatctctgaatttaaatcataggcaaggattaccttctatgcacagcctatgctctaccattcttctgagctcaagcacaaaaacactgtattctagaagttcccaataaattattgttcaatgaattaatgaagaaaatacaggttgagtcttctggtgatggatacttttggcttcctctgtgacatccttcccattccacactctcccaccacagaatatccactggttgggtggggctgactccaccctctagctccaggaatgggccttgattgcccttaaccagtcaatggaattcctccccgctatctacagtgattggtttaggcataagcctggtccaaacagaatgaagttcacaactttttctccgtagctgggagaagttctctctcttagaggacagtgtggtgtgcagatgtgttcactgcaactgctgcagtttgctaatgtgagggaagccagctcgagggtaaagccaacacccagaaggcagagcatcattcagaatgggagctggaagtctaatgaaatcatgctgaagccatgactaacctctggagggtacaatcctttgagccaatttatttcctttatggtttaagccagagaatgaggttatctattactaacctccctgttatttatggagttccctctatttttaaatctttgggacactatgtaatttgtttcttgcaacttaattcatttaggaaaatagcactcttggatagcatttactcccctagtgaaatcactacataccttgctgtttatgctgaatctaacaaaagtcatattcacaacagctaaaataataaatttgagaactgttgctgccctaatttctgttcaaaacaatcagtgttagtacacacttaatagtactgatatagacttcttattcatttatatagcaagcatttcctgaacatttaaattcatcgtaattgcatatagataggcatatgatatggtatatacggacactttgccaaagattagcttttgttcaacattcctcagtgtttccggcaatattaaatgtagataccttttcgatgaaactgaagagaccccagcagacatatggattttagcatctctgtggtatacatttctaagcagcactgcagctggatgtaaagccgacagatttctggatggatctcaccatcttccgggctgcaacagaatgaaagagaaaagctgtgaacattctcaagatttcactcatcagccatttgtctcagctccgagagggaaaaatgctcaataaagattccttaaagccttgatcctaaaatataggacttcctgctttcaaaccaatgaccaatgtgacagttcttatgtaagtctctttctgactaacagttcttaatttttttccccttcagcagcagagttctgccgggagcttaaaatcataaatgctttacataattgaaaatatcagacatcttcaattgagctgttggaacaaatttccaaaaaccataagaatctcctagcctgcaagaagagattaaaaacccttgtttttagagaaactgacaagagcaattcaattaccagttgtaagacagctctttaatattagggccctagtataatgtgattagagagcaatttacaaattatttttatcaaggttttttgtctcagtctaaagattcttcctttattgtttgctgtggctaatttatgaaagaccaaatgtttttaatgaaaaaattaaaatttcatggaaaaaagtaataaaattctaataattatacttaacaatctaaagctaaataaacactgaacttatgctctaaaatttattctaaagtcctgtgtatttctctattaaatatgataaaacatatataaatgataaaacatggagcaatcacttttgtttttgattaaggggaaaaaaactagttgataaaataatactttattttatatgcaactaaaatagcatgtgttgaataaaacaaatcaaataaaagggataaagtttagagatagattagaaataaaagaaagcctaaaagtgaactctatcaaatgtcttaatgagttaactttacttccatcgctattaatttaaaatgcaatgaaatctgatttttaaatatagcatttggatttggtttctttgtaatgtgggtcagtggcaatatatcaggaggtaattattagataaaaataatggcttcaagttctggaatcacactaaagagaatttgtgtgtacacagcacattacaatgataattacttttcattttcaatacttatttagtcgatgagcaagagttgatctaaccatatggcttatataacacaagaaaatgcaaaattcttagcctcagcatcagtgatgcctgcacatgttcttaactgtgtcagacagaataaagtacctcaaaagagcctgcacacaaaatttggctctatctgaaaattgaaaggtgttattttctcatttgtgtctcgtgggtgccaccttaggccaacataggaagcaaaagtatctctggggaaaatatcggggtttttttcagagcatcctcccatagatgccttccactctcaagctgtcctccgtttctcccatcccaccccactcagacatacccagacatacacacacccagacacatacacccagacacacacacacacatacacacccctctgattatttcatctcgtcttcagctttcacagtctctgactgtgtcctattccctcatggacctgctagattctgaacagataatgggcattaatggttcatgtaataaaaattgatccttgtatattatctactaatacatttattttcagagcaaaatctgaagataatgtcttaatctaaaaggagggtaaagggaaaatattttaaggcagacaggtcttttctatgctggttcatcatcccaacatcagctgcctattttcacctacatacaacattggccctggtggctcataggcagatattttttaaaattttattttatttttaatggacacataataattgtacatattatggtatatagtgtgatgttttgatacatgtatatattgtataatgattaaatcagagtagttgacagatctattacctcaaatatttatcatttatttgtggtgagaacattcagaatactctgttctagctattttgaaatataaaatacattatggttaactatagtcatgctacttactgtgcaatagaacaccagaacttactccttctatctaactgtaactttgaacaatataaatataatgcttcaca

SEQ ID NO: 318469 - DNA, 4001 bp, Homo sapiens
acgagcgagtgatcttttcgttctgttatgtggaactttgcataagaaatttttccaagtatattctacacattttttagaatggcgtgatactttcctatagtcctaattcagtttttttaatattgctgtttaaatgtgaaatcttacacaacgataatttgtatcttttcaggcactaaactttcttctgttattaaatgtaacatttagctgaaacatacgtaactccaatatcagtaaagaatcaaagattttcaaataagactaaaggaaaacattcaaacataatgttattgtatgctgaaaatatttatatgtgtcagaaagtaagttcctttctcccttaatcaaacactcaagaatcggactataatttatccacttcactactattttgttcaattattacaaattttaattttttaaaagttttccaaacaacattagtaatgttatttctgatttatgagtcactaagacaaatggctaacacataaagagtatttgcattattaaaattaagttttcagagatcaattaatagtgctataaatgagtcatttaaaattaactcccagtccctgtcttttcctccgctttccagaggaactatttctgaactgtcccagtgaaaagtatttttgcctgtgttgagctttgagagggatgtatttttagaacaccaatattacactatcacccatagggtagacataaaaaaacactgctttttgctgatgaaacttagtgaccccgtcccttggagttggcacattcaactgtctgctgcctaccaagggtcaacccacagtcgtgaagtgtaccagtaagtgctccacattcccactggggccttctatcttcctaagagtgttctctgacagggctgttccctgcccagtgaaacaaaggaccaaagattttctcaaaaatgtttaaaaatttgacccatgtaacgcggacactccacactcacggaagtgggcagaagggggagggggaaaaaaaaggaaagaaaagcttcttcagcctcagcgcggagcagctgctcttccttacccagacgggacagtcgtggaccaccagcttgacattcccaaacgcactggcctgatactcggtgaacaccggacgcgcgaccgtgctggccgcgttcagcaacaagctgctctcgtccccggagaccagagggcttctccccaggtaagtgcggataagccccgacggccggttgtcctggtggaatgtgtccccctcgttccccagcgccacgatgtggatggacctgcacggacagagggggcgaggggagaagggaagcacggtcagcgcgcgggtctctcctcggaacaggaagtgcgggggacagcgcgcggcgaggatgggcaccagcccctgtccctggggcgcacggcacgcgctggagagagacaatggcaggacggcggcgcgtacgtacatgatctcaaatccaagggcagggcggcgactcggagaaaagcagcggctcacggcttcgcggggcccccgggcggcgagttcacccgcaatccgctcatccccggccgcgtccccctcgcgcgcctccaccgcggcggggccgacgcagagcggggccggggccgcgccagccagcgagcgagccggggaccagggcgggctagcgggcgggggataagctgccgctactcagggagtgcccgggaacatcgccgggcgcgggaccgccgcacagccccaagtggacgcagctgaccgcagtcccctctccgccgcgcctcctcggctggcagctgtcgcctcctgctgccgctgccgctgctcctcctcctctaagcagagaaggggggtcggggagatcggggcctccgccccctcagcggaccgggcgcagcacgtgccagccccgggggtcgggcggatgcgggggacgcgctccccgcggaggccccgggagctccggtggcggcggctggacacaaaggagccgcccgcgcggggcgccgcggaatataaattaataaatacaacgccccagcccgagagctcccagccgccaatccgcctgcagcaagtttgttcaactcgcaaggccgtaaccagagccaggaaaggggggtggggcgatggggcccccgctcactccggactggaaaaaggaggttagggaagctagggattccagcccgagtgccgccccagcaacccgatttccccccctcttggccttgaccgaaagtgctttaccacgtctgccgctttctcatttgtcaacatgcgctacagctgttttctaaaatcatacttgtgagaaaaaataaaggcaacattcatgctgctgcagaaagagttctttgttcacacaccaattaatttgctaatgtcgccttggggggattatttactatttcaagctatatttagcgtattttaccgaaaacttcaggattttaaatgctgggatttttagtgtgatcgtttttaaaggaagttatgtatgggggtttaacgtgttggtaagttaaatgccagtttacttggagatttttctgtacacgttatggccacatatttaataatagctccgcagaccaactgaaaacataatcacgtaaatgcaaagatactttagattctttcataataatgcactgaagtaaaggctatgaatatccctaacgtgcttcaaactacctcgatacaaacgaacactgggatccacttactaacaccaaaatgggccagggattactctggggttagactcctccatacagtattaaaattctaaccagtaccttactctgtgttgaaaagagttcttgcttatccttttatctgtttatttttcccttctgtaaaattggactgtttcttttctcagctgagctattttgagggtatgaaagagggggtattgagtagggcagtaaaaaaactagggcaacagctttttattatgggcccttattgctcggttgaaagtagtttaatagtttctcgtgctcagagaggatataatgggagatattctttatgtggtcactgtttttttttttaatctaatttccctttgcattttctacgatttctctttgagtctctagaacctaaaccatccttaaaaattccagcatgcaagatcactttttctcttgggttaatagaaaatatattttctcatcagtcttttccggaaacccataagtcaaaaacaaagacactagaatggatgaatggataaagaaaatgtggtatacacatgtaatggatgattagcgtttaaaaaagaagaaaattccttcataaactacaacatggatgaaccttgaggaccttgtgctaagtggaatcagccagttgcaaatcacaaaaagtgattccatttatatgaagtatctaaagtagtcaaactcttagaaacagaaagtagaatcatggttaccaggggctggggagaggggaaaagggggcgttgttcaacaggtatagtgtttcaggtttgcaggaagaaaaagttacagagatctgttgcatgaggtgcatatatagttcgtactatactgaactatagaactgaacgctagaacattgttaactaaacactagagcgtgtactgaacactagaacatgattaacatggtaactattgttatattttatgacaatataaaaatattaatacaaaaatgaaacaaaaatagacaccaaagttgctgacaacttggaagtgtcagaaagggagaaagtattcattttttccttagttactcaataggtgagccaagcctgtgctgggtaggcataggagatcccaaggtacataagacttggtcattgaccttaagaagctaaagcaatttgttaccagaaaggggtcccaatcctgactccaaaagagagttcttggacctccagcgaagaattcagggcaagtccataaagtgaaagccagtttattaagaaagtaaaggaataaaataatggctactccata

SEQ ID NO: 318470 - DNA, 4001 bp, Homo sapiens
ctatatataggagctcgacgaactcaatttaaaatacaactatatatttccagcaccacatctgagcaggtttttaatgcacaagttaaactcaagtttattaagggctcccttcaccttcatctaaaacacatatgcctgtatataaattaaatcactcactaattacatcttttacagacctgaaattgtagaagttatccttgttaggaagttttctagtgaatctattttatatagatttttcacatgtgtgttatagtcaagtttccaaacagttgcacagaagtcaaaagctttacatctttctatactaattctcaaaaccgatctgctgaaaaaaatggtggaaattagtgcattgataatctaattagtagccattttcaggatttaagctctactatattgtattatattttagaaactgtcttgtaaaaggacctagttcacccaaaactaagtccctgaactttcagaataaaatattaagttataaaaatgtactcttgtagctaagtgaaagctgaccattcagtttataaaacagtaatcttacatcgtgataagcaaaataaaacaaattagaaaatgcactatgctttcactctagccgttgtcaacaaggagcccagctttaacaaattactgtagataacagtcattacgtcaggtacgacatagggtaaaaaactgatctcatacagaatgtctacaacaagtttttttgtttacttcctaaggtgttttatagacctcagaaactgattctgtacagctgaaccgggttacactccaagctacagcccgtgtgaaatatgacttcgtcggaatcagtaggctcaatcctgtttaccgtggaagagaaaagaatcttgtacgtaactactaaatcttcaacgagataatgtcgaataaactctagtactgtaagtgatagaggaaacactggctagtaacgggattaggtcattaaaaatatcacccgagtttccccagttcggaaggtgtaaacaaacccatctccactgcagaaggtaaacaatgaacctgcagcagggtgagggggcggtctttagccaactacagtcccagcggcccgggaaagggaagcagaagggaaacagcataaaccagacatttagcagtaatgaccagttctaggtttcactaccaagttatcaatgctgcgggtccccacaggacggtgggcaaaggggaaagcagtcacgcagtcggcaagcaccgagcaggtccggcttctgctccggggacggggagggcaggatgtggtcgctcttccctcaaacatcctcctgcaacctaaataacagcctctacctccctccagctgcccctagcttgggctgccggactccgggataggtgcaaaccactctgccggagctcgagcccagagggtcgccgggtctgccgagttccactcggggctcccccgcacccgcagcagcccgaggcccggagaagggctcgggcgagggaagcgggcgctgggtagggggatgggtccggcgaggcggccccgggctcggttcccgcgggccggcaggcggggctccggctctggcccccgcaccccgccggtcccgtgcggggcccgcccctgcctctggcccccagccccggacccggctcctccccagcagcgcgccctcgcggcgcccgcggcgccccgcgttacctcgggtcagatccagcgggacgttctcctcgccgctgtcattccgccctgcgcgaaacagacacacagccccaattaggattggctcgcaggccagctgcggctgccctggctccggccagcgccccggctcgctccccaacccagggccaggggaaggcaagtgccaggggtggcgggcgccgggcggtggggagtgagggttgcagcgggcttacctcgtactcggaggttcttcagagagcggccgcggccgatcgccgccatattgacgggtttcagtcacaacaccggaaacctcgcccaatcgcgcgagaaccccttcccctccccgcgcgccgcgcccgccccccgcggcacctcccccgccccctcggcggcgacggcggcgggtggtgcaggctcggccccagcgctgagggagcactgagccgacccaaggtctgcaaggagttcgcggcacccgcccgcccacgccggacccggagggcacgtccgccgggaggggcagttcccacgaggaaagtcccattgatgcgagttggcagtgtagaggatgctcccctccggccgccgcggaagccgtcgtccaaatgcaggcgagcggggaggaggaggccgggatgcggccggcgggccacctgctctcgccggcctgccagtctcctgcttgctctgaagccctgccatagacggccccgctcccccgtgtatccactgaaacatttttttataaaaacgctgcgcacagttttagactcctttcctggaatcgctttgctccaactaagttaacacgtaacaaagtttgttttccagcctcgcccttgatcttcagaatgcccctctcggctaggagggcttctccaagtggaagtggttaggcagttttgtttttggccgccaggcgtaggacgcgagaagggggtgcagcggccggggaccagggcggcggtccccgcggtgggatcgcgccagcgccgggaggccggggagagggtgttctctgccgggagccgaggcgaggctgctgggtactgtgtccggcttttatggctctgcagctcctaggatcgtggctcatgcaggtgttgtggattaatctattttatgcataagcctattaacattagggattttaattctagaaactgcttagttaatacgtatgtgtacacacacacacacacacacacacacacacacacacacacacacacacacacacacacacacacacacctggccactgacccagcagctttctcttgaactacatttactttaaagagaggagcgatttgtcctctccagttcctcagctcatctttctattccatgagactgaaagttaattaaaagtggagatctagccttaaccagttctgttttcccagctcccagttaatgcaatatctggcacaaataagtattcaataaatatctgttggatgagtaagtgccctggatttctaatttattccaattctctgcttactttaaaaaagaaaaaaaaagcaatattggggatatttgttgaagttgttaataagagtgaacatttggaaacacttaaatgaccaaaggtagggattatgtaaattatgtcaacgattaaaagtgaagaggtagacttagtaataggaaataatgttcatgatattaaatcaagcaaaatattacaaatttcctgttttataataaaagtttaaatatgtacgaaattaaaaatatacattataaaatattttatatgtacatgtatgttgaaaaaagtctgaaaatatacatgaaaatgttagctgattttctcccctcatttgtggaattacacgtgcacttttttgttcttgtttgcttgtctctactttttaaatatcctatagttaatatatgtcatttgtaaaataagtggtaagaagaaaaataaaaggaacataaagtagcatcatctggaaaataaaataggaacactgcttccttagaatattgccaattatctatatattccagttctttttttttttttaaaccaagtctacaatcagatatctgcggctgatactgcacttagatttaaggatgtaacacaattacagtactttaaagaaatgtcttctggcattaccagtagtagttttaatgtcaacaagcgtgctccctccgttatagctttaaaaatcttggtgcaatttatttattctagttactgcctaaaacaaaaatcacaaaacttgaggtctggcagagggttggatttcaaccctccatgtatcaccacatttcacccttaaagaaa

SEQ ID NO: 318471 - DNA, 4001 bp, Homo sapiens
aaataggaaaggggcctatatttaggaatgaagttataattagaaggaaaaattgtcaattattttatagaagtgagagttgaagatgtgaagtggatgctatcactgagcaggagataatggaagaaaaggaatgtttgggagcagaattctggggcaagttcatattgaaagctaagggcagctagtcaaacaatgattattgatataggaggagccaaagaagtaaaagggaagagaggcccaagaaagggtaccaacactggtgagattcaactgagaccggaatgtcatatttaatgactaagtcatttcttggtgaactttacaaataatttaaatattgcagcgccaatgttttggaagataaatctggcatcattttgatgtctcaccaaaaccttaacttttaaatttaacttattttccatgctttgtctctgcctcccccgtcctctaacactcttacttttgacccctacttctgtcagagacactaaggaatgagtgtgctgagaaagcaggaaaggaaggtatctttccgaagtgatagtaggttttcatagagaaagtccagctgattagaagaatctacatgagaggcaaagtaaacattgtcttccaaatttcacactgattttgcatttgatagtttaatacttaagcgctatttaagattaattttaaaaatccaaaacttgaagccttaacataatgcaagaaccagtgtgactcacatcgcatatcctattacataattacacaatataggtagtccttatcatggggttcactccttaccaaaagataacggctcctaaataaatgtacaaatgtcttgatctatatattaatttctgtgccataagactgaggccataaaatcagattttgttactcccctgattaaaaacatttagtggttacccccacattctttaccaaacctccaaggctctgtagtacataatttctcaccttttccgctacatctccaaccattagtgtgcatctcactttgctccagccacattacattggcctttcctctcttcaaagacttttctgtctcaaggcctttgcacttactactgctgtttcctctgcctccaactctttccaaggacttcactgggctgtctctttctcacacagctcctattattcccccattcattctttcatttagtgaatatttattgattgtctaccaaaggccaataacttgtgcccctcctctccaccagatacatatactttctatgccattatcctttatcattttcatagcatttatccattatcctatttttcgtttacttgatgatctgtgtctctctctccacttgtctgtttgaacaagtgaacctcctaatgttgctactaaaaaaccgacaaatatgtgttgactgaatgaatcagaaagactgctatgcgactgagtctgttagtagggaagtcaatattatcaaatctcgggggggggggggggcttaaacctttcacagctggtcggaagctcaggatcagagaagtttccaggccacagagatgcaagcgtttctcttcagcgcaaagcgaatagcagcagaaaagaaaacaattattagaagacgggacctttgctctatctgggggaaggtaagctcccaaacaaaacctttttaaaaatccgactttctgaatgctctcttctccattcccagcttctgccacgtcccgggtcccagagtgtgcctgctcagatcccagaaaacttgcaggaacaggaagaggtcacacagtgttaaggggaagggagaacaggaacggcgggtttcttaccgcggtcaagaccctgaagtcatctcggctcatgtaacgcaacttggccacattcactttccccatggcggccccagtccgaacccagatgcctctccgacgacagccgcaaagcgtaaggcaggtcgttattccagcctctaagcgctttacagcgccagatggctcgcgcacgcgctgcgtcttagtataggtccttgttaatagttagaagtgctgttctcattgatataggaaaataaaactacttgtatgtcttatgaaacacatagtatgtaacaagtgaacgttttatttttgtgtaatttttgcgttgtgactgagttggcggagtgtagatattctctacaatgtgcctttttttttccatatctgtcaggacttgctgcctcaatgacacgttccgcctcagagagcaaagtggttacttaatgggaggagcaaatttttcccgcaaacaacttctactctaggcaaagtgacttccaacaagacaggggtaaaagaacctgagctagagtccagacaaccaaatctgttaaaggtaaagtggactgtaatcacacaagcacgccctctactcctaattgcgcctgctccggcagctccggagggcgtggttaatggaactcatgcgcttgctcagtacttctcttaggttggtctaggaggcttcgaagtgcgcctgcgctggttggggtgggagtttaaggtgacacgtggagagcgcggcggacgtccttacctccagaggaagtggggattttgatagttcgggctgacctacgcgggtaggacttcgagggcccaggagcgatttaaggattttagaatagttacccatactggctctgcaactcctcgatattcaagcctttgtctgctttttacttgaatgcagcatgtctttgattaaccatcttcaaccaatgaacatctccatttaaacggaatttttctttctgtacttacataagaaggcatagaaatgaattttttttttatttttgagacagagcccggctctgtcacccagactgaagtacaggggcgcgatcttggctcactgcaacctctgccctctaggttcaagggattcttctccctcagcctcctaagtagctgggattataggctcacaccaccacgccctgctaatatttttatttttagtagagatggggtttcgccctgttgaccagactggtttcaaactcctggcctcaggtgatccgcccccctcagtctcccaaagtgctgggattacaggcataagccaccgcgcctgggcgaaaagtttttaaaaaaaccaagtgactaactttatttgtacaaatttatggggtacgtgagaaattttgttacaagtatttagggtgtctgtcatccaaatacaatatatttttgtgtaactatagttaccctactctactatcaagcagtgaatatattccttctatctgactccatgtttgtaacctttaacctactctcttcatcctgttcccactcccctcatctttcccagtctgttatctgtctttccactctctaccttaatgtgatcaaattttttagcttccacatataagtaagagcgtgtgatatttgtctttttgttcctggcttatttcccttaagataatgacctccagctccatccacgttactgcaaatggcaagatttcattttttatgtctgaatagtactccattgtgtatatataccacattttctttatccattcatctgttgatggacacttaggttgattccatagctttgctattgtgaatagtgctgcgataaacatgcaagtgtaggtatccctttgatatactgatttctttcctctgggtagatacccaatagtgggattgctggattgaataattctatttttaattttttgagaaatctccatatacttttccacagtggctgtactaatttacattctcatcaacagtgtataagagttctcttttctccgcatcttcaccaacatccattattttttgtctttttaacagtagccatttggactggggtaagataatatctcattatggctttgattttcatttcttatatacttagtgatgttgagcaatttttcatgtacctgttggccatttgtatgcaaataactaacttctagagcaagaatggaatg

SEQ ID NO: 318472 - DNA, 4001 bp, Homo sapiens
acccaggaggcagaggttgcagtgagctgagatggcgccactgcactccagcctgggcgacagagtgagactgtctcaaaaaaacaaacaaacaaacaaaaacaaaaaaaaaagattagacaacctccattgacccaattcttaacgcttttttttttttttttttttttttgtgaggcagggtctcttcagttaatagggttgcttaaaaaaaaaaaaaaaaagagagagacagggtctcaatctgtttcccaggccagagtgctgtggtacaatcagggctcactgcagcctcgacctcctgggctcaagtgatcctcccacctcagccccccaccccaagaagctgggactacaggtgcaccatgtagtcccaccatgaacactcctgagttcatgacacatgtaagtggtccatgcagggccttttctcctttgtgtttatttatgtattcccttttgtccctattcttcccctctctccccaccacacctggctaatttttttgttgtttgtttttgagacagagtcttactctgtcgcccaggctggagtacagtggcacgatcttggctcattgcaacctttgcttcccagtttcaagcgattctcctgcctcagcctcccaagtagctggaattacagacacctgccaccacacccggctaaattttgtatttttagtagagacggggtttcaccatgttggccaggctggtcttgaactcctggcctcaagtgatcctcccgccttggcctcccaaagtgctggggttacaagcgtgagccactgcgcccagcctaattttttggagcgacagggtttcaccatgttggccaggttggtcttgaagtgctgagctcaagccgtctgccagtctcagcctcccaaagtgctggaattacgggcgtgaaccaccgtgcccagccaattcttatgcttttgcagccgcgacctccatccactctctaccctacatgtcactcctctgcttaaaaccaaaagatttccactgtacttagaaaaaactccacattcctctctctgacctacagactctatgtgaccaaaccccaattatccgacctcatctcctaccactctttccctttcttaccatactttagccacactagcttgctttctgttccttgactatactctcagttgatttctgccctagggccttcacactggctgttcccgctgcctggaccactctcttcccgtatcttcctaagcctgcctcctaatttgggtctcaacgcaaatgtcccgtcctcagagatgctctgctagaccacagtatctaatactgacccctccgccccaccctcacaccagttaccgtgtcatatcgccctcctccattttttttttttttttactatacagtcctacttgaagtttctaatctttcttttctcattaaccaaaactggagggaggaaaaagcccatcattttccctggacagcagcgcctactgggagtttcacccgcattaacatgcaaacgacaggcaaactcctagtcatccttccaaagaccctgctccatagccctgccgagcccggtgcgcacctgctcacttccgacccagcgcggtcgcacgaggactggacgtttgagtccgagcaactccccccggctgaggcggctcttcgggggctgggccgggacctatgagtctgggactccagctcccggcccagggccgacaactgcgaagagaacaagcccaagggcagattgttcggggcttagtcgtgggtagcaggggttctggagaaggctggggcccgggaggccggccgagctttccccgccgcgcgcctcagctccgccggccgctgtgcccgccctcggcccgcacctgccggctcccaagcccgcccgctctcacctcgccccgcagccccggccccggcttccggcgccactgtcatcggaaccggaagccgcggcgggcgatcggcggcccgggcccgcccattggcggttttgcggaggggtggccgtcccacgagcccgcggctttgcgcctcaccgccgaggctccccgccgcgcatgccgagtggagtcgcccgcgggaaccgggcggcggccagaaaagccgcgcctgtagtcctctgggggtcgcgcctggtcgtttccaggttccgagtccctccggcccggccccgggcctcccagtcggcggaagcccctggccgcgaccgctcctcgccggcgggcgggttccccacccggcagaggcgtcggcctcgcactcaacccagcacccgactcccgggtcagaagccccaagccccaagtggttacgcttacagcgctgcccgccctgctcagtgagggcggcgcgggggccgtgaggggcagtggctgggctaggtgcgcaccggcctcggcagggctgtggagcagggtctttggaaggatgactaggagtttgcctgtcgtttgcatgttaatgcgggtgaaactcccagtaggcgctgctgtccagggaaaatgatgggctttttcctctctccagttttggttaatgagaaaagaaagattagaaacttcaagtaggactgtgaacaggcttagggatcctggacagagcctagaaatctcaggagaactgagagctcttgaaatatgaagtgatgcttaaaaaaaaaaagaaaactccaggccgggcgcggcggctcacgcctgtaatcccagcactttgggaggccgaggcgggcggatcaggaggtcaggagatcgagaccatcctggctaacacggtgaaaccccgtctctactaaaaatacaaaaaattggccgggcgaggtggggggcgcctgtagtcccagccactcgggaggctgaggcaggagaatgtcgtgaacccgggaggcggagctcggagtgagccgagacggcgccactgcactccagcctgggcgacagagcgagactccgtctcaaaaaaaaagaatagaaaactccgggccgggcggctcacgcctgtaatcccagcactttgggaggctgaggcgggcggaacataaggtcaggagttcgagaccagcctgtccaatatggtgaaaccccgtctgtactaaaaatacaaaaattagccgggaatggtggcaggcgcctgtagtcccatgatcctagctactcgggagactgaggcaggagaatcgtttgaacccgagaggcggaggttgcagtgagccgagatcgcgccattgcactccagcctaggcgacagagcgagactccgtctcaaaaaaaaaaaaaagaaaagaaaagaaaactcctttcctgtcccagcctttctggtccccttagcccgaacttaatctgcccactgggtattcaacagaattcagttctgcggaggagggggtccagccctaccctgccgccctgtgttggtcgctgtcctggggaacgggggaaggggagaagatgggagctgcccatctgccctaaggaggaagggtgagggttaggaaggaggagggaacaggcactgaccccaaacccaggtccagactgaattttctttttctttttttgagatgaagtcttgctctgttgcccaggctggagtgcagtggtgtgatctcggttcactgcaacctccacctccaagcttcgagcgattgtcctgcctcagctccatgagtaacagattacagacatgctccaccatgcccggctaatttttgtatttttagtagagaggggattttgccatgttggccaggctggtctcaaactcctgacctcaggtgatccacccaccacagcctcccaaattgctgggattacaggcatgaaccaccacacccagccccagattgaattttctatcccggaccctctgctctggagggaaagagtagagaagtccccactcctcctcaggcctcagctgggactaggaacagccctggagaaaaagccaggtctctgtgttgcccacttctgctccctttttggttgggc

SEQ ID NO: 318473 - DNA, 4001 bp, Homo sapiens
caccagaaaagaggctaccattgttagttgccagtctggcaacactgtgcatctcaaccacagtgactggcacagagcaggaacgcaaatatttactgaatgaacccaagacaaaagttgtttctacggccaagctgggaccctaactgccatttttaacacagtagagatgagatatgcaccttaagcacctgattactggtgtaaaacggacttttcaaagcctagtctgagttgcggacaggctacagtaaaagccttatgtgattatttttccccagccagactgtctcaaagaagaaaacagcttagcactttggcatacaaatacagacctcagaggggcataatatgttagtatcttaagagtgtacaagcaaatcatgactttatttaggttgcctactttaggtcatcctaacatgaacagcagtttagaaaagaaaaatcccctctcagcattctcagggtgacaatgagggtggggataatggcagatatctcccaaaagttcagcgtgggccaaaacccaaaaaatcatattccacgatgtgcaaaaggtttctttcaaaccatgactaataatttaaacaaatacatgtttacaccaaataatcaactaaacaaagtccttgttcataggaaaacatgacattaagccgaatggtttcaaagacaattcttgaaaattttacctatttcccttttggtcggcacccgtgacctgaaaagccttggctagtagttccgattagtgtcagatcctcataatgtgacattttcaggcgtcaaattacagtaaaactactagggcaagaacaagagccaaaagcaacagggaagatgtccattttccatttacaccccccccccaatttaccacttaagaaaaacggcacgtttttatattagaaaagggccgcatccttccagatctagcgcagccttaagtccgtgatttgaggaacctgccgcttccaaaatacaggctgagacgtcctccccatgaagtagttttgcgctcttgcaccacctcctttgtctacgctgtccctgcaaactcctagctcaatgccctccagcaaacgagctgcctgaacgcaaagatgaccgttccaagtcttttttaaaagaagggaaaaacccagtcacgctcctggagcctggttcccacgggagcaggccgggctgtccacgacggaagcctcgaccctggctggggctgtcggccgggcagcgcgggagagccagggccagagccggggccgggaaccctagtcccgccgcctacgcgggatgcagcgaccaccgcccgccgcccccgggccggcactcacctccgtggaggggcagcggcgccagcacctggccgcggacctcggccttgggggagtcaagcccgtagcgcccgcggtcgatgcgaaacgtgagcggggcgccgcggccgggctcctgcaccgtcacgttgatgagcgccgtgtagtactcctggctcgcgttgtctgcccgtgccggccacaggctgcaggtcagcagggcgagcgcggcgagccgggcagggcccgcccgccccgcgcagctcatcgtccctccggcagccgccgctgctcgcggaccgggctccggggccggcgcctagaggcggggcgggcgcggcccgggcggcggcgggagcgcgcgcgcgcggcctgcgcggggccgagcccgagcgcggccctcctggacgccgcggccccgccgctcgccgccctcacgtccactgcccgcctgtggggacgcgcccatgggccctcggcgagggcggcgtctcaggtcgcacgcgggcgtctcttcggggtcccaggagggttgtagaagcgtgccccctccatccccccgggtcggtcccaccgaatgggaggcgcctcgcaaggacgcggcgggggaggggaagggcggcacgggaggaagcgccccgaggagggtcagcggaacacaaagtccctctcgcgcggctgccgcctgaggcgcgtgtccgccgccgccccgcccccccgctggtctagcggcaacgcgcaggcctaaggcgcagtcccgccccgagcgcatgcgtgccagggcctgtccgctcccgcccgcctgcacgagggcccgggcagccgggtcagccgctggtgctggttgtttctctgtcaggcgtgatagccgcagggcgtggagcccgggagatttgcgaggacgtatggaaatgtgtgagaacagactacaaaggaaaaaaagccataactttaaaagaaatgtttaaaattaaatgtcatgagatttaacattcacgtcatgcggttgacatcatggatgggggatgtctctggcccggacctgcagggacacgagtggttgggaaagacctctagggtagccgtccctaaccattttggcactgggggacgggtttccaggaagagagtttttccagggactgagggagttgaagtggtttccggatgaggctgctccacctcagatcatcaggcgttagattctcgtaagaagtgggcaacctaggtcccaagcatgcgcagttcacagccgggttcacgttgctatgagagtctaatgccgccctgatctgacaggaggcggagctcaggcggtgatgctcactcacctcctgctcgcttactggttcctcgaaggccctgggccggtacaggtccgcggccgggcggttggggagcccctgctctagtgactaggtgaactactccaggggcccccggaccagagggttgcagtgggaaccccccctccaccttccgaaacgcgcgcgcgcgcacacacacacgactctcattttctctctccatggcgtttaaaagatacacatcgctataaagtatcagctaaaaggaagaatggggcagtgcagccgaattcaggaacttacaggatctttgtggggaggcggagggggaaagtttggcgtcttctgaccagccagggttgagtctcctgtctcctactgcgggaagtgggtggagtcagctttgcacaaccaaatgttctgaaaatccggaaaagaggtggctccccaaaaagaaatttgaggcactgtttccaggaaagggtacggatgcagtgcaggctaaaacttaagatgcccaccactggccaggcgcggtggctcacgcccgtaatcgcagcactttgggaggcctaggtgggcggatcacgaggtcaggagttcgagaccagcttggccaacatggtgaaaccccgtctctactaaaaataaaaaaattagtcgtggtgatgcgtgcctgtagtcccagctactcgggaggctgaggcaggagaatcgttggaacccgggaagcggaggttgcagtgagcagagatcgagccactgcactccagcctgggcgacagagcaagactccgtctcagaaaaagaaaaaagaaagaaaacagatgtccactattgatgacttggcagacatcctttacaatttctccctccatttccctctcttccatcctctaccatagtccttataaaccgtgccctggcctatggagaacggcttttacttatttacttatcctcggcaagtacagaccctaggccaaagcagcggggtcctcgccctgggcctggcacctaaagagtgctctaatctggtcccctccagctggacccttcatagggcaaggagtccttagcaccaaggtacccatgctctagcacctaagacccagaaattccttctccccacagcccagggccacatctagggcctgtgtagggctcttcccggtgacggtctcctgctcttcttgctgggcatgccctggcctacccctgcccaagaggctcatggcctctactcctttgtccttataaaggaggagtcttcaaactgtaaggtgcccatgacccctggcacaagaaacaattatagaagctcacaagcaccactttgttaatcaggtggggaggaagtggctttctcaacccttct

SEQ ID NO: 318474 - DNA, 4001 bp, Homo sapiens
actctcacaacaatcccagacctgcttctccaagtggactaagcaagcctacttcctcccgtttaccttctcagaaatgctgccggtctttctggcactccactgtggaagcacgcattcatcgctcatgttataactgtaacaccgaccgcatttatcgagtagttaggatgcttcaagcagtgtgataaatgctctacgtaaattttctatcttcactgtaatcttatgatttagctaccatttgttattctcactttacaaataaggaaattgagacttaggtgcaagaacttaccaagggtcacatgattatcgtcaggctaagcaggaattaaaattatacacttccttcctcacaccatatgcaaaaattaactaaatatggatcaacgacctaaatgtaagaactaaaactataaaacccttagaaggccgggtgcggtggctcacgcctgtaatcctagcactttgggaagccgaggcgggtggatcacgaggtcaggagatcgagaccagcctgaccaacatggtgaaaccccgtctctactaaaaatacaaaaaataagccgggcatggtggcgggcacctgtagtcccagctactagggaggctgaggcaggagaatcatttgaacccaggagacagaggttacagtgagtcactgcactccagcctaggtaacagcgagactccgtctcaaaaaaaaaaaaaaaaaagtcaaacacaaaaagccatatattgtttttaatttatatgaaatgtccagaataggcaaatccatagagacaaaaagtagtttagtggttgccagaaactaaggcaggagggaatgggaagtgactgctaatagataccgctaatagatatggtgtttcttgggtgatgaaaatattgtggaattagagagcagtgatagttgtataactttgtgagtgtactagaaaccactggattgtatacttttgaagagttaattttattgcatgtgaattatgtcttaattaaaaaatttttttaggtacaaagcaccgttctcagcgcttaagtggaatacagaaatgttggctccttctcctgggacccatcaaactaatgtgctcctcacaatctaataagctcctgtgtccgctttttcatatatttcttcctccaaaagagtaacttgcagagctaagactctaacccaagcctacaggattctaaagcttttaccaccattgcctcccgggcaggattagattcatgggccagcaacccgtgcagtcacatagggccctgcacttagaagggccccagatttagaagtggcctgctcttaagaatgatacaatggactttggggacttagggggaaggatgagagggggacgaaggataaaagactacaaatagggtgcagtgtatactactcgagtgatgagtgcaccaaaatctcacaaatcaccattaaagaacttactcatgtaatcaaataccacctgtaccccaataacttatggaaaaattaaaataaaaaagaagtgccctgctcttgatttgatgctgtgctctcaccctcttgaagttcttaataatttctgaatgagaggctgcatttttattttgccctgggctttgtaaattatgtagttggtcttatacccaggagagagaaaaaaaccaagtgagtaaatcagggcacccaagggattacctggctgccacagaaagaaccttgaaatagaaataatcacttctaattttctgtactataaatcttgattgtcacaaaacagaaaccaaaatacccttctaatagataccaaaaccagaaacatatctcggaaaaatgcaaaggacggaagaagaatctccaaagccattcattaatataattattcatgtttagccaaaggaattagaccaagagcaaaacacacagcaaccctacctcagagtgctcagagaggggagaccagagacctcttcgtgaggaaaaaagtgaggaagcccatgcaccaaccagcttgggaaatcctcacaaagtcagagcagaaggtgaattgtgacatcatgtcagaggtcacaggatagagagaatagaaagagaatttcaaagcagtgttaataatttactgaatgtttaaagtgaactaaagatttagagtcaattttgaggacaagattgggtaaagacagccttctaataagttttgtttttgactctaggaaaataacagacttttgtgtctttggtctcatgtgcctggttagtcttttaaactgcagtctccccgtgtgcctagccctccactgtgctaaatatttcacgtacattctctcatttaaatgcccaggaccctatgacttaggtaattttatgtgcccacttgacagaagagaaaactgaggcactaagatttgtttttttaataaggccttttatatttacacaattactatttatgacatttttatttatttttaatataaaaagatgtaataaaagacagcaatgtcataaagttgaagtcaggtgtattatactttggggttttgttttgtttttgagaccgagtctcactctgtcacccaggctagagtgcagtggcacaatctcagctcacggcaacctctgcctcccggtagagggttcaagcgattctcgtgcctcagcctcctgagtagctgggattccaggtgcacaccaccacatctggctaatttttgtatttttagtagggatggggtttcaccatgttgcccaggctggtcttgaactcctgggctcaagtgatccacccgctttggcttcccaaagtgccgcgactacagatgtgagccacggcgcctgggccactttttttttttttttttaacttttaagttcatgggtacatgtgcaggtttgttatgtaggtaaactcgtgtcacgggggtttgttgtacagattatttcgtcacccagtgacgaaatattaagtctagtactttttattcttcctgatcctctccctcctctcatcctctcatcctctaccctgtagtaggtaggccccagtgtgtgttgttccccactttgtgaccatgtgttctcatcatttagcttccacttacaagtgagaatatgtggtatttggttttctgttcctgtgctagtttgctaaagatgatggaggcactaaggtttggccagtatcacacagtggtggagccagggttagagccgattcctcatcagtctgactctctccaggagcctgtcagagaataagggttttttgtaacaaattcacagagagtaaaatagttctggccttaagaactaaacgggaaggccctggggaagttaggattcgagtttatgacttaaggataggtgagaatgagaacacagacagagaaagagacccaactcccaccccctgtccccagggacaccggatgatgacggagcctagggagaggagaggttacagtgtaccacctagaccagaggtcgggacccaggccacggagtggagagtagaagtgagtcacaaactatggcttgtcactataggggttagcagacctgacggtgcctgcatttgttcccatccatcactggcatctggtagctgtcccgaaactttgctgaactcatcccaccatcccaggggggactgcctccttttccatggccaccactcgcaagcactcctgcaacaagcccttgaacacagaggggcagcagtgtggagaggaaaaccctgcccaacttttggataaaactgaaccttaatgagccctaccccagtacagaagtgtccctgacttcttgctggtctcttgtcattgtgtatttgctcatcatgtagatcttaaaagtctattatcatgtgggcctctgaaacattgtttttttttaaaaaaaattagaggtttcaggccaggcgtggtggctcatgcctgttatcccagccctttgggaggccgaggcaggtggaccacctgagatcaggagtttgagaccagcc

SEQ ID NO: 318475 - DNA, 4001 bp, Homo sapiens
agttagtacctgttaataacaatcagaagaaaaggatattaacaccgcagtctgtatttcagctcagagtggagttcatgcaaatcccatttattctctaactggtggagctgagactgctgaagctgggtaagaggccaagatgtggaactcatactacatatattatgaaaatcctgccatctgcagaaaagaaatacaaaagatggtgttaggaccctctccaaattaaaattctgaatttccatgatcactgcttaagtcaaacatatcctaacatatagccaatcctaatctacaagtgcatgttactctcctagggcaggctaactgagccatgtggttaaaggagtatttgcatgtccccagcaatgactgaggactttttatctgtctgccctcagctatgggaggagctaaggaggaacaccaaggtcatatgaaagtacaggacaccatgccccataacaaacaatctcttcagtttgttttttgttttgtttttttctcctttcctcttctgcttcttgtattccttcatttgccactcccctccagtttttcctctcttgttcatgaattaagcctgccagtggcactcaaggttaattttggtaacagaaaaatacttaaacaaaacaagagtacacaaacacaaacttttaagttttattctaaatgctttagagctaggcttcttcactggggtgaggggaaaagggagtgtggtctatagatgggctacggagaatcctatcaacaccctaaaattatatgcaaaaatactatatacaaaaccataattaaaaaccagattctcggatgtgtaactcccaaatgagataagaatgagattcagaatcaatttacattaattgagcacctactatgtactgtattaggtcctttcacattgtcttattttactaggtgggagtatatggtgctaattgaattaagctttttgtttcttcctgttaaaacatttgcaaatgggatgagagattcattcatgcagtttatggttttaggttagtgttctccatctgactgcacattagaatcttctgaggagctgttttttaaaatctcaatacccaggccacaccctagaacaattaattcaggcctcagtagttttccaagttctccaggtgattccaatatgcagccagggctaagaacttctactccaagcagtttcaacagttcctcatgacctaccctacaagatttcagcttgtgaagctgtcacttggaatccagtacctcaattcaggttgctaacccccatttccttctcactctatccatttggtcttcgggtgtcctagtctgggttcagctcgccactaggcgtgcggcgtcgtttgggcgactgccccaaaacaggggcaggcccaacgctagctatccgccccaacgctgggatcagagggcgcaatgcggatgtgtgagctgctggccagcctggggcgtcccgaaggagcagggcccacaccttccccttcctcctcagcgtcccgaagggagtcccggccagccgagctgcggacgcccggtcccggatttgagggactgaggcccagtgtacagtcccagcccggtccccttctctgcctcgcgcgcccagagagctatccccaccgtaccttccggccgcccggcagtgccgaaccccaaagttccgccctccgcccttgcctggggcccactcaccgccgccagccgaccaggcctagagacgccctgctcaaccggcgcgccgcctcttccgttctcgggagctgtcagctgagccaggcggatcccgctggcgcgaccgccggcatagggaggactctgcgcagccgccgtggtcgcccctgcctctcgggcgcctcccgcaggcccaaggcggcgctgccggcgcgaccaccgtcacccccacttactgcgagccctgtgctcacaggaggctcttttcagtagttctgatggggcccgagaattcgaatttttaccaatctctagaggggatcatgaggcagtggtctacctagggcagagactctcacaacaatcccagacctgcttctccaagtggactaagcaagcctacttcctcccgtttaccttctcagaaatgctgccggtctttctggcactccactgtggaagcacgcattcatcgctcatgttataactgtaacaccgaccgcatttatcgagtagttaggatgcttcaagcagtgtgataaatgctctacgtaaattttctatcttcactgtaatcttatgatttagctaccatttgttattctcactttacaaataaggaaattgagacttaggtgcaagaacttaccaagggtcacatgattatcgtcaggctaagcaggaattaaaattatacacttccttcctcacaccatatgcaaaaattaactaaatatggatcaacgacctaaatgtaagaactaaaactataaaacccttagaaggccgggtgcggtggctcacgcctgtaatcctagcactttgggaagccgaggcgggtggatcacgaggtcaggagatcgagaccagcctgaccaacatggtgaaaccccgtctctactaaaaatacaaaaaataagccgggcatggtggcgggcacctgtagtcccagctactagggaggctgaggcaggagaatcatttgaacccaggagacagaggttacagtgagtcactgcactccagcctaggtaacagcgagactccgtctcaaaaaaaaaaaaaaaaaagtcaaacacaaaaagccatatattgtttttaatttatatgaaatgtccagaataggcaaatccatagagacaaaaagtagtttagtggttgccagaaactaaggcaggagggaatgggaagtgactgctaatagataccgctaatagatatggtgtttcttgggtgatgaaaatattgtggaattagagagcagtgatagttgtataactttgtgagtgtactagaaaccactggattgtatacttttgaagagttaattttattgcatgtgaattatgtcttaattaaaaaatttttttaggtacaaagcaccgttctcagcgcttaagtggaatacagaaatgttggctccttctcctgggacccatcaaactaatgtgctcctcacaatctaataagctcctgtgtccgctttttcatatatttcttcctccaaaagagtaacttgcagagctaagactctaacccaagcctacaggattctaaagcttttaccaccattgcctcccgggcaggattagattcatgggccagcaacccgtgcagtcacatagggccctgcacttagaagggccccagatttagaagtggcctgctcttaagaatgatacaatggactttggggacttagggggaaggatgagagggggacgaaggataaaagactacaaatagggtgcagtgtatactactcgagtgatgagtgcaccaaaatctcacaaatcaccattaaagaacttactcatgtaatcaaataccacctgtaccccaataacttatggaaaaattaaaataaaaaagaagtgccctgctcttgatttgatgctgtgctctcaccctcttgaagttcttaataatttctgaatgagaggctgcatttttattttgccctgggctttgtaaattatgtagttggtcttatacccaggagagagaaaaaaaccaagtgagtaaatcagggcacccaagggattacctggctgccacagaaagaaccttgaaatagaaataatcacttctaattttctgtactataaatcttgattgtcacaaaacagaaaccaaaatacccttctaatagataccaaaaccagaaacatatctcggaaaaatgcaaaggacggaagaagaatctccaaagccattcattaatataattattcatgtttagccaaaggaattagaccaagagcaaaacacacagcaaccctacctcagagtgctcagagagg

SEQ ID NO: 318476 - DNA, 4001 bp, Homo sapiens
tttaataaaacaaaactaccagtcaattaaaatattgaactacaattgcatttgcaaatatcctccctcacaactaaaatatttttaattaaaatgtacataagtaaaaagttaggattttttacattttaaaaggtcatactatgaaattaaaaatgatttcattttcaaaaaacactttttttctaggagatgttagttcatggctctgcttaagctgcatccctatctaagacacaattacatgttctacttgaggtcagttagtacctgttaataacaatcagaagaaaaggatattaacaccgcagtctgtatttcagctcagagtggagttcatgcaaatcccatttattctctaactggtggagctgagactgctgaagctgggtaagaggccaagatgtggaactcatactacatatattatgaaaatcctgccatctgcagaaaagaaatacaaaagatggtgttaggaccctctccaaattaaaattctgaatttccatgatcactgcttaagtcaaacatatcctaacatatagccaatcctaatctacaagtgcatgttactctcctagggcaggctaactgagccatgtggttaaaggagtatttgcatgtccccagcaatgactgaggactttttatctgtctgccctcagctatgggaggagctaaggaggaacaccaaggtcatatgaaagtacaggacaccatgccccataacaaacaatctcttcagtttgttttttgttttgtttttttctcctttcctcttctgcttcttgtattccttcatttgccactcccctccagtttttcctctcttgttcatgaattaagcctgccagtggcactcaaggttaattttggtaacagaaaaatacttaaacaaaacaagagtacacaaacacaaacttttaagttttattctaaatgctttagagctaggcttcttcactggggtgaggggaaaagggagtgtggtctatagatgggctacggagaatcctatcaacaccctaaaattatatgcaaaaatactatatacaaaaccataattaaaaaccagattctcggatgtgtaactcccaaatgagataagaatgagattcagaatcaatttacattaattgagcacctactatgtactgtattaggtcctttcacattgtcttattttactaggtgggagtatatggtgctaattgaattaagctttttgtttcttcctgttaaaacatttgcaaatgggatgagagattcattcatgcagtttatggttttaggttagtgttctccatctgactgcacattagaatcttctgaggagctgttttttaaaatctcaatacccaggccacaccctagaacaattaattcaggcctcagtagttttccaagttctccaggtgattccaatatgcagccagggctaagaacttctactccaagcagtttcaacagttcctcatgacctaccctacaagatttcagcttgtgaagctgtcacttggaatccagtacctcaattcaggttgctaacccccatttccttctcactctatccatttggtcttcgggtgtcctagtctgggttcagctcgccactaggcgtgcggcgtcgtttgggcgactgccccaaaacaggggcaggcccaacgctagctatccgccccaacgctgggatcagagggcgcaatgcggatgtgtgagctgctggccagcctggggcgtcccgaaggagcagggcccacaccttccccttcctcctcagcgtcccgaagggagtcccggccagccgagctgcggacgcccggtcccggatttgagggactgaggcccagtgtacagtcccagcccggtccccttctctgcctcgcgcgcccagagagctatccccaccgtaccttccggccgcccggcagtgccgaaccccaaagttccgccctccgcccttgcctggggcccactcaccgccgccagccgaccaggcctagagacgccctgctcaaccggcgcgccgcctcttccgttctcgggagctgtcagctgagccaggcggatcccgctggcgcgaccgccggcatagggaggactctgcgcagccgccgtggtcgcccctgcctctcgggcgcctcccgcaggcccaaggcggcgctgccggcgcgaccaccgtcacccccacttactgcgagccctgtgctcacaggaggctcttttcagtagttctgatggggcccgagaattcgaatttttaccaatctctagaggggatcatgaggcagtggtctacctagggcagagactctcacaacaatcccagacctgcttctccaagtggactaagcaagcctacttcctcccgtttaccttctcagaaatgctgccggtctttctggcactccactgtggaagcacgcattcatcgctcatgttataactgtaacaccgaccgcatttatcgagtagttaggatgcttcaagcagtgtgataaatgctctacgtaaattttctatcttcactgtaatcttatgatttagctaccatttgttattctcactttacaaataaggaaattgagacttaggtgcaagaacttaccaagggtcacatgattatcgtcaggctaagcaggaattaaaattatacacttccttcctcacaccatatgcaaaaattaactaaatatggatcaacgacctaaatgtaagaactaaaactataaaacccttagaaggccgggtgcggtggctcacgcctgtaatcctagcactttgggaagccgaggcgggtggatcacgaggtcaggagatcgagaccagcctgaccaacatggtgaaaccccgtctctactaaaaatacaaaaaataagccgggcatggtggcgggcacctgtagtcccagctactagggaggctgaggcaggagaatcatttgaacccaggagacagaggttacagtgagtcactgcactccagcctaggtaacagcgagactccgtctcaaaaaaaaaaaaaaaaaagtcaaacacaaaaagccatatattgtttttaatttatatgaaatgtccagaataggcaaatccatagagacaaaaagtagtttagtggttgccagaaactaaggcaggagggaatgggaagtgactgctaatagataccgctaatagatatggtgtttcttgggtgatgaaaatattgtggaattagagagcagtgatagttgtataactttgtgagtgtactagaaaccactggattgtatacttttgaagagttaattttattgcatgtgaattatgtcttaattaaaaaatttttttaggtacaaagcaccgttctcagcgcttaagtggaatacagaaatgttggctccttctcctgggacccatcaaactaatgtgctcctcacaatctaataagctcctgtgtccgctttttcatatatttcttcctccaaaagagtaacttgcagagctaagactctaacccaagcctacaggattctaaagcttttaccaccattgcctcccgggcaggattagattcatgggccagcaacccgtgcagtcacatagggccctgcacttagaagggccccagatttagaagtggcctgctcttaagaatgatacaatggactttggggacttagggggaaggatgagagggggacgaaggataaaagactacaaatagggtgcagtgtatactactcgagtgatgagtgcaccaaaatctcacaaatcaccattaaagaacttactcatgtaatcaaataccacctgtaccccaataacttatggaaaaattaaaataaaaaagaagtgccctgctcttgatttgatgctgtgctctcaccctcttgaagttcttaataatttctgaatgagaggctgcatttttattttgccctgggctttgtaaattatgtagttggtcttatacccaggagagagaaaaaaaccaagtgagtaaatcagggcacccaaggg

SEQ ID NO: 318477 - DNA, 4001 bp, Homo sapiens
gcgacgcaaggccatccactaatctttgatgcctgctcactgcacaggccccttcctctctccccgcacctcctcccacaacgcctgcagatctcagatgcgtttgaactacagtaaccccaacccagctcgcggcaagcaggcagcgcagcagcagtagcagcagcaaccgggccgccgccgccgcggggctaagagattacgttcagcaaaaactcttccaggaaagaggctcgagagctcccctcctatctcgccaagggtgctgactctgtcgcgccacgccacgtaccaaaaggctcgcgaagaaaaacgcgggcgaagttcagcatccccgaacagaaagggaactcattccagaaagggggttcacgggtctgagggtccttgggtggggaaagcagtattggagggagaagacagaagggatggcaagacagaggaaaccacggggacaaaaaggaagggatgaggagccctcttactataaaagggactgacggacgggatgcagagcaatgggcccccctcgaaaaatggactggcaggcccttccgcacccccaaacaacctcgcaccacctgaaagcggggagcttgagtttggggctgcgtagatcaaagcagggtaagacgaagggaaagagggaggggagcttggaagcaaagtgaacaaagaggcaaaagaggcaaagttggaaatggaaacgagaaagggagctggaaaggggccgctctggaagggtcttgaaaaaggcctagaaatgggatgctggggaggcaaagggggacagccccgaggaagggcatctcaggaatgtaagggagcgctccaggccctgggaagaggaagggatgggagggcggggaggcagccgaggcccgggagctggaacagagggggctttgcgcggggcccaggaggggagagcagggtcggagggaggcgaccaccgcgggaagagctagaggatgggagggaggggtgctgcggctgaagaggggatgtggactcctccaatgctagggagaagagggaggtgaagcgagataaaaggaaaggggcgaacagggagaagaggaaggagcctgcgacgcgatgggggaggggagggaggccgtgggaagcggccggggggcgcggggatgggaaggggccgggcgggcggcgtggtcacctcaggctgcggactccctccctggggagcggcgctgccggcgggcgggctccgcaactccccggctctctcgcccgccctcccgttctcctcgggcggcggcgggggccggtacggcacggctcacagcggcggctcttctgcgccgagcctcggatgttgcttctggggaggcggaggcagcggcagcggcagcggcccggcccgtacggtcaccatcgtccgcggcagcaggcgctcgcgggccgagccccttagcagccggcgccggcgtcggcggccatggcctcctgcgtttgctcctcccgcccccggcgctctgcggcggccgcggcccgacttccgcactctgcgcctgcgcgcggcccagccagcgcggcgcgcccctcccgcgcgcgcccgcgctcactcacaatcgcgcccgcggagtgctttccgcaccgcctccggtgcgtgggcgggagacataagcctagccaagcccatacagcccggctcgggtggctatggagaggcgtactgcagagacacctggacgcgcactgtgacaggcgccattctgacacacgtgctctctcactcccaaacaccacgggccgcaagcgctcacacccacactcacctgcagggaccacgtgggagaatttgaagggctgatcctgtcccggtgcattcgcagtagcaatgatgcgagaattcgttttaacctcgtcactgactggactagactgtaaactccttggcgtctgggatggctcagccgtgcccagcaccaagtgcaggcactcaaacccctgtggagtaagtgactggatgaatgaatgcattggaactgttcactgagtatctgtaacaattttgatcccatggtttggtacaaagaattttattgcagtatgaaattaaatggtgtttgtgtgtttgtcttgtcttggtctaaggttcaaaacaggctaatgtatgttttcccctccccaacgtagaggagttccactttgtctctgtgccagtctctatcacagaatgcgcaatcctaccctaatttaaatgtccacaccttttagggcaggaactgttgcccagaatacatagcctgaagcatattgtgtgtttacacaacgatagtcttctgggcttggcaagacttctcattccccatttgtctgccactctgcctcaccacgaccttctgcaacccccacttctatctcccctgccttccaccatcaccaaaacccctccactgtttcttgctttctctttcgttagttcctggggagccagttgctatgagcacctagcctggccttagatgttgaaagggccagtgtacacagaagatacacacccagtgatgggtaagatgttgcaactatactgggtcatgctgaaattgtgaagcctcaacttcttcatgtgcaagagaaattaatgtactgtaatctcgatgtctgtgttgaggaccctccttgtaaattcaagtctctggcctctgccctttgaatggtaaacccccaattctgaacactcttgtatcctgctgaaattgtgaaagcaagctctgtatttagaaaatgcaatccctggaggtatcagtcaaccaaactctgagtaacttgccttccattagtttgatagctctgtaggaatcaagtgtttaaaatgtgtgggaattgtgtacataactcactataaccacctttcatccaggtgcctcagactacttcaccatagtcataaatcctgtcacatcccagtgatgcagttcatgagtctcttaatctagcctggtaagtaaaaaaattacagaggtcacatgaataatgactggaataggaaatggaccaagatagcaaggccttatcttgatcccctccctgttttaacaactttacatctgactgagtcaagaaaacctaaggccagaaacagattacaaagaagtcaaaatgaacgtaacactaaattctaactttatttatttattattcttggataaatggcagaatcctgaaaatgtgattctaaaaggaagtatggttgctggatttgcgtggtttttgtttgtttgtttgtttgttttttgagacggagtccactcttgttgcccaggctggagtgcagtggcgtgatcttggctcatcgcaacctccgcctcctgggttcgagcaattctcctgcctcagcctcccaagtagctgggattacaggcatgcaccaccacacctggctaattttgtatttttagtagagatggggtttcttcatgttggtcaggctggtctctaactggatttgtgttttaaatggaggagaggcctacttcagctcttacctttcctttttttaaagtggagaaaatggcttcaaagccctgtaaccctcactggaagtattctggacttgtaaaagcaggaaaaagtcacatgtctttttaccttttaacttaatagcagctgcctgtaaatgctgaagttcaaaacaagtaaagaaaattactctggtaatgaaagggttactgctattatagtgctgctaatccagttatgggaaagctccacattgccagaagcaggtaattaaacagaactaaaaagcaacgcaaaagaaaaaagaagtgggggtggggcgggtgaatcgagagcagctcaaataaaagagctcaatcaagtgtagaggaagtactttctagaggcacccaaacccacccaaatcaggaaaagccaggagctaaatttgtccttaagtacctggaagaaacataaggaaatgtctaaatgccacagcttggtcataaaaggaacttacccagggtgctagaagg

SEQ ID NO: 318478 - DNA, 4001 bp, Homo sapiens
gggtcccgaaagctgtcaataaaaaacaatatccaagatccccctctactacatagtcaactcgagactgaaatgtttttaacaaggactttggatagaattaaatacgcccaaataaacgaaactaaatgttgcatttatttctatacgtgaatgttattttagcaagtcagtggcaagctggtcatgtataaaggcactgacgaaacaaatttaatacatggaaaatcaaagagaaaaaaatttcaaaaccttatcactttgaacccttctaaagtaaaagagcacatgatagttatcaatacaaataggtactttacactacactttagcaccacacactaaaccaacatcaaaacaaaactttaaaatattcatcttctttgcaagtacttgcaattactcacacctgccaaatcactatatcatacaaacacgaagtaaaatggagccttctctcctgatctagagaatacctttataatgttgcctaatttatcctgttccagatttattgtcaaacagggctaatcagcatatcctaaagtacaggggagctcaatattctcttgaaaacaaaataataccaaataatcctagaaaataagcaggagagctgaaagcagaaaaaaccgaaaggtttaacacacccaaagccaaatacataaacttcctatactgttttatcttccatgcaagattttaaaatgtcctccttgaactttgaaaagaactgggaaagtaatatccaacatgatgtgtctgcaggtaacataaactaaatgtgactcaaagatgttttacacagtaaaacagctaaaaacaaaccaaaaaaaaaaaaggcatttctttccaaaaaccacaagaggtgcaacaaatgctaaccaaaaaggagacctcaatgagttcattaaatgaccttctcaggcttagaagcagcaatccgtaattatgaaaacagtaatgtcttgtagaagtataatgctgtacagtttaccattcaaatttgtgggttagaaaacacagggggcttcattctacactttcctgaaaatacgggattttagttttgaatatgaagaaaccaaacaaatcgtcctgaataagaaaaatgtaggtttttacagtcacagctaatctctgaagaactatgtcaaataagagaaatgaaaaatgtgattttttatttctcttatttgagttcttcaaaaatacacctcctaaacttttttttaaaaagacaaagaaaaaacaagaatgacacgtgacccaacttaaaactattcagtacaatacttctacaccttccccctaaaaaagaaaaacaaaaatcatcattcaccattatctcctttctttctcccaaccagttaaaaaaaaaaattctaccatcaactaaaactgatcttaagaaaagtaaattttcgggctgtccatcggttaggatggtaggcctcactgaaaatgttaagagcacaaagctagagcctaaaattctaagtaaaagcccagaactgagataccaggaaagagaacgcatttcttacataagcaatggcacatgttttaaatatagctggtcctccccactcccactccttgctagctaactttgtatgtacctgatctccacataaactactagcaattctgtggtttctcatcatctcccaaaccgcaaagacagggagtctactctgaatacaaaggccatctttcaacttaaggaacagagagaggaaataaaactgctacctctgccatcggccgctcagcctgggtcacgactgcagcaccgacagctcattcttttgggcatgattcaagattcagtaaaactgcacactccgtattttaaaaaataaaaagacacacagtcctctccttccctttcagactagtttcctctttactgcagactgcgacgcaaggccatccactaatctttgatgcctgctcactgcacaggccccttcctctctccccgcacctcctcccacaacgcctgcagatctcagatgcgtttgaactacagtaaccccaacccagctcgcggcaagcaggcagcgcagcagcagtagcagcagcaaccgggccgccgccgccgcggggctaagagattacgttcagcaaaaactcttccaggaaagaggctcgagagctcccctcctatctcgccaagggtgctgactctgtcgcgccacgccacgtaccaaaaggctcgcgaagaaaaacgcgggcgaagttcagcatccccgaacagaaagggaactcattccagaaagggggttcacgggtctgagggtccttgggtggggaaagcagtattggagggagaagacagaagggatggcaagacagaggaaaccacggggacaaaaaggaagggatgaggagccctcttactataaaagggactgacggacgggatgcagagcaatgggcccccctcgaaaaatggactggcaggcccttccgcacccccaaacaacctcgcaccacctgaaagcggggagcttgagtttggggctgcgtagatcaaagcagggtaagacgaagggaaagagggaggggagcttggaagcaaagtgaacaaagaggcaaaagaggcaaagttggaaatggaaacgagaaagggagctggaaaggggccgctctggaagggtcttgaaaaaggcctagaaatgggatgctggggaggcaaagggggacagccccgaggaagggcatctcaggaatgtaagggagcgctccaggccctgggaagaggaagggatgggagggcggggaggcagccgaggcccgggagctggaacagagggggctttgcgcggggcccaggaggggagagcagggtcggagggaggcgaccaccgcgggaagagctagaggatgggagggaggggtgctgcggctgaagaggggatgtggactcctccaatgctagggagaagagggaggtgaagcgagataaaaggaaaggggcgaacagggagaagaggaaggagcctgcgacgcgatgggggaggggagggaggccgtgggaagcggccggggggcgcggggatgggaaggggccgggcgggcggcgtggtcacctcaggctgcggactccctccctggggagcggcgctgccggcgggcgggctccgcaactccccggctctctcgcccgccctcccgttctcctcgggcggcggcgggggccggtacggcacggctcacagcggcggctcttctgcgccgagcctcggatgttgcttctggggaggcggaggcagcggcagcggcagcggcccggcccgtacggtcaccatcgtccgcggcagcaggcgctcgcgggccgagccccttagcagccggcgccggcgtcggcggccatggcctcctgcgtttgctcctcccgcccccggcgctctgcggcggccgcggcccgacttccgcactctgcgcctgcgcgcggcccagccagcgcggcgcgcccctcccgcgcgcgcccgcgctcactcacaatcgcgcccgcggagtgctttccgcaccgcctccggtgcgtgggcgggagacataagcctagccaagcccatacagcccggctcgggtggctatggagaggcgtactgcagagacacctggacgcgcactgtgacaggcgccattctgacacacgtgctctctcactcccaaacaccacgggccgcaagcgctcacacccacactcacctgcagggaccacgtgggagaatttgaagggctgatcctgtcccggtgcattcgcagtagcaatgatgcgagaattcgttttaacctcgtcactgactggactagactgtaaactccttggcgtctgggatggctcagccgtgcccagcaccaagtgcaggcactcaaacccctgtggagtaagtgactggatgaatgaatgcattggaactgttcactgagtatctgtaacaattttgatcccatggtttggtacaaagaattttattgcagtatgaaat

SEQ ID NO: 318479 - DNA, 4001 bp, Homo sapiens
aatcaccacgtactgagatgacagtattactgacagtctttatactgccatcgaaaagtaactatttttctatattctggaatccaatataaatcattactctgtttttataagtaacaagagagggaggagctattactgatttaacacttgtagcccatatttatttcatttgatttggaacctttctcttttttcaatgctttgctattttaaaatgtgcccattttcaccatttactgtggctcctaaacgggtaaagaagaaaatttaaactaaacaaataactaatcctgctttagaaatcaagatctgctagggaagaaaaactccctaatccgtacagaggatcatctctattacaaaagtccattagcagaatggtacatgttccctctttatttccacccaccactcctgcctaacaaatataataagaaacagaaaacaggacacatttctatttctataaagagaaaataccgggtcccgaaagctgtcaataaaaaacaatatccaagatccccctctactacatagtcaactcgagactgaaatgtttttaacaaggactttggatagaattaaatacgcccaaataaacgaaactaaatgttgcatttatttctatacgtgaatgttattttagcaagtcagtggcaagctggtcatgtataaaggcactgacgaaacaaatttaatacatggaaaatcaaagagaaaaaaatttcaaaaccttatcactttgaacccttctaaagtaaaagagcacatgatagttatcaatacaaataggtactttacactacactttagcaccacacactaaaccaacatcaaaacaaaactttaaaatattcatcttctttgcaagtacttgcaattactcacacctgccaaatcactatatcatacaaacacgaagtaaaatggagccttctctcctgatctagagaatacctttataatgttgcctaatttatcctgttccagatttattgtcaaacagggctaatcagcatatcctaaagtacaggggagctcaatattctcttgaaaacaaaataataccaaataatcctagaaaataagcaggagagctgaaagcagaaaaaaccgaaaggtttaacacacccaaagccaaatacataaacttcctatactgttttatcttccatgcaagattttaaaatgtcctccttgaactttgaaaagaactgggaaagtaatatccaacatgatgtgtctgcaggtaacataaactaaatgtgactcaaagatgttttacacagtaaaacagctaaaaacaaaccaaaaaaaaaaaaggcatttctttccaaaaaccacaagaggtgcaacaaatgctaaccaaaaaggagacctcaatgagttcattaaatgaccttctcaggcttagaagcagcaatccgtaattatgaaaacagtaatgtcttgtagaagtataatgctgtacagtttaccattcaaatttgtgggttagaaaacacagggggcttcattctacactttcctgaaaatacgggattttagttttgaatatgaagaaaccaaacaaatcgtcctgaataagaaaaatgtaggtttttacagtcacagctaatctctgaagaactatgtcaaataagagaaatgaaaaatgtgattttttatttctcttatttgagttcttcaaaaatacacctcctaaacttttttttaaaaagacaaagaaaaaacaagaatgacacgtgacccaacttaaaactattcagtacaatacttctacaccttccccctaaaaaagaaaaacaaaaatcatcattcaccattatctcctttctttctcccaaccagttaaaaaaaaaaattctaccatcaactaaaactgatcttaagaaaagtaaattttcgggctgtccatcggttaggatggtaggcctcactgaaaatgttaagagcacaaagctagagcctaaaattctaagtaaaagcccagaactgagataccaggaaagagaacgcatttcttacataagcaatggcacatgttttaaatatagctggtcctccccactcccactccttgctagctaactttgtatgtacctgatctccacataaactactagcaattctgtggtttctcatcatctcccaaaccgcaaagacagggagtctactctgaatacaaaggccatctttcaacttaaggaacagagagaggaaataaaactgctacctctgccatcggccgctcagcctgggtcacgactgcagcaccgacagctcattcttttgggcatgattcaagattcagtaaaactgcacactccgtattttaaaaaataaaaagacacacagtcctctccttccctttcagactagtttcctctttactgcagactgcgacgcaaggccatccactaatctttgatgcctgctcactgcacaggccccttcctctctccccgcacctcctcccacaacgcctgcagatctcagatgcgtttgaactacagtaaccccaacccagctcgcggcaagcaggcagcgcagcagcagtagcagcagcaaccgggccgccgccgccgcggggctaagagattacgttcagcaaaaactcttccaggaaagaggctcgagagctcccctcctatctcgccaagggtgctgactctgtcgcgccacgccacgtaccaaaaggctcgcgaagaaaaacgcgggcgaagttcagcatccccgaacagaaagggaactcattccagaaagggggttcacgggtctgagggtccttgggtggggaaagcagtattggagggagaagacagaagggatggcaagacagaggaaaccacggggacaaaaaggaagggatgaggagccctcttactataaaagggactgacggacgggatgcagagcaatgggcccccctcgaaaaatggactggcaggcccttccgcacccccaaacaacctcgcaccacctgaaagcggggagcttgagtttggggctgcgtagatcaaagcagggtaagacgaagggaaagagggaggggagcttggaagcaaagtgaacaaagaggcaaaagaggcaaagttggaaatggaaacgagaaagggagctggaaaggggccgctctggaagggtcttgaaaaaggcctagaaatgggatgctggggaggcaaagggggacagccccgaggaagggcatctcaggaatgtaagggagcgctccaggccctgggaagaggaagggatgggagggcggggaggcagccgaggcccgggagctggaacagagggggctttgcgcggggcccaggaggggagagcagggtcggagggaggcgaccaccgcgggaagagctagaggatgggagggaggggtgctgcggctgaagaggggatgtggactcctccaatgctagggagaagagggaggtgaagcgagataaaaggaaaggggcgaacagggagaagaggaaggagcctgcgacgcgatgggggaggggagggaggccgtgggaagcggccggggggcgcggggatgggaaggggccgggcgggcggcgtggtcacctcaggctgcggactccctccctggggagcggcgctgccggcgggcgggctccgcaactccccggctctctcgcccgccctcccgttctcctcgggcggcggcgggggccggtacggcacggctcacagcggcggctcttctgcgccgagcctcggatgttgcttctggggaggcggaggcagcggcagcggcagcggcccggcccgtacggtcaccatcgtccgcggcagcaggcgctcgcgggccgagccccttagcagccggcgccggcgtcggcggccatggcctcctgcgtttgctcctcccgcccccggcgctctgcggcggccgcggcccgacttccgcactctgcgcctgcgcgcggcccagccagcgcggcgcgcccctcccgcgcgcgcccgcgctcactcacaatcgc

SEQ ID NO: 318480 - DNA, 4001 bp, Homo sapiens
ttcgggctgtccatcggttaggatggtaggcctcactgaaaatgttaagagcacaaagctagagcctaaaattctaagtaaaagcccagaactgagataccaggaaagagaacgcatttcttacataagcaatggcacatgttttaaatatagctggtcctccccactcccactccttgctagctaactttgtatgtacctgatctccacataaactactagcaattctgtggtttctcatcatctcccaaaccgcaaagacagggagtctactctgaatacaaaggccatctttcaacttaaggaacagagagaggaaataaaactgctacctctgccatcggccgctcagcctgggtcacgactgcagcaccgacagctcattcttttgggcatgattcaagattcagtaaaactgcacactccgtattttaaaaaataaaaagacacacagtcctctccttccctttcagactagtttcctctttactgcagactgcgacgcaaggccatccactaatctttgatgcctgctcactgcacaggccccttcctctctccccgcacctcctcccacaacgcctgcagatctcagatgcgtttgaactacagtaaccccaacccagctcgcggcaagcaggcagcgcagcagcagtagcagcagcaaccgggccgccgccgccgcggggctaagagattacgttcagcaaaaactcttccaggaaagaggctcgagagctcccctcctatctcgccaagggtgctgactctgtcgcgccacgccacgtaccaaaaggctcgcgaagaaaaacgcgggcgaagttcagcatccccgaacagaaagggaactcattccagaaagggggttcacgggtctgagggtccttgggtggggaaagcagtattggagggagaagacagaagggatggcaagacagaggaaaccacggggacaaaaaggaagggatgaggagccctcttactataaaagggactgacggacgggatgcagagcaatgggcccccctcgaaaaatggactggcaggcccttccgcacccccaaacaacctcgcaccacctgaaagcggggagcttgagtttggggctgcgtagatcaaagcagggtaagacgaagggaaagagggaggggagcttggaagcaaagtgaacaaagaggcaaaagaggcaaagttggaaatggaaacgagaaagggagctggaaaggggccgctctggaagggtcttgaaaaaggcctagaaatgggatgctggggaggcaaagggggacagccccgaggaagggcatctcaggaatgtaagggagcgctccaggccctgggaagaggaagggatgggagggcggggaggcagccgaggcccgggagctggaacagagggggctttgcgcggggcccaggaggggagagcagggtcggagggaggcgaccaccgcgggaagagctagaggatgggagggaggggtgctgcggctgaagaggggatgtggactcctccaatgctagggagaagagggaggtgaagcgagataaaaggaaaggggcgaacagggagaagaggaaggagcctgcgacgcgatgggggaggggagggaggccgtgggaagcggccggggggcgcggggatgggaaggggccgggcgggcggcgtggtcacctcaggctgcggactccctccctggggagcggcgctgccggcgggcgggctccgcaactccccggctctctcgcccgccctcccgttctcctcgggcggcggcgggggccggtacggcacggctcacagcggcggctcttctgcgccgagcctcggatgttgcttctggggaggcggaggcagcggcagcggcagcggcccggcccgtacggtcaccatcgtccgcggcagcaggcgctcgcgggccgagccccttagcagccggcgccggcgtcggcggccatggcctcctgcgtttgctcctcccgcccccggcgctctgcggcggccgcggcccgacttccgcactctgcgcctgcgcgcggcccagccagcgcggcgcgcccctcccgcgcgcgcccgcgctcactcacaatcgcgcccgcggagtgctttccgcaccgcctccggtgcgtgggcgggagacataagcctagccaagcccatacagcccggctcgggtggctatggagaggcgtactgcagagacacctggacgcgcactgtgacaggcgccattctgacacacgtgctctctcactcccaaacaccacgggccgcaagcgctcacacccacactcacctgcagggaccacgtgggagaatttgaagggctgatcctgtcccggtgcattcgcagtagcaatgatgcgagaattcgttttaacctcgtcactgactggactagactgtaaactccttggcgtctgggatggctcagccgtgcccagcaccaagtgcaggcactcaaacccctgtggagtaagtgactggatgaatgaatgcattggaactgttcactgagtatctgtaacaattttgatcccatggtttggtacaaagaattttattgcagtatgaaattaaatggtgtttgtgtgtttgtcttgtcttggtctaaggttcaaaacaggctaatgtatgttttcccctccccaacgtagaggagttccactttgtctctgtgccagtctctatcacagaatgcgcaatcctaccctaatttaaatgtccacaccttttagggcaggaactgttgcccagaatacatagcctgaagcatattgtgtgtttacacaacgatagtcttctgggcttggcaagacttctcattccccatttgtctgccactctgcctcaccacgaccttctgcaacccccacttctatctcccctgccttccaccatcaccaaaacccctccactgtttcttgctttctctttcgttagttcctggggagccagttgctatgagcacctagcctggccttagatgttgaaagggccagtgtacacagaagatacacacccagtgatgggtaagatgttgcaactatactgggtcatgctgaaattgtgaagcctcaacttcttcatgtgcaagagaaattaatgtactgtaatctcgatgtctgtgttgaggaccctccttgtaaattcaagtctctggcctctgccctttgaatggtaaacccccaattctgaacactcttgtatcctgctgaaattgtgaaagcaagctctgtatttagaaaatgcaatccctggaggtatcagtcaaccaaactctgagtaacttgccttccattagtttgatagctctgtaggaatcaagtgtttaaaatgtgtgggaattgtgtacataactcactataaccacctttcatccaggtgcctcagactacttcaccatagtcataaatcctgtcacatcccagtgatgcagttcatgagtctcttaatctagcctggtaagtaaaaaaattacagaggtcacatgaataatgactggaataggaaatggaccaagatagcaaggccttatcttgatcccctccctgttttaacaactttacatctgactgagtcaagaaaacctaaggccagaaacagattacaaagaagtcaaaatgaacgtaacactaaattctaactttatttatttattattcttggataaatggcagaatcctgaaaatgtgattctaaaaggaagtatggttgctggatttgcgtggtttttgtttgtttgtttgtttgttttttgagacggagtccactcttgttgcccaggctggagtgcagtggcgtgatcttggctcatcgcaacctccgcctcctgggttcgagcaattctcctgcctcagcctcccaagtagctgggattacaggcatgcaccaccacacctggctaattttgtatttttagtagagatggggtttcttcatgttggtcaggctggtctctaactggatttgtgttttaaatggaggagaggcctacttc

SEQ ID NO: 318481 - DNA, 4001 bp, Homo sapiens
tggaacctttctcttttttcaatgctttgctattttaaaatgtgcccattttcaccatttactgtggctcctaaacgggtaaagaagaaaatttaaactaaacaaataactaatcctgctttagaaatcaagatctgctagggaagaaaaactccctaatccgtacagaggatcatctctattacaaaagtccattagcagaatggtacatgttccctctttatttccacccaccactcctgcctaacaaatataataagaaacagaaaacaggacacatttctatttctataaagagaaaataccgggtcccgaaagctgtcaataaaaaacaatatccaagatccccctctactacatagtcaactcgagactgaaatgtttttaacaaggactttggatagaattaaatacgcccaaataaacgaaactaaatgttgcatttatttctatacgtgaatgttattttagcaagtcagtggcaagctggtcatgtataaaggcactgacgaaacaaatttaatacatggaaaatcaaagagaaaaaaatttcaaaaccttatcactttgaacccttctaaagtaaaagagcacatgatagttatcaatacaaataggtactttacactacactttagcaccacacactaaaccaacatcaaaacaaaactttaaaatattcatcttctttgcaagtacttgcaattactcacacctgccaaatcactatatcatacaaacacgaagtaaaatggagccttctctcctgatctagagaatacctttataatgttgcctaatttatcctgttccagatttattgtcaaacagggctaatcagcatatcctaaagtacaggggagctcaatattctcttgaaaacaaaataataccaaataatcctagaaaataagcaggagagctgaaagcagaaaaaaccgaaaggtttaacacacccaaagccaaatacataaacttcctatactgttttatcttccatgcaagattttaaaatgtcctccttgaactttgaaaagaactgggaaagtaatatccaacatgatgtgtctgcaggtaacataaactaaatgtgactcaaagatgttttacacagtaaaacagctaaaaacaaaccaaaaaaaaaaaaggcatttctttccaaaaaccacaagaggtgcaacaaatgctaaccaaaaaggagacctcaatgagttcattaaatgaccttctcaggcttagaagcagcaatccgtaattatgaaaacagtaatgtcttgtagaagtataatgctgtacagtttaccattcaaatttgtgggttagaaaacacagggggcttcattctacactttcctgaaaatacgggattttagttttgaatatgaagaaaccaaacaaatcgtcctgaataagaaaaatgtaggtttttacagtcacagctaatctctgaagaactatgtcaaataagagaaatgaaaaatgtgattttttatttctcttatttgagttcttcaaaaatacacctcctaaacttttttttaaaaagacaaagaaaaaacaagaatgacacgtgacccaacttaaaactattcagtacaatacttctacaccttccccctaaaaaagaaaaacaaaaatcatcattcaccattatctcctttctttctcccaaccagttaaaaaaaaaaattctaccatcaactaaaactgatcttaagaaaagtaaattttcgggctgtccatcggttaggatggtaggcctcactgaaaatgttaagagcacaaagctagagcctaaaattctaagtaaaagcccagaactgagataccaggaaagagaacgcatttcttacataagcaatggcacatgttttaaatatagctggtcctccccactcccactccttgctagctaactttgtatgtacctgatctccacataaactactagcaattctgtggtttctcatcatctcccaaaccgcaaagacagggagtctactctgaatacaaaggccatctttcaacttaaggaacagagagaggaaataaaactgctacctctgccatcggccgctcagcctgggtcacgactgcagcaccgacagctcattcttttgggcatgattcaagattcagtaaaactgcacactccgtattttaaaaaataaaaagacacacagtcctctccttccctttcagactagtttcctctttactgcagactgcgacgcaaggccatccactaatctttgatgcctgctcactgcacaggccccttcctctctccccgcacctcctcccacaacgcctgcagatctcagatgcgtttgaactacagtaaccccaacccagctcgcggcaagcaggcagcgcagcagcagtagcagcagcaaccgggccgccgccgccgcggggctaagagattacgttcagcaaaaactcttccaggaaagaggctcgagagctcccctcctatctcgccaagggtgctgactctgtcgcgccacgccacgtaccaaaaggctcgcgaagaaaaacgcgggcgaagttcagcatccccgaacagaaagggaactcattccagaaagggggttcacgggtctgagggtccttgggtggggaaagcagtattggagggagaagacagaagggatggcaagacagaggaaaccacggggacaaaaaggaagggatgaggagccctcttactataaaagggactgacggacgggatgcagagcaatgggcccccctcgaaaaatggactggcaggcccttccgcacccccaaacaacctcgcaccacctgaaagcggggagcttgagtttggggctgcgtagatcaaagcagggtaagacgaagggaaagagggaggggagcttggaagcaaagtgaacaaagaggcaaaagaggcaaagttggaaatggaaacgagaaagggagctggaaaggggccgctctggaagggtcttgaaaaaggcctagaaatgggatgctggggaggcaaagggggacagccccgaggaagggcatctcaggaatgtaagggagcgctccaggccctgggaagaggaagggatgggagggcggggaggcagccgaggcccgggagctggaacagagggggctttgcgcggggcccaggaggggagagcagggtcggagggaggcgaccaccgcgggaagagctagaggatgggagggaggggtgctgcggctgaagaggggatgtggactcctccaatgctagggagaagagggaggtgaagcgagataaaaggaaaggggcgaacagggagaagaggaaggagcctgcgacgcgatgggggaggggagggaggccgtgggaagcggccggggggcgcggggatgggaaggggccgggcgggcggcgtggtcacctcaggctgcggactccctccctggggagcggcgctgccggcgggcgggctccgcaactccccggctctctcgcccgccctcccgttctcctcgggcggcggcgggggccggtacggcacggctcacagcggcggctcttctgcgccgagcctcggatgttgcttctggggaggcggaggcagcggcagcggcagcggcccggcccgtacggtcaccatcgtccgcggcagcaggcgctcgcgggccgagccccttagcagccggcgccggcgtcggcggccatggcctcctgcgtttgctcctcccgcccccggcgctctgcggcggccgcggcccgacttccgcactctgcgcctgcgcgcggcccagccagcgcggcgcgcccctcccgcgcgcgcccgcgctcactcacaatcgcgcccgcggagtgctttccgcaccgcctccggtgcgtgggcgggagacataagcctagccaagcccatacagcccggctcgggtggctatggagaggcgtactgcagagacacctggacgcgcactgtgacaggcgccattctgacacacgtgctctctcactcccaaacaccacgggc

SEQ ID NO: 318482 - DNA, 4001 bp, Homo sapiens
tggccaaatggaggtggtataagggagagagaactgtgtttattccatgaaagcaacaattaagtctaagcacactgtccccttgtactatgtagttagcaaaatttaagcgaaatttttaatctttatgctccttaatgaaaaagacattgtaagagtaaaaagcattatcattcaggtagctatgtcatattacagaaatatattaaaatgattaatttattgcattcttgcctggaagaattcctgcttcatgtatgaggtgcttattaaagaggctggtgtcggtcctcagacacactcaaaaaagtgctaattaagtctattttatcaagaaagaaatcttgttgattttttcaatattattttttgaattttcgaagaaaaaatcttcactttgaaaaaccaaacacacaaaaaatgaaagagaggaagaaaaatggggtaataaaataccattgacaaaactaagagcaaaccctagggaaactggtaaattgttgatggttccagagagataaagtacaacataacacgtacacaattacgagataatttttcattacaataattaaaatgactattctcctaaatttttgattctttatgagaaaaaacttactcaaatattccgggaaacctaacagctcgcctcctcgattctacttattaaataaatatttagagtttctgccattgtcaccaaagtatctttgggctgccagtggcactacatttatacaagagacgaaagtctgacagataaaagacaacggaattttacttctttctacgactcaaatgataccactcatttgaaactgaagtgtttatgatctttcaagtatcacttttaggggtactataacaggagtctgaaaggaattgactctattttttaagaaaggttttaacaattaatgagtatataaaaatacaatgagcatcagaccgtccatctttgagagctaaattttgtttgagactaagagaccaactggaccaaggacaactctagtcagacaagttctaatcacagattccacaaggattgactgcttagttttgatataatcactttgcctcttgggtgcctcagctgtctggtctataaaatgggataatagtaacccgaccgcataatgctcctttgaagttaactaatgaatgctctcacagatacacttacaactgttagatgctacgaaaataatgagcactatctcgaaaaaaaacaaggtggaatatatgtgttagtgttcataacagcactagtaatttcccaccaaaggaccatctccccacctccgcccgatggatttcagagcttatgacctctgcctagcagaaagtcgtacactccggacccaaggctgcaacaaaagcgactgcgacgccgatactgaaatgggctagacaaaggaaagtggaaccgtgcagagggaatcggccgtggaaggggctgtgtggtccccacaagctccgaaattaaacaagacgcagttccccacctcagacctggagagggttcagtactggacccctggcacccaccccaccttccccggcctcctccgccacacctacagcgcctcgcctccaggactcagctttttcgaccctgtgtaattccaacctccaggtgggcgcgccccgaggccgctccgagagcctcaggtgcgaaagttaagccgcggccgcgtcacctgaggcccgccgggcgagaggcggccaggccagcggcaaccctagcccagccccttggcacgtccccgcctgggccaacgtgggggcccgggccaccgcggctgggtagggcccggccgaggccaggtccctccgagaggcgccgccgccgcgccccgcccgactccgacccgccggcctttacctgtatccacgtcccggagcctccggcttcgcgccccgtcccggcgctcccggccgccagcagccaggctctgaggactcgctgcggctccggcggcggcgatgccggttcggcgagacgggaagcgacaggagccaaaccccgcggaaagcgctcgagctgtgcctgcagccccgaccccgcggcctcggacgtggcgccccggcgctcgcccgccacagccagcggccctgctcgccccacgtctgcgggttcccacccgagccgcgcgtgggcggcgccgggctttgaccccgcgcaggcagacaagcgccgcgggccagacggaaccgtgggaaagtttttctcccttgtcatccccttaccagagccacagaaattatccctgtggtctcccttgtcctcactcggccttttctggagttaagagatccaagccaactactgggtctgttccctgctaaaatcttaggccggcgtcccatccacccatccccatgcctaggacttttaagctggcaacgctacctgggtttagttttcccttcgtatatcactatcttcgttgcttaccttcttgtgcctaaagttccaccgatgtgcaaggagattaaccactaaagtgcacctgacactactcttgacaaattgcagttgggaggtgagttgatgactggcggtaaatcaaaagtgcttatttagggagtgagggggccgcgtgcagtaaatgttgacttgcaggtgcctcatagatgatcaaacgactataaataagattcggaatataaaaagcaagttttattagttggcttgaggagagggaagggagctaggagggaacctcaaaaaaaatatacagctttgtttctctgctagatacagaaatttttatttgcctgaagtggcttacttggaaacttgtcctaagattagggctgtatgcagtgacttcccatctggaaatacaaggaaataaagaacaaaatgaaagacatcacgagaaaactacagaccaatataccttatgcatagtaacataaaaatcctcaacaaaatactagcaagccaaacccagcaacattttaaaaaattatacaacatgaccaagtaggatttatctcaggaatgcaagtttggtgtgacatacaaaattaatgtaacacactactttaaatagactaaatgtaaaaaccacatgatcatctcaaaagatgaaggaaaagcaattgacaaaatctaacaccctttcttgatataaacacttcaactaggaataaaaggaaacttcttcaacctaataaagagcctctgaaaaatccataattaacatcatacttaatcttgaaagaatgaacattttcacctaaaatcaggaataagacaaggatgtcaattgttgctacttctattcaacattatagtggaggcactagccagggcagttaggcaaggaaaggtggaatatctaacagctagtagaacaaagagaagaaagataattaccaaagaaaacgaggacaacagttctcagagctaaaggacagaagcacatgagctctcagtttaatggataaaaattttctataaccaagttgtgaaatttcaaaccacatgagtcagagagatcttaactttcatggaggaaaaaataggaggtgatttatgaagatttagaaatcagaatggcattggattctcaacagaaacataaataaaagataaattctgagaaaaaaatgatttccaattttgaaattgatgaagtatgaggtttaaaaagacattttcaaatatacaaaggtttaaatagtattttcatgcattctttctcaggaagcaattggaggatgtattctataacaaagtggttagacagagaatctgatagaaaagagaagtgaaggtgacacccgcaacaactgtggtaggcagaatggctcccccaaaatgtccacattctaatctctggatcctgcaaagatgttacagtatatagaaaagggactttactgatgtcataaaagtgactgacccaaatagggagactatttcggattacctacgtaggcccagcctaatcacatgaatctttaaaagcagaaaactttct

SEQ ID NO: 318483 - DNA, 4001 bp, Homo sapiens
acctcagctggtaagagtggatcctggttctttaagccctgccaggaacaggggtggcgtagaagggttacacccacttcatggctgagaaaactggagccgagagaaaggaagtaagttactctaggccacaagaccagagagaacggaattggtcctagttggcctcctaggcccaaactcccccaagccataactcctgtggcatcagtagctggaggaaatcacctaatcccgagtctccaagccatacaggaggctgggagagcactctctttcaggcacccatctttagctctgtagtacagagaagcaagcaaggcccagagttggagctagcaacttgctcaaggtcaaatagcaagggtggccaggtggcctcccctaacaactgctctgcccgtccacatctccatgctgtcctatcacggagctctgtgtgaacgggtcttgagagtcccgtcgctgagccccgtccgccccaggcacgcaatgcattttgcagttaacataaccccccacacccacccatgagagccggccaaccccttaagtccagtgccccaagcacctaccctgaccttggtctaagagccccagggatctgtttgcaggaagagacactcccttttgcagataaaaacaaagtcagaccctgggggcatgagcagactcagccaggaagagaagccccccttcctacttccccacaccccacccgaaacaagcaggctctgcccagcgcaagcagagcttcccaacgtgtggtgcctggaggccgctgagggccggaccaccagactaggagagaagactccctagtgaccttggtcaaggaaatccctttgcttctgagcgcctcagttggcacagctataaaatgggggtggaaatctttccttcccacagcgcccaaataaaaccagaagagtccagaagaaaccaggtggtcacactagtgggggaggaaaccagggtcctggggaagggggggctccccaacgcgggccaagtgcacgctgtggggctctgggaagcttacccagccacccctccccaggcatagtgctggggggccgaggcgcggacacagccccgagaggggcctccctcgtccgcttcctactcttttgcgccgctctcggagggacaccgggggcgggaggcgagactgcagcgcaggggccagaacgctgcgactttaagagccgaggatcccggaccatgtgctcggcgtgagacaaaagcaacaacaaaggaagtggcggccgcagggggaggggggcggctccttcctctccaaccgcagcgctcagctgcaggagaggggagatacggcccggccacggggggccttggggggggttcctgatccctggggtctcgctgcccgcagtctggaccgcccgtgattaacccctacggagccacctagatcacggcccccattcccaggggaggggaacagaaggtccatgggtgggggaataggaagttgggggccctggcaccgactcacctttggccgcccggccacacgttgactcctttgttcccgatctaggacggccaaactgggcagggggcgggggagggggggggtgcctgtctggatcctttaagagctcccgccctgcggaacaatgtgctcccctccccacccccgggtccgggggcagcccggctccttccggggcctctctctttgttgtccgcccgacggcgtctgcctcgcgaggcccacgcgcgatcagtctctctcggcccaggccctcagggagcgggaggcggcgcaggacgcagctgggtctgcgcggcagccggcggctggccctttaagaactgtccgcggcggcagcggaatgtaacaaaccccacatttgattcacaacattcgaagcggcggggtcgcgcgccagacgggagggggctcgcgggggcgcgccgggaggctccggcaaacagtagcccgctgcaagcccgcaggggccccgccccgcgccgggagctccgccctgagagccaatcactcgccgcgaccacgcacgtgactagtgggccaccatcttgaatttttttaacctcctcctcgcccccaccttcgcacttaaagggaccgcagccatagtcaaaagcaaggggcggggccgcatatcctgacataaagatggggagaccccagggtgggcaaaaccgatcggctgcaactcgaacttgctatgcaaactcgctaactactcgcgcctctgaggctcagtttccctgccgaagaaatgggtcccgccaggagaaccggcagtacggacttactgtgtcatggtcccctcctcggggacagggtgccgcctgagatactgaagtgcaatgggtctgacctctgacggggcgagagcggcccaagtggttatgctggctctaacaaccctgggccggccaccttcccggagatgacgtcacccccaagagctgcagcaccgcgctgacatcatggcccggccgccccacttctccttgtttatactacacggcgtctttaaaaagctggtacggcccagattgcccaacagaccaatggcggaccacccatgcaaacgagctaacgtctgccgggcaaggagattggccctgctcgcgctgacgtcacagagacatttaaccgccacgcccccagcgtggcggtggaggaagagaggcggggaacaggttgtagtttaaagcaaaagtgcaggcgctgggcgctctagctgctaggctgggcttgagagtttggtgtccccgcggagacctccctagccagggaaactgggaactaagcccagtgaagcgtctatactttagttttctattcctctcagcagctatgagacggagggattactatagccagttcattttacagatggggaaagtgagggccttcccttactccagatcacacaactagaagtgtggcggagcaggagtgtgaacctaatccaaagccgagcctcgttctcctttgcctcgaagcccacccacccgggcaaaatttatacaaaatggggtattacctccaccacaattatataagcagaaaatcagtaatttgctaaatatccaagagctggaacaggtcgaataatgaatattgggtgcatgcatataatcaataacgactcttgggcagttaccacaaagaggcagctggaggcgacacggggctatctccaagacagccataaacaaggcgccaatgcaaaatgttaacatctgttaacctgtgtggtgggccatggggcagggggatggggggctcattttctatgctgctttggtatatttcgtaatcctaaattttatataaaaattgaaaccaagatgctgaacagttctaacagtatgtatcaggtttctttaattggacatatgccacatctgcatatatttctggaagggtatacaggaaactgattaacaattgtccttagggagaactggaagggagaagttgggtcagtaggatagactattgtatatattgcacattagctcttttttaaaaaccctatgcattataacccactgaaatttttaaagaaagctattataaagactatgtcttaagtcttttaagccagaaaaccttttgttcccttagaatcagaaaccccctttcagcttggggaacagacatgtttatggcaatgtttagaccagcaatgatcgtatcactgtgcaacacaatgactgaagatggaactgagccggctgtcggcagatctctaagcaacacaagagcaaggtcatgatgcagtgctatcgatgctccctggaacgccaaactctatccatcacagttaaaaattacatgtgcatgagaataagtgtggctatacaaggttatgtctttacccagttccttatcatcaactgttcctttacctccaatgtctccttcaaccttttgttttccccaccacataaaagcaatttgaaaaccctccccatggccgggcacggtg

SEQ ID NO: 318484 - DNA, 4001 bp, Homo sapiens
cagagggagatttgaagatgctggccttgaaaatggaggaaggggacatgagccaaggcgtccaagaaatgcagctctagaagccagaaaaggcaaggaaacgagctgggttttcctgagaaccactggaaagagcaaagccctgtcaacaccttgattttagcctagtgaaactaatttggacttctggcctccagaactgcaagaatgtatgtctgtgttttttttttttttgagacggagtctcgctctgtcgcccgggccggactgcggactgcagtggcgcaatctcggctcactgcaagctccgcttcccgggttcacgccattctcctgcctcagcctcccgagtagctgggactacaggcgcccgccaccgcgcccggctaattttttgtatttttagtagagacggggtttcaccttgttagccaggatggtctcgatctcctgacctcatgatccacccgcctcggcctcccaaagtgctgggattacaggcgtgagccaccgcgcccggcccaaatgtatgtctgtgttttaagctgtcaagttttgtggtgatttgttacagcagccaaacgaaactaattcactttggttatagagtttaaagccagcaaaatttggctgttttttttctttttaaattagttttcttattaaaaaaaatacagatggggtcttgctgtgttacccaggctggtctcaaactcttgggctcaagtgatcctcccagcttggcctcccaaagtgctgggattacaggcatgaaccaccaagcccagccaaaatttgaaatgttgatgactaaaatatttaaattaaatttacacctgtgctgactcttgtcatcataaaagtgagtttttgttttacatctgtttattgaaaaggggcaaagagctctcctgtaaaaccaagaggatttcttttaatgcctctaagatctgttgacttgtaactttgagattatgaatgtctgttcctggcaagtgttggaatgtttgtggcaaaaaataaactgtgaagcttcatttgctggacagtttaccctgagcactctagggatgatgacctcagtatgaccacggtcgttccggttctaataaatttaaccagctctgggtatacatagctctgagaggactctctgcagatgaggaacttagctaaaatattcctctttgtaaagtcatttcacaaagtgactgcaaccgtgtaatttttttaacataatgtaaacacttttttgcccaatgcaattactttgttaagttttagtctatcttcatcataaacacttttaaacaattgagttgccattacgttgtaggtaagtgagcattttgcaatgatttcgggtctcatagtcgataaatcgaaatggttcctagataaaacactcaagtatagatgtcaccaatgctaaggggaaagttttgcctgatactcttaaggacgctgagtgccgcgtaaggcccctggtccgggaggagggctctctgggctcgtctggcttgggcatgtagaccggacagctccccgggccaagggcgcttaccccgcggaccaccgcagcacgtcggccggctgggtgcggatggcagccttggtgaattgcttcaggatgtccggcagctccgggggaatgtggatctgctgagcgcagaacatggtgtcgggaagcggcatcgctctccgcagaagggaccaggctggtgaatcgcggcgcgctgcgaggaagaagggcggctgtcggctacgacgcggtggacccgctagcagcgcggggcttgcggccagggccgcctcccatcccgttcccgaggttggggccggattcgcggggctcttacccgctcctccgcgggcttcgggagaaattcggaccaactgccactccgacaacaccctagaccctgcagttccctagcgccagccgccactacggacgcgctcggtatccaggcacccgggacgcgagcaggccccgcccctggagccgcgcacgcgcacgcggccctgagcgaggcggggctgctcccgggctggacaaggaggtgctggcgtagtccgactagcagcagccgctgctccccggtggttcagagccgcgcgagctgagcgtttcgcctacaaaagcatcttcggatcggtttcccaccgccgaatgtgagcggcgaactcacgaaggactccctcttccccttgctctggctgcgtgaggctgaggctaggggactcgggcctgctaggagggaagcgggttaagtgaaggggctgatcgcctgggcggcacgggccccgctgcgggacccgcctgcgcctggggccgctcctccaaacttctcgggcttcgaacttcgcacatgctgttccctggcctaagccatcccgtagtgaacctgagttcttaatttaaaaagccgcttagacagtgggcagtttccagctaaaacactattgtatttgttttcttacgataggttgcttgagccaatgtgactggctctaggaggaaataaatcacatctgtcaaaagagcctcgagtcgaaggataggagaaacctcgaatttggtgggtgctgaccaaggcaccatgcaaggggttaactttgctttagggggtgacctggctggctgctgcagttgccgttaacagccaccgaatggatgagactccagatccacctcctcctgcgttcctcaaaacaggaagatggagaactacggagagctacttcccagaggggccgatggcaagcactcccttcaaggaaactggggaagttgcccgattttgatcgtttccatccaaacacccaccagacaatatatacatacacatttctaaattaacagcattggcaaaaactgaaaatacttgtatttaaagttgatgacagtatgaaaacaagaaatccgtccgggcgcggtgggtcacgcctgtaaccccagcactgatcacaaggtcaggagttcgagactagcctggctaacatggtgaaacccccttctctacaaaaattggctgggcgtagtggcgcgtgcctgtattcccagctacttgggaggctgaggcaggagaatagcttgagcccgggaggtggaggttgccgtgagcagaaatggcaccactgcactccagcctgggcgacagagtaagactctgtccccgcccccctccacccaaaaaaagaaaaaaaaaaaaaggaatcttctatgttgttgagagggatgttaattagtacctttatggggcagtaatgtaacactaaaatttttcgatgatcgtgcaatattacttctgggaacttaccctacagaaatactataaaaagtaatatggacaaaaatcttcaccatataaattgggtaaatgtcttttggaaaacaaatcatggcctggccacacaatggtatgaaaagatgcccgtgtaaagtgaaaaaaagcatcttgtcaaacaatctgcatagtatgacacctttattgtgataaatgattctgtgaaggtatgtctggaagcacacaactaaactattaacagcagttacctctgggaaataggacagggatttcaggttttattttggccatagacacattattttgattctaaattcatcatttatttactaacttagcattactattgagtaccaaatatttgccagggaattgttctgggaatacagtaataattcagtttaaaaaaataaaatctttggagcttacattcaagtgggaaacaacatgcaaatataaacaacaaaggtaaaccatatagtatgtttaaaagtacaaaagagagccgggagtacaaaatacagcagggagatgagacaggaatgccccagtagctgcagctttagataagcctcagtgagaatgacacttcaggaaagaaatgaagaggctaaagagcctgaagaacatttgggtattgcaaatagtaagtgcaaaggcacgaaggcctgacctgttttggaggcaggg

SEQ ID NO: 318485 - DNA, 4001 bp, Homo sapiens
gggcctgcatttcccccaggcatcaatgggctaaaggtagatgattatatcttatatgtgaggcttgagctttccagtttgccattttctatccctacctatcccctataagtatttgcaattcccccattctagaacatgtctgatgggaaggatccaggagagagggggttgaaactgctgatcatacctctgaactactctttccactcttcctgtcacacttccggcttaactccacattttttcctccttaacatatccccaaaccttcaaagagtcccagtgtctcagatgatacaccaagcctcatcaccttatgtcatttcattctctaagacaatagctcttaactgagtgagggaagagttgattttgccccccagggagcatttggcaatatctggaaatatttttgcttgtcacaactgtgaagggagggagtgccactggcatctagtggggagaggccagggacgctgctaaacattctacaatgcacaggacagcccccaccccccaccccccacaacaattatccagtccaacatatcaatagagctgaggctaggaaaccctgctctaaaacgtgatctccatgagaacaagggcctcgtcaatcttgtcctagaacaatctctggtaagtgctccataaatattcctttgaggaatgaatctagcccctgcttatttcactcatatccaactcccttccctcctctcatgcattctaagctccaatcacagagaacagagggcttgtacgttctcacatgggccagtcttttagaaattatgaaagagtgactcgctgcatctttaccagttctcctgccaaatccaatgctatcacatggccagctcccacaaatctctgtccatcaatcccactacacccaaatacactaaaacactactctcactgcagcaccttcccctacagtctggttcaacaagccaccctgggcaacaacacttggcaaactagcagccagaaggttaaatcaaaagtatttttggtggggcacggtggctcacacttgtaatcccagtgctttgggaggctgaggtgggaggatcacttgaggccaggagttcagagaccagcctgggcaacatagcaagaccctatctctacaaaacaaacaaaaaagcaggtttttgcttggttgacatactgttttattaaattttactattactattaaataattaaatgctctaaagcaacgcaggcactctctggtggctctgaaccctatctctggcctaacacatctgaagggtcacactactttccagagtcctgaggcatgtgagtctgtgactgctccacgcatgacgttcttaggcaacggtgtccgagcgccactagcgccggagggagacgtacctggacctcgtcgtccttgcggatgggcatggagcggacattgtacttctgccgcagctccttggagagcggggatgacatgatcttcctgcgcacgtgtgagggggcattgaagtgacgtttgcggtttttactgcggtccgaggtaacgaagggattgaacttcatggtgaccctctacaaagggcggagagagacggaatgaaggggcgctcagtgggttacaggggcctgttctcgacccaagacactcctcatcccccaacaaaggctctacaggggaggtagcctctgaaaaggcaactgagggaggacagagagatgcgactagtctgactatcacataaagtgaggcgtgtgtggaggtcgcatgcccgtctaaaggggtcgtgggggagagggtagcactgggaccttgaggctgaggaaggaatgctagggttaggcaggaatgggtggtcgggaggtcactcaaagagagctgtggggtgacatgtgttcccgcgacacatagggcagggtctcacggggcggtagagttcactgtccgagaaaactccagcctccactcacccggctactagctgcctcagaccctgagtgcgcagggccggaagtgagtttccgtgccgcgcaagcgcagaaagacatcgaagccccatttccgtaggagcgaagtcgaatggcgcccccagcggcttggggtgggatctcagtgcctcattcctggcggccccgggagggcgatgccagtgagtacaagggcctgcttgtgtagggcctgcggtagaggcttactggtgttcttttttttttttttgagacggagtctcgctctgtcgcccagactggagtgcagtggcgcgagctcggctcactgcaagctccgcctcccgggttcacgccattctcctgcctcagcctcccgagtagctgggactacaggcgccccccaccacgcccggctaattttttgtatttttagtagagacggggtttcaccctgttagccaggatggtctcgatttcctgacctcgtgatccgcccgcctcggccttccaaagtgctgggattacaggcgtgagccgccgcgccctcctacctctacttttttctatctctgggactaaacggcggccggcggcgtgcctgcgggtttgtggccgccgccccgcccctctctcctagaccccgcccctctcatccagtccccgcccactccggccgctccgcgcccacctgtggccctcttggcccttctgcccgtgcctggccccgccgggtcgctcccgagctccgcgtttcgttcgccgacccctggaagactgcctggaggcccgggcgccacccaaccactggctaggccgacactttgcgcggaccctgggtgtaaaaggtccccgggtctctggtcccgacggagctgtgagggagatcaaccacgccccctccgtgggcaccgtggcggcagggaaggaaaagggctctgggtctcgactctcttcgggttaagaaccgacggggtttattctatgcaaggtgttattaactccaactctccctttcgttcattcattccatatatgttgaacgacaacttagtgccaaatgccggcatgctgaaactcagagagggaagatgtcttgcaagtacagcagccacacccaggcaggtcccgtgctctctcttagtttatcagtgttccctgacatgtagtggtgacattgttaaacacctgcgtttactaatactagattttttttttttttttttttgagatagagtttcgctcttgttccctgggctgcagtgcagtggcaccatctcggctcaccgcaacctccgcctcccaagttcaagcgattctcctgcctcagcctccccagtatctgggattacaggtatgcgccaccacgcccggctaattttgtatttttagtagagacggggtttctccatgttggtcaggctggtcttgaactcccgacctcaggtgattctcccgcctcggcctcccaaagtactgggattacaggcgtgagccactgcgcctggcctactaatactaggttttattccgggcccttcacagttaatgttggaggcctctggaggatggccacacctgggctatttgcagaagcctggacagcacagcaggcagagttaaagcagttaaggcagtatcagctgaagggccacccagctgtgcgtgtgcccaggctccaagaataaggaggttggggggcagtcctaagaaaggaagtcattacctatcggcaacccaggagcagacgctggcataacggcgcacacacagtaaaggtcagaggttcttcttagaatagtccttaggtgttagtcaaacccatgccctgccccaaggagttcattcattcattcactcattcattcactcactcactcactggttctgtttattcactcatttctctatcacatatccatttattgtcattcacccacttatttactcatacattcattcatttgctcatcaatttatttggtacctacatggagccaggtacaggtcttgattaaagagatctggggaggagtgctcccaagaagttcagagcc

SEQ ID NO: 318486 - DNA, 4001 bp, Homo sapiens
gcactggacaatcccaccacaaagaattatccagcccaaagtatcaatagctgagaattgctgaaatagaacatagtaacggaaggagcaccagctttatagttaagtctgcatcattctgaatcttagctgagatcttagatgggttaatctcttagaaactactctttaatatgcaggttctctcagctaagtctacggcggagctgagattctgcatttataactctaaggccaagacttgagtaacaagagcccaaggcaacagcagcaaccagggcaattttctacagcactcttgcccacagccactatactaaaggttgaaccaagcctgactccagaccttattcactactgtcttgacaaattttgacaccaattaaacctaataaatatcaacactttgggaccctagttcaaacaatgctcctgttatttaatttatactactgtttagtgaaaaaactactaataaaatccaaactaactgatgtcaaggttacagcggcagaagataaaagctttcaacatctggcctgagcccaggagttccgagattatcctgggtaacatgacaatatcccattctctacaataaatacaaaaattagctgggcatgtggcagcgcacacctgtagtcccgggtactcgggcggctgagatgagattacctgaggctggggagactgaggctgcactgagccgtgatcgtgccactacactcaagcctgggcaacatagtgaaaccctgcctcaaaaacaacaataaataaaaagcttccaacatctcatccccagtaaccatcagggtactgttatctttttacaagtaaacacgagggtttcattcaagcccactggaccaattatgatcgaacatacaaactgtacctgaatctgcggtatacaatttttaggtgcctcattcgaccagttccggtggtatttcgtcttttagccttggcactccagttatctaaaacataagttcagaaaagatttcaaacggtgttctcccacacaccttgtaggtgttgttaacacacgagttttatgccacctcatcggcatacagatgtacgagttttaagataggcaccaaataaagttcaaacctatgcccccacttaagtgcaatacaaacaaaagctaacacagttggcctgaaaaatgttacttacactttctcttgcgcttggcagggtagccacatttgccacaggtcgacttctgaaggtggtaggccttagagccacagcggcggcacaacgtgtgcgtcttattgcgacgctttccaaacgatgacgttcccttcgtctgcacattaaaggaataaatagttctgaaacctggcaacttctagatttactcgagttctccgggaaaccaattactgataaaatttaaaggcaatcgtaaagatcgaaactgcgggagaagcctctttccacgaatgccaagtcagagaccactacccgcatttcacgttacctaaaaccctccgcaagagttgcaatgttctgaaatgcaccttatctttacagactccggccagagagcatcaccaatgaattatttcattgttacacagagccaaacattcccaaactccttccctcggctcccaaccaaggctagagccgtgaaaggtctccaaaggttggaccgaggcaaaggacacaatgcggctctagcaccacaattacggcgggataggtcccccaggcaccagttagcagtcattcttctggctcttgagggccaccgcatgcctctttccagcccaccagttccccttatccggaatcttgccagccccccaagcacagcaaacagagaggcacaaaggacgaggatggaacgcgattcacaaacaccacagtcacaactcaccatctcgcttctgcggccgagaccagaaagaccggaagagaaggcacttccgctatatcacgctcagaagcttccgcccagggaagcacttcctgcggggcgcggtgcagcgttctcgagcgtccgtcgtcgtagtgtaggtggggtcaagaggaggatgcggtaccaggcagggccgatcgcgtttcagtgccggaaaggcgggcgggactcccagttttctggcgaccggatgggcgagtcttcgtcgggcctgcttagaccctgagggccgtttagattacagttttgcttttcgtgctgctgttgctggtgctactgctactactgatcggtttcgcacgttagcagtcagatctgttgctataccgtcgattactgtcttctaggcacatggagaacctggaatgcggggctggccctgcccaggggtacccgcaccgactgagcgtccccggcgtgtaatgaccgtgtgcgcctgggataatcccttttaggagaaagcaacttctccagcagcctcctcattccgatcccggaggcttttggccgacgctgactttccctgcgagaggtcgctaggagtacggaggcatggagctggagcttagaatataaagggaaaagcagacagtgattttgttgttgttgttactgtagtaaatcagaggcaagttatctgatcccatatttcattgtgccaaggaatcacacatggaacttgttcaatatagtttccaagggcctggcgccgtggcttacgcctgtaatcccagcactttgggaggctgaggcgggcggatctcttgagcccaggcgttggagaccagcctgggcaacatagggagacactgtcgctacaaaaaaaatacaaaaaattatccaggcgtggtggcgcgcgcctgccaacccagctactcagggggtggaggtggagggaggcttgaacccggaaggtggaggttgcagtgagccgagattgcgccattgcactccagcttggatgacggagtgagactctgtctcaaaaaaaactgagaaaactaaaaataaaatgttgccagagctgctttccgttctaggagggagaatctgttttctttcctttctcagcttctagagactgcccaaactccttggtttattgctcccttgcatcttcaaaaccagtgatactgtagttcccccccgtttctgtgggttaagttccaacaccctcagtggatgcctgaaaccacaataccaaaccctatatatactgttttttcggtacatgtgtacctgtgatgaagttaaatttatgaattaggcaccataaaagattaacaacaactaatagaacaatcataacagtatactgtaataaaagttatgtgaatgtggtcggtctctttttctcaaaatatcttattgtcctgtactcaactatttttaaaccatggttggccatggggtaacaaaccctgaaatcctgcaaagggaaaccttggataagtggagactactgtagtctttctcacattgcattactctttattctgcatctgtcttattctttttcctttccttttatttttatttgtagtagagacaaggtctcactgttgtccagactggtcttgaactcctgaatcttcctgtcttggtctctcaaagggttcgggtgccctgccatccttctcctacttttaaggccccttgtgattacattgactccatccaggtaacttccttatctcgagtttcgctaattagcaaccttaattccctctgcaattataattgtcctttgccacataacctaatttattcgtaggttgaggggattaataccttgttatctttggagacagccattattctgcctaccacggggactatgagaaatgaggtcagtgtagaaaaggtaggacaggtgtcaaccattaaggaaccaagcagtgtgacaggcattatgtcagtctctttactccagacattcccagaattgaagacaggagagaattatttttcctcctctctctagtgttcggtggttctttttggtgtatgtcaaaccatgtaaattttgccctgatcaagtaaacccttggctttctttaaa

SEQ ID NO: 318487 - DNA, 4001 bp, Homo sapiens
tcaaggttaacagacaaaacatttccagaatccctttcccctggctattaaatgaaaccctagtcctgcttcatgtccctgtcttcttccatccaatactctactgtattctctcatttctgcctcactaaaacttctttctccttgcacttgggggggtatcaactgtggccacatggcaaagtaccatgagaagtatcctttccccagaaactaccaacagctcagctcacagcacctacaagatagaagcctagggatctagcagcagatgcctgaaggctgcaccccaaaaggcaagaagaaacccaagaccaacagctacccatgtactggtaccattcctaacacccttcatggggcgagggagctgcttgattcctgcatgaactcctcagcttagaattcaagggacccttaccaacacagccctcaagcctctcatctcctgttttcctgtgctccacctgatcccttcaaaatgttcaaaaatgcaactgatttgactcccacaactatttagaactaaatctttgtcaccaacatcaaatatcaaaggcactaaaatatatccaaaaggcaggctaatggaaaagacccatctcagaaatctgatgggtcctgagactaaataactctaacctattatgaccttcataataattgcaatcatactgtcacaagatctaagggagagagaaactgacaggaggaaggcgggtgagaatgaatgagaaagtggaaggctaggataagactgcttccggcctaaagccccaggccttctgaacctcctggtgttcagaacaatttaacattttcagaagacactaacactaatcgatatcctgcagatggtgaagatagagagtgtctcagcctatggtcacagtaaagacagtggcaaaaccaaacatagaaacaacgtgtcctgactcccagcccagcactctctgcctcctgccaagatgcctctacaccacaaataactaccctagtctgtctcaggtgttcctagatctctcctctgccttccctatataaactttagttaagtgtgtgaccacagtaagtacttcaagtgtaagtcttgggtgtacgaagttaaatgttcctatcttcaaatcagaccaatgagcacgacccagtgcgttaactattgtaaggaacgcgccacaggagagaagcccaaagttctgcctcgagaagcatagaaaggctccagcatatctcaaatacgtaagcatgagtatgtttcggcatgatggccattcagtaaatgccaatttgcagtttctccgttcctaacatcccctaaagtaacgagcagagtggtcatcaggagtatataaacgcagggcaagcgcacagcaaacattggtgctgggccctgagcgcccagaacttgcaacgtgcccgactcagcaacggaaagaatcgcccagatttagaagcatccaacatagtgcgagagttttccctgctttccttctttgaatgatcactacaaacccatgggatcggtgctattgttattcctattttgcaaacgaggaaacaaacgagattaggcgtgggcctgcgatcaccaagaaaaaagtttggcgaggtagaggcgggagcccacgtctgtcccgggttccctcaactacgctgtgcagctcaaacgcggccgtggccgtggccgtattgcggggccgaggccttaaaaggctggacccgcactcacccttacttcacaagctcctccctgaaagcaaaacgggccttctgagaccaggaacgaactcaatcccgagttggccaggatccaggtgggccagccgcgcgtctcttgcccggcacctagctcggttcccacggaaagacccccgtctctcgtcccaagccccacagggtcccctcgccgcaggatgccccccgattgtcgcgcccgggcctcctacctgcacgtcgtctccagactccacaccggaaagagagagtgggagggggcggagcgacgggggtcacttccgtgtcccggaagtatacctctgaggtcacggggcgaggtcgggttccggaagacgccggcattattcctcccaaagagtttaagactcgtcataaggaaagacggtttattacttaagggagagcgaaaagaggtagagggctggttgtcgctgcgagcgggtcggcctaagcgacagtacgaagcggctacacccgcggggtgaggtgggcctgtattccatgatggcggtggtcgtggctagacagacttccgccatcctgactcccgccctggcagccttggagcggcagcgccccttgtgtggagcaggggaataacaacaacaaaacggccttaattaaagctagggtggcgccggcctgtggtcccagttactcaggaggctgaggatcgcttcgtccaagtagttcgaggccagcctaggcaacatagtcggggaaaacacaccgtaatcacttactttggcatattatataatgggcaaaataagaataaattattcaatatgtattttcagaccggtctgggctaaacagtttatatgcattgcttcatttactcctcaagacattatcaaataattttgatttccctcttacagataaaggatgttaactgagagcacacctttgcagaagggtttggaattctagcttcaaagccctcgtgtttaatagctacttccacatagccctctaataacaatatacatgtatatatttcgaccgaatcttgttctgtagccaaggctggagtgcagtggcgcaatctcggctgaccgcaacctctgcctcccaggttcaagctattctgcctcagcctcccaagtagctgggactacaggcgcgtgccaccacgcccgacaaattttttgtgtgtgtgtattagtagagacggggttttaccgtgttgactagggtggtctggattttctgacctcgtgatccacctgcctcggcctcccaaagtgctgggattacaggcgtgagccaccgtgcccagcctctaataacaatattgaaggaccttgaaggcttgggagaatatgtcggagctgtggggaagggccaagaagtgtacctcacagagctaggcaagcggtagatacattttatctatgtactatatgtaatatttatatggaatatatatagtatttttgtattacatactatataaatattataaatatattttaaatatataaatatatcccgtggctccagcctgggtgacacagcgagaccctgtctcaaaaaaaaaaaaaatttattctgctaaactgaaaaactcaacataccttctttttttttttgagacggagtctggctcttgttgcccaggctggagtgcagtgacgccatcttggctcactgcaagctccgcctcctgggttcaagtgattctcctgcctcatctcccgagtagctgggattacaggtgtgcgccaccacacccggctaatttttgtatttttagtagagacggggtttcaccatgttgtccaggctggtctcgaactcctgcctcaggtgatccacccgcctcggtctcccaaagggctggcattataggcgtgagccaatgcacccagcctcaacataccttctcgttgcattgcatttcttcgatgatgagtgacgtcagacatctctttacggattgttttaaccatttgcatctcttctgtgaaatgtctgtattttttgaaggagagggcttttttgttttaatgagcttcccagtatgttagcagagactggagtattgtggagtgagttccgctttgattaagagttgtattaaacagacctccaaacctcatgtggcttcatggagggagcaagccttgatcttatggctgaaggcagcccacacaatcacctcaggacaaatttttccacagggaagcctatctttatcccagaaaccatcaaagtcactgctttcaaactccactttatttaatcaacatatttat

SEQ ID NO: 318488 - DNA, 4001 bp, Homo sapiens
ccgtcattgggtacaaaggctgtgattttcttgccattcttgatcagctggacccttacacacttcctaatggcagaatttggctgtttggcttcaactcctctgaaatacaaaaggcacagcactgtgagctggctttctgaaaaagattatcttttcatattaactagagaactaatgagaaactgtttctatcttttcaatctaacctcaaatggctgagctgaagtcctgtgatgtcaacctagttttctgccagtcttaatttcattagcacaatgggggaaatttctagaccttttacagttataaaagtagactggagtggcagcgtgggcctgtagtcccaactacttgcgaggctgacgtgggaggatctatgcctagaacgtcaagatggccagcctgtgtgacaagggaccctatctcaaaaaaaaaaaaagaaaaaagaaaaaaggtatctgaggtaagaattagaaagtctgggccggacacagtggctcacgcctgtaattccagcactttcggaggccgaagcaggcattatcacctgaggtcaggagtttgagactagcctggtcaacatggtgaaaccccatcactactgaaaatacaaaatattagctggtgtggtagtgggcgcctgtaatcccagctacctgggaggctgaggcaggagaaatgcttgaacctgggaggctaaggttgcagggagtcttgcgctactgcacaccagcctgggtgacagagctagactgtctcaaaaaaaaaaaaaaaaaaaaaaaaagtctgggttaaaatggctctaccatcaaatatgatagaactatatgaaattattattttaaaaagtcaaaaccagtcaaatactggcagtttcatgtctcaatcttaggtgtatgacctcaattaattctgatgcaagtcacttctcttcaccttagttttatcaagtcgataaagttcaatagctgacacgtgccatttacttataacaactcccacagtaaaggtgtttgtgtcctttacttcatcattgctagtatcttctccaattccttccaggccaacgttaaattaaaaccttaactacctaattcccaaaaactaattttaccaacttttaaatagaacaaacgctttgcaattttaccccacaatgcccaaatgaatactactacacaaaaacctgcaattactttcaaaacaagaattcgtaagttcatgtctcgaattcctataataaactaaaacttgacgggagcaatggacttacactttttccagcacgattccttttgcatgagaagcacctccaaaagggttggcctttagggctgtgcccaaatgagctttcttatactgtttatcatgccacttctggtctcgtcggtgactacggagcttcctagcagtacgaagtccacgacacttgcctaaaaattaaatattttagttcttccgtaaaaacacgccatctacgtgtttcccatcttctaagacactcgcctcacctggaataaacccttaagccgattggctctcgtactatttattggcctgtgggccaaacatttggccttcaagttgccctgaaccgactaataaacgttcgaagagggctccggagaatgtgttctcccgaaggacgaggccccgctcgaatgcccgggaggaagcgctggcctccctgcgtccctcggtaccccgacctcggcggcctccacgcctcatgggccccttccgcgccggaccacgtgcctcctggagcggcgcttccccggccctcccccatggagcctctccatggcatcccccgccctactctattcgcatccgcccgcccgtccccaagaccccaagtcccgcttgcagcgcccttaaaccggccacaacagctcacccatcctgtcggcgccacgggcctgagcgaaagagagaagcaccgcaggaaggagccacaagccaccgcgagcaagccccgcccagccaaggaccccgcgccgctgtctgcgccgcgcctgacccgaggctggggtctctcctttgaaaacgacgcgtttgcatcactttcctgagccagaatctgcgtcttatttaatttgcaagaaattcagagatatctaatttgcatggttttttttccccctttttcttttgaatgctggagaccggaggaacatggactaccaatcccagaatgcgttttatgggacccgctcaccgcgcaggcgctcttgcccaagccactgagagcgggacgcggggctaggtcagagtaggaaggagtcgctgagctgaatctttgtggagtggagtggggcgagagtcctccgagtagtctggaaaattagacttctgagccttaattcatacttataagcagctagtaaattgtaaaatatagtgaagcaatgtagtgtagtaactaaaaccccaagctttggagccagattgggcctttaaccctaaagttgccgtttattttgactggcgagtcatttacttatagatttatttatttttatttttatttttttctgagacagggtctcactctgtcttctaggctgttgtgcagtggtgcgatcttggctcactacaacctccgcctcccgggttcaagcgattgtcccacctcagcctcctgagtagctgggattacaggcttccaccatcacgcctggctgatgtttgtattttcagtagagagggggtttcaccatgttggccaggctggtgtcgatctcctgacctcgagtgatccgcccgcctcggcctcccaatgtgctgggattacaggcgtgagccaccgcgcctggccatttaattaactctttaatactgtttctcctgtaagatgaactagctgtgagaggtttctgggatattggttcactcagcaaggatgtttaaaaatgccttctatgtgccagacgctgttgtaggtaccgggaatatggcggttaaattaagagggtgaaggtttctgctctgatacagtttatattctaaatgtgagaggacagaccagttagatagatgtaaattaaataattaaatagatgatttttacatactgtagagctatagagaaaatatagctggatgggtgatagtgacttggggatgggggtggctactctggatagggtagtttaaggtgacatctctgtgcagatgtagaatgggctagtgctttctaagaactgaaagatcagtgaagaaggggagcatagtgactgaggagtagtgtggcattagatggggtctgagagttacacaggaacatgtggagcctgtaggccatggtaaagcctttttctactcttctggtgatttaaagccattgtaaagttttgagcttgggagtaggtagcaaaataagatttatatttttatggggttactctggctgttgagaggagaaaaagacatgaatctgggaggccacttgggaaggtattgcaatagttcagatgagagatggtgatagcttggaccctcagtggagacagtaaaaagtggttgggtcagatacactgtttggtggtagaatgaacagaatttgctcaggactgtaggatgtgagagaggagttaattacagcactatgatttttgacctcagcacttgggtgagttgtagagttgtgagttgtgagttgggtgagttccaaagtgggaaatacgaggagaggagcaaatttcaaaggaggaaatgaagagttctggtttggatgtgttaagtttgaactgtcaaacatccagggatgtgaagtggacagttggatatatgataagaagctgaggagtaatcaatgaataaatagtattaaaactgtggctctagttgagatagcttaggtgatgactgtaggtagaacagagattagagtcctgagcacaccaaagtttagtggtacagaagagaaggcaggtgaagcaaaacagatgaagaaagagtggccaatgttacactctgttcaaagccaagtgaag

SEQ ID NO: 318489 - DNA, 4001 bp, Homo sapiens
aaaaaaaaaaaaaagaaagaaaaaaacagttgccttataggctcatctactatgaaattcttccccctttttttccttgatggcaaaatcaaggatttatttttttttgtttttttcagatcctcatcatctgtactgctgtaattggtcttcctgctcctaatactgtcacctccccaccattacaatctgttctctacatagctagaaattcttttaagaactgaagttaggacacatttctccctttaggatcttccaaagacactaagaataaaatgcaactcctcatctgacctttaaggacatatatggtccagcctctccctactcccctgacctcatgtcctcccctcctctccctcagcacacttagcacacctgttacctggagtctttctcaagctgaggaaggttggtcccactcagaacctttgcatctgttttaattaattaattaatttatttatttatttatttttgagatggaatctcaccctgtagccttggttggagtgcaatggtgcaatctcagctcactgcaacctccgcctcctgggttcaagagattctcctgcctcagccactcgagtagctgggattacaggcatgcgccaccacgcccggctaatttttgtgttgttagcagaggcagggtttcaccatgttggccagggtggtctccagctcctgagctcaagcgatccttccgtctcggcctcccaaggtgctgggattacaaggcgtgagccaccgcgcctggcctaataaggcttttaaatattgaatatgtgttgaatgatattttggatatacgggttccatgaaatatattattaacactaattttaaaacattttagcaaattaggttaacttttttttcttaatttttaaaagttttatccccacagaaaggcatctcatctaacacttttttttcttttttcttttttttttttttttttgagacggagtcttgctctgttgcccaagctggagtgcagtggcgcgatctcagctcactgcaacctccgcctcccgggatcacgccattctcctgcctcagcctcccgagtagctgggactacaggcgcccgctaccacgcccagctaattttttgtattttttttttttagtagagaccgggtttcaccgtgttagccaggatggtctcgatatcctgacctcgtgatccgcccgccttggcctcccaaagtgctgggattacaggcgtgagccaccgcgcccagcctcatctaacgcttttaaagtaacctggctaccagaaactttaaaattgcctatatagcttgcatgctatttctattggccagcgctgctctaggacgtcgcttctgaatacaggaaccttgcctgttctgtacactgctggcatttcagcatctagaaggatgtctggcgctgatgaaaaaatgctgagcaaacacccagcccgaacttccacgctcccaaacgccccctcaggctcacctttcagcccatgtttgaggcagtgctccatcactacaaagaactgctgcaagggggcatggtccgcatccaggctgcggcccaggctcagagccgactggagcaacaccttgatgctgagtttcatcatgtgcatcaggttggcacgctcctccatcatctggcacttagaagctgtggggcaggagcagggatagcttcgttagtggactgagcgtggggaggtcagactccgggcaacggtgagaagacgggtcaggcaggaggccaggcggtctgcttagggaacggacgtgctggcgggcgggcaaccgggattcgcaggtaagtagtccctgatccctagaggccacagccccctacctggacggcggggccttgggtcagaagagccactgggcctcctgctccagaggcctctcccagacggctccgcgcgttgctacggcgacggctttagcaagactcgccgcgtttggcttctcccgcaaccccggttccatttttgaccaatggaagggcgctacctacaggaagccctgccccaagctcttagagggcgtgctgggaaagcgtcccgcccccaaacattcctattgggcgagtccagctcaaggcctctcctacggagctggtgggcgccattttgcaccctctgtcccggacggaggaggatgcgcaccccgcccagaaggcttttccagccttctctcttgccggatagtgccagccgggtgcctgcagggaagcatcttcccctcagctccaggctcaaattcttgttgccgatctttcgtccgctactagtggacaattttaggttttacgcacactttgttttttggtaaggaaaaccgttggagtcaaatgaattcagagagttccatttcaactcccattatcttgtcgcattgccttgagggtgtaataaagactgtgtgcaattatcatcagatatctatacgtgctggccaaatgctctctgaaacccagtaagctggtatcctagaaactaaaagtttagatcccaaagtaagagtcctggcaggaaagtcccaggtgcgaagcgcggccctcacccgggcgcgcgcgcgcgtttacattgtcttggaaatatttgccaattggaatgggggcgggggatcgtattgtttttggtttgcagctgtccaattactactgaggttaaataacttctgtttattctctgctagtatttcttctgtgaattgcttgctcaattgactttcgtgttgaattgcttgcctttgtcttactgacctgtatattttggatactaatcctttacctgttttatttcaccagcattgattaatatggacaattaaagagcatatttatacgtactatatttttatatagttaattacagttaaatctgaacgataatattatggccgtgaacttgtagtaaaggtcttaaataaatactgagacatcctgggactaaaaattcaaaattatctcagcaaaacccaagaaggtagggggagagctgctgggcaagaagaaacagcctaagcatttcaccttggttgtggagagggttaaaagtggcttaagtaaagcatttcgttgggggtggtataatttttttttttttttgagatgttgtttcactcttgttgcccaagctggagtgcaatggcgccatctcggctcactgcaaccttcgcctcctgagctcaagcaattctcttgtttcagactcccgagtagctgggattacaggcatgcgccaccacgcctggctaattttgtatttttagtagagacggggtttctccattttggtcaggctggtctcgaacttccaacctcaggtgatccgcccgccttggcatcccaaagtgctaggattacaggcgtgagccaccatgtctggccagtataattatttttatatttcgagagaagcctatgtattatatttataaattttaaaactgtaatggatgattggcaaaggaaataaaacttgtaaaacttcatcaagagaagggagaaactctgaagacagcaataaccataaaagcaatttgtaaagatttatctttaaagaagacaccaagcccagttctatcatctagtggtcttgaaattggaatacatatacagcagtcttgccaaagctaggtatgcccagatgttttaaggaactcaatttccagattttcaagtttcacaggcactctttctcctccctctaaagaagggcaactcactccataacctgtcttcctcttgatacggtgacctggggtgccctaggttccatacaccaaatggaggtggtgtcgcccttgatgattaagtaatcaaaaacatgaagaccagccttttactgctttatggtattcagttaagcttggtcttggggcagaggggtggtctctaaccctctgcttgggtgtcctaaatttagaaaattaaatttttctccctacaaatctatgtaattatgttcaaccagtcaatattcacaa

SEQ ID NO: 318490 - DNA, 4001 bp, Homo sapiens
gctagagggcagtagattcccggcctgcccaggctctcatcatcctctaatgctattttccactgccaggatctcaaaacgagtcagcctttcaactttactcagtaattattcttgaccactgaaaatctcacaattcactacctggggtcagtgcatctacagcaaaggtaccagtggatggggaggaatcaggaagcctcgagtgtgtgctatgatgctccttggaaggcaccacaacctttcctcagctctgtcccagcattttctatgaagttggcaatgttctattatgtgctatctcatacagtagccactggccacacacaggctactgagcatttaaaatgtggccgctgtaatcgaggaacaagtttttttttttttttttttttttgagacagagtctcgctctgtcacccaggctggagtgcagtggcgcgatctcggctcactgcaacctctgcctcccaggttcaagcgattctcctgcctcagcctcctgagtagctgggactacaggtgcatgccaacacacccagctaattttttgtatttttagtagagacggggtttcaccatgttggccaggatggtctcgatctcttgacctcgtgatccacccgcttcggcctcccaaagtgctgggattacaggcgtgagccaccgctcccggccgaggaactcaatttttaattcaatttaaaagtactgaatttcaattgattcagttagaaattgaggaatccggccgggcgcggtggctcaagcctgtagtcccagtactttacgaggccgaggcaggtgtatcacaaggtcaggagttcaagaccagcctggccaagatggtgaaaccccgtttctactaaaaatatgggaggggggtgggggcggggaacttagccgagcgtggtggtgggcacctgtaatcccagctactcgggaggctgaggcgggagggaggatcgcttgaacccgggaggcagagggtgcagtgagccgagatcgcaccactgcactccagcctgggcgacagagcaagacccggtctcaaaaaaataaaaataaataaaaacaaaaacacacacacaaaaacatatgcgtgctgttgtattggatagcacagctctggatgtctggcgttagagggctaagttacttaactcttactatcactgatatgctggcactctgttcattacaagggctgaaaaggtctttaagagatcatcgggtgactttaaaatccccatctcacaggcagaggtgagcggaggcgccgctggtccgctgcgcgcagggcccacgccctcccaacacccgccggcgctccactcccgcactgaacggctgaaaagcagaacagtgctggctccgtttcgtgtgtggagttactacagagttccgaagcccggacgcgcacacgtccttcacctagttagtgggagagcatagaggcgcgggtgcgggagcgcgctcaggcacgcggggctgcggggggcggtctcggctgggccgccggagtaaagacccaggcgcagccaggcgccgcccgcccgccaacagctcgcgtaacctcccggaacggccagtgccctcccagcccggcccccaccgcgcccgcgccggcggccagcggggacacgcgagtccgccgcgggacagacccggcccgagcctacctgcgcgcgccgtgccgtccccgctgtccccgccgcccagccccgcggccgcgcgcagcgcgctcccgcagctcgccgacaggttcccggtggccctgcgtgccagggtcaggatgggcgccgaccagccctcggccgcccgcggcctcgttgcgctccgcaggtcgcctgggccgggcagctggcttcggtccacgatctcaaactcttctcccggctcaagcgctgacccgggccccggccccggctccagctccggctccagctcccgcccccgcccagcagcgcagccgccttcccggtcggccatcttggccgtgtcatgtgacccagcgggcgggcgggcgcggggtgggggcgggcgggcatcgcctttgccttaggtgggggagatttttctccctcttcaccgcctcgccttccctctgtttcgaaaggttcgggaaagtccaagtcataacataaaaagtgtgcgtattcccggccgccggcaggacctgttcgcggggaagttcctcttgaactttctccgaggacagttgtgcaccctgcccggcgcttcacggggttccctggccgtcgttgtctttgtgacaccatttcctcttttaaattttcatttcatggtctatattttccacttcgtcatttttctgtagcactcattagaacaagccccgaaagggcgactaaggaaacgcacaggcgaggcaggaaagcaggaatttttttttttttttaatctaatgactatgacggcttggcaagaaagagtgcacgatagtggactggaaatcagaggtggcttctcctattgattagttaagtgggataacaaaaaccgacctcattattaaataagatttgcagtaaggaccacatggcagatgttagcgattgtgactactatctctggtatccaactgtgtggcctgggtaagtcactatacactcagtctgtttcttcacttggaaaagaaaggaatttgagtaagtacaaaggaaaattttggccgggcgcggtggctcacgcctgtaatcccagcacttcggaaggcccaggcgggcctttagtaggacgaaaccccgtctctactaaaataccaaaacaacaacaacaacaacaacaaaaaaccagccagatgtcgtggcgggacagctctactcctagctccttggggggctgagagtgggaggatcgcttgagcccgggaggtcgatcccacagtgagcggagatcatggccactgcactccaggctgggcgacaaagtgagaccctgtctcagaaaaaacactaaaatttactagcacttaacactttgcaaagtgaggcaacatgagccacaccaaaccagcagagctgttttgattcccagaatgtttacaaatcttaaaacttgttgccaatatttagaaatcaaaagatttcacataagaatctggattttagctttctctggaatcactggaatatttggtaactcatggcatattcccagatggcaacaaactgttgggaataaactgtgctgcccctttagacgcccagctgctccctggacctgtcttggtccagcccacttcactaggttgcatgatatgtctggtccctgaaaggccagttctcagtgaagggataccacttcatctaggagtgttttgggaatttgtggagttggtgtttgagttgtgtaatgactgagggcatactaccagtcttttttgtttgtttgttttcgtacggagtctcgctcagtcgcccaggctggagtgcagtggcgcgatctcggttcactgcaagctccacctcccgggttcacgccattctcctgcctcagcctcccgagtagctgggactacaggtgcccgccaccacgcccggctaatttttttttttttttgtatttttagtagaaacggggtttcaccgtgttagccaggatggtcttgatctcctgacctcgtgatccgccagcctcggcctcccaaagtgctgggattagaggcgtgagccaccacgcccggcctggtcttgtttgtttgtttgtttttgaggccaagtcctgctctgtcaccaagctggagtgcagtggcgcaatctcggctcactgtaacctctgcctaccgggttcaagcgattttcctgcctcagcctcccaagtagctgggactgcaggggcgtggcgccacacttggctaatttttgtacttttagtagagacggggtttcaccatgttcgccaggatagtctcgatctctcgacctcgtgattcccccgcctcggcctctcaaagtgttgagattacaggcgtgagc

SEQ ID NO: 318491 - DNA, 4001 bp, Homo sapiens
cgtggggctcgtctctatccctttgccaatttcctctctccacccgatttcgaagcatctcctctccagagaaggtcctcggcctatccacaggctcctcctccatgctctgcccatcctcctcccacctacttcttaaatggggccccccccagccctccttcatcctttcacctctttaccgcccggggaaggccaccttgccccgacggcgcgccctgggcctgaggcctgcgtcagtaggcagagctgctgggcagcaggtcgtagcgccccccgctgtagaccacgacgccaggtgggtagtagagcaggtccggctccgcggccgcgtggggcggcgccggggcctgcagcccctgatcctcgtgctccggcttggtagtggcggtgaaggggcgcatgctggtgatcgaaggagacgcgatgcgccacagcaggctcttgagcgccttgcggaactcgcggcgcacgaggcagtagaggacggggttgaggcagctgttggagtgcgctaggcacacgctcacagggaacgcgtatacctggcacaggaaatactcctggctgaagggcaccgcgttgaacttgatgaggatgctccaggtggtgagcgcctggttgggcagccaacacaggaagaaggacaggacaacgatggtcactgatttggtgaccttcgacagtctccgggcgctggctccggtcgggcgtcctccggctaccgcggcccctcctttggtccccgccgcgcggcggtcggcgatgaagcgcaccagcagcaggtagcacaagataatgatgcccagcggcagcacgaagcccagcagcaccttctgcgagtggtagaggcccagccagaactgcctgtcgcggcccagcaacttgtccgggaaacgcaccaggcacagctcctcgcccatcaccttgaccgtggtggagaaaatggcactgggcagcgaggccagcgcggccaaagcccagatccacacacacagcgccttggccgagaagcagcagctgtcccccaggctccggccgcagcagtcgccccggccgtgtcctcgggtccggtggctcttcagagccgaggccaccgaatggtagcgcgtcacactcatggcagtgaggaagaacacgctggcgtacatgttcatggacgtcaccatggacacgatcttacacatggccttgccgaagggccatttgaagtcaagagcgttctccaccgcccagaagggcagggtgagcacaaactgaaagtccgtcagcgccaggttggtgacgaagaggttgatagaggacttgcgccagccctgcatgctcttcatcaggtagagaaccagcaggttgcccgccaaccccagggcgcacaccacccagtacaccacgctgatgagaatccgcacccgggcctctgtgtccgcgctctctgccccgccgctgcccgggggatgtcctggcggcgcgccgtccggcaactccagccccagctcccaccacaagtccggaagctgcagcgacgcgttaccactcgtgttggccgcctccagaaggtccgggaccagactgaagagttctgctagcttgtccccgcctgctgccttattcatggtggctatcgtggctgcatcggccatctgcatgcgcaggtacctctaggtcatgttctgggggacaagacctaagataacacggtttaccccagttttgttgccaggctagcctgcgggacgtgcgtgggagctttcaaagcagctactgaagagagagcccaggaactgggtactaagcgcgtcctggcgcgcagcgaacgccctggacgcaggagttgagctcagcggctgctttggagcagagttgaggagtgcagcccgtaaggcaagcactcggcgtccaagggttctcaggccaagctcggagtccctaggtccttatgtacaacgcagacttcccctctccgtgtcccgcggtcactggggcactggcgcataactcccccagccgctcaattgtgcgatttggggccgctcgctccctttcaaatacctttatccgtttcctctgggactgcttggatgaggtttccgtccttggagagaaagagatcgtagagttccatccaccacgctcagcttcctggaggtcagtgggtgtctgcgtctctccgcggttgtcaactccgggtgggttgccagcggctctcaccagttacggtggcacttgcacggccaaggcggcgggccccaaggagcatgcgtaatcccggggcgccgcgaggggcgctttccgaggtgctgaacccagccgcgcccgcgccgcgagggagagttgagctgcaggcaaagcccacccgccactccagttttcctctccagagtttcagcaggaagggtcttaagagtttattttacagctgcaggagaaagtcggctttgacgtgagtttcttcttcctttcttattcccaaacattatgattagaagttttttttttctttcttcctcactcccacttttcaccggaattattccatttggtgaggaattgttctaaaaatatgagctatcctgcttactttccttcttgaaagtaataacagtggcctcttttcatgctcaaatgagataatgggtacttattggatacacaaaggacagctccacctcccctctttaattagctgaccacttacgcagtacctgtgtttgtcaggattttcaaagggtcttcacatggcagaagtctgggctcaagggttgcccctactttaatgtattctgagaggtgacacaaaaacagagcaaacaactgatggtcctacttcacagaaattaaatgccctaagcccaaagcgcttcaacaaattgtttgatcacatacaggccacagtctctttacctagatgcaaatagaatagaggataccactgggctgatcgtgaaccaccagccctcctatttccattactgttagcatcaggactctttttcaggcgtttttcagaccaatggaagtacattctaaggactcttccaagggaatgagtggaaaccacttgaattacttctcaagcttcagtctacataaatgccaggtcaatcgctctggtgtaaattacacttttaggatttactttaaaattttgaaatgttttcctcttggtctgggactaaactgaaaccaaagtttcttaagcataattgtcctcactcctggagtactacagaactcccagctttacttaaggagataaagaggatgcaaccttcaagctgaggagataagaaacagaaaaagaaagaaagagaaaaacgaaaaagaaagaaagaaagaaagaaagaaagaaagaaagaaagaaagaaaagaaaagaaagagaaaaaggaaaaaagaaaaaaaaagaaacaagaaacaatcttgattccaaaggacttttagccctgaagagcacacaccttgctacggatgctgcacagctccgtcttcccactagagggagtaagggctttagtaaaaacctagccaaacacaaacatctcctttgatcagttcttacctggagatcacccctgccctgaggattcctcccaaagcacaggttatttctatggatgactattatcctggttttagtagcctcactttcacactcagttttgactttatttttaactggttatttctccatcaattttctctctctcttcatctatgtctctatttctcttttctaatatttcaaggggctgttgaaacacaagaaaagctggggcataccctgaaagctctctgctgttaaatttttggtatgttcacaccaatgacctccatctaacacatacacagcttctcagtgcttctaggcacacccaggaatatatctacttggtctgctccaaatcacatgtacatattcatactttatgaaaaaattataggggcctgattcaattcatctcacattcattggccacttactcttgccaggcactgagatagg

SEQ ID NO: 318492 - DNA, 4001 bp, Homo sapiens
caagacaaacaaacaaaacccaccaaaacccaacagacaaacataagactgcaggacaactcaaacaggaaattcagcgaatgctggccagcttgtgacttctgctttctgctgtgtactttatatttaacctcattccttcctctactttacatctcgttcttttctgtctgctttctctcctacttaatttataatatcttactctactttgtgttatcttcatatgtcaccttaaatcctacctaggacccaggagagtataaataaactgaccacaggacatctccacttaggtaacacatcagagtctcagattccaaaccacagcaaactgattttggcattttccaatcccctgctcccttcttcctctaccccagaggggatcccctttttttgctgctccagtcaacagcaataccctcattcacccaactgcatggccagaaacctgagtatgatgctattcctggcccctctctctctctcatgcaatcagttgccaggttgtatctcctcactctctgttccttcctcctcaaccctagcgccatagttcaggcccttgtcacttctggcctgaattactgcatgagatcccaactcacctcctgcacctactttgctcttcttcaaaattagcctcccctgcctgctgggaggcacacctgagctcctcacttaacctcctggacaggccctgccatcccctggctaaatctaaactccccgcagtgtgcccacccatcccctctgcaccatctgtgccgcacacgtggcactgccactgtgctgcccattcctctgctcaggtgccagtcctccagggaagcctccgatgcccctcagctcctgggagcactccgcctctgggtgcccctgtatcacctcatgctttcctctagacctgcaccggcactgggttgaaggaaaataatagtagccaacgttaattagcacatactctgggccaagcacccttctaggcagtttaaatgtattcctttatgtcatcctcaaaaatcccatgaggaggctggggagcggtggctcatgcctgtaatcgcagcactttgggaagccaagtgggaggtggaggttgcagtgagctgagatcacaccactgcactccagcctgggtgacagagtgaaactccatctcagaaaaaaacaaaaaacaaaaaaaactttatttctctgtctaacccaaattttgtgtcctctcaccaacttctccccagcccctccatccctcttccctctcttcttctgtaggctgagagcagccattccagggctgattgtccaggcatgcccagcactggccagtgtgaagaggaggagcatagaccactgctgtgacttcctgggagtgggcttacactggcatctgtgcaggcttcaggaaaaagaagcgaaatcacggcgtggatctaaggggccaagcctcaccttgaaggttcttctgggtctttggcctggacaagaacatgaaacttgaatttctcaaggtgaggtgaaggccaagcaggaagccaggatggtcaccaggaaaggagccagaatgaactaagtgttctttagggcaaggaacttaccagaacctctacgctccgagctatgatcaggctgctctctccctctctctctctctctctctctcccccacccccccgacccctttgtggccaaggtaaggccacattttagagtggaagccccaaggcaaccccccacctcacaacctccactcttgttgccctctctaatccaacgcctgccaggctcacacttcaaccactagactgaaaagcaagaatcttccacaaaaataatcttttaccttagacctgcttcctgtgcagatgagataaggagaatgctcttgtctgaatttctgggcgtggagattagcaagccgttttcctcccagcagctagagcgagcaagaggccctgctgtgagtagtgctgttctgagtctgcgtggtccagactcaccacactgcaggcacgtttcttcatcaggtgggaaagcaggaagaggtttaatttaggacctaaagctggtatattgctgagtaaaagaaatgggaaggcaccaagtctctaacgaaattgcgctgggtgcagtggctcatgcctctaatcccagcactttgagaggctgaggtgggtggatcacttgcggtcaggagtttgagaccagcctggtcaacgtggcgaaaccccatctctactaaaaatataaaaattagccaggcatggtggcgggcgcctgtaattccagctactcgtgaggctgaagcaggagaacgcttgaacctgagaggcagaggttgtagtgagctgagctcgccgctgccctccagactaggtgacagagccagattccgtctcaaaaaaacaaaaaaaaaagaaaaagaaactgcttgtgatccaacactcccccactggtgcctcctcatggtgaagagcaattactctggcaccagagtcttggggttcaaatccttacttcaccagtatgtgactggaaaagctacctaacctgcctgctgaagcttcatggctaataattcctcacagcatttctttttttcttttttttttttgagacagagtcttgctctgtcacccaggctggagtgcagtggcatcatctcagctcactgcaacctccacctccctggttcaagcttctgcctcagcctcccaagtagctgagattacaagcgcccaccactaagcctggctaatttttgtattttcagtagagatggggtttcaccatgttggtgaggctggtcttgaattcctgacctcaagtgatccgcccaccttggcctcccaatgtgctgggattataggcgtgagacactgcgcctggcccaggaggaataagtttaagagctcccattgtacagcatgctatctatagttaataacaatatatcgtgtatcgaaaattgctaagacagtagatgttaagtgtctttatcacccccaaaaaatgacaagtatatggggcaattaagtcaaatagcttgacttaataattccacaatgtatacataaattaaaacatcaagctgtatttgtataccataatatatacaatttttacttgtcaattaaataaataaatacacagaaaagggcagagacaggtcaagaagcacagcactcagtacagaaatacagataacaatatattgaaagaaagaattcaaagataaattttttttttttttttttggagacagagtcttgctccattgcctagggtagagtacagagacacaatcacagctctctgcaacctcaacctcccaggctcaagtgatcctcccacttcagcctcccaaatagctaggactgcagggtatgccaccacaacctggctaatacttgtatttttttgtagagatggggtttcaccatgttgcttgcccagtctagtcttgaactcctgggctcaagtgatcctcccagcctggcttcccagagtgctgggattacaggcaccagccaccgcacccggccaaagatatgttctgaagattgaaacgtctctctttccaaaataactactcttggccaggtatggtggtgtgcgcctgtaatcccagctactcgggaggctgaggcaggagaattgtttgaatccgggaggcagaggttgcagtgagccaagattgttccactgcactccagcctgggcaagagtgagactccgtctcaaaaaacaaacaaaacccaaaaacctcttgactgggtgctgtgcctcaagcctgtaatcccagcactttgggaggcagaggtgggaggatcacttgagcccaagagttcaacacagcctgggcaacatagggagacaccatctctacaaatttttttttaaaaattagctgggcatggtggtgcacacctgtggttccagctactcaggaggctggggttgagagtatcacttcagcccaggagtttgaggctgca

SEQ ID NO: 318493 - DNA, 4001 bp, Homo sapiens
aaaaagaaaagaaaaaggacaggggagattttttatttattagagacttaatgaagacttatgtatagggcttggaagtaaattagataatatctttaagaaattaaccagcctcttaggtgctgtgtgtacctgacaccctcacttcctatctctgggcctgtttcaaccctaaaatcagaggggaaacgtgcactccctttcagtttaacaagcagtctctgatttcctccaactgtggagaaattctgattctagaagagaatggatgttaaccacctaagctcttagctagtctacctgaatattaaatatccccttaactcatttccaattcctaatcatgaagcaatcacttaaggcttgtagcaacagatgtcaaactaaaaagttcttaattggttgacaataggcacagcttcagaattgttaactagaagtggtgaagtcacacgggaggagtttcctataataagccacaaagagcagggcaatccgatttaaatttaaatatccacccccttatttcaaaagaaactaccactaagaaaattgatttcttttcttcccccctccagtcacatcgactgcaagagccatttctcaagacctggccttggccttatttctgccacatcctagaaaaacccattcccacagctgcctgcgaagcagctagctcggtgaccctctgctgataccgaggatgcgggagccagggaagtaactgccacctttctctgtctgaaggaataacagggttcctagaaggagagagaagttggaaaagagccgggtatcttcatcactccccgctccgattcttgctccttcaagggccaacaaaactaacccacctctccctgctctaaagtctaaaccaataaaacaagttggaaactgctgtccaatctttccaggcagcaggagtcctgaagcccccgcccccatcctcccggatctgggtagaatcacagtcagagcatgtcagcgctggagcggcctttgaaatgcggagtccaactcagttctgcagagccggggcggcgaggcccacggcggggagtgcccggggagtcccgactggagcccagggcagcggacggagagctgggggcgccggggcccagacgcgagcgggggcggactcacgctcttgtcgatgtccagcttgagtttcttctgcgagatgctcttctggaccctcttgctgaaggaggcgttgcccgcgggccggacgcagcgctcgccgtcctcgatgaggcagcagctctggccgtagcccggggcggcggcagctggggcggcggggggcccttcgcggctgtcctcctccgtgctgaagccgttcatctccccgccccgggccggtccctctgggggagggtccccggtaggccactccgcggccgcgcttgccgcggggcaggtcgctgagacccccgcagccgagggtcccagagtccgtctccagcccgggcgctgccctgccccgcgtccgagaggcccggctccctcggcccccggccctccgcctccggaagcccccttcctcccggctcgaggccccggggtcggctcccgcggctcgcagggccccgccgggggtcacccggaggagccttctgccgggggcccagaaccgtaaccctgcagcgggggtgtccgggagggcgtcccaggaaacagccgctccccaaggactccgggcctgggttgccagggggtttcgaaggcccctgccggctcccgccttctttcggcagcggggcaaactcgctgccgggcagctcccccggggtggcgcggcctcctcgcgcggggcccggcctcgaacccgcggcacccgggccccgcggctcgtccggcccactccacccctgcagccactcggctgcgccccgagtcccgcggcagcccctgggccgcccggccgccgcccgccgaacgctccgcaccacaacagttcgctccccccgcccttcgcgggacagcggaagtcccgccttcacgcgaccattggtctcatttgctctctgggcggggctgccgccgccgctggcgcgtcccattgggcgtcgccgccgccagtctccggcgccaggctacttcctggactctgctgggatgggttcaaagtagagaaagtggaagaggaaagagttaccccagcgagaaccgggaaccgggctgcagactctccggcccgggggagggatggtgagcaggggcctggctggaccgagggccagactccaggaacagaggaacacattcggggacagacagtagagacgcggacggggacgctgagggacagacttggaggaggggcatatgaggggacctaaagaggatagaggtgctatcaggagaggggcggactaataaaatgaaagggccagggccagaggactcgcggatccgtgggaggaagggtgggtgaaataggacggaaagccagtcatggcgggaaagacagagggacaaccccatacagatacgtggaaagacatgcggaggaggtgatggggggatcttgcaaggcagtcgcaatattgggggtagccgataccttccagagtgtggagagtgggactggcttggacggcgcggaaagaaaaggagagggggaaaggagaccccgaggggtttgggcgacccctccactgggaagaatgggaagtccgaatgaggtctggagggtggactaggtgagccgcgggcaagagaaagggcttcaggggagatgaagtgaaggctgggagtggggcccaggggccaatctcggaatctagatggggaagggctgcggtgtcttgggctctccctggagctccaagctgtagttctattgctttgagtccccgggtctaccggcgaagcgactgcgccctgccaagaccctgcgcttggtttcggcgcccagggcaccacctcccctccaggaggggccgtaggatatgctctggtccagcacttcagtcatgccactctccaactgcgcagcatggggactgatgaggtccgaaaggcgatgggaccagcccagggtcgtgtaattatgtagggctgggcagcgttttatgggcagggaagaggggaggctgtgttaggtgataggtaagcaagtgttagtactagagggcatagaaggagcttcgggtttgtgtcctgttgtaaaagggaaagctaccagtttccatgtttagaagcaggtggctggtgatcttaagttttgctcagtggccataaatgcatttgtagcatctgaactggtaatttcacacgtgggacagccatcgtcggaaataggcctatcagagataatatgaagtacagtgatgttcattatggaattatttataataggaaaaataaaatagaacctcagagttccaaaagggaagtggttaagtaaactacctaaaatcttcagaaagagattgtgcagttagcatttgaggtagtttcaacatcaatgtaaacattttctatagagaataattcaccattaattcttaaataaagagctgatgaggagttggagaaatgctttttttatgataagtaaaaaaattcaggatatgaaattgcatggaggatacgatgtctgtacatctatgtttaaagaaaaaagaaaactattggtataaaaaatgcaccaaagtactaacagtgattatttctgggtagcaggaatatggctgatatttttctccttttgtttaacctttgcattttctttaataagcattatttttgtttttacagtagaaaaaatagaataaaaattaatggaaaaaaggcacagattaataggagtcttccctcagagttcatatattctgttcaaaagtaaattgttgttgaactcattatgtataccaagtatagggttggctataggaggaggatgaaacataacccttgccctaaaagaatatctcctatctggggtgttcagacatatatgtagaaaacacttgggtatctgtacc

SEQ ID NO: 318494 - DNA, 4001 bp, Homo sapiens
tgatgtggcaatgattttcatttccttttctatttctttttttttcttttttttttttttttttttttttttttagcaacaatgtctttttctttcacccaggctggagtgcagtggcatgatcacaggtcactgtagtcttgacctggcttcaagcaaaccccccatctcagcagcgagtagctgggactactggcctgctagccagggccctgcacccagcaaatttttttttttttaatgtagagactgggtcttgctatgttgcccaggctgattttcatttctgttagactcatcttttttcttaattcttgcttgaatttctattccagtacaataatgcaagtcaaaggaaggttaaaatataccttatttaaactgctaatctttgtaattactgacagtgcatctctgacatttctaaaatgaagacaccttccttttctacaaactcagaaaatgccaatgaactatcttaacattttttaagttcaaaacattttggtgacagacacaagtctactgaaaggtataatagtagataatcatgttgctttgctatactggcaccaccatttatttgtcatctgtaaaatgacagctagtgccttactcatagtagtcaataaatgttccttttctttccttctttcattgtttcaatgtgacctactcttcactgatactttaacacggaatataggacgtcttcaaagacacttagtaatatagaggctgatgtaagaacacacaaataaataatactatgtttaatttttcaagttaaaaggacttcttcacctcattttgtccactgtaccaaacaccttaaattgctgacgaatttggttctttcagctaacaatgtcaaagttttagctgttttaaaacaaatcttcttggaaaagcttcaacaccttaaaaatcagtacagtggcccactgaggtggctcatgcctttaatcccagcactttgggaggccgaggcgagcagatcacctgaggtcaggagttggagaccagactggccaacatagagaaatcccatctctactaaaaatagaaaagttagaccggatgcggtggctcacgcctataatcccagcactttgggaggccgaggcaggcggatcacgaggtcaggagataagagaccatcctggctaacacggtgaaaccccatctctactaaaaaatacaaaaaaattagcggtgcgtggtggcgggcacctgtagtcccagctactcgggaggctgaggcaggagaatggcgtgaacccgggaggcggagcttgcagtaagccgagatcgtgccacttcactccagcctgggcgacaagagggaaactctgtctcaaaacaacaacaaaaatttaaaaaattaaaacaaaaatcagtacagttttctcaacagtgtatcttttttccacttaactgggactttgggctacggaaaacgttaaccagtactagtaaggaagctcaatttgcctctacactaattgggagcgctgaaaacaccaggccgtgtcacagcctcttcagctgtcagtgagacccgccaccttcaccttaccaggtaaggaaactgaggcccaggggaaggaaggggcttgcctgcagccacctcgttctttcctgaaaagaccaagcgtctgacagcagcagtgttctgcctcgagggctatcagacggccccgcggagcatggatgagacctgtcctccctcgcgccgcctaaccccggggtgaaaaacaggcgccccttcacgcagtgccacaggcagggactcagagtaggtcttggccctaaaagtgcgccttctaggggatccatagctgctgcccaccggtcctcccagaaggaggggctgtcactcacctgcgactggagggaacgcaatcccctacttggcgttggccgtacaccaggagaccgaactgcaaagcgcgatggctgccgtggccccagttcgcatcagccccttccgggccggcgggtgcctcactagcgacagtccgcaggaccgcgtcgccgagcgccctaggttccgcctcctggcagtcttgccgccaattccccagttgagcgaggctgctcgcaacccctaacaccgcctgggtctcccagccgcctggtctccccacacccgcccgcccgaagggattttaggggcctgcgtgccgagaaaggaacaccccatgcctccctaggggaaattacttttggcattttttttttttgagacgttgtctcgctctgtctcccaggctggggtgcagtggcacgatctcggctcactgcagcctccaccccctggattcaagagattctcctacctcagcctccccagtagcggggactacaggcacccgccaccactgtccggctaattttttttttttttgaaacggagcctcgattttgtcgcccaggctggagtgcaatggcgcgatctcagctcactgtaacctccgcctcccgggttcaagcgattcttctacctcagcctcctgagtagctgggagcacaggcgcgcaccaccatgcccggctaatttttgtatttttagtagagacggggtttcaccatgttggccaggctggtctcgaactcttgacctaaagtgaaccgcccgcctcggcctcccaaagtgctaggattacaggcgtgagccactgcgcccggctaatttttgtatttttagtagagaccgggtttcatcatgttggccaggctggtctcaaactccctagcataagtgatccacctgcctcagcctcccaaagtgctgggatcaccaccgcgccctgcctaaaatacattttcaaagtacacgtgcttattgaattcatttttttttctttttttgttatttgtgcttattgaattcaccagtgatttacacaatgtagctacgtaccagataatgtgttggatgctggttattcagcttttattcagctggttattcagttgttttatagacggtcttggccaggcgcggtggttcacacctgtaatctcagcactttgggaggtcaaggtgggtgaatcacctgaggttagagttcaagaccagcctggccaacatggtgaaaccccatctctacaaaaatacgaaaattacccaggcatgatggcaggtgcctgtaacgccagctactcggtaggccgaggcaggagaattgcttgaacccgggaggtggaggttgcagtgagccgagattgcaccattgcactctagcctgggcgacagagcgagactctgtctccgtctcaaaaaataaataaattaattaaattaaaaataaatttaaaaattatatatatatatagacggtcttgctctttctcccaggctggagtccagtggtgctatcatagctcactgcagcctcaatctcttgggctcaaggaatcctcccatgtagctgggaccacaggcgtgtgccaccaggcccagctaatatttgaattgttttgtagagataggggtctcattatgttgcccacgctgatcttgaactcccgggcttaagcgatcctccggcctctgcctcccaaagtgctgagattacaggagtgtagtcagatagtcagcatttttttttttggaggcggagtctcactctgtcgcccaggctggagtgcaatggtgcgagcttgagctctgctcactgcacctccgcctctcaggttcaagcaattctcctgcctcaacctcccaagtagctgggattacaggcgcagtccaccatgcctggccaattttttgtgttttagtagagacagggtttcatggtgttgcccaggctggtcacacccgactaattttttgtattttattagagatggggtttcaccgtgttgcccagcctggtcttgaatgcctgagctcaggcaatccacctgccttggcctcccaaagtgctaggattacagttgtgagccactgcacctggccgtagtcagcctttttgtatgtttgttttact

SEQ ID NO: 318495 - DNA, 4001 bp, Homo sapiens
tttaaaacaactcctgggtttagaattactacagcaactttatgaatgtcagaagaggaaaagtgtcatggcaatatcagatgtcacaaaaggacagtctgggctaagatgaagacaatgttttgccctaacaagagagccagttaatatgaaatgaaccatgaaatggaatgaccaagtagaaaatacactgccaaatcgtcagatgctgaataaacagcgtcagtgaattatctgaattaggaaaggctaaaaggttcttgatgttttatcttcaaaatattttaaaataacacccatttaacaatttatgaacggtctctttagaaagtctaccatttaagaactacctgattttccacaacatggaagcaagtccaatactaattgaaacaaaactgccaggaaaaaaaaaaaagtcttaaaatgcaaccatgtcactgaaaggtacaggccagttgtactgaattttaagtgacattagggacaatgaaacagtgactgagtctaattctacactgctacaaagtgagtcgagttgtcaataataatcagggtcatttcattaaaataatcctccttggaattatcaggcatttaataatcagagcagaaatagttttcctcttccaggattcttaatgaaagataaaaccaggagtaaaaagatgtaaactcaacaagccagaagtgacacttgtgtgaccacaaattagagttcctgttttattctgtgtgactgcaaattaaagttactactgcacatggccggggggattgagaaacaacttcaaccaacagttggaaacaaattacacgtgctaacagttacactcattaggaaattcagaatactttcaaagagagagttatttagatgttgcattcatttaaacgcagacgatgaatatctcagccgccttcctttgcaggattctgtgccaagcccttccgaagccggggttgataaggtcgactccaagaagaaaagcagctcaagtaggaaatggtatcctcacatagcccagagaaccggtgacgcactaggagcttggaaaatatcccatcgtttaccttgctagaagcagctgggtagggaagaggtcgtccacgtgcactattgttttccagatatgtttatttttaagttttgctttggtatcaataacctcaacctcaacctaacagaaagaggggggatggcagcgccactggtggtatttgggtgcaacacaagtttaaaaaataaaaacataacctttttttttttaattgcagcatactcggtgccctcacctctctcctcctccacacctctgccatcaccccacgcagctctccgccgccgccacctcgggtccccatgacaaccccaccccagggcgggcccccctccgccgactcccggccctgccagccacacttgcttggcaaggggcgactctacctgccctcggctttctctcctgagaggcgggccaggacccctccgggcgcgcgggcccagtcccggctgcagacacgaccctcaccagtcggggacgtgtggaagggcgaccgggcacgagctgaggaggttccacccccaagccccaaaacccaaaggagtgacacggggccggggcgcgaccccaaatggaggacggcggccccgcgcccctctctgggctgctaaggggagccgaggggcagacgcagtgggcgcgaaggaactcgtccgttttcacaaacaacgacgcgtcgcggcggcaggagatgctggggccgaagctcaccttgaagggattgttgagatccgggtcggcaaacgggttactgtcgaaatccgacatctctctggctctcggcgtcacccacccgacccaggcgcagagagagagacgaggcgaggccgccgcccccctgcgcgctcacgtcgccgccgccgagcagatccgggtgcagctcgcgggccacccagccggccgcgccactgagcatgcccggtgcggcgggctcctggccgcggcgcagctcgcgttcgccatcccgttcctccgggcccggatcccacgctccgggctttagctgcgaccgagtaggcagtcggggcgaaggaaacgggaactgaaagcgatgaaaagcgttccacacgccacgagcccgcgggatcctcggagagtatggaacccttcccctccgctctcagccggaggccagctgcgtccagccgggctcggtcttctgaacaccgatttcaaatcaggtcctcggggcccagcgtcacttagggaagtggtggcattttgtggtaaggacgcacacttgtcaggttgggggaggcagcctgagtcgtgggccgcgcaccccgggagcagtgccgttagaccgtgggacgcgggcactggagaggctactgcaccgccctccgcaaattacctccccggggcgggggcgcggccgctgctaaggatttttgcatacccctgaccccacctgagaatcccggcctcccatcttccggtctctctgactctaggttgctgctaaatcacggagagcagccttggcgctgccggtcccaacttgatccaaggagccttgagaaggagatgagattcagtaccaggggccggccgtggctcccatcctccggaatctgcaaaatggctacttcttcagaaataatggggagagggatggcaagaggccagagatcaaggccctcgagtattaacttgagcatttgggcacaaaatagacacttttggattttcccgtcttttccaacaccaaggatgagattatcaaaagatgtgttaaattaatttgtaccggccgggcgcggtggcttacgcctgtaatcccaacactttgggaggccgaggcgggcgaatcacaaggtcatgagttcgaaaccagcctggccaatatggtgaaacccccgtctctactaaaaatacagaaattagccgggagtggtggcgtacgcctgtagtcccagctactctggaggctaaggcaggagaatcgcttgaatccgggaggtggaggtcgcagtgagccgagaccgggccactgcactccagcctgggagacagagcgagactctgtctcaagaaaaaaaaaaaatcaatttgtaccattccttgccccaccctgccgaacttattgaaagagcatcgctttcctcacttttctcctctaacagaaaagcacttagatgaagctacagggagccagaattcttttgacttggtgggtaccggaggattggaagaatctagattgagtattccttggcctttggggagcttgctctatgcaaagtcacccaggaaatgatactccccccactgtgaaacactagctagagatgatagacaaaaagcacatttgttgtaatctccctttgacgggattcaggttgggatagatgtcgaagcagctgcttctaggtagtcaacgaagatgtcaactagtaaatgacaacagacaaggatgagcacagcagagctgtacgattctagatatcaaaaagagcaagcagtctgttgtactcaccatcgcatcctcagcagctgcccagtgcccggttttaacttagtgctcagtgtatgtgtcaggtttgaatcccaattctgatactacctgtgctactctcttcacctctctgagtctgtaaaggattatttaagaattaaatgaaacaacatacagaaaagtgtcctgcatgtatatttagtgcctaacaaatattggttgaacgtcgaaagtggcaaggaggctcagtatgttcttatacgctttgcctcccttctcctgagcaagcatgtccttgcccagctcatctgcttctctcaccacttttgccctcactccctccacctgtcctccaaatgactcaaaataatctgcactatttattatgcatctactatgttccaagacaatgagggtcagctgagcccgcattgcaggatggaaatttccaactatgttctgtttacagctaatgatat

SEQ ID NO: 318496 - DNA, 4001 bp, Homo sapiens
gaagacctgctcaagccacctgaggcagagttattcatcccagcaaggaagtcaactgggaggcttcccctgaaagggacaccgatgtctgggttccctgggcaccttcccaccaacactagatcagttgacaaaaggtggtctctccgctagagtagaaggaatcaaagtcactaggttatttggacaaaaccagcagaaactgcagggaaaacaagcccaacagcggatttcctgaagccctcattcctcccccattccgaggaagaaatctacaagtatagagggaaaaaataaaaactttcaaattttagcaacaaatggctttggtgcgtttgcattctcgccagtcttcaaggagtagataatttttatgcttcataaacagttacagagcacaacaggaagaaagacctgccagttttgtttccaaatccggtttacctctgatactggccccatctctgtcaccttgcactgctggctctatgccacctgcagactctcgcggcctctctctccctctctcacgcagcacccctcacaaaatctgggacttggcactctcggtcccccacagggatcagcatttggatgagaaaataccaggctcgagctgctcttaaccacgtttattgagaggggccgggggaaggggatggacggtcctccccgcggcggggttttcagccctcgcgggtgggcagcgtcttgtcctcaggtgtagatgctccagtctcggctcagccaaacactgtcagggccccctggaaagcagaagccgagcttgagtgcccccagccctgccaccaagaactcaggcgggggcgcggcagcggccggctctgtggggagcgggagcggggcggttccgctggcgtctccgggggacgcgcacccgcgcggggccatctccgccttccccgcccctgcagctcggatgcgccccacccagttcccacccggagacccgggcttctcccagggacagggcttggaggggcaggacgggaaacagccctgacgtagggccgggacacctctggtgcagttttgaggctggccgggaagggatgcccgcgcaggaagggcacccggggtgcccactttaccagcagggccttcagggccttcacggcccccacggcctggggacccagctcagccacacacttctgggagccctctatgaggtggttcacggggatgcccaggctgctcagcaggagcttcagcgggttgagggtgccgagggggttggccagggtcccggccccggcctccgccgccgactccagcgcagcgacaggctgggccacaggcttggccgagcccactaagaaagcagcagctgcaagcgaacagggaggggtcaccgcctgcgcgccggggtccccagaaggcaggtccaggacgcgcccccgcgggaggcgcccaggaaccgtcgcgccctgcccggctccccgaccgcccctccctcctgcgccgaggcctgccaggtgcgagcccccgggacacaggcgggtctggggaggcggccccgccaggagacgctgcagggtcaccggagtggcctgagggtggcggaaggaccggtgaactctgtgcagggtccgggacaggcccccaagggaggggacactcgcgctgcgccttgcaggatgaggagccggtctccagacggggggcagacgggtgtccccaggccaggggcggcctccatcccggcacgaggctggagacagccctgagagggggaggccgcgggctgcaggcgcggggccccggggtggcggagccctctgggcgccgggcgaggctggaaggacctgggatccacgatcggcgcaggcagcggcgggggcgcagcgggcgccgaggcctcaggccccaccgtgcgcgccaggagcccggggcgctcaccggagctgcaggacagggccacgcagagccccaggagggcggcgagcttcatggcgcgggggctcggggcgcgcggggaacctgcggctgcccgggcaaggccacgaggcttcttatacccggtcctcgcccctccagcgccggcctcgcccgcgctcctgagaaagccctgcccgctccgctcacggccgtgccctggccaacttcctgctgcggccggcgggccctgggaagcccgtgcccccttccctgcccgggcctcgaggacttcctcttggcaggcgctggggccctctgagagcaggcaggcccggcctttgtctccgcgaggcccaccccggcccgcaccttcgctttgcggtctgaccccacgcgcccccctgcagggctgggcccgggtgaggggagcttccctcgcgccagggcaggggcgggggcggcgcagttcctggctccctggtccctgcctctgatcccagaccgtggcaacgtcgggcactgggggtcctcgtgggcgccttctgcgcctggggaggtggaggcgccagggacgatcaggcctcactcccggccgcctccccggccgggccacaggcagccacagtgcaaacagaagtggggcgtttttctgtcttcgaaactagcctcgacgccagtggatgggcctggtttgttcctgagtttctctaaatgtcctcactcgtctgtcacctgcagaagtatgacagatggagagcaaagcacattttgaaaacttttgcaaatgatacataaactaatttgcttttagtccttcttctttcctctattttttgaccccaggcattgagcactgagtgactcacgttttgctgcgtggctgctctcagctaggttggtgcaaagtctctcttttcttttgtaaagtgtagctggcacgcgtgggaaacaggctcccgggtgggaggacctgactcttcaggcagtgtcctggaattccttccctatggctgacagcacgtcttagccctcagccaccccgagctactgcggcctcctccgcacctgcagacacttgtgcctttgccaactgttgtggccaggcacacgcattcacactgtttctgttcacttacacttttccttgactattttgtttgggggatttttgcattataaatctggagtttggttgtgttttgttggtcatcatggaagtaattttaatgggaaatacgttttcttttttaaaaacagtttgaagttaattacttttttggtggtggtaaagacactgtcttgccgtgttgcccaggctggtctcgaactcctgagctcaagcaatcctcccacctcagactcccaagtagctgggactagaggtgtgagccaccacactcagcggattttgattttgttttttgtttgtttgttttttgagacagtctcactctgtcgcccaggctggagtgtagtgaggtgatcttggttcactgcagcctccacctcccaggctcaagcaattctcccacctcagcctcccaagcaggtggggctataggtgtgcaccactatgtccagctaattttgtttattttttgtagagacaaagtctcactgtgttgcccagactggtcttgaactcttagcctcaagtgatactcttgcctcagcctcccaaagtgctgggattacaggtgtgagccaccacgcctggcttgatttatttttattttttctagagatggggtctcgctacattgaccaagctggtctcaaaatcctggcctgaagcaatcctcccgcctcagactcccaaggtgctgtgatgacacgtgtgagccaccccgcacagcccagcttcaccatcttaagggcacactccattagcattaagtatattctaatgttgtgcaaacatcaccacaatccatttccagaactcttttcctcttataaaactgaaactctgagcctattaaacaactccccactcccctccccaagcccttggcaccaccattccactttctgtctctgaatctggccactcccggcacctcatatgagtggaatcgggcagtgtttgtcttttgtgt

SEQ ID NO: 318497 - DNA, 4001 bp, Homo sapiens
atgtgctatgctaacattatggacaaagctccatggaaacacaagaaagggatgactaattctaacatgaaagagtgctgcaggaattttccagaagtgctgttagagctatgtcttgaggcaaatgtcaggatcataaggtaaagaagaggagaagcattttagaaacatgaccaataaaggcacggaaccattaggataaaagtgcatacacaggatggtgagccttctgcccagaaggctggagtgcagatttccaataggctatgaccaaaggatggaagataaagggagtgaggctgcaaaagttgagtgaggtcagattttttaaagtgttggatgtcacacaaaggagtttggatttttttttcctgagggcagtggggcgctatcaaggcttttacataggaaaattacgttttatatctttggctttaggaagataactttcccgtagaagatgaatggtgggaaaaagtagagattgaggaaaatatgtacgatgtattttttacaaaaacatgtgcagatatataaatgcacacatgcatgtgagcacacacgtaagaacacacatcctcctactggctaagacctgccatagtttattttcctttggaaacctattatttccccattcaaattattaaaatggagcctgtatatatttttttaaattttcaatcacctattgtccctccaaaattctcacccagagggggcggtatttattttccccacctcctttctgctgccactttgcccatagatacctgtccctggacattagagaacagtgaaatatccaaaactggtgaagttacaaattccttcagaaattcaataaacatcaaaagccaaagttgccattgtaggtgtgggcggcaatcaatttttcattattaatctccatacttcttatttcagacattttggtaaatatcttctctgtatgtgtttacagcttcctgggagaagatcttcaaagccttctgttctctcaatgagcagtggctatcatgaaatctctttttcccatgtgcccacactgtcttcctgatagttacaatgattccttccaaaaaaataaatcagttcccattctcctccaagaagccagcttctatacccttacctgaaaattaaactaatcacccaccaatacactaaaagagttctatctggatatctcacagtacgtttacagtagtctagaattatagtaacttaggcagaagccctatctatcctaccagagtagcaccttaagaacaatatttatgactgcttcatgtctaaatcttccaatgcctatccagtgcccaacaaattgtagccattcaataaatatccattgagtggataaacagatgaatgtagctatctcaggagaaccaagctagcaaattggataactggagatgatagcaagaatgactccatatagttcaaaagcacaaaagaaattataaagtcaaattttaactcaaaattgaggaaaataagaaaaacgaatggtgaccaatatccagcagtgaaatgtgctttgttgaccctccgtggaagttggctaacttcctatgtaggatgtattagaatacttatattgggctagagcttagatggtggggatctgaaatactttccaacatcaccattttctgtgattccaaaacttcttccaaccctgcaaatatgtgcaattattatgtgtcagttaaaagtaaaataaaaaaaaatacaattcctaccaccatattccactgtcagtgaggcaaggcttactagttgtgctcttattaacagaaaagtaaagaaatgtcacatattccagatgtattccagttacttaccagagtaactacaaaggctgatggtcaccagcaggaagatagttaccagcttcatgacagttatctgggatatttttcaggagtttaaaaatcagaaaaatctagcaaaatccaccaagccagtggttccacttgccatacaaagtgtgatggctgcttttgcacacacatatttatatgcccattgaggacctgaattctagtccctaccacttgactcaccccaccaaagaaagggataaatgttatgttttctcaccaaacaatttggagggttttccacttccccgtgtgttcccatgagaaacaaagctctacagtacagcattctcaagtacctcttgcataaacccttgcacagaaataaaagcagaaggcaaagagcccaacgaatccttctcctggaagaacattgaaaagaagtgaagaatttatatttggattagaaggagtgttttcctctggttttctacatttttccccagttttctaatcatttaaagtttggagaatcacattagctgatgaactacccagttgtgaaagcaatctggaggccactctggtataatacagagtcagcttcatgacatttagtgccacatttctctggaattcacctgcccccagcccactcacacatctactatggtaagattttcacacctctgttaccttttccagtgtcagttactttgagtatgttcagagcatgtcttctctgagcctttggatagaataataggcttaagatctaaaatcagagtgtcttttgaaaaacctgggattcaattttcactgtttgtgtaatcttggatttgacatttttaatctaggatattggtcctctcatctaaaatgggaacataaataacacaaccaaccataaggtgtgtagcttggggaaaaaattgtttttgcaagattctttggcaatcaaatccgataaaatcattcaaaaatacgtaattgtaaggtactggctacaggagtagtaatttgtttccaaggctgtctttctggatccagggttcagccacaggacctcaggacaacttcatttgtgagcagaagtcctggagttctttggggcatcgagtgggcccgacatgcaaggaagagggtaagaaagaaccatgaaggggtgaaatagaaagcggagtccatatgggcacaggaccagctcagggctccccggccacgtggtactgctggctccagccattcccaccaccaaagtggaacccagaaaattttgagaaaacacaccttaagatgtaaggccagaggttggggctttatttgtcctcatctgagggtgtggtattgtaatgaagatctaataaaattatgcagacagagcattctgctatgccaaaccaaaattaatatctaatttatgtcacattttactaatttttatgttaccatgttgtaactgtcatttctttatctttctgctactttataaactactttataaactacatgaaagacaccatgaatgcctgccatgcacctcaatcctgccacttctccttctttctctaccagtactgcttccatttctcccacatattcccactgatgccagtgatattaatataccaagcccctcaaagagccaaggttggtggtaagattgatgccgttgccggaggaacagggtccagctgcttgctctcgtggtccaatgatgagatacaggtgaactgggaaagaagcgagtttatttttgtaaccagccacagggagaaggtcggagtaatttaccagaccaactaaaagttatgagtttttcctttagtatatataaatgaatttcaagctctatgcctatatgcaggagtatttctacttagcctaaatctaatctttaactagtggtctgtgggctggaaagtttcttaattttacatgggtcctggtatggtttgtatgtgcatgaatgcttttatcactcaatcaggtttgaggatgagaaagcccaggtagggtcttaacgggtttgtttctgcattccaggtctcctactcaggcaccagtttctctagttcttcaatgtttaacttacacattcatcattacagcaaagggcttatggagacttggttgcttgtggagatccagcctgccacaatgacgccc

SEQ ID NO: 318498 - DNA, 4001 bp, Homo sapiens
aaccaaaagcaaaataagtctgataagttcgtcacttgaaagcagttgtaaatacagaatgatcaaaacaccacagaactggccaaaatgaggttaaaaaattctctctggactttactgaaattatcctcagcatctattttccaaacacatttctcagttggctatcacgaatttctttcttttttctgctaattttttgattatgctgttccttcgtaaactccaattcttcaggaaaaaaagcctatctgaaatgccgataaatatgctgcttgcaggcagaatttctgtaggaaaagctaacttcatcaagataaaaagacttttacaaaacccaagactaaattttggttcaattttgctatcttgccatcccgtctgaggtgcctccgccgctggcagggtcttagtctgcagaaggaacaccgggcaccatctgggttgaggacaaaggcactagctctagcttttctccaatcacaagctaccatttcccctaaaaagccccactgaccatgggctttccttcctgcttgtggacgccctcctagcagctcttaaaagcccaagatgcggcaggggtctctgctcagtcagtaccaaccacagcaacacactagaacggtttacacgctttctgatgttggcaggatggctgtatgactaatcctcacatttaactcaacgagatttttaataagtatttcaaaaaggagaaaattgcacaattacaggcataattcaaatcaatattgctgaatgccttggttcctattgagatttttattctgcaatttaaaattactttgtaattaaggaggtgggtgggtaagttcatttaaaagaaccaaacaactaaacctatccaatttagcttgattaaataaaaccctagaaggccgattcttaagatgcaatcgtagagggcacattcagacactcagagagcaagggctcagggaagtataaccctgaccaccatcctggactaagccgagcccggccctagaggcactcagcgcacaggcaagcacaggtcccggcgtcctcgcccggtcagtgcgctgagctctccgcctgagttttaaaaactggcacagctgcttttaaacactggcacatttttggtggcataaggaccaccaaacacgacccaaagtagaagcccttaacttacaaggtctcgaagtggacatggacagatttgcgctttctggaaaggcgaactgcaagcctaagctcgggcgcgccacgcttcccaccggacgcccaccgggccgagcccggccactcctcgcacccacccgggcggtctcacccgccccgccggccccacccacgggctgcgggctgctcctcaggacaacccgcacagagggcggcagaggcccagcccagccagggcggccaccggccgctatccgcccgggtgaccttgggcagacacgactcctccccgagtccacctgccaggcactgaggcgaggggctacctcagcccgcggggtcccaggaccccaggcccggaccaaggcggcggaggggacgcccagcaagcccgcggggttgtgaccttcacccggacgcggactatctactaaggaccgagctccccgggtccccgagtccgccccgcggcttcccctcgcaccggcccagggctctctcagccccttcccgatcccgggacagagggcgcagggacccggcgcccgctccgctcggacccgctggggaccgtcccgctcctaccgccgcctcggcccccgcctgccccgccccggtccgcggcacggactcaccgccttggccagcgccaggcgccgagcgctcagcagccgcgacaggccccggacccccgacatgtctgctgttgccgccgcgcagtcccgccagtccctgcgcagactgcgcctgcgcaccacaccggggtcgagctggcgggggaggggggataccgcgcctgcgcaccacgccggagtcgagcggggctgcagtgggggacatcgcgcctgcgcaccatgccacgcccggagcgggtactgagtgggggcgccgcgcctgcgcaaagcggacccgcggacggtggcgttaagggaacgctgaggtcccgcgctccccgaccgaggtagagcgggccctgttccggggaggtggtgggcaccaacatttttaaagccccgtgggtggttctccgggatcgcccagaccgaagggcctgaacgcccagaccgcagggaatggggtcggaggggggcgctcgtccgcggaggtgggcgggagcggcccggggcctccgacctcttgtttattatacatcccttgattaactaaactattttgtaattgtgtgtgtttgtggaggtcacatgtaaacaaacttaaagtgactctactttgtgaaaatgtgaaacttcgtgtaggtactcagtaaatcagtaaattcttactaacgttagcccccagcctagctatggagggtgcatgctgagcccgaagcagagaactctgtaatctctgcattcatcaccaccacgaggaggcctcagaagcttctagcactgtttgcaccttccccacatcacccctccctgccttcctcacagtcttccttctgatcagaagaccctttccttctttctctgcctgtcaaaatgctgctcactcttcaaaccctagctcatatgaaagtgtccggtgtgagcccacttttatcgagttgattctgtatctttgatacaactgtatgagggttctccagagacacaacaaatagaagggagacgtgaggaattggtttaaaggttcaattgctaatctcatccaaaaacacccttacagacacgcccagaaataatgcttaaccatgtatctgagcacctcatgatgccgtcaagttgacaaacaaaattaaccatcgcagcagccatacatttaaacatatttgtaccagagaacttacctgattctacctgcacttcagatgcttaagacatgtctgttttctccactttccccaaccagattgtgagtcgctttcatcttaagttcttgttttttttttcctttttctttttctttttttttgggggggacggagtctcgttctgtcaccaggctggagtgcagtggcgcgacctcgactcactgcaacctccacctcccaggttcaagcgattctcctgcctcagcctcccgagtagctgggactacaggtgcccgccaccatgcccggctctggtctagtttttttcttctttgaatcccgtagggcctcagtgctgtgcagcaagcacatagttaaaactgaagaaaaatttcttgaataaaagtagttaacgtttttattctttacttcaaggtatatctccatgaataacctaaatgatcccccaaattggaatatccggcctaattccagggcggatggtggtgatggaagcaggtggaattatgccctgttggttccaatgctgggattggctgcttttcgtaagtcatggttttcttaaaattcgtgttttccaggctgagagtgtggagccccggtgagggaggcagcatggtgtgggagcctgaaggccgtgactttgggacctgccagggacagccgagttttatcccctgcagtgaaccgtgggcaaatcacttaagctctgagcctcagtcttcctgttcacaggagatggataatcatacttaacctcagcacactgcaaggattaagtcagccaaggcgtttagaagcattttgtgtggggtgggttttaataacttagttccctctgaaggctttgctgctctcaagtcggggaggaggttccttatttcaggtgccctcataaggactgctggggaacaaaacgggtgtaaaggaaaccagtgggctgggcgtggtggctcatacctgtaaccccagcactctgcgaggcccaggtgggcagatcgagtgaccagcctgagcaacacagcaaaaccccgtctctacaaaaaaatac

SEQ ID NO: 318499 - DNA, 4001 bp, Homo sapiens
caaacaaacaaacaaacaaacaaaaaaccctgtagaaatggaacttataaaaagactatgaaaattatattttaaaaaagaggtctgggtaccgtggatcaggcctgtaattacagcactttggaaggttaaggaggcaggagaatcgcttgaacccaggaatcagaggttgcagtgagccaagatcaccaccactgcactccagcctgggcaacagaacaagactccatctcaaaaaaaaaaaaaaagatgtggaacaaatgtctgttggactgtatcaaatcaacatagtgacagtatctctaatacagcataccacagtggtcaaatccctttaacatttcaatattatgacaactacactcatatataaatgttgaagcacatttgaggatttgtcatttaaagttaatgtaaaactgcaatttatagattataagaaaaatccatagccatgtaacattttttctcatcctcagtgtaaatgttactaaatattctagaataaaatgtagtgtacataatctgttaccataattttgagaaagaatggttaactcagtaccctttcagtggctttcctccacttattctttcttctgcccacatagttgcctactcacagacatttttaaaagtcttttagagccatctttgtaaagaaaacagcggtcttctctaaaaacaatgtaaattagagattttagtcactgtctgtattctccaacttcacagaactcttagactctaatgggcaacttaagttctttagcattattctactagtcttatttctgtaaaccaaagatttgtaagtaaattggtaagtaggcaatctgtcggcagaaagtctttgtctattgtaacaactgaaataatcttagcaaatcacaatgtaggacgatttaaggaatcctagaagaggtataaaattataagacattctcacatcaaatgacaaactataatgtacatgtagactcttgtcagagattcagagagttgtgtccacccactttccaaatgctgtccagacatctagaagtcaaccaggagatcctcccttctatttggtttttccacagctgaaacattgaacagctgttgtaggtacaattctgggaaggttctgggagagatgagtaggccctaaaggggtgtcccaaaagcatgcattcatctccagaaactcagactgagtacgacccccaccccacttcagggcctgcggaacccagaagaatcagaccccacatcctgctctctaggagactggggtgaggtggcaaggaaggcgaaggcacacaaacactatgatccttatattcgagttttgaggcattttctcacccgtgtttcacccagggcgttgcatacagcaggtgctcatttactgttttggtgaccgactaaataaatgtgaaagactgagacgagcctggggctacaggtgcacaactgccgtggtcccctggcccagccgcccaccaccatccgcgccagaacccggtaaggaggtcactctctctatctatgtcgcctcaagcagcagtggcacgcaaaggtcagtcagccctggccaggctgcgccctccccccggacagcactcaccgttggtgtagggagaccccgaggccaaggcggctccgttctgggcctggaggctggctggggcgccgccggaggccggtattcccggctgggacatgatgactgggttggaaggggctggtcggggtcgacaacagcgcacaagaagagagctgaaagaccactgctgaaagcggagggaggaggctaacgacttaagactgaagactgggagaagaggggggggcgcattaagcccgaggcatggcgccgcactctccccaggccaccggcggccacagcctagcctgggagctgaggcttgagagtcgggccggcggggccgcgaacgcccggctagaaggcggcagccaaacctagagagaaggagggaggccctggccggaagtgcctgtcagccgccggccgcgcagccgcaatcaggacacgtggcacttccggctccgggctcgcagcagccgccgccgcgccggcgaactcttctctgccagccgggctgccccgaggccacctgacagctcctggtgccccgaccccgacgaccgtgcccggcctcgccgccacgtcaccgactctcacggccggccggaagtgccgtgtgtcaccgctacggaaattcccgccgttgtgaacgtgacctcgctcgcagagccaggatcgtggggcaatctgagattcagtagccgctttcgtggggtgggactgacagttcctctcctcgggttttgtgaagattacctgagaccatagaagtcatcgtcctctgttgagaccgtaccaccactgggagctggggcggttaatgttcatcgcagtatttcattcacatttcgtcttcgtgtttcagatgtaaattataaggggttttaaaaagaggtggttaaatatgtgtacatgttaatagtgtgatcaagccaagaaggaggcctttgtctttgactggaggactcagaggaattttaattttgaaactcgctgattcacagcatagtcacgctcaagttcattagcacatttaaatggcagttttgtttcctcttctaagagtttacagtaaggtaaagaactcaaacttcctttcagagcaagtagactttttttttttttgcaagttgacttttttgacttttgaagccaaagggaggtcgaaactgcggtgattggacaacatagttaattaatgattgagtaatcatcttagctgccttcattctatttaggtttttcctgctctgtgctgacgataaagccctcctttacagatttgtactgtggattaaaatgtcatgccacgcggtttcgaaacctcagtgtgaagtacatcttacctaattcatttaataccaaatgcctgctatgaagtgttatattacatacaaaaaaaagccagatctaaaccactgtgtcgggctgggcaaggtggctcactcctgtaatccaagcactttgggaggctgagacagaaggattacttgaggccaggagtttgagaccagtctggacaacagggagagtccccttatctctatttaaaaaatatatatatatatatatttttgagacagagtcttggtctgttgcccaggctggagtgcagtggtgccatctccgctcactgcaacctccgcctcctgggttcaagcaattctcctgcctcagtctcccgagtagctgggattacaggctcctgccaccatgcctggctaatttttgtatttttagtagagacagggtttcaccatgttggccaggctggtcttgaacacctgacctcagttgatccacccgcctcagcctcccaaagtgctgggattacaggcgtaagccaccatgcccagccaatgtttttaattaaataaatttttaaaaagtggccagtgtggtggcacatccctgtagtcccagctactcaggaggctgatgtgggaggatcacctgaacccaggagttcgaggctacagtgagctgtgatctcaccactgcactccagcctgcatgacagagtgagatcttgtctctaagaaaagaaaaagaataaaccactgtgtcaggcctaaaaaaggtcagtaaaaattcaaataactaaatactaaattttatactaaccctgttttcatcatttgcctcagaactttactaaaaatgtatttgctcgggcgtggtagcttacaactgtaatcccagcactttgggaggccaaggcgggcggattacctgaggtcaggagttcaaaaccagcctggccaacatggtgaaactctgtctctactgaaaatacaaaaattagccaggtgtggtggcacatgcctgtaatcccagctactcaggaggatgaggcaggagaattgcttgaacccaggagacggaggttgctgtgagccaagattgt

SEQ ID NO: 318500 - DNA, 4001 bp, Homo sapiens
agactacctctataattaataacatatctgctgattccaaactcagccattatgacagagctcttctcggtaagctagacgtaaaacttgtctttcttcaaaacaaaccagaacaatcatttgtgactcctgatgtgttaactaaagtacccctaaaaagcagaacggtattaaacaaagctcacgttatcttccctcaatttcgatttctttctgagtaaatgtaacagtcacaaggaaggcagatgcccagacaaggaagactttacagcgatctttttctctggaagagacctttctagttagagcatttatgtctggccaccacctttcctgtcccctctcctagcaaggctgacagctctctatagccaccagatcagctcccccaacccccggcccccaaaatgaaattattgcaagatctgcctggttctgctgtttgttgcctgggactcccgcccactcgcccaggacccagcaactgcctgtggcgcctcgtcctccgagcgctcgctcgcagcgccccctgccgggaatcccgaggacgccgcaggcgcaggaaagttaaatcccaactccggccgcggcatcctggtacaaagcaagcaaagggcgaggaggtgaacgcgcttcccgccaaagccaggggaacagggatgtgaccgctccaagccaggcaccggccgccgcggggagcgagccgggggaatcactcctccacgaccgttcccacgcacatcttgggagaaaccattccctctggagcccgatctgcccgaaaccctggggtctgaaaccctgagccgcggtgtgcaaaatccgtggagcagcggagggatgcctggtgaaaggggctcgcctagctgcagcgcacctggctggtggttccccaggcctctgcatcccccgccttagtgtctttcattaaccaaggcgcttggcggagttgagcccaagtcccattgcctcccggttcccctgtaaggaaagcaggaaaacctgcccaagccggtggggctgcgaggtggccgctcccgaaccgccaagtcccgacctccgtgtcccctgcccccggctcgcggcagtgcgagcctggaggcgcgccgggggcgggcacagaccagtgtgcgcacctttccgggtgttgggcaggggtcccgtctcgcccaccgcgacactccggctccttacctctccatgctcagacctcggcacaggcgggtacacaaacttccagcccgtgcactagctcaactgtgggcgcccccggactgacggtcgtcctaatcctgtacgcgcaacccccgcccaggtgcctgctgatggatcccacccgagatcggcaccacccaccagccgaccgctgcagtccccgggtcccggccagcggcgcggcgcggcgcggcgcggtcaggggctcctgccaaggccacgcaggaatcgggcgggggtcgctcaccaggtgcgaggagcgctggtgccagtcatccagcgcctgggggccagagcggctccgaggatcctcttcagcacctggctagggaagtggaggcagcagctgcagccgccccctgccacttccccagagccgccccctactcgctgagttccagaatgggggcaccggcttgggggccacgagcacggtccccgagcgcgcggccaaccggtgggtgggcaggttcgcgcccagcagagacgaccctcgaggtggcaaagttgggtgtccaagccagctccgcggggcagtcctgggtgggagaagggagcgtcccgggatgagcgacactggccgggccgcccctgcacggggaaggtggagggccggggctgcagcgggccaagggccgcggctggcctgaggctgcgaagcccacccgcggcgggaaagcagcgctcgggagcgggctcagggagagcagccgccaccggcgccgccttcccggcaagtagatcggcgcggggcgagcgggcgcggagagcgcggggcggagagcgctgggcggggagcgggggacagcctgggcccacccccgccccgccccgcccctgccccgcccccgccgccgcgccgcctcctcctcctcctcctccccgccggggtgaaactcgagcgccccacccgcgcctgacctccccgagcccctccccgggccccgccccttcccggtacaggacccccaccttcgctcctgggagccccgctgcaccccaggagttccattccagcctccccagtgcgagtgcggccgagcgctgacttttgggggctccctcccccgtctcactgggtccctctgcggctcccccgcccgctgtcccggttcagacgtggctgcaccccggaggggggcgccggccgagacctgagacgtggcgctccctctctgccggcctcggcttcaggtacgtgcggttccctcggctaaatctggcccgggggatggggggcaggggccgtctggtcctccggaactcgaactttgtgattttgttctttctgtgtgacatcctcatccgttctgagggagaaactccttaaagaagacgagagagtcagtcgttgcgggttcttggaggagcactttgggggtgagactcccggctagttcgggtcgatttcagcgggattaagtcaaggaaatgaacaaatctgacgaatcagggaggccagagaaggcgtccccaggtagccacgctgagcgttaagagagaagtcccgtatggtcaaagtcattcgtccaattctgtgtcaattattccttgttgcacttttgcaggatccttgggccttactaagtactcaggtgaaaagttgataattgggaagcaagtaaagtacctttgaagacgtgtataattggacactttgttgcagttcttcagtttctggaggaggcggtggggggggagagggagggggtcagcctcgcgaaaagagcaaatggtaaagttataggagtataaggcataaaacttgggttgggagtcctgactggccttgagtggccctttcccactggatgggggtgcgggacagtatctctgggccctttttactcagtctgcgcctcagagggaggcttgaaggtcccctgcatgaggaaatgtgtgaattgccccctcctgaccgcagtgaggtagggacccccgcaaggacccacgttcacaccagcgcccttccagccagtggtggggtatggatgggcctcgctggtcctgggcatggtccggtgcgtccataagggttccattgagctcatccataaaacaaagaagctattgcaggctgcagggtgtcatagctcgcacagtagccatgcagacctaagaggacaatggaaatacaaattgctatcgatgtgtctttattttctagaacttttttttaaaataaaagaattaagtgaaagcaattccgaaggtttctatgaaagcccagcccatccccaaatgcccagtctctggcacgggtgatctggctgtcttgggtactcaggccttactgggatttcctttaagacctctgggaggaagtgtcagtagctgggcaggccttcttggcaagcattcctccctgggttgtggcgggggctcccggcctgctgtgtggcagctgcaggctcctggggacctgaaggaaaagcttaaccgttctcccttcccttgcttggcacttagagcactagttccattccagacattccgattatcttgcctacgtggcacagaggcctaggagcctccctgggaggaagaggcaggccaaggtcttgcctggctgcttctagggggaaagatgtagggaggaagctgccttatgcttggatctgcagcctttgcctggacctgtggagcctacgtggccagggtgagggagacagaaattagaacccaatgtattcagctaatcctcttcttgcctctgaacattgccgttaatacttgaaaagaaaaaaaaaaagcaaaaaaactcttggcatatagagctaagcagt

SEQ ID NO: 318501 - DNA, 4001 bp, Homo sapiens
ggcgctgggcggaggggcggcgagggagcgggaaaaacagcggaattctgtttcctttcccgacgtccacaagcccgggaccgctccctggctccccccgtgccgctcgggtcttgcgaggagggaggagacctcaggatcctgttttgcaccatctcccacagcgaggagctgagcaaaacgcggagaatcgggacaagagacacttcccgccccagaaggatcaggcagggtgggtgggcactgcccggcttactctccagcgccccattgcccccatggtagcgccctaggacacagtgaggagtcggaacagagccctagtctgggtttcaaacccagggccatcttctgccaggtctctcacccttccccctcctgggtcatctttccagagcgagaccgcgctgatctgggaggagggcgtaccgtgcgccagcccggtgcaaagggctcggtgcttcaggagggacgcagccgcgacgggctatatccttgccgctcgggttgggagctgcggcgggggacaggacccatggcgggggcgccgcgtcacccgaacggctgctcccggacacttattcgagcaaacaaagcccggaacctctggtggcagcggccacaggagccaggatctcaccgagagacagggcgcgcgggtgcctagagccattacaagtttcttgcactccacggagcccagcccagaccccacactgacaacaaaagattctctccgcttccacaccgtctccgcggaaccccttctcccacctggcactggacgaaaacagcgctgttatacccaaccccctccagccctcgagggcagaaccccttcccctgccttcgacacaccgggccagggagcttccgagaatcccaccatttagggcccgctctgctccctgctgggcacgcgggaggatgagccttgggtctcgcacacacacccccaggaggaacagccatacgcgccgtcgcggcccggggcggcgccgggcgtgtgcgcaacgcgggtgggaaagctctcgacgtggagccggacgcactctggggcgcagggcagagaggaaaggcaggcagggctcacggctgctcccccaggaccgggcaaggctcgggaaacagagacacaagacaaaataaaacgcaggcaccacaaagccgacagcacgcgctagccacggccccgggaccctcaggctggagtccagctgcccgggaggtggggcgcgcccgggcgcccggggcgtaccttttcggtgcatcgacggacaggcggccggggctcggagcgaactggtacagcgtgtatcccatttagtaatccattatcgaggggatctctccgggccgcgggctgcgctctctccttcgcaagcctttgtcattcctacatgtgtgcttgtctctttgggggaaatagtcgcggcgactactttctgggatgcaaacgcgatgtgttcatctccaatgacgagcggagaaggggagaggaaaaaagaagccaaaaaaaaaaagaagaaaaagaaaaagaaaaccaacaaggaagagggtaaatgttcaagaaactcttctccaaatccaaattccacttggattccacttcggtgagtccccttggtggtgtctgcgccgattaacaagtcatttcagggcggggggcggggtgggggctggggcaggggtgcaaggctctggcccggctctgcggccggcagcgcggtgccgcgggtgtggtgatgctggccgctgctacacgctgctaagcgggcatcgcgggcgaccggcaccgcggaggagcgccgctgctgggttccgagcgcctgggcagccgagtgcgcggggagcggagttggctgcagcctcaccccgtgccgctcactactcctctgtcaccggagaggccgccgctcccgggcggagccaagtcccggactggattgcgcagatcggactctccttccgcaactccgcctactttggctggcgtctcctccgacccaaaggagagctgtggtgtatgtgagtgcgagtgagcgaggcagaggcggagaaactacgcggtgtggctgcaggtggagccttggaccaactggccagcgccgcttccttccaccaggattcctggccccaccgcgcgctaggcggaggctcagcgggggcgactctggctggagcccagccctcacctcccccacccccacatctgctctagctaggaaaaaaaaaaagaaaaaaaaaatcccggacagcattgctgagtcctgccaaatcagaaaaataaataaaaatagacgtagtgcaggagcgagttacaagaaaggttttgttcatcgattttcttaaatggaaaagttttaaaggatgagggtaagtgaacggcgagcttttctgattctgattactgttatcaagaggtagattccagaagcgatggacgctctacgtagttagatgaattggatagaagccggtgcggttaaaaatacacttggaagataagaacacagctattaattacgcacatacacacgttaataaagcatgtgaagtaagcaaataaactacagtgcagagaatggcgtttttaacgacggcgatctattttaaaacttaatgaagttcacattttgtggactggtcttagaaataagtaaacttcagaaataacacgcatacaattccagtgagaacccaaaaggtttatggaagaagaaaatcgcaaccacttccaaggcgctattgttatgatcacatgaagaatggcaggcacagccttctttcaccacttgaactttcaatagctacaaagtcttgcagttacaggcttgtgccaactcgtcgggccacaccacgttcccctccccctgccgctgcgccccgaaatcaactgcgcgccgcggctcttgctccccaagggggcttcgcagatggtacggatcctagtcgcaacctttaaacaaagtaacatcgggcggcccagcagttctcggagagatatttactagtcatggagttggctgagaaaagcaagtgcggagatcggggtctcagtcccacttaggccgagtttctttatattggaaactgtacctgttccctaattgggactaagaccactaataagtccacgttccctctttggtcgcttctctaagtacagacatctgcttaagaggcttcacgaagaataaatgcacatgggtcaacacccattccccccgcaccactaccaccacctggaaaaggtagggagaatggtaggaaaaaaagaaaaaatcagtacccctgctgttctccagagctgtcagcaggggccgctatccccacctttctcgggcaaaggcctctatagacctggggtagtggggggcgcggccctaggtgcgcgcgcagcccccgcggcttcaagagccagcctcgggagggggttggggagtgtggggcggtgggtaggattgcgctttcccgcgggttgggtgggggccggctccaggacgtctcctcagaatcccgcggggttaggagaaggatctggcggccaagacggctggatccccggctgcgctatttaacacccagattttggctgatgactgcagggtcagtgtgagctggtcccctggctcgtccgtgcgccccaggcgcggtactgcagccccttcgaagctccggacccttcggcctccggggttttttgtcccgcgctccacccaaccggggtcgccgaggctccttcttcgctccccgccgccgatttacatgctaattgtgtctgggaaaagttcttaaattggcagaattaggcagagcaaacgaattgtttcacaggccgaactaaattaatttcgggtttagctccttcccttagagaaacaaacaattaagttgttttatttgctttatggatatattggaaatgccccacaacgagtttcaggatattgtttaaagggacattatattcaatattaatacttgcatgtttaatttgt

SEQ ID NO: 318502 - DNA, 4001 bp, Homo sapiens
tttctagaaaattcctctagaatggtatttacaatgataatacaattatccttattatagctaatgtttatttaacttttatacaaatatattcaggtggcactaagcacttttatatatcatgtcagttaatccttaaaacaattatgtgaccattatccccttttgcagttgagaaaaaccatggctaagagtttaggtaacttgtctatgatcacacagagagaaagtcagtcacaaaagagactggattaaaactagttctgtcaaatcctaagctacatcttagctactgcaatatattgagagtttttagatagatcaccttgtaataactatagccgccaactatttttgtttatgcactaagatgccaaagaaaacataaaaataattcaagctgttttatttcttaatagaaaggctaggttttctctgtttcctagaccacaaattcagtagttacagaaccttggcaaaaaatcagcacttggttttttcactttgccacagagcacatatttatttatctatttatttatttatttattttttgagacggagtcttgctctgttacccaggctggagtgcaatggcgcaatctcagctcactgcaaacttcgcctcccgggttcaagcaattctcctacctcaccctcccaagtagctgggattacaggctctcgccaccacgtcctgctaatttttttatttttagtagagacggggtttcaccatgttggccaggctggtcttacactcctcacctcgtgatccgcctgccttggcctcccaaagtgctgggattacaagcgtgagccaccgcgtccagcccagagcacatattgcaagtagctgaatggtgaatacaaatgaaaagactgtttcactcatttccctcatttaggtttatgatgaaaaaataacccattggcagagagttgtagcttaagagttcacactttcggatttcttctgtcattataatcaacaggctgctcaattttgttttcttaaaattatttcttacaccgtaaacctttgataattatagttgtcagacagctatataaaaataatgaagataaataacaaaattgggtttcctggaagctgatccaataagaattgaaaagtagttgtaaatttcactatgtcaccacttttcaattgcgaaacttaaatttcatggccacattcagacctacatttatttaaaattactcattaaaaagcaggatatgtacaaactttctctgtcctccacctctgaactttaggccagcatctgaaagcccctaattcacctgaatgctctcattcaccatttaaaatacaaaagtttgcatttaatcacagaccacctaattgttgacatgggttttagcttctttaagggtgaccacttctgcactgtggactgaacctactgtaccccattccaccactttttcttctgaaactgctcacaatatccctggacatttctacaacactagaatgagcatatttcagtgtctgctcttcaaatccaaatggctgggttttttccctgtttgttcttactctgcccttcagtggaaaatatttaaatttgaacatataatactgcctatgtaacatcacaacagattatagaataaaaggtttggatttctccagcttcctctgctctcagctgtgcagaagacagggcagaaatcaagaactgacaaatgtgcgcactgggaacttcacctaccacacctaagttcagactcttcttattctttttctcttttattatttttatttcctctatccaccagttttctgaatctattctatggaaaaaaacaatttatcagactcaaaaaatatttaccaaactttaaaagaataaagtatcagaaaacacgaagttcctacttacacaaccacttccaacgggcctgcttcctttctctttgctttactctggcagctccacaaagccacagcagcacactctgatatttatagtcctgttgtttacctcacccctcaggtatagtccaaagttcaatgttcattcttgcagtgaccttgcaagcagagcaaacccctgagctgattgttatcaacttaaaagaaagtagcaagtgctgccatgcataatatggggaaaacattttgacaattactaatttattccctatccttttcagtcaccctagaatctaggatttaatggtacagtcgggggcgggaggaagggctaagggtaaacaaggcctccaagttgccttctttcccaaactataacagggaaaaacatttgctgagccagcgaattatgctgctgctttaaaaaaaaaaaaaaaagagagagagaagcttttttttccttttgttttgcttcttgcagtgatgaggtgctagcttagcccacacagtgtgacctttgttagaaaagtcacctgctgttacaagttactctggtctcctgttgttacagacttacacgtcgattgtgttctatgtttataacttgaattcatatgggatttcacaggaccactgctcttttcttgttaatttaaggaaatagaaaaatagacttcctatctgagggaaatcagacctcatttttattgtcactgaagtcgtacttcctggaagacctatgcatccccagaattttttgaggatcgaatataaaatctttacaaatgtgaataccataaaaataaaaattaaaggtagtagttggacatggaaagagtgtggaaatttcaagatgtacaaatgaaatagctaattcctactatttcagaagagggtattttctttctggtaacgcttgtaagttggcatgctcactgtaggtgaggtaaggagcaatgtcaaatgatgtcattcctagatagcaatggttttcgagtaggccttgcttttttcatcaattaatttttttccaaataatcccccactgattgctgtatgctgaatactgttgtacaaggtgcaggaactacaaagagactcagatgttatccttcctttcaagaaacttcctatcaaattaggaggttaccatttgaaatccaagttctctttacttgccctgagcagttgttacttgccttttggggtcccatatctctttgagaatccagttaaaatgcacatatacataatcatttttttaaagagtgtcattaaaaaaatctttgtacaaagcagatattcctccctgtagttcatttccttgaccaatttaagtagtcatattgaggaaagagagagaccctctcatattgttttatactcagtacctgttttaaggaaaaaaaaaaacaaggatgtgaaatcaaagacaggcagcccggtgccaggcccaaaccaggcctgggcctgcctggcctaaacccagtagttaaaaatcaattcataacttcgaaaccgatgttattcatagattccagacattgtacagaagaacactgtgaaactccctgccctgttctgtttctctctgaccaccggtgcacgcagcccttgtcatgtaccccttgcttgctccaatcaatcacaacccttacatgtgaaatctttagtattgtgagcctttaaaagggacagaaattgtgcactcggggagctcggattttaaggcagtggcttgcccacgctcccagctgaataaagcccttctttctacaactcagtgtctgaaaggttttgtctgcagctcgtcctgctacatttcttggttccctgaccaggaaacgaggtaactgatagacatagacggcagagctaacccgttaggcggcttaggcctgtcctgtggagcgtccctgcaggggactccagtcagcctgagtgacgcgatccaaagaacgctcccgggtaggaaattgccccggtggaatgccttgccagagcagcgcatagcaggcccctgcagaggattaacacggtggctgaacaccggaaagaactggcacttggagtcgcgacatctgaaacttggtaa

SEQ ID NO: 318503 - DNA, 4001 bp, Homo sapiens
aataggtagcatatattatttattgtgtccttaccatgtgccagacacagggctaagtacctcccctggattctcttgttgaatcctcacaatacccctatgagggaagaaatatttctatcccattatacgcatgagagcaccaaggggttaaataacctgcccaaggtcacatggccaacaaggagtgtctaggattcctatcaggctgtctgattctggtttctctacatacctctcccacctgcaacatcaactgttaaacctctggccacagacaagacccagacataactttctggtcagctgggcacagaaaatgcacacagacacacatgcagagacacccaggcactcacgggtctcttggcctccagctaatcagcaggtctgttaggattcaggcactgccctcctccggtacataaattccaatttataatacggggcgaagtgaatctctgagtagcccagcctctgaatctgttcctcatgtatttaaacttacttaactgacatacgaccccctctccaatgggaataaaacacccgagtctagaaattatgaaaccaagagctcctgctttagtcatgcacatttccaaagtagaataagaaatgtattttcagattaaatggaaaatttacatatataaattgggatgacggtatttatagcattaattacataagtcctggctcccttatttagccccagaaccaattcgttatcgttcacatattcagaattcccccttccctccaacagccctgggcctccctcctcctcctcctccttctccccctcctcccccttccagccgaccagggccttacatgctggcaagaggacacagcttccttcactgtcacagcctagcctcccagacacacccagatccagccttagacagcaggggatgtccagatacaaccccccaaaggcctccctcccgcgagtgaattatgaaagcctttagtaagttggctgtcggcaggctcaggcccagtgagacccctgcagggaccaccagggacatcaaccttctgaggacctggactggagcccaaataaacgcccactgggctgagtctggaatccctccagctcctggcgaatggctgccgcagacccgaccactgaggcctgacctgcctggagtcgcacccaggattccggcgtggggagcggggcagaggggagcgggggaggaaggaaaagcaggccaagggtcttcaggactcaagtctgcaactgtcctgggctcgtgtgggagactctctcggatcctggggcctccatcctccccggctgtacctatcccgcagcacctgtgcggctaggactcttccccaagtgtgcagaaagaaacaccctgggcgatagggtccggagtgtcccggaccctcacctgcggccccgcgggcgccactctatcttcgcacctgcccggagccaggcgggtctttgctccttcccgcgaaaggggttagccttgcctgcgccccaggaagcgaccccgaccagccgcccggcaaggcaggccgcccgacgctccgggaccccccgatagcgcggccgagagcccgcgccggggtcctcgagctggcccggtgtcgaggcccggccgtgaggcgctgacagcccgcttcgcgccccccgccagctgcagggcggcccctcctgcgccccgcgcctcccgcgcgcgccgtggcccagcggggccctcaccgagaagcgctccaggtcggtggccgccatggcgagctccgcaccgggcgggtgggctgggacgagcgcaggggcagcgacagggaccagccggctgcgggacgcgctccgcccgggcggctgcggctgaatggatccaatatggccacttcctggaaactccccttggcggcggcggcgggagaagccgcggagccgcccctgcccccgcccgcgggaccggcctccccgcccggcccggccacgagcgcagccggagccccgccgcttggacggccgggggtctccgcggcgaggcgggaggtgccagctgcggggactgctgggacttgtagtccgcgcgttgggggaccgggacggcagtgtcggggggctcggggctggtgcccggcgggcctctgcgtgtcccctggagcctggggccgagcctaggtgagagtctcctgggtccgcgcgctggaaagcctttcccgtaagggggaagtggggcacggcgtgcgccctagagatctcccccaccaagccgtctccacccgctggagcctgcaaatgtgctgggaccaccaaccagagtgtggacaagctgcgggagacccgtcggatccgggagaggccgcggcagcctagtctgcgggtgtcttgggccccacctgatgctccggccggagctaaggcgggaaccccggcgggacccgcgcgtccggccaggcggccttcccgggcaagggaccagccttcggctccttgtgcaaccaacgagcaggatgcgcagtttaggctgggattcctgcaatagaaaagcggagctcgacggtcaaggcgtcagattgcaagtgtccatcaccctgcctgtcccaagggcttgggacaacgtcttaatggttccaccattgtgcaaagaggatgaccactcccagtgcgtgcacgttctctccgctaatgtcactgctcaaaacgttcagaaaattaacacttacgccagggtcggaggcctcaggaggttctgtatccttctcactgacaatctatacaaaagcagctcccaaatcctctgaaaccccgtttctttctcttccctctgcctttctctctgctctttctgggaatgtggcaaggtttgccccctaccccccactggcctcatcccaggttggtccaccctccacacacacccctcaccccagtatgctgagaagcaacctgacctgtttctcctactcagaaacttgtgctgactggaggtgcctaaagaccacgttcgacttagcacacctggcttaagaggagccccctctctgctgtttgaccttgtcaccctgatttggctttcccctcctcactctcccaggcaaactgtagcttgtccccaaggtggactgacttcccgctggaccttcctgacaatgttttcactttgctcctctctctatgttgctgtttcccatgctgtattaaagttatctacaagaaatagagcagagcagtggttagggtagctggatctatggcaaaccttcctggtggaatcctgctagctttttaaccttagctaggcaagttacttaactatgcctcccttccctggtcctaaaaatgagaacaagtatagcacctatgttacaggattaaataacataagtaaagggctttaagttgtacttaaaatataatattaaataaaatctccctctctagactacaagggccttaatctcagagcccagagaatgtgtggtcaatactgaattgatcatcctagactgtatctactgtttcctttttctttccctataactaacaagaaatcacgaccaactgccatccgtatggcagttctgcattacaactctctgggactagccctaaattatcttcaaaatggtcttttatctctaatcggaaatatttcaaaacatgtacttcttacagtcctggccagtggctatgagaaggaaaagctcagagtacaggtgacttccttcttttgggatatattcactctgctctgtaggagtaaacaggagaatttcctcctattccacaatgccgaaatttctctcattttatgctgctgctggtcagaacttataaaagagtgagaattatctatgagggctcaaaaggtgaatataacgatcatttctcacatggcaaagtgttatttcttatggcagcatttctgagtgtttcgtatacacctagaggttagttcatagattttaccacaaaaagattggtctcaccgtcaaataactggggaatgctgagt

SEQ ID NO: 318504 - DNA, 4001 bp, Homo sapiens
gtatttaaacttacttaactgacatacgaccccctctccaatgggaataaaacacccgagtctagaaattatgaaaccaagagctcctgctttagtcatgcacatttccaaagtagaataagaaatgtattttcagattaaatggaaaatttacatatataaattgggatgacggtatttatagcattaattacataagtcctggctcccttatttagccccagaaccaattcgttatcgttcacatattcagaattcccccttccctccaacagccctgggcctccctcctcctcctcctccttctccccctcctcccccttccagccgaccagggccttacatgctggcaagaggacacagcttccttcactgtcacagcctagcctcccagacacacccagatccagccttagacagcaggggatgtccagatacaaccccccaaaggcctccctcccgcgagtgaattatgaaagcctttagtaagttggctgtcggcaggctcaggcccagtgagacccctgcagggaccaccagggacatcaaccttctgaggacctggactggagcccaaataaacgcccactgggctgagtctggaatccctccagctcctggcgaatggctgccgcagacccgaccactgaggcctgacctgcctggagtcgcacccaggattccggcgtggggagcggggcagaggggagcgggggaggaaggaaaagcaggccaagggtcttcaggactcaagtctgcaactgtcctgggctcgtgtgggagactctctcggatcctggggcctccatcctccccggctgtacctatcccgcagcacctgtgcggctaggactcttccccaagtgtgcagaaagaaacaccctgggcgatagggtccggagtgtcccggaccctcacctgcggccccgcgggcgccactctatcttcgcacctgcccggagccaggcgggtctttgctccttcccgcgaaaggggttagccttgcctgcgccccaggaagcgaccccgaccagccgcccggcaaggcaggccgcccgacgctccgggaccccccgatagcgcggccgagagcccgcgccggggtcctcgagctggcccggtgtcgaggcccggccgtgaggcgctgacagcccgcttcgcgccccccgccagctgcagggcggcccctcctgcgccccgcgcctcccgcgcgcgccgtggcccagcggggccctcaccgagaagcgctccaggtcggtggccgccatggcgagctccgcaccgggcgggtgggctgggacgagcgcaggggcagcgacagggaccagccggctgcgggacgcgctccgcccgggcggctgcggctgaatggatccaatatggccacttcctggaaactccccttggcggcggcggcgggagaagccgcggagccgcccctgcccccgcccgcgggaccggcctccccgcccggcccggccacgagcgcagccggagccccgccgcttggacggccgggggtctccgcggcgaggcgggaggtgccagctgcggggactgctgggacttgtagtccgcgcgttgggggaccgggacggcagtgtcggggggctcggggctggtgcccggcgggcctctgcgtgtcccctggagcctggggccgagcctaggtgagagtctcctgggtccgcgcgctggaaagcctttcccgtaagggggaagtggggcacggcgtgcgccctagagatctcccccaccaagccgtctccacccgctggagcctgcaaatgtgctgggaccaccaaccagagtgtggacaagctgcgggagacccgtcggatccgggagaggccgcggcagcctagtctgcgggtgtcttgggccccacctgatgctccggccggagctaaggcgggaaccccggcgggacccgcgcgtccggccaggcggccttcccgggcaagggaccagccttcggctccttgtgcaaccaacgagcaggatgcgcagtttaggctgggattcctgcaatagaaaagcggagctcgacggtcaaggcgtcagattgcaagtgtccatcaccctgcctgtcccaagggcttgggacaacgtcttaatggttccaccattgtgcaaagaggatgaccactcccagtgcgtgcacgttctctccgctaatgtcactgctcaaaacgttcagaaaattaacacttacgccagggtcggaggcctcaggaggttctgtatccttctcactgacaatctatacaaaagcagctcccaaatcctctgaaaccccgtttctttctcttccctctgcctttctctctgctctttctgggaatgtggcaaggtttgccccctaccccccactggcctcatcccaggttggtccaccctccacacacacccctcaccccagtatgctgagaagcaacctgacctgtttctcctactcagaaacttgtgctgactggaggtgcctaaagaccacgttcgacttagcacacctggcttaagaggagccccctctctgctgtttgaccttgtcaccctgatttggctttcccctcctcactctcccaggcaaactgtagcttgtccccaaggtggactgacttcccgctggaccttcctgacaatgttttcactttgctcctctctctatgttgctgtttcccatgctgtattaaagttatctacaagaaatagagcagagcagtggttagggtagctggatctatggcaaaccttcctggtggaatcctgctagctttttaaccttagctaggcaagttacttaactatgcctcccttccctggtcctaaaaatgagaacaagtatagcacctatgttacaggattaaataacataagtaaagggctttaagttgtacttaaaatataatattaaataaaatctccctctctagactacaagggccttaatctcagagcccagagaatgtgtggtcaatactgaattgatcatcctagactgtatctactgtttcctttttctttccctataactaacaagaaatcacgaccaactgccatccgtatggcagttctgcattacaactctctgggactagccctaaattatcttcaaaatggtcttttatctctaatcggaaatatttcaaaacatgtacttcttacagtcctggccagtggctatgagaaggaaaagctcagagtacaggtgacttccttcttttgggatatattcactctgctctgtaggagtaaacaggagaatttcctcctattccacaatgccgaaatttctctcattttatgctgctgctggtcagaacttataaaagagtgagaattatctatgagggctcaaaaggtgaatataacgatcatttctcacatggcaaagtgttatttcttatggcagcatttctgagtgtttcgtatacacctagaggttagttcatagattttaccacaaaaagattggtctcaccgtcaaataactggggaatgctgagttccatacacagacagggttctgtagaagtcctcagcttttgatcagctaatatgcattttctgtgcaaaagaaaggggaatatacagctctacccacactttgttgccccttgtctctaccctgcatacatacccagcaccacactgaacttgaacatgacaagacttcgcttcaggaaatgctgccctccaggcctcttgcttgtcttttacttttgtttatactttcttttgtcatgtagaagtttaaatttttgatgttgtcaagtgtacttgttattttatttattatttttactttggcttctaaaaataaagacccttccctaacttcacaaagatattgtgtttgtgagaaaagaataaattttctttaaaaacttttttttaactccttcacatctaggcaatttgtgtatgtgtatgccaaaccagttgtttcatctttcccctctgatgtacaatgcaaatggtatcacagacgacatttctgt

SEQ ID NO: 318505 - DNA, 4001 bp, Homo sapiens
gtaactgggattacaggcatgtgccactgcacccagctaattttgtatttttagtagagatagggtttcactatgttggtcaggctgatctcgatctcctgaccccaggtgatccacccaccttggccttccaaagtgctgagattacaggcgtgagccaccgcgcccagcctataaaaagttcttatggttgtggaggagctgcatgagtctctgtgaaacaaataatagcttcagagctttacgtttttatctatatgttgggatgtctaccccacgtggttttagtccgcctggcacaaatcattaggccctgttctaccaagggcttaacaaaatgctttctgttccccaaaatgaggccttctttttttttttttttttttttttttgagacagggtctaactctgccatccaggctggagtgcagtggtgcaatcgcagcttactgcggccttaacctcctgggctcaagcgattctcccgcctcagcctccagagtagccgagaccacagccatgtgctaccatgcctggccaatttaaaaaaatattttgtagatacaggggctggctatgttgtccaagttggtctcaaactcttggcttcaagcagttctcccgactctcccaaactgccgggattacaggcatgaggcaacacacccagcccaaaatgttgcttcaatcacaacgtcagtgactttagaattaaattagtaccacgtacctctgctttctctgagaggcagtcaagctatcctctttcctctttcccttgctaatttcctgggttttcttcatgtttttctggcgggcaagttctcgttgatttccacctacaaagtcaaacagtcatgctcttttcccatctccaaaattattaataattccaataaacaggccttatttaaatgcatctttagtttgtgttttcatagataaactagcagagtaacagattgatggtgctcctagatctgacaataaggaagtggcttaaacacttaaagacttaagagtattatcataccaatctaggtggtcactagctataaataccagatattttaaaacagatattcgaatcttgggccggtatcccaaaataagttctggcttttgaggggagtgggtggaagagaaagctagatacagagatcacaagttcagcccatcatttgagagttacctttatccccatgcagaggcggagaggggtggatggagactgaacagattgaaggtaagtctgcgaaaggcagtgtgggcctttacatccttattctagccacaaccctgcaaggtaggcttcattgttttcattttgcagaacagactgacctaacacctaggactggtacaaacgaacatcaaatttaggaccggctctaaagcctcctgtttattcggctactacctgcgagcgccaaacaaaagaactagggaggcgactcactggagttcccggtcctcattaggccttaagacttgaggtatcagctataaagtacctccaaacaaggaccctcctggggcggccgtgtccacatctccggggtgtgttctttaccgcacaaactcgcacctgaggggcaggcacccgtccggcctgaaaagccggaccggaaccacccgcgagctctctctctgccgactgaagcggggatccccgcactgcgcgacccagggggattctccagccggactccgcctcccccgcccgccgcgcctcagcgctaggctcccacgccggacgctcgccgccgcttcccacccccactcacgggccatgccgaccaccaacggagcctggaagaagagcaactcggaaaagcaacggttctctggcactctgggataccgtcaccaccgctgaccgggaaggctgagccctcgtgggccctccgcccggctgcgcctcccctctgctccgccaacggccccgcccgctggaggcccgacaacagccgccggcatggccggcgcgtcactgcgcgtgcgcggccggggctgggccggggctccgaagctcggccggggctccgagcttgttgaattacatttccctcatgctacattagcactaattttaaaagggatatacaatatgtatatctctattatgtgataagttaagctgttgtattctgaaatttaaaagcattattttcagtgaaaaaaaccacacaaatagaaatgtgtacaaaaaactcactgaatgatatttctttaatagtaaaggcacaatatgtcaaaacctcctctgtcctttttgcaacgatgtagaactgcaaagttagctaatgtcatctcctaattaaacaaaatcaactgtgagaaaattaaactgattgcttcacaattacggttgagcaaacactcagtttgtccctatttcatctcctgctttagatctttgagaaatttcccattgttttgcttccttagatttacagggaagaatatcttaatattctttaatgaacttgcatttgtagcatctatactaatgttacatcaactaggccttatgcatacatatttataacttaaaatattctgcacaaatatgatatattttaaagtctatacctcttataagtattatcttttctgctgaaattcaaggctatcaaataagtgtatgtttttagagttgtacagtgagatttgaaagcagtcatgatataatcactgtaatttttttaattaaatggtggcagataggccagataaattgcgggaaagggtcagataaatgatgttatgaatgaggtaaacttttatcatattttgtattatttgttatctatgcttctgtttacatagcaggatgactctattgcattctgtcattaacactgatttgtccatatcagtgcaagtgaaatctgccctaccctaaatgaaccagttatttctaacctacaccatcaagaaaaggttatgtctatcaacctccattacatattatatagaatatacacaatatacattctagatatatgaagtctttgcatacatctgagttatgcgtatgagtatacatttatatatacttatatatatgtttaagatatatatttctgaggatccatatatgtcagtgaacatgtactcaatgaactttcattattgtgcaaacataaacagtgcagtgttatgggatattccaaccaattataagatcaaatctcttcacttattctatttgtttttgttgttattgttgttgctttttgagacggaggagtcttgctctgtcacccaggctggatggagtgcagtggcgtgatctcagtgcactgcagcatccgcctcctgggttcaagcaattcttcttcttcagcctcccaagtagctgaaattacaggtgcgtgccaccacacttggctaatttttgcatttttagtagagatgggttttcaccatgtgggccaggctgggtttgaactcctgacctaaagtgatctgcctgcctcagcctcccaaagtgctgggactacaggtgtgagccactgcatccagcctctatttgttcatttttataaggcaatttctcactcaagatgtagaatcccttttcttttcttacttcattatttttttctagaagccaatgttaaaaagagaagtgtattaagagacactttaaaaagatgagatttacaaaaacatcttgataataagaaaaaaaaccatatgtcatttatatctaaatcaatcagatacctttaaggcttgtctcataggatcctataaccagggtttttaaaactgctttatattaagaatagctaagaaatgggaacttaatctgccttcctcttatgaattctacaccacagccagtatgagctgagataatattagatactcttaatgttattgttcctgcacctcatattcatgaaaattgcatagatatttagagaaatctacattccactaaacatctatttatctatttatatatgtatttacaatttttgcattta

SEQ ID NO: 318506 - DNA, 4001 bp, Homo sapiens; identical to SEQ ID NO: 318505

SEQ ID NO: 318507 - DNA, 4001 bp, Homo sapiens
tcccaagtaactgggattacaggcatgtgccactgcacccagctaattttgtatttttagtagagatagggtttcactatgttggtcaggctgatctcgatctcctgaccccaggtgatccacccaccttggccttccaaagtgctgagattacaggcgtgagccaccgcgcccagcctataaaaagttcttatggttgtggaggagctgcatgagtctctgtgaaacaaataatagcttcagagctttacgtttttatctatatgttgggatgtctaccccacgtggttttagtccgcctggcacaaatcattaggccctgttctaccaagggcttaacaaaatgctttctgttccccaaaatgaggccttctttttttttttttttttttttttttgagacagggtctaactctgccatccaggctggagtgcagtggtgcaatcgcagcttactgcggccttaacctcctgggctcaagcgattctcccgcctcagcctccagagtagccgagaccacagccatgtgctaccatgcctggccaatttaaaaaaatattttgtagatacaggggctggctatgttgtccaagttggtctcaaactcttggcttcaagcagttctcccgactctcccaaactgccgggattacaggcatgaggcaacacacccagcccaaaatgttgcttcaatcacaacgtcagtgactttagaattaaattagtaccacgtacctctgctttctctgagaggcagtcaagctatcctctttcctctttcccttgctaatttcctgggttttcttcatgtttttctggcgggcaagttctcgttgatttccacctacaaagtcaaacagtcatgctcttttcccatctccaaaattattaataattccaataaacaggccttatttaaatgcatctttagtttgtgttttcatagataaactagcagagtaacagattgatggtgctcctagatctgacaataaggaagtggcttaaacacttaaagacttaagagtattatcataccaatctaggtggtcactagctataaataccagatattttaaaacagatattcgaatcttgggccggtatcccaaaataagttctggcttttgaggggagtgggtggaagagaaagctagatacagagatcacaagttcagcccatcatttgagagttacctttatccccatgcagaggcggagaggggtggatggagactgaacagattgaaggtaagtctgcgaaaggcagtgtgggcctttacatccttattctagccacaaccctgcaaggtaggcttcattgttttcattttgcagaacagactgacctaacacctaggactggtacaaacgaacatcaaatttaggaccggctctaaagcctcctgtttattcggctactacctgcgagcgccaaacaaaagaactagggaggcgactcactggagttcccggtcctcattaggccttaagacttgaggtatcagctataaagtacctccaaacaaggaccctcctggggcggccgtgtccacatctccggggtgtgttctttaccgcacaaactcgcacctgaggggcaggcacccgtccggcctgaaaagccggaccggaaccacccgcgagctctctctctgccgactgaagcggggatccccgcactgcgcgacccagggggattctccagccggactccgcctcccccgcccgccgcgcctcagcgctaggctcccacgccggacgctcgccgccgcttcccacccccactcacgggccatgccgaccaccaacggagcctggaagaagagcaactcggaaaagcaacggttctctggcactctgggataccgtcaccaccgctgaccgggaaggctgagccctcgtgggccctccgcccggctgcgcctcccctctgctccgccaacggccccgcccgctggaggcccgacaacagccgccggcatggccggcgcgtcactgcgcgtgcgcggccggggctgggccggggctccgaagctcggccggggctccgagcttgttgaattacatttccctcatgctacattagcactaattttaaaagggatatacaatatgtatatctctattatgtgataagttaagctgttgtattctgaaatttaaaagcattattttcagtgaaaaaaaccacacaaatagaaatgtgtacaaaaaactcactgaatgatatttctttaatagtaaaggcacaatatgtcaaaacctcctctgtcctttttgcaacgatgtagaactgcaaagttagctaatgtcatctcctaattaaacaaaatcaactgtgagaaaattaaactgattgcttcacaattacggttgagcaaacactcagtttgtccctatttcatctcctgctttagatctttgagaaatttcccattgttttgcttccttagatttacagggaagaatatcttaatattctttaatgaacttgcatttgtagcatctatactaatgttacatcaactaggccttatgcatacatatttataacttaaaatattctgcacaaatatgatatattttaaagtctatacctcttataagtattatcttttctgctgaaattcaaggctatcaaataagtgtatgtttttagagttgtacagtgagatttgaaagcagtcatgatataatcactgtaatttttttaattaaatggtggcagataggccagataaattgcgggaaagggtcagataaatgatgttatgaatgaggtaaacttttatcatattttgtattatttgttatctatgcttctgtttacatagcaggatgactctattgcattctgtcattaacactgatttgtccatatcagtgcaagtgaaatctgccctaccctaaatgaaccagttatttctaacctacaccatcaagaaaaggttatgtctatcaacctccattacatattatatagaatatacacaatatacattctagatatatgaagtctttgcatacatctgagttatgcgtatgagtatacatttatatatacttatatatatgtttaagatatatatttctgaggatccatatatgtcagtgaacatgtactcaatgaactttcattattgtgcaaacataaacagtgcagtgttatgggatattccaaccaattataagatcaaatctcttcacttattctatttgtttttgttgttattgttgttgctttttgagacggaggagtcttgctctgtcacccaggctggatggagtgcagtggcgtgatctcagtgcactgcagcatccgcctcctgggttcaagcaattcttcttcttcagcctcccaagtagctgaaattacaggtgcgtgccaccacacttggctaatttttgcatttttagtagagatgggttttcaccatgtgggccaggctgggtttgaactcctgacctaaagtgatctgcctgcctcagcctcccaaagtgctgggactacaggtgtgagccactgcatccagcctctatttgttcatttttataaggcaatttctcactcaagatgtagaatcccttttcttttcttacttcattatttttttctagaagccaatgttaaaaagagaagtgtattaagagacactttaaaaagatgagatttacaaaaacatcttgataataagaaaaaaaaccatatgtcatttatatctaaatcaatcagatacctttaaggcttgtctcataggatcctataaccagggtttttaaaactgctttatattaagaatagctaagaaatgggaacttaatctgccttcctcttatgaattctacaccacagccagtatgagctgagataatattagatactcttaatgttattgttcctgcacctcatattcatgaaaattgcatagatatttagagaaatctacattccactaaacatctatttatctatttatatatgtatttacaatttttg

SEQ ID NO: 318508 - DNA, 4001 bp, Homo sapiens; identical to SEQ ID NO: 318507

SEQ ID NO: 318509 - DNA, 4001 bp, Homo sapiens
acccggcaattttgtgtttttagtagagatgaggtttctccacgttggtcaggctggtctccaactcctgatctcaggtgatccgcccgcctctgcctcccaaagtgctgggattacaggcatgagccactgcgcccagcctgtttgcttttcttttaacttcctaccgccccatccacaggaaatcacagtgtgatcaccatcacacagcactgaggcccaccacagtgatgcctccagcaggcctgggaaagcaggggttaactttgatttggttctttccaaagtcctaagaggggagactttagaaacctgctaaaacatcaacagcaaaataattcttttacaaaacccatttgaatactggtaattacagagctctaaattaggaacttgggaatggcagaaagagcctcaaggggacttcaagggaccaggacagatgcccctaaagagctgtatcattactacgtaataaaaagtgtcgcatcatattggagaaaaagtatttcaaaacgggaataaaagatttgcagagctttctgaaaacagtctttcctggtccaccttgttctcaaatacctggtaaggtggtgaccattctcattctctttctctctctgcctgacacagggaaaaaaaatcatttcgtctcagtcgtcaaaagcctcaatttcctcaactctgaaaaggccagctttaatgtatgccaagcacagtattagacctcaaaaaccaagacagctccacgtggccactctaaacaggacagattatctgccagtataatcgccggttacagaaacccacagtttaaccactccatcacttacagctggcctcgattgtggaaaggctgagtgtcagcaagaacaccccgaaccaggatgctccctagagtctgattcgttcgtgaaaacactccattaaaactctgtaccgaaacgctgataatccacatgtaaagggagaaaagagctccacatccaagagactcacctacttcgttttttctaactctgcaggaaggagtgaaaccagcattacagggctaagacgtactaattctacactgatgcagtaactggtaggagacataatgttttaagacatcataggtttaaataggcgagagttaaaaaacaggttcgaacaagtttatttgcaaagagaggcaggaaggttccagccctacccaggcagtcgtgctagtaccgagccagggttgggtcgggaaattcaggaagcagggctgagttttcccttcgcccagacctgcgcccggtagtttggaagtcaggcttcgagacattctcaaaggtacagagcccacgctcgactacgagatgccaagcgcaacctgcctgggttgtttgacccgagttttattcagggcatagcaaaggagacggtgcctaaacccacttttcttcctggattcatccgacaagcagagtggagagggctacggagctcagcgctattcaccagtgctcggcgcaagaggcgacacgcccctggagcagtcgggatcctccgcccgagcccggcacgccccgctccacgcggagtcccggaggccggacgggaagaccccggggtagcctctcgggcttccccctgccccttcccgcccgcccagggcacaggatttcccggacggctgagcgccgcggggccagcccgagcgacccacccgggccctacgttcggccgcggagctgggagcgcacccaggcaggtcctccacgcctggactcctggcccggttctccgatctgacaacccccgcgctgcgcccggcctcgctcacctggcccgcacagcactgagctgacatcgcggcggccaatgccgaaggcgcgctcgctggctccccgcgccgcacgggccctcctggctgcctcgcgcctcgagcgctgggctcagccgcagctcacacttgaacgaagatcagcctcggcgaagcgcctaggcgccgaggcctgggtaaaaacaactgcggccaagccccgccccgccgccggccccgcctcgcccgcccccagccccgccccgtgcccgccccttcccgggcgcccggcggcggagcaggctcgacccgggctcgcacttccgctggcgtcaggcgggtgggctgctgcgatcacttcccggttggggcgccgagctccggagtcggccgccagcctttgggccccacgctccgggtctggtgcgcggtctggccgcgctcgggccctcgccaaatgagagcgcagcgcctctccgccttcggatccagagaaagagcttgttgctgcctctaaaaggttggagccttagtaagcggttcctgcctttcctgcacagaccagaccgccgggtgctggtctgcgctctgccgcgcgccgactgggacagcccacccacgagatccttgttcctgaaatccctttccttccctcatctgccaagaaaactttcaacttttgggctctccgcgcctcccaagcttcctcgaatccctgggcccttgactgttctgccctgatggcacttggtgagagatccattgagagccctttccgtgccttcctgaatattgatatgttttccagcctctcctcctgcgctggcccaaggactcattttccgtccctgcttcctcactaaaaagagggtgcccaataattgcttgttccatacagaaggcagggaggccgtctctaggttttctcccactcagatctgctgtcctcacagccacctccccaagaggaatgaaggtatttcttttttttttttcttttttttctctgagacggagcttcactctgtcgcccaggctggagtgcagtgacgcgatctcggctcactgcaacctctgcctcccgagtagctgggattacaggcgcctgccaccacgcccggctaattttttgtatttttagtagagacggggtttcaccatcttggccaggctggtctcgaactcctgacctcaggtgatccgcccgcctcggcctcccaaagtgctgggattacaggcgtgagccaccgcgccctgccggaatgaagatatttctgttagtgcgatttttgcgccaatccctttgctctttcaaataagcattaccgtacccattttagcggtgaggcaactgaagcccagagaggttaaataacttgcccaaagcctcacagcaaagttgaggaagtaaaactgggcctggaatccactcgtctgatcccctggcacatgacgcaaggcttgaccttagagggactcgtttccagacagagctctggcaaaggagtgtcttgggcagcttaggagtagaagaggaaaggtgaatggaaaccaggccttgggttatgagctgcgcaggattttccagcatctcagatgcaggcgtttagagaaagagatataatggagcaggccctactcagagccacgaaaaggaatgaggacagttggctctaactcaaaacaaaaatagggtaaacccaatcagtcaagcgcagcaacctgctccgtggcgatctgtgactcatcagaagctgaggctctcaccaggactttctaatgagcttcgctgttggctacgaccgcggtcacttcacttcagccctactcctggcctggggaaatgggcaggccccctagtagctcggggtggggagacgggtggagaggaaggaggggcgaaaagggaaggcgcgaaatctacaaatgtttaagccagctggaactccgatgcctctttgccttttagggaaattgactcgactcggaactcgaggacctttcacaagagaccactgggttagggggcagagctggtaatagaatccagcgctccgaaccctgaatcatgtcctctttttgctgctgaggctcaggccacagcaccccaaattatgactgtagaataccaaaatatgctatcccaaaatacacttgtttggcacatttcaagctggttattctgagaaactgcagacacgggagtagc

SEQ ID NO: 318510 - DNA, 4001 bp, Homo sapiens
atagagcctggaaaactttcagtaatgttcctaggacatcttcatctgagataactttgtctttggattcctctggaacatatcggagggtcctgaaaatgggaaaagtttctattcactacccttcaactgataaaagccaaacttacctgcataacttctgggttcctggccttaaggaactataagcttattctcatgtgtgtggagggctggaaactaagttcagaaaagaattgtttgagggagttctagttagctaactcccaacacttcccacccaagtagtcagtacttatgaaaggcccattctataccacatgctgtggggtccttacattattccatttttgcagacaaggaaagcaaaattgttagggaacttgttcaaggtcccaaagccagtaagtgggagagccagaggcagaaacgaagttcagctctttcccgtactacacccaacagccaagctgaatgtcatcacaatgagaatgaatgacctcacattcaatggctttttaaaaatggccttgtagtttcaaagacaaattcaacatcgtatactttgtgacactccctccaggacgactaacgtcttcaatgactgcacctcttatttccataatcattatctttttgtactaactgcattatttttacttgaacaaaaaggttgtaattcccgcctcacggttccgagtcatgatacaactgatctcctgtttccctagcatgcaaccttccggaaaccgctttgtttccctatttgtcggacactgacttcagggaggcccggtcggcctctttggtgagcacggtgttgagctgatcactggtgcgcccttaataacgccggcgggactcaccccaatccgaaacccaccatcccgacgtgcttttgagtggcgttctgcccgttcttaacgcgcgagctactgcacgctattctcacagccgggatgggcttctttaaccacgtgaagtacttgtatgaactatgaaaataaaccctggcttggcttttctgaggaagttcaagcacctaattaacccctggtggagaaaaagccacgcactctcacgcggtaagggcagtctttttaaaaagtttccatttttgcccagatacaagctccccagtcagtgccgaacgcaacagggaagaacaggcgacacatccggctggcgagctcggcctcgcgggcccggcagcgcagcggacactgggaaagaggccataggccccgcccacctgaagccaccgcccacttcaggcttccagcgggcctcggactccaccaacctcggccccgcccgcctctggcccgcgttccttaaacccctccgaggcctcagtccccgcccacccggcccgcccacctcagtccctgcccacccgggcccgcccatctcaggccggcagtcagcctcaggctctccgctttgcgtcccgccgccgtggtggcgtctgggaaccgaaggcaggtgcccctcgttctgccgtcccgccctctcacctcgggttgtggcttaggttcagtgcgatccagggaacgaagcggtacttgtaacggcgccatcgctgccacaggccccgcagcagacggccaggcatggctgccccgcggggccgtgaccaggacggcgcggggaaggcggatcgaggcctcgggcccgccccggcccgggaggagagggggccgcgctcggccgccttcccctggctccgctctcagtgttcctggcaccgcctgacttctgttgctctggggcttcgtccttcccctttcctgacctcacctctctgaatgagaggcgcgtagagctggaaggaggtccccttgaccactttttctttctccggtcgctcgggtgcttccgtgggcgcacacaagcgctagccctggttgcgggcgaagggtcaccgggcctcaggggcgaacccgcccccgagaccgcgtcccaggagcggaccgcctagtttctctgtcacggctgtctggcctgcccctttgtcccggccgcgctctgtgttccatcctccgtccacttgagctctgcctcttcctcgacgttctctccccttctctccgtggccccagagcagcccgacttcgggaacccgagtttcagtcctccccagacagcagcccttcttctgcgtgaacccgtgttcccaaagttaccagtttgggcgttttgcgaatatttacacgtaaaaaaacaaagtgtcatgattccctgttttcactcgtttttctcttcattgacccaaccattcaaaggcaaaactacatggacaaatgtttctgaaaaacagctttgttgaggaatggttgggatacaataaactgcacatatttaaagtgaacaatttgataggttttcgacaccacagccaagatagtaatccagcccctcccccagtccccaagcaaccactgaggtgcttttgtccttttaatatggtcttcgcttcaatttggaaacgttttgtctagaagttctgcatctgtgttcgtgagagatattgtttcgtagttttcttgtagtgtcttaatctggctttggtatttaggctaatgttgacttcataggatgaggtgggaagtagtcccccataggtgaaatttaaaaggaactttacgaccgctcctccccaacacccagatgcatgcacacgcacacacatatttagaacaggtttggacaaagttcagttttaaggggggcaaactacaggaatcccttaaccatattcaaatcaccaagtgtttattgacagataaatacgttggtatcatttcctctattctttgcctgagagtgaggttggatcctaaactattgaaattgaacggctcagatctaataaaaactcagccaaggccgggcgcagtggctcacgcctgtaatcccagcactttgggaggccgaggcgggtggatcccctgaggtcaggagttcgggaccaatctggccaacatggcgaaaccccgtctttactaaaaaagaacaaatacaaaaattagccgagcgttggtggcacgtgcctgtagtcccagctactcaggaggctgaggcagaagaatcgcttgaacctgagagacggaggttgcagggagccgagatccgccactgcactccagcctgggtgacagagtgagatcccgtctcaaaaaaaaaaaaaattcagccaatcgccagtagctgcgggactaatttgttctattctgaaagaaataaagagaaagagtatctaccaatgtctctatttcgttcatatcatatagaatgttagcaaactctagaggctttctctcagactctgtgtttgtttgataatttggcataatctagatttacctgacttgctaaatggagtcaattcagttccaggatgtattaataagtggcatacaagaaagtttctttatagtctccaaacttaacaaagaacccaaaagaactagtttaatctttacctatggtaatgtacttgtctaaaaaaagaaaaaaatcagtttttgtatatttttacagtttttttatatttatggtattaaaattaaattttggttagctaagtaattaatgaaaaccttctttttctagtttcttaaagtaggttattaggtcactaattttaatcttttcttcttttctaatggaagcatctaaagttatacaaatagaaacatggtagctaaagctcaagtcacccttaaccaaacaccgtaccttgtacttccaccaatcctggtacttggcgcttctcagaagttatcagacgggtgtgttttctgccagttttatttttatgtatttacatacccgcgtatgtttttatagaaaatacatagtattttgtgtgagtattgttaaaatattataaggatccacaacttatttgatttcctcaaaaatacatcttgaagatctacccatattggtttaagtctactgcattcttctatttttgaggttttgccttcaagttt

SEQ ID NO: 318511 - DNA, 4001 bp, Homo sapiens
tttctgaacatccatgtggcctgaaagcctcaatctaacctctgaatacgtactaagctgagatgggagctgatagctcctccctgccaaacactgtatttttttttttttaagacggagtcttgctctgtcgcccaggctggagtgcagtggcgcgatctcggctcactgcaagctccgcctcccgggttcaggccattctcctgcctcagcctcccgagtagctgggactacaggcgcccgcaaccacgcccagctaattttttgtatttttagtagagacggggtttcaccggcttagccaggatggtcttgatctcctgacctcgtgatccgcccgcctcggccacccaaagtgctgggattacaggcgtgagccaccgcgcctggcccaaacactgtatttttgaaagtgagacacctgctcagtgctgaggagagaaaggatctgcttgaggtcccagaacttcttggtagccaccccattcatcctcccaaacagttccctctcatcttttatatcaagtctgaagctgtaggagctgcaaagcctcctcatttacctgcatcctccctgggcacctataacaatgcctagaacactgaagcagatcagtaaaagggggatggacaaagaagggagaatccaaaggcacccaagtcaaaatctagaagtcaacgcagaagagggactaggactgtgagaaatgtgcagggaaaaagctatgggggcgcagaaaagagttgcctacggagcagctaagtgcccaggctctggagtgaagcagagctaggctttttcgttcaggcagtcaacaaatactcattgagggccttcttggtgcaggcaattgttatgcgcaggggatagataggctgagcaacacaaaataggccctgttcacatgaggagaagaaaacatgtaaacacctttaatttcaactagtgacaaaagacactaaagagaaaaaacccagagtttgtgttacaaagggtgtgtggggggatggggggtgcaattttagacagcatagccaaggaaaagcgtctttgagaacgcagtatttacgactgagactcagatggccttggactatggatggccagctgtgtgaccttgggcactcaacctctcagagccccagttttctcatgtggattatagagccaacacccagtacctcgcagggccggaagagtgtaaaagtatatggacctaagtcacctggcacgcacttagtagactgtttattgtcattctgggcaggttagagacctgtgacagacgtgaaagttcaggagaaaagcgtgaaaatgcaaggtccctgtaggaccaactactactccaagaatctacttccttgcacatcacctccctactggattgcgagttctagggcaggaaccaggtggtctcccctccgacccccagcaccaggaggcaaagccgagagcgcggagcgctgggccaggcactgggccacctggctgccgctgcccccgaggcagccatcttggtgtccccggagcgagttcgccacgcaggcgccgaagacagcgcggccaggcgcgcggggacgcggcggagggcccttcccaccggggacgaggcccacgggatgctgggcctcgggatgctggaagcgtggtgttgtccggccgcaggatgccagggatccccaggtgcagggaccccccccccggcccgaggcatccccggcccgcaaaggggcttccgacctccgagcccggggtctccccgcagccggcccgcgggtgcacggcccgagcctgcccaagcctgcgcgcctccgccgggccccctgcgcgtttccccacccacctggctgggcctgccgcccgcgactcaccgcttcccccgggctgccgcccgcgctgctcgcaggtcccgctcagtgcagcctccgccgccaccggaaacgcttctcccgccacggcgtcctcgcgcgtccccggagcgcgtcctcgcgcgcgcctgtgagcgcgcgtccgggcccgggagctacgaggcccagggacccgccctccgggtccaggcccgggtccaggccccgccccgcgcccgcgactccgcttctggcttagcgaccgcgccccgggtccaagaggaactccaagcccatcctcacggtggtgtggggctctgcgcgggctggggccactatgttccatttgggtttcccttaagggactgcttctttatcatttctttattcccagggccttggcgtagccagcatccgttcacgcagtcatttacccaattaaagtgtggagcttggcaagactggcgctacaaggcgattttaggactttagtgccacgacctgatttatgtcttaaacaacaacaacaacaacggcgcactctgtcttctttatggagaacagactgcgtgggaggggatgtggaggcagagaggctgtttagccagatgctgtggttatccaggagaggaatcatggtattttggaccaggtgggtaacctgggcatatttaaagggcaaatgaaatctaataaatggtgaattacatcataaattgcataggaagattccatttttaaagatgtaaattctctcccaaatgacctatgacaataaaaaaaaattcgacaacactagtgtgcttggtggagtgtgtgttataactgcacaagcggactgcaaaatgtacatgaaaaaaataaagagccagaaacagccaaacaagcttttaagaaaagagcaaggcagagtgacttgtcctgcagatacaaaacttgttataaaacaatggtaaataacaaaggtggtgtgtttgctccggggtcaacaaagagcctcgcggagccaaatagagttgccatccatgtagaaacctgcacatgtagaaacctgctgtgagttggcatcacaggtcaggggacaaaggttagatattcattaaacagtactgggatagccaaatccctacttgtataatacatgaaactcaactccaggtggattaatgatccaaacgtgaaaaacaaaacttctaaaacttaagcaatatgtcacagatattttgagtgctattcctcatcctccaaattcctatgaatgtttaactagctttttctctgtaccataccctgtgccaagtgctgggctcaaaaagatatataaaagatcgccccttcttggctgggcactgtggctcatgcctataatcttagcactttgggaggccggagtgggtggatcacctgagctaagaagtttaagcctggacaacatggtaaaaccccatctctaccagaaatacaaaaaattacctgggcatggtggcgtatggtcccagctactcaggaggctgaggtagcaggattgctggagcctgggatgtggaggttgcagtcggctgagattgtgccactgcactccaacctaggtgatagagtgagaccctgtctctgtctctctcacacacacaaaagaaaactaacaattattaaaaaaacagaacaaaaccagtttctccaaagagcttgtgagcaaggagatagacatgtaaatacttgtttgaaataaatggtaacaattcaatagaaaacttgcaacagtagaatgtggaatatattgtataactaagtgccatgagaacacacagaagggattgactagttgcctgcagaatgggcatgtggagaggtttagtagatacaaatgtgtcagttgtctgttgccacagtaatgctataagacaactgcaaaaccttgggactatgcaacagtaaacatttagtttttttcttgagtgtatgggttggctgggaggttctgctgacctgagctgggctctgcagagcttgctcatgtgtctatggtcacctttgggccatcagtggcattgctgatcttggcagtgctctctcatatgtgtctggggcctcagctgggataactgggtagggatggctccgctccatgtctcattcctccagcaggctggcct

SEQ ID NO: 318512 - DNA, 4001 bp, Homo sapiens
aacacgaagatgaaactaataaagaaaatgttcatgaaccatctcttaaagatatcctgctgccagtcctgtcccaggtccctcctccaagtacaacacttggaagaaaaaagaaaatcgctggctgaaaatcctgaccttctaccaacaggacagaatgtgtgccttctcattctaggtcttatgcagaggaagcaatgagaaatgctggctctccacttttctttcagcattaacttcaggctcttctattagctacttgtttaaagattgtaggacacaagtaaatgcacacctgttgtcacagagatccaccctaagaggtctagtcactcttcagctactcaagaagtatccaagattccattcattcatccatctccccaaccagacttttggccaagccccgttcggaaaaaaccaatgttgtcacagattgctgtgctagtaattgtaaagcagttgtaaggtttagctcggctttgggctgaaccagtctctcaaatgcaatgacattgtactgtgtgttttctaaatgctgtacataaaacaaggtatagctttcctatgagaggaaaaaatctatactgcaatagagttgataaagaagaaccaaaactgaagaggaacactaagatccctgttgtgctgaaaatttttaaaactttgatttttataaaaagctcttttgcagtaaggtgtaaaataaaaccaagagatcaatgaaataaaattcacaccatcatgtctctgtcctttaagaagaattttgagtaaactgccattttctgttacttttttattatctatgtttcctaaaatacagaagtgttttttgagagtaaaactgcaaattacttcaagtgagaaaattggaaatgattatagaaacagaattacaaatgttgatccagcataattctaggcaaatatatcactgacagtcaaatcccagataatgacagtcaaactcctatataaaagattttagaaacccatacacacatatctgtttcgacactctgaaagtgtcatccaacgtagaaacttcaaactctgattccctcctaaaatgagagccattttctactattaaaaaacaacaacaacaaaaaactccccattaaaactcttgcgaagtgaagcaaaacacacagacagtttcatctgaaattatcttccttgccagtgaacggcccttccacgcagaaaggaaaagttacagatggttggagcagggtgacaacataaggaattcacatactcctctttacacaataacgttgccagctaaatcctaactttcaaaagaagtctctctgccctgctgaaaatcagaccttaaagggggaaaagcacagattggagccccatgccaactgtttacatgacggagttctaacttgctaattcacacacacacacatgcacacactaaaaactcggagtgcctgcaaatacagcaggcagatagcttagaaagtgaacagacgcgtgcaaacgcaagaactgaacagtaccctacctctcttgtccgtttcacaaaccggccgatgaaaaccgcccgcgatcccagggcgtgctgagcagctctgaaggaggtggccactcggcccgctgagtgtgtgcaggcccagcctgcgctcagaagctgccccagtcagattttccaactgcagaactgcagccaagtccctgcccatgcctgaagaatttcctgaacagcattcccgttctttttctgactgctttgaaaccgtactccgtacttcaatatggctttgtcagaccgactcacagctactgggctgtctccagctatcaatgggaaacacatgtgtcaagcacaggccgactcccctgcaacagcgctcatggtgtctgccgggctcatactcacaaccagaaagaaaactgcttctacaaccaattctgatttttcagccattctccacacagcctctgctctgtagtgctagatgctggagataagtcctctctttcttctgctcaacactgctcctttttcacttgctccttacacttgagtccccagctgacccctgtcagccccctgagctcttgccagtcctgataacaagcttattacagctgagagatgtaaattctaatttgatctccctacctgccgcttcctaaatctttgctcaaaatttcaattgcttgagggggagcaatatttttagcatttccacactggtacagttcttcggagctgtcccctcaacctgatatgtacattttttgctgcagcaactaaaaataatgcaattatttttcaggcacttttgttgctctctgttctgcaacagtgctggtccaaaaatgtaacattttataggctgttggaatgtgtgttatggttatggaaaatagaaaagagaaaagaatgtactttgaatcagaatgcgtcctaattctgtgcacctgtgattatttctggatgacactccctcaagatgccctgtgtacattctgctggatttgatgctctacctttgacattttccctttccatgcaacaagaggaaacctcaaaacaggaggacacccctcttctcccacactgaaaaacccccatatctaaagagccagagcaaagttgtcaaggtaacattgtagaaaagaggtgatttaaagagagaggagcatttgttttgaactgtttcttttttctgtttttggtattaacattttacttccaaaaatcacaccccattggcaacttattctaaagaactggcttgccagattttaagtgttgtatgttcttgaggggatgttgtaagtaataggattcggtggggtcgtgagtttagcatcaaattacactgggcactttgagcaggattagattttcgccttgggaagcagtggggtgggaggcggtgtggggaggtgtgtgtgcacatctaaggtcaagatgcaattacagaatcagatctttggagttggagacaccccagagatcatccaatccaaattgtttccacccttcattttacagagggaagtagaggcccagacaaatgagatgacttgtccagggttttaaagacagttaataccagagctgaagctagaaatgggattggtgctctctttttctatctgctttctctactgcagcataatttgggaaggtgatatcatctagccttctaatcagatagcctgggtctaatcttagctctgcatcttactgactataaaccctggtcagcttgcttaacctctctcgatctgtttcctcatctgtgaaatgggaaccataatagaatctactggtagaattgttaaggattcagtgagataatctgtgtaaagtgtttatgactgcctataaatacatttcagtttacttttttttttaatggagcaaaatgcaaaccttttctctaacctaaaagccaaattgtactctcccatctagtgtgagttctagaataaagtatttgagtggctagttttctgctgctttaactttatgtaataggggcctgtcaccttaaacttggagaactgtcctgaagccttattggaacattaagccagctataccgctactttccatttattccctaaatataacactgaagtctttccttgagattaactcacagaaaagaaaaacagtgagatcaaatctgcagtcagttacatgaggctgaacaaagtgtcattccagagaactgggctttataccttaagagctcaaaattatcattctataaatagaagactattaacaattacaatgttcatgtttggaaatggcaacgtcctaaattaacaataatagcaaaataaaatcccacaagttgaggaagaaatctttcagagaaaatagctgctgcaaattctaaagaatcagacttctacgtggggttccacagtctttgagagccagtggtagcaaattgctaatgaaccgcttattgtttattattcacgttttatgccctgcttcttttcaggga

SEQ ID NO: 318513 - DNA, 4001 bp, Homo sapiens
ctcatggcccaggctggagtgcagtggtgtgatctcagctcactgcaacctccacctcctgggtttaagccaccctcctatctcagcctcctgagtagctgggactacaggcaagtgccaccacacctggctactttttgtatttttagtagagacagggttttgccatgttgcccagcctggtcttgaactcctgacctcaaatgacctacctgcctcggcctcccaaagtgctgggattacaggcatgagccaccaagcctggccctggttttattttctcacttgttaaatggggataatactaacataacagttgctgtgaagaaaaaattgcctataatatgaacagcatacttctgacatatagtatttgttcaataaatgaacaatagtcctcttaatttgttgttaaaacaaacaaaacaagcttcagaaaatggaaatacgataaccttatagtcaggcctctcctcttgaaagatcaaaaaaaattctgattatgttacaatagatcatcaagttgggcttacagctattttagtcttcgtttataattataatataaatgaacacaaagagcagatgcataccttccaaactttcttgttcatccgaggtgtaagtgtccatctgactttgttcccgtaagaaacgaataactgcataaaccaggtgcttgatagatgacattttagaagcttaaacacttttccttgataagaaaaatgaaaacactgaactaagttattttaaagaatcagtcaggaaagtcataaattacaaagatgatatgggttataaagtgtattaaaggtaaaaacaaaacacaaaactgtatgacctttcatcttttctctttgtaaagagtcaggagagcacaaagtattgtgaaggtaatttattacatattttcattaatacccagtggtatacgagtatgttaaatcttggaataagtaaaaatgtcttcaaaacatgtacagcataagcttagactgtcactgcatatctcaccatacagaaatcccctaaaggcctcagtactaagttaagaggcatttcatactgctgactaaaagctgatgtataccaagcatcttcctctttttcatgggatctaaaaaaagtattaataatgtacactctacccacttttgtaggttgagagttatttgatgaggaaacacattcgcgaaaggttattcaagtggtgagtgtcgttcttaataaaaatggcatttctatttaatcagcagacatgtcaggaaatcgctgcccaagtcgatggatactacaagccgaccggcgctccctgcagaggctgtgctctcgtggacaagctggaagctcccggtcatgttcattcacatggaatactatcgcatccaaacagtggcgcagggccaggcggcattcatggctgatttccaccaaatcgcatcatccatctgctccccaggttccctaattcaaagccagggtgtggtacccgccgctataatgtttattatttgtgtagttattttaaaggcgatgtcagcctctaggccacggggtcataagcactaaataaggccccagggcagaaggtaaaaacagaatggggggaaaaggggtgagaagagggaaataggcttctcccccttcctctccccagagcgcatcgagctccccctcccttccgtcctccctcaggtacccggcctcgcctcggccctgcccggtgtgcagcgggtgccggtgcgggccccggtccggagcggcgggaggcgcacccttgccagacagaagccccttaccaagcaggaggacgcgagacgactgctgctggcccgcggggttccgtaggcaggcccgcccgacccctggtcctcggggctggagcccggctcgggatcgcagcactggtcgcggcggcgcaaacttccccggcccctaggccgtagaccccagaacccaccaggctgtgctctctctcaggcggcagggtctggccagcaccgcccctggggcggggccggacgcgagggctggggcggggccagacacgcgagctggggcggggcacggcgcggggcggggctggtaggcgccggcgtggagctgccgcacgtgggagggcgctggccaggcagccactgtggcctctgcggctaggccggctcgagactcccgggcgcccaggcgctgccgcccgcctcgccgccccacgccgaaggaccacgcgcccgccgccgccagcctctcagcgctcccatgatcgcccggtgccttttggctgtgcgaagcctccgcaggtacctccagcgcgcgggttaaccttggccgtgggcagggcggggtctttcgccgtgtggtgcctggagcccggacccaccccttcccgaccgcgcctctccgacgctcccgggacgcaccctccccgcggcttgcaaggtggacccctgggggacacctggcgcggccacctggggccacctttcccgcctccgctccctcgggaggacgtccattcctctttgtttgggactgcctcagccgcagtcagcgaggctggtcacagacgcggcccaaaatgaatgcaaatagtttggataagaaaatcatttcacgttcaatcccaatgcagaactacagacctgtcattaaaagtgccgcagctgtggactcagaacaattgtgtttgctcctcgcgcccattattagcattccaatcgtttaacatccacccgagatgaaacctctttggtggtgttgcttgtttccgtccatgctctctgacttccttttttattttcctcctccccataaaacaaacattctgcctcttgccggtgcaaattgacttggcccaaaatggagaaaatgatcgcttggacacggctttgggcagcctgagctgctgttttggattgcttcctagccctctaaccacaccccactgcaacagaccagtagcaagatggtgagggaattaaattctttgcacggatgcgctggttttcggaaacaatgccgccaccatccccgtttccaaatctgcccagaactgtaaatccaaatgaagattcaacagaataaagaaaatgtgtgcttcttgctagctatcaacaaaactactttgtaacatgtcagcatttaagctttctacagttcccttttgcacattgccactcgtctgtgtggatggagctttgtgttgctcagtccgtagagttagggagcaggcaggcgacagtggttaattacaaagagttaatgtggtgattggtgaccatatttcagcctgtcgttttttgctagtctccaggctgcaatcgatatagctgtcaaatgaagttataccaagaaatgaagacttcacataatgcaggggtgagaggagggaataaatcttcatataagagcaattctcggccgggcgctgtggctcatgcctgtaatcccagcactttgggaggccgaggcgggtggatcacgaggtcaggagatcgagaccatcctggctaacacggtgaaaccccgtctctactaaaaaatacaaaaaattagccgggcgtggtggcgggcgcctgtagtcccagctactcgggaggctgaggcaggagaatggcatgaacccgggaggcgaagcttgcagtgagccgagatcgcaccactgtactctagcctgggcgacagagcaagactccgtctcaaaaaaaaaaaaaaaaaaaaaagaacaattctcaaactttttattctcaggacccctttacctttcaaaaattaccgtggacctaagagcttctgtttgtgtggtatatctgtctatatttaccatattagacattaaagctggaaaaaaattaaagtagttgttaatttacaaaactaataaataggctaggtgcataaatagtgattttaatgaaaaataactattttccaaaccaacccccccgccccccaatcagtgagaagattaacattgtggggttttttcccttttttttaaa

SEQ ID NO: 318514 - DNA, 4001 bp, Homo sapiens
accttaggcgtgggacctcactttgctgagccctggtttcctcatctgtcaaatgggcttaaggccctctgcctgatatgggcgtgataggagaggccagaagagggcgcgtggacgatgatggccgggcctcggtggcagtatctattctcgtttttgccagctcacagacctggtgggaggtggcatggagaattccagacttcctccagttgccatgttggtgaaaactgtcttcatgccaaagaggcaaactcacttacacgctaacaggctcaaacaagaaactaagatttggcagcatttgaaaacagttaacaaaaaataaaaaaaggaaggaaaaaaaaaagacaatttagctcagctctggaatcaagggaaacttcactctatataaagatgccacaggtccaggaaatagcttcccaccgcctggctaagggctgaataactggctgcccagccaataacaatacagactcacacagcacaccctttcttgtggagagcgcggagtgggttcccggctatctcctttcagaatttcacaggctattcacggaaggcatgcagatctactttgtaagaattagttcttaaaaaaaaaagatctgaagacgacttccagggaggccaaggagcttaatttagccagccaacgcccttttctattcattgttctatacttctttgttaggattttttccctccctcttactctttttcccttcctggttaacttctctgcagccaggctccgccactgcccacttctcaccgccagagacactatagcccccttccctgctgtaatgaggccctccccaaggcctcatgtgggcccatcaccccacatcccctttatctccacctagaacctgcgaggtggtcccagggcctcctgaatctgcagacgtgtcccctaggttgctgcggaagccactttccacctgcaggtcaccgtcagccccaggcacccctgctggagggagggaagcccgaatgcagctctatgttccaggacctgcaacctctgagcctcagccttcctatctgcaaaacgacgctactgtcccattttctcaagtccttgccagctccaaacaagattcccatgttccagagggagatgccaggagaaaactttcgtacattttaaaacagaagttactggagagagggggcaggggatgtttttaaccctttaaaggcgtagccactcaaatgatccattcccagagatctcctccatcgcccaggccggctcttgccaaagaacggagtcaaattcggcgaaccctagaggggctacctgtggctggggactgcgggtctgcgcgcctctggacaaggaggggcaaggcgggcggcctgagaacaggcacttctgtctctcccgctttctgtctcagacccctcaccggctggagccagacttttccacagatgagcaggacgggagttggggggacacggagaagacagaaaggggtagaggagccgcagggaggcgagtaggggggcgaggcgggaggaagggatggagggggagaacgaggcaaaagcggggaggggaggggagggagggaggaggagtcgggagggacccgggcagcgccgccgcagagccgaggggagagcaggggaggaggggacgggaagcgctggaggcagaagttttccaagccgggggccctcggtcgcccccgacggggcgcgggctcaagggggcgtgggggccgcgccgcactcacataatgcttgttgggcacccgccgcttctgcacgtctagcaccttcacctccacgatgctgcgccgcggcggcatggccgctcctccgcccgcagcgggccgagcgcgggtgcgggtggcgcggggtgcagggagcgctgggggcgcgccgccgcgggcagggaacctggagctgagcgcaatcgcagccggggccgagcacgagccgccgccgccaccgccgccgcccttcgctcggcgcgcactccagccgggcccagccgccgccgcccgcccccggcccgccccccgcaccgccccccgcaccgccccccgcaccgccccccgcgccgccggcccgccccccttaaagggcccggccccgacccccgcccaccgcgcgcgaaccccgccggccacgtccggcccccgcccggcctttgtcccggtgctgagccgccgcgccgggggaggggactggactgaccccgtcgcccgttcactgattgacgtatcgattcattccagcactctcgctccggcagccgccatccaccgccagtttggagagccggacacccgggttcgaatcccggctttgccgcttttccactctgtgccctcggcaagttgcttaacctctctgggttgggtctcttcgtctataatatgagcctagtagtacaagcaccatgtttgtctttttgtgtctggcttatttcactcggcataatgtcctcaaggctcatccatgttgtagcacgtgtcagtagtaccgcctgcctgccggtgctgcgcccgggattaagtgcatgtgaagccattccgcagtgcagtccatggtatgagtgctggcgttcctaaagccaccccaagccctggtgattcaggaggagcaagagacccgtgaccaggttcccccagcctcagtctgggacatggggagtgagggagagaaaaactgcaacaaatgcgcatacgtgcaatgtaattgccatggaagcaacaaaaggggataaaagggtggtgactatgtgtgaggggcagctgggtgcttgttagcaaggccatcgatttccagttgcggagcacttaactgctcgctgggccccgtggcccctgcttttcacaaatgctgtctttgcatcctcaggcagactctaggaggaaaaggtgtttttacagaggacggcctccagacatttggacatttccaatgaggcctgaggaccctctgacttgggaactgtacttcagaagaatgtgccttacaggaattacatcagtgaaggtccagagtcagggagccggtggatggagcccgtcactgcctggctctaggtggatctcacacgttgaagctgccgtggctggggcagctcctcgtttcttcatctagtgcctcctagcactggctgggcactgagtcactttcaggagatgttggctgaatgaatggataaatgaatatataatgcatggatgggaggtttaggctcctggccagtgttttcacagccagtaagtgggggctcttttcaacaaaccgtacgactcttctccatgccacgacagagctacttcccaccccggtccaggatcagcctttggaaaagggtgggcttatccagggtaggacggctctcagcctcggccaggccacgtggatgatttgggctgattcactttggatccgcccctccatttgctcctctgacttccttgccagactttaccatcctgctccagccccagaggctggcctgtgtggatttcactgacagctctctgtcctggtcttcctgtttggcttggccagtggaagggcctggcaggagattgagggcaagaggagagagggaggtctgggtatttaatccctaagcccctcctccccgattgtttttaccaaaggtgccctttctcacatggtctctctcagggttcctgaagccacttttctgctcaggacagtgacagtcttgctgttgcaagccctgggtactacgccatcctcggtgcttccttagccccgcccacacccgtatacattgaccctttactaaactgtcttcatggacccagcttgagggtggcatctgttcggtgccaggaccctcactcatgtaattcctgtaaggcacattcttctgaagtacagtcccaagccagagggtcctgaggcctcattggaaatgtccaaagaagtgaaggtctgcttttccgtccctgccacatcgtgcattgccttattaggagccaagcctt

SEQ ID NO: 318515 - DNA, 4001 bp, Homo sapiens
gttctactactttctggactagaggaaaggagaacctaggaagctttaatagttctaaagagaattcttagatggattagataggctcaggttttcattgtatttgagtaaaatgatcactgcccacagaaacttatcactgggaaatcaacagcagcactctggaatgtaactaaaagaagataatctctagctccttgtatacacaaatccaacctctatgtggacatgatattagcaaataagatctctcttaccccatccatgtggattctgacattaggcactagccggaaaggactggcctgcagacgtctggggttggtcctgcttttcctgccatcctgcaaggtcatcgtgccaggcctgcggaaggagccccctctcccggagctctgccctgagcgcactccatccagaaggcgcacgagcagcaggttggccggcagcgcctcaatgttggaaaacacaggcgtcctgcattcggggcaccgcagctctttgtgggccttgaaaaccctctgtagacatggtttgcagaaggtgtgctggcaagggaggactttggctgtgacatcgagcttctcaaagcacacagggcactccagaagatcaagtaacgtcaaatcatccattttatttcaaaactccagttcccacctggaggagcagcgtccacatggtagggtcagttgagccacgggggcagagctggtctcttgagaacgtcagaatttttgcctgcttgaaggagggagaggagagaaaaaaaaatgtgactgctccgagaggtatatcccacctacattgaggcagtgtctcataaggcagtttgcaagtactttgttccggcacccaagtttcaaatgactcattctgattcaatgctagcaggtataagactcaactcgtgcttgctgtgaggatcagagggaacattcagcacaagactgactgcttattgcctatgtggacaggaaagcagggagataaactggcctgctgaagtggccccccaacccctctctaccagccagggcgggaagaggtcctttaccccctgcccggggaaagctcctggacagtctcaattcttacaacaaagccccctccgaacgcaatttctgtgaagctatctcctcctcctccttcccctaaatctaaatgtatctattatctgcaccacatgcagattagtttaggtgggtaagtttatctgaatctcatgcagatgtagaattatttccttcacaatataccttcccacatgattctagcaatgtacaagaaaaatttccactagaaacccatttccaaaaattgttttgccttaaccacaggtcagggtgcttggaagctttgtttcttttcttttttcatctttttttttttttctctcctcatcccgattaccttaggctcagagacaatgttcctcccacaaggtaaagtagtgcagcctgtttagttactttgacattgttctcaatttcaaatgaagcagataggaattctggattgtggtcacgacctgtaaaaaccgtactggggcagcatatacaggtaggggtcgtgtgtgtgtgtactctgaaaacagtacttgttccagaaacaagtttccttttggatgtatgaaaagaagcctccagtttagaaaagtctggaagaagtcagctgtccctcacaagtgccagggcttcggtaagcaccgagcccagaggtttggcgagaaggccagtggccccactagcgactagtaagcaggacagacacgaccgagaatgagcgatggcgcctcgccttcctaagcctcctctccaaagatgtcagcgcggcagcgggctggggaggcgtgtgggggccactaaccttgtgcatgtaacttctgctgagttcagctcagccccctcctccgcgcagcaggggtgcgctgcgccctccaaccggcttcctttcctccaagcgccgctgctgccaaccgctttgaaaactttaaccactcagtcttactcatttcaagggatcgccttacccagccctgttaacgctttcactgccagggcgctgcctacttaccacgcttttgttgttgcagttgttaactttatgatctttccttcagtttactgaattgcttctgggaaaagattgtaagaggtaaaatataagccagtccctaaggccaagtatttacaaagttcatattttcacctttcccgttttctgtagtatccaaggagtcagaacctgctccattataaacataccaaagtgattgtgtttattttaaatcttcataaggatttcctgggaaggtcaaaagtaaaaatggtcaagctatgaaaacaaggataagtcggacacctagaaaatattgctctttgaaaatcatagtcaatctctgaatttagagataagagggactttagtgatctttttgctcaatctgtttaaattaaaaaactagtgtcacgtatatacacatacgtgaaaaatcaaagcacagagaagctttttcaaaaaaggaaaagcagtggcctccaagctctcctcctgcctgttatccactgtagtcttttcatatcctcagattatgcctatatttctattttttgatttatcgataatacatttcatgtaaaattacaaaggtatccgattaagtgaataataacaatcttaatgccagggtagtccttatctgtgtcaaccactgttctaaataccttacctgtgttagccctttaaccccttaacaacccaaggagacactaaactattctttactttcatcttgcagatgagggaacttgagacacagagaggataaataactcatctcgggagtcacagctagcagaaggcaagtgggctgtgctcttaacaatgtcatggagtgatataactttaagaggctggccaggcgcagtggctcatgcctgtaatcccaacactttgggaggccgacgtgggcagatcacaaggtcaggagatcaagaccatcctgaccaacatggtgaaacctcatttctactaaaaatacaaaaattagctgggcatggtggtgcgcacctgaagtcccagctactcaggaggctgaggcaggagaatcgcttgaacctgggaggcggaggctggagtgagctgagatcgtgccactgcactccagccagggcgacaaaaaaaaaaaaaaaaaaaaagaggtgaagaggtggttcaagggagctaagcctcccctaagagggcaagaggtcaaaagataatggacaaaactggctactcactttctcttacagatgaggcagctgtgcccagaaagatcaagggattctttgaagttgtccagtgagttaggggcagaattgggactagaaactaggtgtttgaggccaggcgcggtgactcatgcctgtaatcccagcactttggaaggctgaggtgtgggtggattgcttgaggtcaggagtttgagaccagcctggccaacatggtgaagcccgatctctactaaaaatgcaaaaattagctgggtgtgttggctgggagtgcttgggaggctgaagcacaagaatcacttgaacctgggaggtggaggctgcagtgagctgagattgtgccattgcactccagcctgggcgactaagactccgtctcaaaaaaaaaaaaaaaaaaaaagagaaagaaactgggtgttctttttaaaattattgttattactatatcttctctctagacgtaaggatgacaattatttattatgcagagagtgttcagacacagctcaatgggaaaatcttaagaggagaccaggaggtctgaaaacattgtttacatatttttccacgttctttcatgttagttccaaaacatcaaacatgcatgtggcccagaactttaggatggagccgatggttatctattttctgagcacggaggcctaattttgatgtaggacaatttcagagaccactttcaactattacttttttaacgtcactttt

SEQ ID NO: 318516 - DNA, 4001 bp, Homo sapiens
agaataaagtaattgaatgatagtgttattatgattttgacctttttcaatattttgtttgtttgtttgtttgttttcagctgcgtaactctgttctacaggaaatctttggctgaaggacgatgtcaactagaagcagagccgctctaggtaggaatgagggaacatgagcagagctctctgaggcacctctacacagcagtttacaaccctaaaattgtatatatgattaaatggaggcccagggagagcgcgagttatactggggtcatcaaaatggaattaacaatggtgaattttattgtgctcaactaactgtgcaccagactgtttcaccatttcacatgtagacttaatctccaccacagctctatgaagaagacataatcatgtcataaaagctacagataaggaaactgaaacacagagaagttaaataagttgtcgaggcaagtaaaagaaccaagataaaatccagacactttggcctcaaagaccaagtgagtagccaagatgacaactgcataactagagctagaggaagtcagatctagaaccccgatctccgaccagtggtcctgcacgtctccctccatgctgtttctactctcatggggcacaatgacaataggacttagggggagggactgaaaagtgtttacatctgagaaatctggagaagcgaaattgttcatagctaaagtcgtgccttttgtgccaagggcatcatttggggggacactccctgctgtaggtgccaaggtgcctagatcaagacttcaagcagaggaagcagaatatggttgttttgggttcactttaatgacctcaagtgccttctacaagcccaagtcataagactaaagaagaaagttgtctgtcagagagtagaaagccctcagctaggggatgctccttagctccttctctcaggaaccatggtggagctccaggaagacacagagttctaacaagggttaggaatgattccttggagcaatgttcccctatctcccaagcaagcctccccccaccaatctaaccccacatttccccaaagccaccactcatcctgataaacaccacacaagagaacacagggccctaccttgattctcctctgaaaaaaagcaagaaggttgcttcagggagaccaaccagcctggttggcctggaactgacatatcccagcaaattcctcagtcccaggcaaaccataatggctggtcaccctaagtcactctcccatgagttgacaatttcttagagcaacaactctccattgcctcaacttgatgcacacactcacacatgcactcacacacaaatcactctgtaataggtggaggcaggaaactgcctgtttttctccagtaacagcaaccctgacaaaaataggcttgaatgactaaggccaagtttatggccacccataggccacagaggaactcactgcctgaactttcttcctgtcctggggggatctcgggaagaaaggaaggaagggcttagtcacaccctgggagtggcagccaggagcagtgctgctcagctcctgacagagtaaactcaaaggctctttcttcaggaaaaaatagatgcttccaggctttgctccctttttacagagccagcatgacaaacacttacccagggaggaaggagaggcagccagaaagcacaatcatctccccatctttgggagaaaagtttctccaacccagcaggtccctgagcctctactggaccatccactttggccaagccacaggccaagggccccctgggaaactcacctgggccccgggtcagactccgctccctggggatgcagaagcagccacccatgtgtgtaccatcctaccctggccgaggcccttgggaacacaggccagaagagtgctgcaagggacagcctcccaacggtgtccctcctcccgcctcctccctggcacacgagggaccgaggcctgctcaatgcacaatgcagcctttgatatcccggctacagcaggaggcccagggagggtgggaggggcagcccagcccagcctgcaggcccacagctcctgcactgtcaggcctggggaacagggctcctccctgcctctcagcagatcgcttcatgcctatcagcctgcagcacattcctcgcattctaggattgagatacacagtttggttcttgtgagggcagccagggctggggaggagggcagagaacatcccagagatcaagactgctcttcttgctccctccccgactgacttggcccacactgactggcctgccacccctttacagtgatctccacccagtctctctctgcaaaggcctcccttggctctctgataaagttggagctgtgggtgcagcatttcacttggacctagcagcatcaatgagccagctcctcactggggaacatgcaaacccccagctgctggtgtgcaggaaaagaatccaggagatcacctgatgaagcccagcattttacaggtgaggggatggagaaccaaatacatcaaaggatggggagaggttggtcaataggtaaaaggttagagttacataggaggagtaagttctagtgttctattgcacagtagggggactacagttaataacgtattgtatatttcaacatagaagagaggattttgaatgttctcaccacaaaaaaacaatgatgtttgagatgatggatatgataattaccttgatttgttcattacacaatacatagatatattgaaacatcacattctagcccataaatgtgtagaattattatgtgtcaattaaaaataaaactaaaagaaaaaatacagcaagtctacaggtatgcaagcaaaactggtcccacaagactaacctctttcctgtttcagataggcagtggagcaggggaatccagttgacactgtggctaaatttcagaaaacctcccatgagatcttgcaaaggagatggagaaaatatggctgaatgccagcaaggtaggacggaagcatgactgctctaacaaccaagctcaaagagcactgctcacccaatgtttccttcatgactagagcaaagtggtgaaaggaccctggtgagaggcccaaagaacaggaggtgtgagccaagagaaggtcctgccaggcctatgttgcaggctatttggaggctgaacttgaggtcagtatcaccagcatttttaggacggcagtggcctgatcaagtttatattctgagaggagcacttgggtgaccaggtgaagaatggcctaggggtcagtcccaccagagatcaggagtatccacctcacacaccagcctagccccagaggacagggtcttgagcctgtctctgaagcactgctcccgtctccatcctgactcatcctgagacacagttactgaatgtttactgtgggccaggctctcactgtacattattctattcaaatcccataacagccccataatgtaggcatcatttctactttgtaagtgaggaaacggataaagaggagtgtataacttgtccaactccctcccttctcccaccatttatgaatgtcagagtcaagactgagcaaggtctagttgattccacagcccagaagaatcacgtttctgatacatgggatacattgtgggttctcccatgactactaggacacacaatgagaaaggcctaggaaggactgaaacctctggagccagctaaccatttacacaaagcccaggagatgagagctggggcagggagtagagcgcaggagggatggggtctctctgatcacattgccaccggggaggatgttttctctgtgcaggtctatttaaagtatctacttcccatacgtttctcatgtgtttcccttactgaagtacagtgtttttgaatatgaattcaaatgttttcttgggcccacaatgaaaggacaagagtttctttagaaaacagccacttaaaactgggatgtacttgaaagtcaggcagtgacaa

SEQ ID NO: 318517 - DNA, 4001 bp, Homo sapiens
ggcctcagcacaaaacaacaaggcattttcatacttgtctggctgcagggagcctcttgcagtccagccagcccctgtggctgggggtagccctaccttaggggtccctgcctcagtggcagtggtacctgtgggctgggctgttatgcctgtgccggctgctgaaagggagttcagaggtggagctcaaggagctctgcaggcattttgccaagcctctccagagcagagggagcaacctagactccccgctagaaagacaccagattggagtcctgggagggggagttggggtgggcatttgatgtatacttgtcacctgaatgaaggagccagagaggaaggagacgaagatgagattggccttcaaagctaggggtctggcaggtggaggcaccagtctgaaaggaggagctggggctgaggaattgtcaagggggccagtgctccttcagtctgggcttcatggtgtctgtgacaagtcaggcagcagttgggatgtggctctggagttcagcaggggagggtagaccaggcaagacccaggtttttagttagaggttactggggaaatagctgaagacagtttccggtggataaaatcacaccaaggcaatgggaacagatccaagtaaggcgaccgaggaggcacaggagaacggacagcctcaaatacaacgaatgatcaggatttacatcatacctccctcaaggccacctcacatctgacctctctgtggaggggctatccaggccgcccctcccagcgggtcttccctcagtactgggctcactgtgtaggcgctgtctccctgtcagactgagttcctgggtactggaccacgtctcaaaacccagtacccgcagctgggtctggctaggcggacgttctgggaagttcaccggctctccctgtccccagcgtcccccgttctcccagcctgtccgcgctgacagcgcaccccacgcagcatccacgctccgagtgtgcgactggtttacgggctcatcggtcgctgcaccccagatgcagagtctctggagacccgagctccgtgccatgcacaggaaatgcaggaagctggcgacacccggggagaggcggccgcgggcgtggacagacccggttacctggggttcaatctctgggagccgaggcacgggagggagagaggcgcaggccccggcggccgcagggggcggcagagacacgcggagcggctcgacagcagatggccgcagccccgcgcagttctgggcctttcccgttgggttcaccgtcggggaaggatcgcgcgcaggggacagcgcgagcccgggagggaaggacccggcttctccagatgcttggcgacaaagggcaggagcggagggtggcggagtgagaccgcgctgcccgccggcgccacacgcggcgcgcccagccgcgcccctgagccgcgccgccagcttagagtgggccgcctctccgccctgcagctctgcagctgggagaggcgcgctggggtccgactccactggcgcaacctgacgcggcgccgagccagacacgtcccggccgaacgatgcccgggctgccccgcgaccaccgcctcgccgcccgctcttcacccccgtccgcccgcagccccgccggcctcccgggggaagcggacccagccgcccgcttcccgctcccccgcccccgccgcgtacctgaggctcccgccgagacgcgctcctgggccgtcgcagccgcgcggtgacatcagagccccgggctctgactccgaccccacctccaggctccggccgcggcctcaggggaggcgccacgtccggccgcgggggcgggagccgcagcctcttggtagcgtccgcgcgccggcccagtcccaggtctgagggtggacagtgcgttcccgcgcgggccacaggcctcttgccccaggccggagaaacctgagcgaggtggtgggagggcgactacggcgaccgcccaccggcctccagcgcgtccgtgatgctcgggggccgggtccctcggggcctgacacctccctcggtggggaggtccagggcgggcccttaggcgcctgacggctacccgctttcccccccaagcccggccaagaaaacagagctgccagggcctcgtgcctcccacctgtcccgctgagtaactcggcccttgatcaactctacccccagacccccatttccaaaactcttccagctctttgactcccaccatgggctcttgtctcctgttccctgtcccatttctttccatttctcccactacccagcatggtctgggccctccagcctgctaccggggtgggggagaggggggcggagcacggggaagcccctggacttgtgtgcaccttagctgtcctgagtgtgtccttagggagctggacatatgcatacccactaaggctggacactggcgctcgaggccctcaccttccaggatctccattttccaaagaacgctctgcctgcacctgccactgagctctccttgctgtgtcctcaggctcccctgccccgacttcccaaactctgtcctatgaataccactctgccaagaaatgctccgttcctgagaggggctggggaccctttgatgagcctctccggctctcaggtctctgcctttgtcctccgctgccctcccgctcccacaggatcaacagggctgggctcaggggctgtgtcctcccatggtagtatccctggcaaataaaggtttattggtgttaataaccaggactctgaactctggccaagagtcaaggttgccacttcctagggacactgggagcctgaggaactctgtcttcttgggtcttcttgggttcggaggcaggagacacctgagcccgacttctgagagtggtgcccgctgggccctgctccttcttcaacaccatctggactcaggcaccagcttcagctggagcgctaggctttaagacagtgcctaagaacctttcggctttgaaagacttttgttgtttgttttgcttttttgagacagagtctccctctgtcgcccaggctggagtgcagtggccggatctctgctcactgaaacctgcgcctcccaggttcaagcaattttccctgcctcagcctcccaagtagctgggattacaggcaccgggcaccacgcccagctaatttttgtatttttagtaaagacggggttcgccatgttggccaggctggtctcaaactcgtgacctcaggtgatccacccaccttggcctcccaaagtgctggattacaggcatgagctaccgcacccggcctgaaagacttttaatatttttaagaccctgatccacagagtctcacagcagcatcaaaatagaagaaagacagcccagcaaacaacaacaaaaaatttttaattgctcatgttggctggggcggtggctcatgcctgtaatcccagcactttgggaggccaaggtgggcagattgcttgagctcaggagttcgagaccagcctcggcaacatggcgaagccctgtctctacaaaaatacaaaaaaaaatagctggacgtggtggcacgcacctgtagtcccagctacttggaaggcctaggcacaagaatcgcttgaaccgaggaggcataggctgcagtctgccgagatcacgctacttcattccagcctgggcaacagagtgagattctgtctcaaaaaaaaaaaaaatggttatgttttttacttatatttcttgaaaactatggggacacagtgtccagaacaattctattaacccactccacccacctaccactcacctcttgcacacactacagcacctctctgctagggaccatgaggacgcagtccagagcgattcttattaacccactccacccacctaccactcacctcttgcacacactaagcaactctctgctagggaccatgaggatgcagtccagagcgattcttattaacccactccacccacctaccgctcacctcttgcaca

SEQ ID NO: 318518 - DNA, 4001 bp, Homo sapiens
tgcccctgcagttcctggacactcatggagcgggtactctgtggggactgtaacctggccagttctttggcctaagccagttccatacggctggtcagaggcatggacactggaagcagaaaagacactgaatcagaaaaagctccagccacaaacaaatggtggcctccaagggccatctgtccctacccccatcacctggaatcccaggctccagctaggagagcattcccacccctctagcgttttgtagatgtgtgtgtcagggggtgcctcacgatgcttggaagcaagagggaattacctggctgggggcccctgggaggcatgggggtctggtggtgatctcattctgaccagtggggcctcttctaggaacacttcatcaggaagggaggggagccaggcaggcacaatgcaggtctctgagaccctctgttcactgtcagcagggctgctctggggtaactctgcaggatacatcaccgcagcctctttctgaggcaagaacctggaggcagggaccccatagtgaccacagtgaaaggaaggaagctcttggtgttgcaccagggagacagtagggtattttcaaaataaccagaaggctcagactgagggtaggtaggaagccctttcattttttgggcaaaagctatgcaagctgcttccccccaacttggtccagagtggtccgtgtctctcacctggaaagtttggtctgaaacaatggtctgggggtttctgctccttggggaacagcctggaagggtgaacagtcgactgaaatgtggctcaagttttgtttcccagatgctcccctcaccagcctgcatctcctgacttccatacctggacaatgggtatggtccctcctgatcctccccaggaacccaagacttcgcctgaagcgctccgactccgactggcgggcctgaaggcatcaccgagcttcaaggacccggagtccaggttcatggagccttggggttgcgtctcgggcagccatccgacctcgtgatcttcaaacttagccagcgccggatgctggaactccaagggctcgggcccagggaggccagagctggagcaggcctcacccaggcattcccgcgccggcccaccgccccgacccacacgatccagctttcctggctctgagaagcaccacttccgctgctggttggcgaggggaccccggccggcagttcctggcgcgggagcccgggagcgcgccggctccccctccccgcccgggtggctgagcgaggcggagcgcgggtgagtcgccgggggccgcgctgggacagtgggccgcagacgggcgggcaggctcatgcggagctccttgcgctggaacgacgtctcccggagcactcgccgctgcgcgccctgaagccgctggcggtaggcggccctcgaggccggcgggctgggcggctcggcagcctgcgccgcggcctccgcctcggccgccagcgcgtacagcagcggggtggcctgcctgttcagtggtcccggggtccccgggacctctgttggctgcggcccactgcgggctgcaaccgcgggccggggccgcggggatgtgcaaagggcagcgtcgggcggggcggggcccgggccgccccaaaccacacgcacgtagtcccagtctaggtaaggaaggaggtctgtccccggcgactgcgtgcgcggctcggggccgccggaggctgcggagaaagagctgtaggccgagtccgcgcgcatggacagatgccacaggtccaggctgctagtggacgaggccggggaggcgcggtcgcccccaggtcccagggcctccatggctgcgcagatgagtgctgaggctgggtggctgcgtgggtcctgggaaaacacagatgtggtgccgggtgaggagctccgggtgagggctgggacagcctgctggccccgccaccacggacggccagacacttacacttcccctccctggtcacaccgtcacaagcgctggcatcccccagattttggcagagtcaccttgggatcagaggtggcagaggaagtaggaccagtcccagggagcacctctgaaggttgagggcccagctcaggggaaggaattgggaccagctcattccctgccaggctccccttgcccacacaagcagcctttaccctgagacctcctggaacgctgagaatgtacccatgttcctttcctccccaaccctgttccacccaggctgcttcctggccgttctgttggcttctccatgtgatctttccctgataaacaatggtcaagaacactcttgtgacctcaggggagctaagaaaggaggggtgggggaagacccagggcaaggggcagaggcagcttcacagccttcctccctccctctgtgcctgttatgttccaggtgctttatataaatatttattttgatcgttgcaactgctgtctgcattttacagacaaggacaatgaggttctgagagggaaatgatttgtccagggccacacagctgggacgtggcagaagcctgcctggaatccaggcctgcctccacgctcactgcagccagaatcaatttcctagaagcaagccctgctgaaaggcagtttaccatccctcctgttccccaacagcctgaatcctccaaggaagcccacactccactatgggaaagtcacccctacctccccatacactattggcagattccaaaataatctggcccccacttctcaaactctgcctttcgtctaggaatgatgggccgacccccatctttgccctgcttctattcttgcttctcctgtaggactcagcttagaggtctcctcactttttgggactcctacagtgtgctgagctgacccccaccccacactgtccctgttggcttgcttctgattccctcctcccattcccacccctgagcttcctgagaatgggccctgctcttcctcattgctgcactctcagtgcccagcagagtccctggcatacagtcaatgttaaatatttgggccgggtgcagtggctcacgcctgtaatcccagcactttgggaggccgaggtgggcggatcactaggtaaagagatcaagagcatcctggccaacatcgtgaaaccccatctctactaaaaataccaaaaattagctgggcgtggtggcacacgcctgtagtcccagctactcgggaggctgaggcagaagaatcgcttgaacccgggaggcggaagttgtagtgagccgagatcgcgccactgcactccagcctggcgacaaagtgaggctctgtctcaaaacaaaacaaaacaaaacaaaacaaaacaaaaccccaaatatttgctgaatgtcaagggaaataacagatttgcagggagtagatgtaggggtggccttggtagagaaggaagagagttccttagcttctgcgcacgcttcttccctccctattagtcttttctggggaagaggacagaatgggtgaagcacttgccaccatagacactggccaggttcctcatgcaatattaggtacgaacagagcaggcaagcacagcttggggcaggactcaccagaaatcaatcccttctggtcctgggagggggatcaagggtaagagttgagtgggtgtgcctgggtcagggtaagagaaattttgaggcttgggaaagggcagtgttgaggtttggggctccctatgaactatggagacttttgggcgctggcctccattctctgagctgcttggtagggagtgcagagtagggtggcccacggctagggtgaggaccaaaaagcaggcttatttgagcctcctagacactatctggagctcagagtcaccctccacccacgtccctgaggcccaggatgttacagattgctggttagggcaaggatgggggttagtggtaggaggatatggtgtttcctaaaagggaaaggcagtacctacaacattcccaggagaggctctcagcagacctaggac

SEQ ID NO: 318519 - DNA, 4001 bp, Homo sapiens
aggagaacattcattggtggatcaagttcccacatgtcagttattttaaaatccattttgttacctttcagtttcacttaattagcctcttctcctgccaatgaaacacaccagggctcacagttggcctcagtagagaagtaatagctggccttcagaaaacagcagggaaggggaagtaagtgggaatcaaagtactaggcaacttttcattcctggactgccgcatccctactaacatttccatcacctgtaaaatgggagcagaacgtctcttctattgccaatttcattaaaacagcacatgtattcatgagcagattaaattcactaaacaaatgaaagaaaggggaaataaatgtggtgtggtaacaccatcttaaaaacccgagagccatgttctcaaaaccacagaccaagttctgacccatgttatacaaatatcaatcccaatatcgttacactctggctcccatcaaaatcctacccaatccccaaatctggctatacttttatcagaaaagaaaaaaacttgggtggggtgagagcagaaaagacacacacacacaacaaaatatctttcacaatgtcaaaaaaaaacctgtttatatgccaggcgaggtggctcatgcctgtaatcccagcactttgggaggccgaggtagacagatcacctgaggtcaggagttcgagaccagcctgatcaacatggagaaaccctgtctctattaaaaatagaaaattagccgggcacgatggcgcatgcctgtaatccctgctaatcgggaaggtgaggcaggagaatcgcttgaacctgggaggcggaggttgctgtgagtcgagatggcaccattgcactccagcctgagaaacaagagcgaaactccgcctcaaaaaaaaaaaaaaaaaaaaaaaactgtttataaacacatcactttcttctcttagcaaatatgtaagtttcattctcctcctgtctacttagtttgggttaacttaacccccgccccatctctcagatcatgtttttatttaggtttattgaggtgggaaagccaactgaactttaaacgaagccaggcatttaagaatattagaaaactgatcttacatatataggtagtcaaatatttttaaaagacatcaaatggcattctaattcctccggtgcaaagaaagccccagcctcacacgtgttagcatttcctgattcctggcttttcccactcagagccccattccaggggctcatatgtcaagtcattctctcctgacttctgaagcagggattttcaaagccaggattccgggaccacctgaatgagaaccccctggggtacagctgcccacgcaccatcttatcggaaatcccagggaatggagcccaaggcttatgcacaaagcccctagacgatccgagagataacactaaccagtctgtaacctctaaaggcaaattttccaggacaaagaaaaacaagcaataagagagtgacaataattccacatgggaagagacacacgggtctcggagatcaacaccaaaccaccccttcttcggacagatacggaaacttaggctgggagaatgaaacaggcaagggcactaaaaacaggtgcggagccaaagccaatctcaaatttccacggccccatctcctgccaataaagaggtgaatggagacattctgagtgggaaagataagaaaggtaggccttcggcagggagccccgggcccacttggacgtcccgctttggagacactagtgaggatgtgtgggtccccagaacactgctgggaaggcgccgaggccgccggcaggaggaggcccaggaagcgccctgagccccccgcccagctccagggccgggcggccctcaccgcccctaccttcggcctccggcagccgagtggcagacacaactcccacaattccaggcggccgcggcggcgaccagctccccctgcgcaaacgcggcggcgaccgtctgagccggtgagctggcagctgtcacgccgctcgcggcctcgcccaatcgcgggccgccagaccagcgcgcggcgccccccgccccgcaccgaggtgggagccccgcccctagccccgccctctgcagactcttgcacgagctgcccccgtgcccctccccttggggggagggagggctgaagagatagcttcacgcctgcttttgcttccaggctggaactgcgaagtttcctgtctgattttccaacaatgtaatttctttctagcggaaggaccctcagaaagcaatcagaggggtgcggagtaaaaataaatcaagttcttgtgactcagtttgggacagaagccgagagtctccagcaataaaatttctcgcaaattcatgcaaaataggacacctttaagccactcactttatatacttgtgtagattttttacaaggaccagttattttaaaaatagcatcaggtggccgggcgcggtggctcacacctgtaatcccagcactttgggaggcccaggcaggcagatcacttgaggccaggagttcaagaccagcctgaccaacatggtgaaacccccgtctctactaaatatacaaaaattagccaggcgtggtggcgagcgcctgtaatcccagctacttgggaggctgaggcaggagaatcgcttgaacccaccaggcagaggttgcagtgagctaaaatcgtgccactacactccagcctgggtgacagagtgaaactctgtctcaaaatctaataaaataaaataaaggtcacttgcgattctgatttttttttaagacagaatctgtgtcccccaggctggagtgcagtggcaggatcttggcttatcacagccttgacctcccaggctcaagggatcctccccctcagcctccatccagtagctgggaccacaggcgcgtgccaccgttgccaggctaattttttttttttttttttttttacagacagggtctcgctatgttgcccaggctggtgtcaacgcagttgtaattctgctgtaccagtgaatatcatgctttctgtaccaggtgctgcatatatattttatttacttataacgtcctctgagcagaatggtcatcccctttttataaatggagaagctgacgctcaaagaggctaaaggagttatacaaagtcatacagtcaggaagtggtagaactgggagttaaagctagatttaagtgtctccaatgtcctgttctctttccactattccacttttagaccttccccttgcctagacatgcttaacctgatgaataaaaatgactgccccctcctgccctcagatcccccacatagtgattcctggtcattcatgagtggagaaaacagtaatccagacagttacctccccaaatggcaagtatttcccaatagcaaacaacctatttctggacttcccttcccttttccatgtactctatgagcttctagcagacaatttaccttcttgattatgtttacttcaagcagatgggaaactgacttcatagccactgagcaaaccttggttactagtatgggaagggagaacaagcccctgggcagtagttcagtgaatagtgccagtttatgagaaaggtctagataaaacacctagggcctgatttggaaagagaacagctcacttttcccctggaacacccaggagaccagtgagaagaactgggcctaagaataattctagcttatgtcactgcctagtaccataagtacagataataaatattcaacaaatatttcatgagtgataaattagagaatgaacatataaattataataagactggcacgagttataaaaaagatgttaataaagtgctacaagagtaagagccttaaaaatagaataagctcaaatcttataatagcatgaataaatgaatgcttgggccaagagaagagtccagctgaacacagctgccagcgctcaaagcggggcctttctccttgggacggatctaaccag

SEQ ID NO: 318520 - DNA, 4001 bp, Homo sapiens
agctggaccagaatgagggaaaatggacaacacttgggaggaaaggaagcaagtgggaaggacaaagttaaacaggtagtgagagaagaggctataggaatgaggaggaactaggaggaaagaagtattttttcccttccaccttttttctctctctactcttttccttgatgatctcagtcactattaggccttcaatactcctttctgtttgcatgattgccaaatatctccattcttgccttttctccaactactgagctggccacatccatctacatttcctattaacactgtaaatccaacaggtccaacctgaattcagcatctccttcatctcaagcctgctgctacttttatatgcacttctcttatacttatcaaacatccatctaaaccattctctctccccatattctttcaatcgttccttcatccaacaaatacttattgtgcatctattatgtccgatacattcagccacagccctagatatatccattcactcatgaagtcgggtcatttctatcttggaaatctcttctctcactacctcatgagctgcctaactcaactaaatttgtctctaagacgtcctgagaaaccctcttgcttgaaaaataatatatattaactagttttgcatgctattcattctatagtgatcatctagcacttggcactgtacctcgggcacagaaggggttcccaatggaggtttagggactgtaaaccagctagaaagggaacaggggcagcagaagctaggaaacgtcttgaacgagtatttgcataggaagcatggtaaactgtatgatctatacacataacatcagcttgataatccttgtgtttccgggggatggctctgggaggctggggagatcgttggaagccttctgagagaaagctccacctcccaccgcttgagtaggtcctcaacaaccacctgatgatgtatcaccttctgaggggaccatggatattgtgttcgccgttgtatccccggcccctacaacatctggctcatagtagggattcaataaacatcgatgcaggattctcgaaaggcagataattcaccacctcatgaacgacaaagacgaaggggttctgagggaaacagaaatagcgcgcgaggtttccttccctattccttcagggcttggtacagggtaagtgctgaggaaataaatcgccctcctgtacaactccaaaatcgggcccctcgctctgcagtcaggccctggagcgcggccaccatctggcccaggcccgcgcttccctccctcccagcctgggctcctgttacctccctgcacacatctgtgtccaccacaggccgaagaattacgcgctcccgctttcctgcatcggcccggccagtacacccgagcccccacgtcccgccgaggctccgaggacgcccgcggccccggcctgagaccccagcccctgcagcaggcgcgccaggagctcgtccatgtgctcggccgctttccagccgcagtcctctcgggcttcagcgctgagcctgggaggcccggcctccccggtccctgccctggcccctgccccggcccgccgcgctccccggggcccgagaggcccggaaggaggcaaggcgggaagtggctgcagctgtgaggcgccaggggcgggaagcgggcggcgggcccagccgagggtcgcgaagacgcgcgcccccaaacgaggcgacgctcactcaccacggtccggcggggcagcgcgccggaggttcgcgacagggcccggcgcggcctccgcgaccggcccgggcgggcgcccccggagctctcagagccgctgtcgtccgagatcacgatgaaatcctccatggctgcgggccccgaccgaagacccaggcagtggcggcggcggcgacgacttcggttcctgcttctgaggtggcggcggcggggcggcggcagcggcggcggctacaacccgggccaccgccacgccggccccgccccgagccccgccccgccgggccgccaagccccgcccaccggcggcgggcggctggggtcagggccggggtcgctgtgcttcgtggcggcgcgggtcctccgtttcccaggaggaaaaaaaaaaagaaaaatggagtcgcagccggcttcggcaggtgttggggccaggcgtgcgagacgccgaggccgcggggacttccccacctgcttccaaccgacgaaagcgtgaagtgaggcgcgcccagtcccaccctgcccaggtgtgaagcgcctcccggactgagagggccttgactgaggggcagggagagaggtcctggcccccgagtgaccgagggtaggtgacctggcttctggccgagctaagggagagagagagaccccactttttggtgcacacgcccatgtgtatctgtaggataaatgcctaaaagcggacttattggggcaaaggccatgtttttgtagttttgataaatgatgccaaattaccctcctaaattgtaccagtttgcgatttcaccaacaatatgtgtctctcaggagtttaaactgagatttagagcaggggtgtccaatcttttggcttccccaggaagaagaattgtgttgggccatacataaaatacactaatgatagctgatgacctaaaggaaaagagttgcgaaaaaaaaaatctcttaatgttaaacagggagttaaacaagtttgacgtagacagttgttcagttggtatcaggatcagaagctgaaaaggtgcacaaaagaagccatgaagtagcagaggccatgaataattagatgttgtgaataagcagaagttataaaggtgaaaaaggttgtccccagtagaggaatcggtgggtagttggctggttggttggttttagggcaggaccattaaaatcaagataggacctattggtacactaaatgtggggtattgacaaaatcctgctgctcaggctccagaagttttgcaaaatatgttaacagatccaaagaataatgtgtttaataggaggggaatttgttcctaaaggaatggttatcaggtgctctccaagcactgtctaatgcagtgtttttcacactttggtgagcatcagaatcccctagagtgtttgttaagacagattgcggccgggtgcggcggctcacgcctgtaatctcagcactctgggaggccgaggcgggtggatcacttgaggtcaggagttcgagaccagcctggcccacctcgtctctactaaaaatacaaaaattagctgggcatggtggcaggcgcctgtaatcccagctacttgggaagctgaggcaggagaattgcttgaatctgggaggcggaggttgcagtgagccgagatcgtgccattgcactccagcctgggggacagagcaaggctccatctcaaaaaaacaaaaacaaaaaactcaacaaaatacagattgctgggttgctggtatggtttggatctgcgtccccacccaagtctcatgttgaattgtaatccccgatattagaggtggggactggtgggaggtgattggatcatgggggtggtttcttatgaatggtttagtaccatccctttggtacggtccttgtgataacgagttctcttgagatctggttgtttaaaagtgtgtggcacctcccacctcgcccctttccccatgtgatgtccactcccccttcgccttccgtcttgatagtaaggttcctgagacctccccagaagcagatgctactatgcttcctgtactgcttgcacaaccgtgagccaattaaaccccttttctttataaattactcagtctcaggtatttctttatagcaattcgagaatgaactaacaatcacacatcagattttctgattgagaaaaagaattttgggggtggggccctgaaatttgcatttctaacaagtgcccaggtgatgtggatgctgctagtctggggaccacactgtgagaaccactggtctggtggacggggagttt

SEQ ID NO: 318521 - DNA, 4001 bp, Homo sapiens
atattcaaatatatacctccagtcctggtctctctccaaaaccctattaaaactacccagtggacattttcctacagacatactagcatcccttcacattgtctcaagccaaattaatgttatcactatatcaaaacctctgaacgtccctgtttttttcaccctgacatgcaaattaaacatctcttttgacttcctttcccttgttttccttaattaatgaaggcctgtccattttttccttaacatgttcgtacctttccattcctctgccactgcctgagttgaggttcttttcatctttacaaccagataactaacataatttcctaatttactttctcactgtctatcttctttccctatactattatagtactctgccaaccactgccaaattaattttcctaaactatcattctacttatccaatcaccttgttcaacagggttttaaaaatgaaatcaaaactcctctgcttgatattcaaggcccctcatgttctcaaatcaatgtatattcccagtcttatctcttgtagtccctaaatgaaacagttcctcttgctcaatttatgctcctaaaaacaaacaaacttggcaccattaacaacacaatttccttaactcagaatattctcttgtatataaataagccttcctgaaagtcagaaataggatctccctttcttgaacttttataacacttaattgtatatatcattcattttaagttaacgacctcctcacctatactgtaactctttaatgggtacctgttctctttccctacaccgaaaattccttgagagcaaaatcatgtctaatttaatttcaagcatctattgggtatctggccccacaatgccaagagtatattttgttgattgttaattaatcatcttactttatttaatacaagtaatagcttttccttgttctactataaacagatctgtacactttctggtggctgtatgcaccagtctaaacatatgggtagggtccagtaatttttaaattttttctcaataaactcacgatagctaccatttattagtgatagctagctaaccactgttaggcactttacacgtgtatctcattgaatcctcatatccaccagtggtaggcactattatctccattttacggaagagaaaactactacatcttggagattaaatgtctctcccttctcatgttattatctgccctttcccctccaaatcaattcatatcattttttctaaaccttttcaccttttactcaactaatcattcgttttgtttattaacgactatgtgccaggtgttgtgctgatgcaggagacaaccgcgaagatggggacagaatcagtaacatcgacgtaagggaattgaagcagaagatcacgctgcctgcagacaccaggaaacgccaagaccccccttccacgaaccaacattcttccaccctctccaacttttttctggaaccccttcacttccaacgccactcaatgtacacttcactttctcgtgctcttcctaagagagtagtgttttcttcctccccaccgagaaaaaaaataaaagcaacaactggaacttcttccttaccctgccttgtctgcagaccctggaggccccttccatttccccttgtccttttccttgtcttttttggttcccgccgcagtggtcgagtcgccctcgaacacgctgaacagctcatctccgaatgcgtccgccatttttgggagcagtgagagcaaatctccctcctacccacgatgccccgcgaccgaagacagtgacgtctcgtgaaggctcaacagtggcccgcaggagacaaaagtagtcgagtcgcgcagccgacaaaaatgttcccctgactttttttttttttcctgcttttctttcctttcctttccgacctaaagtggataagctgctcagtggataaagagcgagggcggcgcgtggcgcctggcgtgtggcaggcagctggcgactcaaggaggcggagcctgctgaattcgaccaattgcgaggcagcggtcgccccggcccgagaagcccggatcgaagcgcagggtggcagccccggagccggggaatgtgaagagctctcggctgtgcagtggtaccgtcggggcctgggccgcgaaggatcttctgccacagctgcaacatgggcggcaagaacaagaaacacaaggctccagcggccgcggtggtccgggccgccgtgtctgcttccagagccaaatctgccgaggctggaattgccggggaggcccaaagcaagaagccagtgtccaggccggccaccgctgccgctgccgctgccggctccagggagccccgtgtcaagcaaggtacgagaggtcccccagcccctggctgtctgccctgagaccttgctgcttgtcctgaggaaagggccttagaacccgggaggagcttcgggcccaacatttctatttcccaacactcgagctgctacctccccatggggtggccttgttttagattaaaaaagtctaagctctttgggcctccaaaattctgacagtagccctgttgcagcctggcatttctcttttaactcacacttctcccccttctaaaaacaaaataattgcattagctcctgtttcagcaggaattcatcctgagcaccatctcagctagctaggctaacgcaaagacgagtactgagtggagttcctgacctcctggtgccagccagccccattttctgtcagtttttcatatcattttcagcaacaatctagtgtctccatgcgttctggaaaaatcaatacttaataaaaattacaggacttacacactggttacacactggttacgtgtaatctattgtaaaattgtctgccctcgtttctgccgccatgcagttttgcttactgtacaaattgatttgacaactcaacttatagatggccgattcctgctgcagatgagcaggccacatattacggttgagctcaaaagatgaacaattacattctgttgtgttcttctcgggttgtttgcttgtacttattggagtattcaagaaatatttgctgagcatttatgtgtatatatgcaaatatttagtatgtgtctgataagatgtgaggaatgtgatgagcaaaaagagacatcacctcatggagcttgccagtctaatgtcagagataggtattaactaataggtaacgcacacagacatatttatagccttataatagataagtgccacaaagaaaagccagggaagacagtttaacagggtaatctaatttttctcgggatgagcaggtatcatggatggtgtctggaaatgtaacagttaagctgagatgaggagaatgaaaaaggagttaactctgtgaagcatggcagaaattagtattccaggcgggcgtaatgaacatcatgtgtaaaaagtttgagtcaggaaagagcttggggctcttgaggaattcacagaacataaagcatcgccaaaggatgaaatgagatgagactgaaaaagtaggcaggtaccagacctttacctagaaggtggaaacagttctttgccctgcgatttattgtagtgttagctacagagttagcatacttgtaattacaaatacatagaatttctccctgacaactatggcagttttattctgtggatcagcctcttttttacttttcctttgtcttttactgacattcctctgaatttgaaccgatagtcatttgttgtattctttgaattccctttcctccagccccaaactgtgaccctttctcaaggtgtcaatccttgacagtatagttcactcctaaagcccttctaggagtgttcatctatttccattacttctatcttttcctttgtagatggcctctcttccaagctcaagttggcaatttatacattttgctggattctctgaccctattttttgcaagcatctcaaatttaacagggctagtactaaaccactcttcttt

SEQ ID NO: 318522 - DNA, 4001 bp, Homo sapiens
ggcacctctgaagttttctaggtgtgttgtattacaaatcgcatatattttcccaaaagtgtatcatttggcatttaaaacatgcatcacacccattttatgttcaaagacttatgacccattacatcggttaaaatattcattcagcttctctgagacaattgtcgccaaccccaaagcaaacaggttgttaggcaaaggaagcaaaaaagtaaagcatgttttaaaaccagccactgaaatatcctactctcactcatccatagttggagagaatcagatttcactttgcgattcacaaacatgtctgcttctccatgttgcttagcgcttgccaataatgcagttgtccctgcttaatggagaaggatgcagagtagaggacccttcctgtgacaagaccacaacaaaaggtatctccaaaagaaaatattttaacctgagcccaatttttaattataaaacatttaaacatgtaatttttatattagatagtactgaaatgaacagtgcagaatcacaaatctaacaatgcagttgattaaaattactctaaaagcaagacgaccgtttcatatttctttcaaataactcaagataagtgcttagtcatagtcaagtttgtggattgggttactcttaagggagttgagaccttactaaatagcagctggtcaatcggttaatctgtaattcgatgcacttggtaatactaaactcaaagataagttttagtgttacagtagaataaagtgcaaaatttttaagtaataatggatgaaatatttatttgaaatgctttcaaaacaattccattctaaagaaagaggcctaaaggctcctgcacttgtaaataattctccatggccagcataaagcgggttctatcacatcatatagaaaaaaaaacccctgcgctttaagtgacccgaaattctgacactgctttttagactgcacagtggaggagacggtattgttctatgaaacggatacattctactgtcacgctctaaaggaaaaatgcatgtccctaaaacccaaacgtgaagtttccattaaaagtgaatcaaagcaggtagacgtcctatttctttaaaagccagatacctagagttaagttatacacagttaaggctcctacaagtcacaccactctgacgatggtatctgctcaacgactccaagtcatggcaaaacaacgctaagaaatattcagatggagcaggcggctatgtgcagaaagccggcgcccgcacacggttagccaggaccgaccggtagctagtgacgccagacacggtggagaaaggatgggagccaagaaccgggcggcctcagaccaccaccgcagctctccctcccgaccacaacaaaagccagacaccgacacacgcccacgctcacgacagccaagggacccccattcacaaccccgccgccacccccgccctggtccccgggacagcaggcttaagaccaagagaggcccccggccgcagcctgggccttgcagccgagctccgcgccggctgacgctcggccggtgcagagaaggcccagcccggggttcggctcacttatggagcgccgtgaggacgcccggccagaggaggcctcgctgagtcgggggcggggcaggtgaacggaacctggtagggtctcccgaagaacagggtcgacaacgcgatccaccgggcccgaaagaaggccaggcccagtcaccgcccgccgcgggcaggcccaaaccgcagcggtgaggccagccggcacgcaatccggtagccacgaccctttccagttcagtgggcggctactcacggtgttcggtgttaaggagacggccggcgggaggctgacgagagccgggaggcgttagcgaaggaagagaaaaaccgaagacgaagccactacagcgtcgcagcgcggcgcggcgtctgctttataggagagggcgcaggcgccgaggaccccggggcgcgcggcgtcacatcgcggctgggctggccgccgagatcgcctgacggcaggccgagaacggctgggcgggcccaggccgggaggcggcaaggagctgccgggggcggctggccgggggatcggggggccggaagagttttcgcctctccccagctctgaaagcgccgcgctgtctcgtcaactgggtgccggaccccgactggcctagaaaggtctttcaggcagcggtgccctaagccgagtgaaagaccccagttaaaaagcctggaaaaaacaaaaccgggcgagtgtgtgcgtctctgtgtgtgttcctgggaacaacagaacggggcgtgtgtgtgtgtgttcactcctggggggggctgcgtgtgtgtgtacgcgcgtgtgttcattcctgaggtgtatgtgcgcgcgcgggtgtgtgtgttcattcctggggtggggtggggtgggggtggggcgcttgtgtgtgtgtgttttactactgaactgatacagcttgtccagcttccattctccacggtaaccctccgaggtgaaatagtgttagccttttcgcctctgcagtgagggaacaggttcggaacggttaagtggcagagctaggatttgaaccttactccacaattaggtgctgttagcccttatttcctactattgacttctaaagaggcttccatgccaaacatagccatcgttatagggaaaccccaagtctagagagatggctccatctagcagtaggtacctactccttcactaaacatgctttgagcccgacgtgcgaggcgtggtgctggggattccgccgtgaaccaggcagccagggcccggcctggacgtaactcttctctagggtgctcccaggaaggctttgatgaggtcgatggaatgaagccagctgtaaaggaaagggagtagtctgaaagccccaccctgttctgctcgggaacattactctccccatcctaggagactgggcgccgggctcgcctagccaacaggcacgtgatgatatccctgacaccaggaagacaaaagatacttccacacagggccccctgaagaaaccagagatgtacagtgcctctgggatgggactgggcaggaaggccaagcagctccttgagttaccaggtctttgtctacaagcctatccagtgtctgccaggtgccacagctgatgacagaagatgaaacgcctgcagctctcagacattttctttgcagcacagccctgccctcagcagctctagcttcaggcctcctaggcagggcccactggagcccctttgctccccgcctatggcatagaaggtggtaccttattaactctctttaagcattctaagcaggactgtgcagtgtcaggtcacacagcccggggacccagcacagggtctggcataaaagtagggatatatttttccaaatatgtctgagaaccccctttattagaatcaccaagaaatgtctgcttttaaaacagattttggggccgggcgtggaggctcacgcctgtaatctcagcactttgggaggccgaggtgggcagatcacttgaactcaggagtttgagaccagcctgggcaacatggtgaaaccccgtctctacaaaaaaacaaaaattaggtgggtgtggtggtgtgagcgtgtagtcccagctactctggaggttaaggtgggaggatcacctgagcccaggaggcagaggttgcggagagccaagatggtgtcactgcactccagcctgggtgatagagtgagacccagtctcaaaaaaataaataaaacatatttcatttgcttgtatatggtgctatatgtatagattatctcaggaaagatacacaagaaattggtcacctcagaggaagggaactaggtcactgagggatgggttagaataatttttcaccttatacccctttgtatcttttgggtatcaattcacatgaatgtattacatattcaaattttttaactttaaaaataaattggctcaagaaaaatgcagattc

SEQ ID NO: 318523 - DNA, 4001 bp, Homo sapiens
cctgagagcagaaatgtttgttgtgcccactcctctatctccagcacctggaacacggcctagcacatggtatgtgctcagcaaatatttgctgtattactgttttaaatagcttactagtaagaaaaactgataaccccaggtcaatgccctgtttatcctatggcttttgcatactccagggttctggttcactctgggaggcactcgttcgcctgcttgaggaactaggggatggggagctattaaggagggaagatacagtaagttctacatttcagtcaatccattctagttcgggggatagatctggggagaagaaggttggaattatgaatccactccaatagttcaggcaagagacgacgagaacttgagaaatagttaccagagaagagggaaagatgcgatgaatgactggatgttggggggcggtgggaagctgactgactctcaggttttcgggttgggtgattaaacagatagtgtcagcagtaatggagacagaacataccaggagaagccaatatgggggtgggagtgggcctggggagatgtctcccccacttaggtgaacgttcacttcgcagtccactgataaataactaaagtgattaaggcaaaaagatcactcaggggtacaaagcaaaaggaatcctacaagaagaccactgtttatgtttctgttaaacggtgaaactgagctggccttgaggcaggcagattcccttctaaggaaaaaggcaggaatgtcttctcatgggttaaaattttcaaggtgattatgcaccagaacatacatatatatatatatatatatatatatatatctaccaagattcctgcatacttgacgacttgccctattttgttgaaaaatagcttcagaattaggcaatcttaaaaggaacccatgctaaagatctctgaacaaaggtttcccaacaacatagctaaatccaccctttgcataactgacatttttaccctcatgtccttacctggaaagttctctcgatttagcttaggcctgcggacaatcacaaagtctttgtcactccctttgctcttcagccgtttccgtggggggctctccgggtggcccaggtttgagagcagttcctgggggatgttctcactgtcgggctcctctttctccagggcggagacccccatgcctgacagcagttcagaagtcttgctggaatcccatccccacgtgaagctggtggcaacgttgctactcaggtctggaatctcctggaggtgcttcctgcagaagtgcacaatacccccggttcctttcgaaaacacacccataaataatttcaaggcaattaaagaagctgcagtttatgcattgtaggaaaccttcacagcagctaacagaatcgcattttttatgtgcctgcggcgagttaccaagaaaacgaagaaatgaaaagaacaaatcgagaaggctttttgacttacgatcctgcagaaggcctcaagaatttctcccagtggagggaacagacaaggagagagacagggcaatcatacactgattgaaaacggtggcagaaaagcccaattagggaagccaaataaaaccacacgctgatccccgcactaaggcatccatccattcacactttccccaagaaggggctaagcaaccattcacttaacagcattactaacaatattagccagtagcgatattcgcggcctaaaagaattattaagagggtccatttcatgctcttcccctttttgcaatccgtttacctgtgcatagcgtccgcaggcccgggagtttaaaatacgtgcattaactgcagagctgctcgcctcccagattcccgctttggcgcgcggcggctccgagcgtgctgctcgggcccccagcagccagacccgctaagcctagcaacgttccatccccactgcgcgcgcaaggctctacagcccgctctgcttcgcggccgcactgaggcccaaggcctgctgggaattgtagtttccgtcccgcttcgtagtccgacgggctcgcccttacttccttcccttgcagctttacccgccttcgagatacccacaaccccccgcgggagcgggactggtcggcccacggggtaggcggggaggcggaagcgggcggcgctacggctgactgggaaatgtcagccgctggactgtagacggattttcctttctcgggagcccgcaggccttctggtgatcgccagcgctgtcgtctctgagcgtggatcccagaacctggacagctgtggcggccgccgtttcccggtcccgtccagacgctgtctggcgagatcggacggtgagcctaaggcggaacgcgtgaggcgcttttgagtctggggtccggggccgagagcaggcggaaagagaggggacccggcagaccccgagtggccgccgctgcggggcccaagtccttggctgctgagtggtgacagtagcccagcccgccggccaggtgagaggctgcgaactgctggcgtcgcacctgttcgtccttttgccaggaagcttcttcctccgtcggggagaaggcggccctaagaattgggtctgtggacgggatccttcctttatctgtaaaataacgcacaacagctaaacacgccgttggaacgagagacaatggtttaattttaggggagccggagaccccagcgggtcctgtgtggtgggaaggctgcgcatgcccttgcagccttgacaggtctcataaatagcaacatgggaataaatgaaaggactgtattttgcaacgagctttacccgtgcacgcagggggcctccagcaaagccatttggttgcttgctgtcgctcagctggctacgtgtgtttgcgtcgccgcctaaaagcgagctgctttcagcctatctctgctgagaagagtttgggggcagtaagagtagggagcgtgacatattccaggtacaatgaccatgcgaaatccattgggcaaactatactacaactgtgaccccgggaaaacagtggaagagggaagggggatgaattctaagcctcataaaaatgaagatttataaagttcataaggaagcataacagcttcatcgcatattagaatattcagtgatgctgtatgacacaccctctggtttccttgaaaaaatgattcgctctgtagtgaaattaaacctcccttgtgcaggtatatgcttgtttcaagcttggtccttagcttgaaaagtaactgcctcttgaggaaggaattcatgaacctttagctcgttcttgaaagatgagattggtgtaaagaagggatctgttcacaacttggttttgattggaactaggtgcagaatcctaggctaagccgttcatcaaactaatgttatatggaaagcattttaaaatgcaatatcctgatgttttacagaaagtgacctttatgttactttggctaaggagaaagcatttgcctttgtttgaagctacgtcctttccctgaagattgcaactcataggagaaaatatttttgacacaaaaaattatagtttccttcaggaaagggaacaaaacagagagagcctgtaagctaatggaggagaaagaataaacaaaaatatttaagatgccataatgagaataaacagttttgagatgtaaaataattgggagagcccacttcagatatagatctcatagataggaaggtttaatcgatgagatgattctaaatttaaagatgagaaatatctttgttcagtcttggttttactaggagttacctgggaactagaatacttgcaacatctgaattagtgaacacaagatcctctctaggacttcagggagagcctgtcagttttgaaattcagtttgatagtttgccccggtaacagacatacttcatcttcctaatatgggaataatttttttttgccttccttctaatcatgactattgccttaatataataaatgcaagtttaaattggtacattagattctt

SEQ ID NO: 318524 - DNA, 4001 bp, Homo sapiens
atcttgtatgaaatcactgtatgagatcaaataatcatatccaaaagaaatcacatactggatttaaacttgtccaaactgtgatcatttcaacctatgtggtaccatcctcttgcgttcacaaattccatcaatgtagtcattacacacttgtaaaggaagacttcaagtaatcccggctcataaaaaagttaaacattaacgaaatctcaaaagcatcaatgttatctcaaaacagtgacattgaacgctgaagaaataagtcttatgtgaccataaaaaatagttacaaaaatcaatgagtttatggggatggttttctgtttacaaagtgtaactgcttatggcaaagaccccacaggtctttctggtcatcctctacagaaaaaccaattctcctgtttcccttttttctttaaagactcgcctctgtccctttttttttaaatatacacctctcccaaaacgttttcatcgcaaaaaaaaagagttatgccattattaggaacagcgtgtcccaagacaagatctctatgatcctttgtatattcaagattgcaagaattgagctttaataactcatagaccataaacacaccctgttaaggttttccttcaaacagcaacattcccactcttgcgatccctaataggcgtacataagccacacaacacaatctttcaaaacgacacagatggtaggtgctctccaacctctctcgagagatcctcactgcacattctcctctaaagggcccacaaacactactgtcattcagagggatggtgactgttgagcgtgggtgggaaagaaagtgcacacgagatacctaactggatggggaaggttgttagaggcagccctccggtatcacgtaactagccaaacccgctacaaacttttgagagattaagttaacattcctcggcaattccacccttgacagctgaatccagagatgccagcaagtcgtgcacgtctactactcccgccacctcaactcgggaagagtctgcagccacatcccgcggtcggcatgcaccaggggctggggaagaagggagggctgggcgagctcaccttttccagctcgtcgtggagctccgccaggctaggccggagcagcttctcgcccagctgcgcggctgtgtgccggtagtgatcgatcctgggcacagcgtccatggtgttgtggccgaaggtgcgcaggtagtaggtgttggtgtgggtatcataatagtagtgctggtggtgcccactgccgccgccgccgccggagtgcaggctgctgccctcgctcagcaccgtgtccccgccgttctggaagctcacgttgggcccgtcgactccgaccccggcagcatctgacaggctgtcttcagccgacgaggaggcagctgggtccacgaagttcacgcggaagcggcccttggcttcctcgctgcctttagccggctcgctctcgccgctggcttccccgtccgcgggggtctgcttggcccccgccccagcaccagccgccgccgctgccgccgccgccgccgccgccgcagcagcggcccgcccggcgttctcggaaaccaggtccacctggaaacggctctggctcggggtgggccccaagggtctgcccagcccgtccccggccgccgcggggccctcatcgcggaccccgccgccgtcccggctcgcgggcgcagcatcctccggcaccgagggcacagccgtgccgggcagttccaccctggctgcggccagcgcagcggctgacggcgtctccccgaccccggccagtcccggggcgccggaggagggcgccgtgggccgcggctccatagctgcccgacccccggcggaactgcagagcccggcggacgtctccggcagcacgccctccacacccctggccggcggtggccacagccgcaagaccaggtgagagagtctttctccccgccgcctgcgggccgccgctagcctggacggccacagaggccaccggcagccgagcgagcgcgcgagtgtggcgggcgcggggcgggccccgctgtttaaagcctcggcggggctgcggcggcggcggctccggcagcagcacgcgggaggcggggccggaggctcctccgcccctcagcccgcccacccgcggtcccgcagcggcgcgcggctgacgctccctcagcgatccggccctccgcggctcctgcgcgaccccacgcaaaagcgccccgtgcgaagagcgcggccagccagtccgcaaagggcctcgggcagtgcgggcagcacgaacggcgcgatcggggagcaggcgcggctacgctccgcctcagtgatgtcgccgggaggatctccgcgcggctacctcctcttccgccgccttcctcccacgccttcacctccctcccccgccgcgctctgcggcgaaaaggagcgggctcccaggccacctcccctctctccacccaggggccgcgcgtcagtggacctgcagcccaggcaacggggctgcggacggcgcgcgtgccctgcctcgcctcacgccggtagctgatgctcccgcggcagctgccaccccagcgccccagccacggcttcagaggctctcgcacgctggctttttttttttccccccgctttggtgaactcgcagtacttgggctgagcccgaaatctcgcgagatgctgcaggcgtcagtgcggcttcccactaggcgcgtggtacccgaggccgggccggagccgcaggccagccgcgattccttcgggcgatgctgggggctttccggtcggggccgcagccgcttccggagccgcgggcgaggtgcgttccccagcctggtttgctctgggctctgacccgccgccgcgaatctccgctcgtaactccgggcctgaacctggaggagggaggatttcctctgtgcagctttcgagcggtagactcaccctgccaggcagacctagattggcataaccagagatcagttccagttgtgatgcagtgggtgtctacacacttctgatgacacctttattttaaaagctgatgttccaaggtgagaagggagcttctttgagacgtcatgttgtttcaagacgagttttaatttaaggcatttccaaaagtgatatgcagctcatctctcagaatacaatgccggcaataactacccgtggagtccttaccaggaggtttctgcgtgatttgggttgtgcagaattcctctgcttatatagaaacagaaaggtactcctctgcaggtctagtttctcttcggtaaaatgtaagggaatataactgtgttcccactttcttagcagcagaaatttttaaacctatagattatgcccaaagtcctaagtaaaatcaatgaatggcgtcctccaattacttggtttttatttatgtactttttttttttttttttgagacggagtctcgctctgtcgcccaagctgtagtgcaggggtgcgatcttggctcactgcaaactccgcctcctgggttcacgccattctcctcctgcctcagcctcctgagtagttgggactacaggcgcccgccatcacgccctgctaattttttgtatttttagtagagtcggggtttcaccgtgttagccaggatggtctcgatctcctgacctcgtgatccgcccacctccgcctctccaagtgctgggattacaggcatgagccaccgcgcccggcccttgtatttttaaactttgactttatggagacgaacaccatcgtttgctgaacacttgaaacatgatgaaagagccacagagttggcagaactgtttgaaaatgctgtaagtaaaagctgcaaccaggcaattttcaaaaaattgtcataaacatgatcttacttgaacttgacaacttttcaggctattttattatctctatttttaaagacggtgagaggggaaaacagctgttgcatcaggatttttaaagctccttttgagctttagtaataaccagaggaggc

SEQ ID NO: 318525 - DNA, 4001 bp, Homo sapiens
actcctcgccgcacctctgtgggctgaagatcaggatgtgatcaagtggattccgaagggcagctgcgtgcccgttacagcctggcagtggctgggcaccgggccctttctgtggaagtaggaagcgggtccagcacaaaagcgccaggtgcaagttctctgccagttcggagaaatctcccaagttcagctcacaccacagggccaccctcaaaagtgtccagaagcccacacctggcccatgccctcccgttctcaatttcatgaaggccagggagcctcctgacacgcccgtagcaggacctgagtgcgcgggcagcgacatgggcagcgctcagccagggccacttcctgctgggcagacacaggcccagggcactgctcaacagccttgagagtagaagagacaagaaaacgaacaagcacaaaattctctctggcttaaaagcaaatgacacttacagtctaaagacaaaagtgaacctgatcagccttgagaaggggccggccagacaagaagaggctccttctgagtgcgttccgggggcgttgctacaaagctcacacagaaagaccacgccagggcccacactccttggtgcttcctgcctccacggtggtgactggagagaaggggcttggactcacggaccctgcttagttagcacttcacctggtgttgagcctggcgccccgcctgaccacttccaagatctgggctggcctctgtgcagaggaagctgagaccactcttcgcccgccacggggaccctgatgacgcaccccaggccaccaggccactgccttcacggtgggtccccacccgtgtctccgggttcctaaactgcctggaggggatgtctggcctttcctgcccgggatggtgggttaggaaggatctggggtctggcaccggacttgtccctggacagacctcaccttccttccactgccagggagcagggaggctgccacccactgcatgagacccgggcacatgcgggcactgccagcacgcggggtgggggctggactgagtccggacaccttctcagagactccggatggaagggcctaagagcctccggtttctagagggggctgagatccggggagtaactgggatttggagccaggatggagggaacagggctgggggattctctccccagccccgtccccaccccctagagaaagtgaaagtgctagaaacctccagattcccggaacgggggacgggaacacggaggacgcggcctgagcaaggccccggtggctgccccctccccagccagggcgcagtccttcctgttccgcctctggggggtgggcggctcctccagggtcaggcgggggcaggacgggccggcccgggctagtgttaccggacggccgcggcgcaggggaagggagagcgcgggggacgcaggacgccccggctcccgaaccgcccgggtctccaccgccacccctgtcccactagggaccacccaggggcccgggctccctccggaggcgcgctccagcccctccccgtttccatggctaccagcagcggcgtccacacctctgcccccggtcccacccgagctgaccgtaccgggagccctggcagggcccctcgccccctagcgctgccactaacgtggggtgggggccctcgtgggggaccgagaacaggcggtgggggcgcgggaaggggcgcctcctgtacccccggccccgccgcccgcctccgctcccggatgccgggcccagacccgcgctcggggcgctcggcctttgtccggccaggtgcggccgcgctcacccgggctggggcgctcgggctcggggccctcgggggtgcccggagcctccgtccgctcggcagtctcgtccccgccgccgtcggcgtgagcctccacgggcaccacggtgaagttggtgggcatggccgcctgcagccgacagtccccgtcccggcccggcccgcgctgcgccgctcccgccgacgccacgggacttggaggcaggggcggggtccgaccgagccgccccgccccgcccgggccacgtgacttcacctgcttgccccgcggccccacgaaaagttggcccgcggcgacttcctgcagggaccccaacccaggctgcgtctgtctgaccgccgcgacccgggacgcggggctttcgctgcctgcgctcccgaccatcgcagagcccgcgaatccccgctcagtctcctgcaccccctcctgctccagccccctgcccctcctgctggaactccccgccctccccgccctccccggccccctccccgcctcccctcttgtccccttccccgaccccccactcctgctccagccccctgcccctcctgcacgcccttctgctggaacccctcacccctcctgcacccccccacccttcctgcaccccctcctgctgggcccccctgcccctatgaaccccctcctgctggaacccctgccctttctgcaccccctcctgctgggcccctcctccttctgcgccccctcccgcaccccctcctgtttgccccccatttcctgctccagccccctacccctccttcttccccctcctgttcccccctgccatcctccagcacccacctcccacacagtccgcccacccactccaggctgtcaacacccgctcagaccctgggctcctagcctggctcctggctagcccaacctggctgcaaaggcaactccagtggaaggagccttggatagcctgggggtggggtactccggagcttggtccagctccagtttagggacctaacccagtagagggagtccccccccccacccatgacaaataccacccacgaagaccccagtctcctccacacctgccccaggagtgccccgcggcccctgccctagaaccctcccttccctccttgggaaatgttccagaagctcacagggtgatgcagggaaggtggagttccagaacccaccaggcagacaccaggataccaccggccagcacctggcacatttctcaacaaatgactcatgaaaaacggaacaatcagatgtccgtcaatggggaattgggctaaaatgctatggcacacaggtgcaatgagtcagcctttattcctaatcacccacaactgctgtacgacaacaaagcagaaacacaggtggtgtgggcaaacacggccacagcctcttgtcacgtggaaaatgggtatggcctggccatgttttagccgcttgcctgtctaatcctaaaaggcagctggaggggagtgatggcctccgggctgtgggatcaccgggctctgtgggttcaaggaacgcaagcccaacctctccagccatttccagtaaagccagtcatgccctggggtggcctagggttctacccctttgccccatggactcttctgggcagaagctgtaggcctgggaccctcctggaacgtcgcccatccagcaccagcccttgcagaggtgggggttcctctggcctgggtgtctggagctgtgcctgctccacactctcaccccacctcccaccaaagggagctcagggctgtggatggtgctaggtcagctgcctccctgggtcagtgggttggaaggtaggaaaccatcacctccccagaagataaaatagttcccaggcatccttatgaggagggctggctttgctaaaaagatccagggggtgggaacagaagtgcccaatggggtcaattatagggttcacacttagggtgctgggtaaaccctctcctcagtcaccccagcaggggcttctgtacattcaaccctggttgccacccagcgctattcccgagggttggacagagctcagggtgggcacgaggccttcccaagtgatgccagcaggagcaacagatgtgcagggctcccgtcgcacatccaagctctgcttcacaccccaggaccccagggccggctgcccgccatgtgctggctgtggaccttcagaggagctggtttgga

SEQ ID NO: 318526 - DNA, 4001 bp, Homo sapiens
cctcctctttggtattagaaaacacaactagaatgggagaaaaagagacatgagttatagcctccaggggtgagaaatcagtgctgctccacaccaggcaagctcttggcaaattgcataatctcagcaggaatcaaggactggagagccacaataccagacctcaaggttgcagtgtgcatattttagtggaccacgtgtgagaaatgtgcataaattcggaatatattctattttctttttaaaaatccgtccttccccttccaatgaggctataaaagggttcttcagagctagatctgactgagaacccctattcccaccctcccccgcagaacccagctgatgccttgcacaacgtacacaatcagtaaatgtccaattgaactgaatgcacagaaagtattcaatcattacttgacaaattatgctgtatacatggttgaaagcataaccaggtcaataaaaataattaagatactgataggtgggagttgtctctgttacatgcagtaaagtaaccagctattttcttcattaagaaaaaaatataataatatctactagtaaatatggtcataaaaagaacacaagtgcccacagtacatgggaaatacatgtgactattttacagggtaattttttcattttttttccatgaaataagcaaagtgctctgggcacatctataaatcatctgaaatcacaattcagcttcgtttatcacaagtagaagtatgaagtagtgtttttctttgtgacacacatgctggaatcttccgaggaaactatcgctgactttttagcgttttaaaatttaggatttctagaacagatgagatgaaaccaattttcattccaaacattacagcttgtggtttctggtttctttaaagcactcacgctatttaactacatttcagtaaatctctttcctggtggaaatcagctgttctgaaaaatcaagggattcctcctggtgctttacaggagctctaatccatagcccttcccataatcaatccgagtgaaaaccagccgtaccatggatgtgtgtcgctgccaacgcaagcagccagcgtgtgcgcctgtgggggaggtaactggaaaccaaaggactcctcgcaaatgacttctcgcaatcccagtgcaggaaaaaaaaagacttgtcttaacagtttgccttttaaataaaattgcaagttggggtcagtgatactaagacttctaatttgtttaagacttcacactggattaaatgcttagggagaagtgaagaccgggaaataggagagaccagattttttttttttttaaactaatagctctgattcctcttaccagtcacttttaagcagatccgctcaaccttgatccttttctagatctcgcgccacaatctgcccccaatccaccccgaatgactcaactccgaattaacagcggacccggcataaacagacaccacactctcacgacgtgagatgactaacaaggactttatctaccaaaatggctagccttgattcaggctactcctctgcttggaaggcaaaatacatcggcagagaagtgaaaggagaaattaaacccagcaggaacacagaatgtgacacttaccttttctgattttgtaaggggtggaagatatcaagcagtaacgaggtgaattccccagcaggtacaacggagcaacaatccgcagcgcgcgtaagcaggcaggctagccctgacagtgtgcatgtgctctgaaactgcaagttactatcagggcaacttaagaaaaggggaggagtctgtgcccgggaaaggaggagtggggaatggaaaccgcacagggaggagggggaaaccccgaggtttctggaatattgattaatcttggcacaccagaagcaggcttgctggctttgttttgctccttagaccactttcacgctttgtcagttcactgtcattagaaatgcaaaaccgggactaggaagaattgaaaaataaagcgcacacaatcggaaagctgaaagtcttgattagaacgtttcaaagacttttctaaggctaaatttaattacctcacattattgcatgtttcctccctttcagggaagacgagggtgtgctctttagcctggttgtacaactgttacgagaaagttcctttttcgaatcggggaattaactgacgtttcttgggaagacactgaatgcagacaagtatgtagaaaaaaaataatgcttactacgattctctaaatttgtctaaagttagggacatgcctctatttcagcagttgaaacttcaaaacttcattttaacaaacctaatttagctcacactgcctgtgttgcaaagacggaaaaggtagcaaatgtaaagagactggaatttttgccaaactagaaaatgaaaagcattttaagaccaagagtgcaaagtacacttgagatttggtgattcaaaagataggttgctgttcagatgtctccattttaaaggatgctaaatgttctccctaccacacacaacttttttagagctaaaaaattctcattgccttgagaaggtaacttgagcttctagtccacttttcttaaaagaaaaataaattgtgaaaatagatattagaaaataaaaaaaaatttttttgaggtgacttattcccaaaacttaaatcttctttagaaggaagaaaatggttcattagaaacaaaaatttataccagaatcacagcctgaggtttggattcttgttcactgaatttaatattccccatgcaaaatatgctcaattcttggtctattattcaacaagaaagtatgtcttttttcccctcaatacaaatctctggagatcataaagaaatatctcctttcaccctcaactgtatgtccttttaaacagctactggttggaaagcaatggtgaatcatgtcaatgctttaaaattacaaatcagcagcaattataacagctttctaacatgctatcattttaagaacttactgaaagtacatgcttttgacattcccagccctcagtgacccttcccttcctctgatctcctaggtcactgagcatctatactacattgtttagcacttaattataccatgttttgtactgcatccttctttttaagctcatgttaagttttggtttctcaactaaattataagttctttgagggcaagaacttgtcttatacctaatacagagtcaatattaagtaactctttttaagtgggtggaataatattaggatgtgaaacaaaacgcttttcaatcttttgtgttaaaacacaattactagtttttacattggtgcctctggtttaggtgcatggagccatttctcaatgccatgactacttttaaaagcatttatttactataccaggtcctatctgagccatgagtttaggattaatttgcacaccccccccccccaccgctttttttttttggtggaaatgactttgacttgtattgcaagggaactcgaaagagaaatctgattttaaatggggtttcaagcccagtggcatttccattttttgtttttatttttgttaataggcaagaaaaagggctggaaaaccacactttggttagcatagagatgggaagaccctggtgccctttctttttcactttttttttcctctctaatccctaaagcttggttaaaaaccatttcattatttcagtttgtgtagacattatgggagtctggtattctgttgagaagggaagtaattcaccactgaaagttttgttggctgtaataaaacctaatgagaaaatgagatgcaaagagtctcagttcagagttcatccaattttagtctggagggaaacattgggaattacttctttaagcaccactttctctttctggaaagctatagcaaaagtcatgcctgggggcctcctgggtttcctcaacgcgtatttctaccttttcccctctactttatagttaagtcccttgagctttaa

SEQ ID NO: 318527 - DNA, 4001 bp, Homo sapiens
ttgtttatcatagcagctagagtgagctctttccaaaagcacgaacctggccttagaatgcttactattttctcactgtcctccgaataaagtcagctcctcagtatacatagaaggccactatgaactagcccttgtggccatttctagtctcatttgtcatatctgtcatcccttgagttccagccactccgatatatgagaattccattacctgaatttcccatactcttgcctagacaggtcttgctcacattttcagaatcagctaaaatcatatcaccccttcttggagtatttcctccacctattgtcccacagagagggtgatttatttatcccaggtcacatagcaagcaaggcaggacttgaatttgggttccagaaccctattgctaaccagggttaatgttagccttctcagtaacacagccagtgtgccccatgggcatctgagggtaggctccacacaccagatgtccacaccttagtgctcagcacaaggccagacacaatgtctgatgaccgctataccgtgctgagggaaagggataagggactagcagaggccactcaggtttttcttgggaggagcatgaggcagaggagggactagcagcagggaaatcctacctgcctgaccaatagcaggcaacagctccatgaggatgctctcctcagaagaaaggtgtatcctgacccaggtccttaccagatgtgaagcagcaaaagcgggagaagtgtgtgtgcatcctcattcctggaacttagaaaacctgccactaaccacgcagggtgctgaggggctacagcccctgcctgccaactcaccctgtgctcagagaggtccctgagggccagggcttccagctggggtttcgccttctgtgcttccttgcacccaatgagcctcaggaggccatctgctgtcttagagaaactggggcctcaggaaaggaccccaaacctcacaagtatatggtacggcagtacacctcctgatgcctccagaagtctgtggccagggaacagacaagatttggccccgccctgcccagtaacaaggtccctcacacccctcctcccatgcctggcaggaaggtgactcaggcagtgcgtctgggtagcctggggctgcgcttcccccaacgcaacatctaggttcttaggaaacttcatttgttgtgaaaatcggaaatgaaaagacagttggtgacaaactcctttctccatcacctccttattggacagaaacgacccaggaatgcgcctcgcgtgagtcctattctttcttggggtgcacacccgctgctggaagtatgaacagcaggtttgagggggaggggagcgctgacccgggcactgcgcagggagtctcaaggggggctgacgcagagggagggtcaggcactcccgggtcaacggtctcggcctggcacccacctcggtcacgacggtggacaggtagacgtcctggctgaactcccagccatccaggcagctctcctgctccagctgccccaggtccacgtcgcgccccggctccagcccgagcgccgagaagttggcgatggtggcgagccggtagcggctgcagctgtggggcacctcgcggccgtcccgcagccgcagcgggacactgttgttgcgccaggcgctgctcaggttcgcggcgtccggcactcgacagcggtgctccggggtccccgccaggaacacgactgacataccattgaagccattggggatgatgctggcgctgagcaggaagaagatgaggcgctggaagggcccccactcgcccaggaaggcgatcacctcgtcgtagtcccgcatgcttcccactgccgctccgaaacttgcaactacgggtgatgacagcgttctcaggacagtgtcttgtagctggggcgctccccaaggatgttagaacgttcccgggggacaggcaggctgttagaaattggggcgcgaagccggggaccgttcctgggaaacaggctgaaggcgttggagcgttcccgggagctcgcgctgagcttgatgccactgtacacttgggaccacacccccatccccggccgggcgcggggaaggggagggcggcccagcccgggaggctgggctcccggctgtctccgccctgtgcttcgcgcgcccgcccgcccccaaggacctgacgggggcttccaggctgggctcagccattccgcccgcgtgccggggaagaagctcgttctcggttgtccccagccacccccgagcgctgattcccagacctgggccccacgtgggagggcgggcgcaagggaggagccgaggccagagagcgagttctcggaggggtcggccctcgatctgctcgggccgcgtggccccgggcccagaccccagcagggttccctccgcggtctcctccaatctggaggctgagcttaggctgccacgcgtggggcgcggaggggcgagtcagtggagtcggttcccgggaaacttctgggggcggcagagcgacaggagcgcgccctctcctgtggcgcctcgcgcaggcggctggcacacgccgacagggagctcatttcccaacagtcctagcagagctgaattcggtcacccctggcggcgcccggacagcgtcctcaggacagccaggaccctcatcttgcacagggaaaacaggcccacagcctggaagggatgagcaaggtcacactacgtcagagatgggcccggatcggagggaggggcgggggcaggagacaaccgagtgcccgggaggcgagtttcctcccccgcacgccggcgtaatggctgagcccagcctggaagcccccgccgggtccatgggcgggcgggcgccaggacatggagcctgcgcattgcgggagcacagtcatggaggcactgtcgtcacgctgggttctgattttgagccccttgctctcctcacgcccccagggccctttatcgcggcaggctgtcagagctttctccgactggaaggctttctgttagcagaagggcctgcccccagtccaggaacagagggagggagggagagagaagtaggagatccgatttggcgctcagacccggcagggtaaccaaagcagggaccacagcctccctttttttggctcagtgcccagacctaaggcccttctgctgttgtgtgagctagcccgggcctggagcctgagccctggggttcacgaggcagataaaattgacagggtgaagagctcacctctttggagattttgcacgagtgtgtttgtttccccaggctccgattaagaggcggagggacatttctgcctctttttgtgtagcttccagtctgacccctcctcttaggaggacttcccacccccttggaacctcagtttcctacctgtaataagactatacatcctgatgtgctaggacagctctgatttatgcctattaatccagtgaaattattaatagagcctccctttactttcacaagtatccttcttcgaatgatatattatggtcattatcttacttagcttgggtttcatctccctactccaccccatataatagagcaaagttggagacaagaacgtatataaggtcgtttattctgagtaatgataccataaaacagaagtgagggactagggaggagagtgaacagagagggaggtaaagccaacatagactgtgaaattgagatggttattggcgatgaccaagatcagtaacagtgttgtgtggagccctagtggagcctaagaataaatggaaaattagcaatactgagcctgtctttattgaaaattttgatattgcgttcatcatgggtatttgcattaatttctattttaaaaaatattgcattaaaatataattaatcttggttactgaatttcttggtgcctccttaaatttgcaccagagacaagtgccttgctctttttcctcacctcagccttgtctcaatccccattgctgtgggttactgaggttta

SEQ ID NO: 318528 - DNA, 4001 bp, Homo sapiens
agctgaacaccctaggctcacggagaggcctcctcttctgggaagccttctctaacctgcgaattggtcatctgcacatttagtgagcctatctatcaatgagggctattcactggctacttactcaatgctgctgaaacttcagggagctagagtgccagtgtctaaaaaagacacaaaacacatacatcattaacatcatgttcctacatccagctccaacaactgctccaacaggttcggaggggacagacaaaaccacccagagggaaaatccaaggggatgagaaatgagaaaggctcccctacaccctatgacctaaggctgtatgctttaactaaatctggccgacagccttgcctcataatacctgagaaaatattccaggtcaacaagtcaccctgaacccatcttcagatgaatggatcttaaagagtgacaactgacggcctggcgtggtggctcacggttgtaatcccagctttggaggcagaagcaggcagatcacgaggtcaagagatcgagaccatcctggccaacacggtgaaaccccgtctctactaaaaacacaaaaattagctgggcgtcgtggctcacagctactcggagactgaggcaggagaatcacttgagcccggaaggcgaagattgcagtgagccaagaacgcacgactgcgaaggttgcagtgagccaagaacacacgactgcgctccagcctggtgacagagggagactctgtctcaaaaaaaaaaaagactgacaactgaccatgggaaaaggcaaacaattacttacagggcatgaccagattgtcgtttttgggttgtggacggtaggggaaggagtaactagaggaaaaagggaagaggcagttgtatacacatgctttatttaacttttaaaagttcaggaaagagaagtatttcttctcttctaaaaagaaatcaagagactagaggaaaaacgggatagcccctggcccaagtcctggctctgctacttaccacccccaaccccaactagagtaagtcctggacacacagggccatagagcatcgcccagggaccgccaggaccttcctggtaccctcttcaaagtggccatcaggacgggaggccagactgaccacctgtgcagggaggagcacactgtggctggaggtcacctcgtgaagcgttcccaagccacctggctggagggtctccatcgctagggtgttgaccgttgggggagggggagtgacagcgtccagtgcgcatctgggagagaggagctcgggttcaaggaccgcgacaggtcctccgagccctggtctcagccccagcaggggccggcacccacctcggtcacaatggtggacaggtagacgtcctgactgaactcccagccatccagacagctctcctgctccagctgccccaggtccacgtcgcgccccggctccagcccaagcgccgagaagttggcgatggtggcgagccggtagcggcggcagctgtggggcacctcgcggccgtcccgcagccgcagtgggacagtgtggttgcgccaggcgctgctcaggttcgcggcgtccggcacccggcagcggtgctccggggtcgctatcaggaacacggaggacaggccggtgaagccattggggatgatgctggcgctgagcaggaagaagatgaggcgctggaagggcccccactcgcccaggaaggcggtcacctcgtcgtagtcccgcatgccgccctcagaggcccacagagcgcggcctggggtcggggaacgcggcgggctttgcgcgtgcgcgcggggcacccgccgccgaccaggcaagccaggcagcaggcgacccaagaccgtccgcggagggtaggctcgcgagctgacaccgccgccttggtcctgccgcggctggccttacatagggcgcacgaccagggaaggttgcgggcctgggccgcaaggcgcgccccgctggcaggcagagcggcgccggcgaaggcggagctggggcgggacgcgagggcgcggggcgggccgggagtgcacctgaggcccgggcggggcctgtcctggggacctggcgaggcccggcctctgccagccaagcctgctggggacgaccgaggtagcccgggctcggcttaggaaggcagcgggactcgaggccttggggtccgagtccgaactcgctcctctagcgccgggcggggagcgagtgggagagcggccgcgaagctccagtgttgaaaacgcacccctcccagctttttgcaaggcctacttgggggcggaggtaaggagaaagtcactggcccagggtctcacagatagttgctcttgacaccgcctaatcttataagagggacggggattattttgaacctgggactgttaactaccctagtagagaggctgggagctatgacttttcattctagtccagatgccctttccacattttcgtctgtaacaagccattttgttcatgcagatgtaaaaatttaacttcacgattaacgatcctagcctagggttaaatattccccacagattagttatttccgtgcagagtttattcagaagctaactggaaaaaaaaaaaaagcagcgaggtgattctaaagcagcaatgttccataggataaggagctacatttgttatgttaacttttctagtagccatattaataaaattgccagatttagcaaataaaaatataggactcctagttaaatttgaatttcagatatagaatgaataatttttaaatattatgtcccaagcaggaatatataaaataaaaatgtaactggttgtcctgtattttattgggcaatgctgcatatttaaaaagtaaaaataaaagatgaaattaactttaatggtatatttaatcaagtatatccagaacatgatcatttcatcatataatcaatatagaaattattgatattttacattgttatatgtaaatcattgatctttttttcccctcctcatactaaatcttaagaattcagtgtgtttcacaggttctcaggatttgaaaaaaaaaaaaaaaggaatccagtgtgtattttacagcacatttcaatttggactagccacactttttattttttaatatttatttattcatttatttattggagacacggtcccactgtgtcacccaggctagagtgcagtggcacaatcatagctcaccgcagccctgaactcctaagcttaagtgggcctcctgcctcagcctgctgagtagctaggactacaggcacatgccaccgtgcccagctaatttttttattttttttattttacagagacaaggcatccctgtgttgcccaggctggtctcagactcctgggtttaagcaatcctcccacctcagcctcccaaaatgctgaattacagacgtgagccactatgcctggccagactcattttttaagtgctcagtagccacatgtagctattggttatcttattggacagcaccattcctaaggcctttaagaatttgggctgctaaacttaacaatgcaagatattcctttttaaaatagtagtggcttagtgatagaaacagaactaagtgtatatttttacaatataatgtgttgagtaaagaatatttaatagtcactatattatgagttgaaaataaagctacagaaagggaacctaacctggccagcagatttttaacaaggaaatctaaacatttgcataaagcataatagacttaaaaaaattatgataaagatgttatcacaggacttgtttgtttctttatacttactattcactattcttacttcctgaagatggatggttataccttcagcaatgtacttaaatccttctaacatcttatgtgaagttatagttcttatctagaactaactgaaaaagaaagcaaagcttcttgaaaataaactccttttttgtgtgctaaaatattattttaatgcttcaaaagaaatgaaagcttttatg

SEQ ID NO: 318529 - DNA, 4001 bp, Homo sapiens
ggggtttaagaggggagagccggctaggcttggtggctcacgcctgtaatcccagcactttgggaggccaaggtgggcagatacaaatacaaaattagccgggcatggtggcgcatgcctgtaatcccagctactcaggaggctaaggtgggagaatcgcttgaacgcgggagaatcgcttgaacccgggaggtggtggttgtggtgagccgagatcacgccaccgcaatccagcctaggcaacaagagcaaaactccgtctccaaaaaaaaaaaaaaaaaaaaaaaaagaggggagagccagcgagggtacaatcccttaaacttgcagatgcctggtctttgaagtgtgcctagatcaagattcccagggttggggccacgctgcccagctctaaggctggcctgggataggagaagcaggtggaggcagaaagcggcttttttgtctcaccagtgtcctctgggagcccacctgctcctgctgtgtggatcacagtggaggggtggcgggggacgggttggggggctgggcggctcaccggatgcccacggtggtctggatgagagtggtgatgcccacgcacgtgaagatggtgccgatgagctgactaaccatgtgctggtcgtggcccacacacagcgcctcagccagcaggaagggcacggcgatggtaccactgaagcatgtcaggtagtgctgggcagagggagacagcagagtgcatgaggcaggaccccagagctccagggagaggggacaacctagtgtcctcatgcctgcctcagcgggcctggaaccggctgcctgcccaggactggcagtccccacaagggattcccagagagctactgctgaccactctgggggtcactaatttccactcaagatattcctgcggcttccgtggagtcggctctgctccctgtcaccaacaccccacctggcaagcgtcacactcccccagggagttcatcttctttcaggattcagcctcttcccgactcctgcttgctgacagccactgtgctgacctcaggtttttcttcctgttacccaagatactccctgctggccagggaggggctggagtccccggggagtgtgcagagtgagggcggggaggccctgggggacccacctggaagcccagcaggatgcacaggtaccaaggtggcacgtcctcgatcttgtacaacatgtcaaacttaggctctgtgggtagcggggtcgaggggtccctggtggtttcatgctggaggcagcagagataagtagcttagggtgaagtgatggggacaggcaaaatccattctgccccagaatcaatcaggcagcccaagtggcttgtcagcaactgagagcggggttcccgccctccccaacagtccatccacccgggtgccacttggcctggccacagttttctcccactttgcattgcttcccgcagggatgagtctactgtgccagcttctagagccctcaggacctgccattttagccagggaagtggacccttaagtcagaagtcttggagaccacaggagagggggccaagagggctcaagactgtggacaagtccaatccggtcccacctctgccccctggagatccttggggtgtcactggccgggagattaggcctctcctgaaccccaacctggagtcagccagtcccaaagctgcaggctccttcacccccacctccacccatcccccagttgccacattcaatttgggacagtcactcttatcaagttcatcagaacgtttatctctggcctccaggaagaaggcctgcacaggccctccagccccccaccccccctgccccccctagcccccacccccagcccccagcacctgtgtccggccctcgaggtcctcctgggccctcatctttggggcacaggtttgagcagttcctgaggagaagaggggatgacttgacaaaggccaaggaggaggactttactccacatatcaggcattgtttgaagtaaatctgtaaccagatgcccagctctggattgcgaaaggggggcccgggcagaggtaatgtattaactctcactaggacagtaaaagccacccaagcctctgccacatgtgcccttccctgcccacatctgcgcctgggcgctggacctgttcttgtttcccaagagagggccagagtcgagggggtgaggaccagaagtttaccaagccccaggtgagcggagaaagagggagtggaaacaggcacttattatgtaaccccctgtatgaggcccttccccactgattaataactagttcatcattatcatcatcatcatagtcattctcgttattgaggaatggccttggccttgtgccaagaaacatggatctgcactgtcccaagtaacccctgtgctgggcggtattaacccctttaacagcgaaggaaacagattcagtagatgtgatttgacccaagccatgcagatagcaagtttgcagaaaccaatcctaaaattcaggttggtctgagctgccttgccctcaccaccctgcacccctcagggtccctgaggcaggcagcagatgggcctctgcaggcagagctgcctaggctggcccagccgggtctgcactctgtgtcagggcacagatccctttcccctcccagccacataatttctgggacccagtgcaaagtaagaatgtgaggcctttattccaaaagtataaagaatttaaagatagcaggagcattagatggagcgtggggcctttctatgcaccaagccctgtgtgactgcccatcacctagcccaggaaggcagtcctatgcccagcctgtctcccctcctggcaggcccagcccagcctggccctagggcctgagatggcagagggggacatggggaggggccctaagaactcaggctcctcagctggtgagggctgggcctgaggtccccattctgttcccctctgggctgccccagccccagcactctagagcccacctacttctgggtcgctgtgcccatggccaggccctgcctgaagggccaaggggcagcaccgctctccagctgggcagcagcttcatgccacagcactgagtccgcccgcctgccggtgtccacactgttcctctgtccgcctgtcctctcctctccctcttggctactgctcccaatttccaaagttgctggaccagtttgaagcctctgcaactccccagcacttttctctccaacttctcctcccagaactccccagggtgctgtggagaccaagcccgaccccctgcagatacggctccatggacactcaattcaacccaaaccacacaacacgcatagagaacaaggtggagaacacggtcccagatccacagtagcatgaaggggcccacacacccagagctgatgcagcctctctaatcaccccacagaaacacaggtccacgtcatgggtgcccggctccacaccctgtcctgaaagcttagtgggtttcttgggccctgactttcctcctggtgtctagggtttctctcctgagtgaaggccacggatggtggggcttcaggcaggtcctggaacaggtgaaggatggagggggctgagtgcagctcccagggaagctggagtggccagggcctgccccaggcacctccattcccccagcagcccgcctctccggtcccctaagtctgaatcccctcccagccctactactactcagccagggacttggcccaaaccccttctgttgtctaagtttcggtttctgcatctgtcaaagggggattagattgtcttcctgcacatggctctcgtgcaaaataaaaatatttctaaaaatgagggttagaatgttctgtctctctcccagggcttggccagatcagagacactcacaaacgaaactgaaagttctggtgccaccgatctccagttcccagacctaggtggggtccagggcttctttactaaggaaaagccccagccagaagaa

SEQ ID NO: 318530 - DNA, 4001 bp, Homo sapiens
atatatatatatatactttttctcatatatatatatatatgagagagagagagagagaggagtattttggtatcaagcaccacatgaagatgtttcaaaacttgaaccgcctaatgtagtgcgcatgttaagcagactttaaaagagatcctggccgggtgcggtgtctcatgcctataatcccatcactttgggaggctgagctgggtggatcacctgaggtcaggagttcgagaccagcctggctaacatggtgaaaccccatccctactaaaaatacaaaaattagctgggcatggtggcgggcacctgtaatcccagcaactcgggaggctgaggcaggagaatcgcttgaaccaggcaggcagaggttgcagtgagccaagatcatgccacagcactccagcctgggcgacagagtgagactctgtctccaaaaaaaaagaaaaaaagagagagtgatcctaagtaatcattcatacctatcttcacaaaatatggtcaattctgggtttggggggctgatatttgagattatatatagaactaaattgtttcactcacgacatagaatcatccaaactgcatgtacacacaaatggctttatgcaaaggccctgacagaacgatatttagtttttcagattaggtacatagggccaaccagcccaccctgtacattccagcaagtgcaagagcagcaactttcctatttcaatacaattatgggcagaaattatatgatgtaaaatagaggcccttccataaagttaagatttagggtagaagaagggaagataaaaccaaaattcccatgaagtcaaaattagacagtggtcttgtactctgctgaaccctgtgatgaactgtagtcctcaaactcatggactcggatccaggttcaccaagacacttcagtatgcttccaactgtttcatcatcatcttcctgctgtattcgtaggccacaaacagtgccccattggcagggattgctcgaatcatagtagctttcagtccagaatataaggctactattccttcatttctcacaacacttaagagggtaccaataaatcctgcctgtttcccatacatggaaagaacttgaattctggatttaatacaatccactgggaacacgacaagccacaggcaaattccagcaactccaccacttaacatcaaatggacagggcctagttcatcttttgatctccctgacgcaaaaaacgatcggctcagttcatagccaccaaagaaaaagaaataacccggtacttcttgaagtagagtactcgagagtccatggtagaagcccaaggggccatcctttttaaggatacccttcacgacagaccaaattgtattatggctttttgctatcttccctgacatctccatttcatacatggtctgtagccggcacttcacaagctcagtggggcagagagccagtgcagcaaatgcagaggcgaaggaccccgcggctgcagtctggagatcactcagctttgcctgcttgtccattccagccactttcctgacaaactgctggcagaacccgtagcacatgaagaggaccgagttttcggcgacgtaggccataagtgccgggccggtgcccttgtagaagccccggagacccacttgagcgtatgtcttcaggaagcagtcggtgaggcccttgtacaggtcagggaacgtctgcatcttcacttttattgtgtcgaagggctgcccagtcagtacacacgctgtcccccctgcggcccccgctgtgaggtcgatggcggcttggatgccaggaccggacttcatgttcgctcactcgtctgagggtcccagtggaaggcgactaactccccagagcgtgagaccggcttttcacgtccagccgcagcgagcgcggggaatggagttgggggtggtggggtggctctaccgcctgttctgggctctcaccccagtgcgggggaagccgctcaaccctacgctccgccgcgggccgccccctccccgcgcactaaaataacccccagctgccggcccagcgcgcggctcactagcgttcctgcggctcctggcgcactggccgggcccccagccgcctccagcctggagccgccatccctgcacccgcaggcgggggacgcggaccgaataaatacttttagtgtactgcgactgggcgcggtggctcactcctgtatcccagcactttgggaggccgaggcgggaggatcgcttgagcccaggagatcgagaccagcctgggcaatatggcaagactccatttctacaaaaacgaaaaaatacccgggcgcgatggcgcgcgcctgtggtcccagcaattcaggagaatgaagcgaggatcgcttgaacccgggaggtcgatgctgcagtgagctatgatcgcacactgcactccagggtgggcgaaagggtgaggctctgtctcaaaacaaaaccaaaaccaagaaaacatgtaaagcttttcgataaattcttgcaattatggccgggaactctagacgccgcagttcagctggcggcaaaagaaatgctgtcctaatcagtcagccctgcttcttttcttttctctcttttttttttttttgacttagggtctcactcggccgcctaagctggagttcagtggcgcgatcctggctcactgcagccccaatctcctggcctcaggcgatcctctcacctcagcctcctgagtagctgagactagagggactacaggcgcaagccaccacatctggctaaattttgtattgtacagacggggtttcgccatgttgcccaggctagtctcgaactcctgaactcaagcaatccacccactggcctcccaaagtgttggggcttacaagcatgaaccaccacacccggcctatcccacgcttcttaccatgcaaaaaacaaaaacaaacaacccgaaaagaagatgccctcacttgaatagaccctgaattcagagggtcaatctacaagaaaactgctttaaagtagataagacaggccaggtgtggtggctcatgcctgtaatcccaacacttggagaggctgcggagggaggctcatttgagcctaggagttcaaggctagcttgggcagcaaaatgagacaccccttaccccctacaaaaaataaagtagagaagacaaactgtcagaggcgctggaaccacagcaactccatcttgactagggactgagtaaaataaggccgagacctactggactgcattcccaggaagacaggcattctaagtcacaggatgagataggaggccggcacaagatacgggtcacaaagaccttgctgataaaacaggtttcagtaaagaagccagccaaatcccaccagaatcaagatggcataataagtgacctctggtcgtccttactgctcattatacgccaattataatgcattagcatgctaaaagacacgcccaccagcgccgtgtccacttacagatgccatggcaacaataagaagtgaccctatgtggtctaaaaagggggaggaatcctcagttccggtaactttggacccctttcccagaaacctcatgaataatccaccccttgtttagcttacattcaataaaaaactgtaagtatccttagtcaagccgcccaggccactgctgtgcctatggagtagccattcttttgcttctttacttctctaataaacttgctttcacttgactctatgaacttgccccaaattatttcttgcatgagatccaagaacaatctcttgggtctggatcgggacccctgtccggtaacgaaacgatctgagggttgctacatgagagacagtgactgcttttgatcagaaaaccctcagcgatctgcccacgctcctcactttcctggggggcaaggaggggagtagggcactgtgggaatccttagccctggagatgtgctactgctttcctgcagagctggagaaatgctatcacatggcaac

SEQ ID NO: 318531 - DNA, 4001 bp, Homo sapiens
attacgcagtttaccctagaaaaatgtataagctaaatagaaagcttcttttacccacctacggtacttttaccttagattttacctttttttgtttgttttgagacggagtctcgctctgtcgcccaggctggagtgcagtgacgcgatctcggctcactgcaagctccgcctcccgggttcacgccattctcctgcctcagcctcccgagtagctgggactacaggcatccgccaccacgcccggctaattttttctattttttagtggagacggggtttcatcgtgttagccaggatggtctcgatctcctgacctcgtgatccgcccgccttggcctcccaaagtgctaggattacaggcgtgagccaccacgcccggccttacccattttgtatgtatagatcatccccaaatagcaacagaaaatgctactagcattttctggaaggtgttaggaaggtttaatcttgtttactgtgtaagtctcttaggtgtctatctttgttgcaaaattaacattcacccacctgttaaggctgcaaaataaacccctgcttgtgtcaaggaactcctcctcattgtaaccaccaaagcataactttaaaccgggaagagtcaaaaagctaattgtatgacaattagctaggtaagtcatctatctttcttcacatcctcatttactcactagacattcgttagtctgttcttcttagttaaatattattgtacttccaagtcaaagtcgaggaaataagaataaagctgatttctacaataaatttaatattaataccattaatctattattctaacaattccagaagaatagaaagaggtagccattattcacattttatgaataaaaaaggatgttgaaaatatctacatcatgcagtgttgcagcttttctgacatcccatggagaataattatgtcatgattccgaagtcctatcttgaaattgtatcagtgtttctaacttttatatgtagtttttaggtcagcagaaggaaagcagaaaggaaaattataggaaggaaactttctagactggggatctgaaaagcagacaaaactcctgtgttcaaaaaggaaaaggaaggaaactttttttttttagcctatgtgtcccatacaggattcttctacacatcttaaagatgagaaaactgagggctcacagaggttaagttgttcagattacgagtggcacaaccaagtttgaacccaagtatgcttatgctgaaaggcttctcttttcagaacacaaaactacaagtaaacacattaattaattaattaaatcaagaaaatagagctgccaaagtgaatcagggaacagttaataatccaatctcctttttaactcagaccatcagttgagacaccaaaacctctaaaaattcctgctatgcaccccatagctaaggcagatgtcttttttggagttgatccaggagaattcgtttgtgaggaagaggaggccagcctcaggggcagaggaccaaaggagggcaaagggtgtggcgcgcgataggatgagaaggaataggaggcgggatcctctgcgccgcttccggggtctgcaggccgcaagccgcggccccagtaacccctcatccctgtgtcggtccccatgcttctcaccactgctctgcccctgcacactgccgccgccgccactggaaaagggttcctccgtggggccttcgtacggggtggaggtggtgggcacgccgtagggcgggctcttctcgccccagtgcaggttgcggctgccggggatatctgggggagtcgtcacccagtggcccaggtccgacccggtgctgaaggaccttgcagggaaggcgccgccaaagccctgctcgtcccgggcaccaccccggtagcccaagccatcaaatccgtccgggcgccgcggatgcatcgcagcgggggcaggatgacgcgagcccgcccggagcccaccaccaccggggccaccacgacctaagcacacacagcttcccgtcggccgccgccgcgtcaggggtaaattctgacaaccggaagtcacgttggaaacccggaagtcttcggagcacgtgattatagcctcttccggcaaccattaaagggcacggttgctagggagacgcggcggtaacctggaccttaaaagtttgttgtcgttagggaataggtgggaatatggttgtgggattaatgaaacacagtaccaaagagattccagaaagagaactggtgtaggaatagggcctgcatgggaggagttcaaagatgcttcttggagggagccgataacccgcgggtggagcctacccggtgagatcccggccagaaataccccatgtcacagctacgccccagatctcagtgttttctcacgggcctggtgcctcgcctgctccgaggaagctagtagaggttggagttgtggagggttaataacgttccacctagctttgtctcccgcacttggggttttggatcaaatctattgagagatatggtaccgcccagtgaacgcgaaagtactgtggaccaccagagcaagcattttaaaagttgaagtgcacgtcgggggtgaaagaaacccacgtactcgaatactgtcctcctggagttagaaattacgcgttttccttttctaaggctgtaaagaaactatagttttctgtcgtatttttttctgatgtgtctaaatcactcagggtattgaaatcccagttatatcgttcaaaattgggacctctaattgaataactgagaggactactgtagagcgtcccctactacctgttttcattagctccacgggctcttgggccaggctccctccccagatctgaggaagacttccatggtttcatcctatgttccttcaactcgttggaagcccaggattcctagagcttttccaagagaactctgacgtgcagttctcgatcttccagatgcgaaccttgattgagagtgataatcaactttgttttgattgaactgacatttttttctgtggttttatcactttttattttttatgggtgtatagtaggtgtatatatttatgggttacatgagatattttgatagcgtacattaaaatgtataattaacatttttaaataacgaattgacattcttaaatttgattgcgatgcagcttgggcaaaggtgttgagtctcttgactgtataaaatttaaatgtccatatagtaaattttaaaatatatagtaatcacaattgaaaggcaaatcacaaacagaaaaatgacattttaacatggtttaaacaatggaacagtagctttaatgtacaaagagttcataccaatgaataaaggcaaatcagaaatatgagcaaaggacatgtagaggcaattcatacaaaaaaaggaagtgtaaatagataatatcatataaaaagtcctttactaattgaaaaaaggtaaatcttaattatctttcacgtattaaggtgtttaaaagggaaaatgcacattgtctttccaggtgagaagaaagtagctttcattaatttctgaagtgatataaaacataactttctgatggagagcagtttggcactatgtatcaaaaactgtaaaaataaccatattttttgactccaaaatcttagaaaacaaatataggggttttttacatgtttctggcatggataacatacatatgtttatggcatgcttgctcataataggaaaaaaataagcaggaatgcaaatatcaaataattattattgattaataatttattatttaaagtgtatatccatacagttgtttaacaaaaatatatttattaagcacctatctcgtgtcagatactattttaagcaataaggatagaatgataaataagccagacaaggtgcttgcattgttagaactgacattctagtttagggagacaaagaacagataaatatatcctgtcaaatatagtgcaatgtcaaataatgacatgattgt

SEQ ID NO: 318532 - DNA, 4001 bp, Homo sapiens
taacatatacaggaaaggcaaatttacagaaaggagattaaggagagggaacagcattcaacttcaaatgagggatcttactgggggatgaaaatgttctaaaacaaatttatggtgatggttgcacctctttgtaaaattactaaaagacattgaattgtacatttgaaatgggtgaattttataatacataaaataaaccttgataaaattgttttaaaagaatacatatagcacttaaactatacctggcacctagtaagtattcaagtgtagtaaacacttaccatcatttcatggaagccaaaaaaaaaaaaagccatgttattagtttggtgcaaaagtaattgcgatttttgccattactttcaataacatcaccaaagtaaggaccagaataaagcacaaaaatcccctacttgctgtgagtcggggagggttcacatgttatcacgtttggggatggggaggggtatcagagtcttggaactactctgactcagccctaccttccagggcatttttcaaaccaagccatttgcatccctaccgaaggtggtctgcttatttaaggggcagcccacggaagtgtctcctctctctgcctgccccgctgaatggtggaataattgtccagtcaaaaaggacctggatatgcccagcgggcctcaggctgcagccccctaactgggaaagttaggagaggcgggtctcagccccacccaagggcatctgtgccaacagacttactcaaggtgaaaggagccacctctgctcaggaaggtgtgaagcagggccctgcagccaccggtctcgggagagaggtggtctcctgctaggtaggaggggaggagttgggatccaatctggtttgttgttcttttcatcttattttttcacccctttggtgaggggctacatttgccaacatcccttttaggataacccttttagatgggtccaaagaaagacttttttttttttttttttttttttttacaattagcaaagtccctcaaacttccccctttcctaatagctgagaaaagagggatagaccaattggaaagaaaaatggagaagcaaggaaatgaatgcaactctcgcccaggcaacccatcccaggcccagtaaaagagtggcttcgggagctgtggcgaagggatcagcagacccaacagtgcccggagaaggggccttggaggtaggcgatggctgacggttggcggcggctgaaggcaataagtgctcctcgcagcctggcaatgggcacctgcagccggcgctccgctccctgctgtgagagctctgctccctccagtcgggacgccccgttgggccggcctaatctcgaagcctggctcccaccaccctgcgccccgggatcagcagccaagcgctaccctcatacataagttcccgcgagccacgtccgcaattcaggtgtgcaccaggtcactgaagggtgtgtgcgccgccaggagcctccattggctgtgggctttgacgagctgtttaatcattacctcatcaagtcccacggatcctaacttaatgagcaaatcagaagctcagcccgaaacgctgtgaagctctcagaatttagccctggcaactgcaagaccaccagggggatctcggggccgggcactccccaaagcaggctgcgcgcacaacggggagcgggatggcagcgcacagaggcaaagtttcctcagagcatagaggcaaactccgccaggctcgctctctctgaccgggggtccccggtaagcacactcacctccgatccagcccgccgcaaagtcttccagctggaagcttcccatggccggcgctcggtctcgccctcccggagccggggcagtgcccacttagagtcagtggggcatggcccgcgggcgcgagcgcgccgcaagaccgaagtcggagtctcgagcacgccgcaggtcctactccaaacccagtcccccagtcaccggctgcgcgggctgccgcgctcacctctccaagtgccggagggcggctgacatcacgcccccagtggaccttaaaggcacagcactctgggtggataagggtgcgctccgcgcggctcatcccagacacaaagaggcaagggtcatcaagtgaaattctcttagtcctcccttctccgggttatcctcttccttgccaacttcagagcctcagcgcctttgaactgaaagtgccagccgcccatccagagacggcaatgcgcgtatctccctgtactgtgctgtgctgacaatgctgattccaatcagctgtggactctctcccatcccaactctgggcagtgatgcctttttgttcatctcagccatgtcccactcagtaccccgtgcctagagcaggcacctggtggttcagggtcatgtctaactttcagctacagctctctaggggcccagctccctgcctggccctggctcaccctacactgtccgccctgggccaacagaaggcagaggtggtgctctgtacctcaaactccctctctgtaggcagaccctacattcagccaggccccaggccaggggtccgtgctcactggagaagtggcctgctgtgcggagaggcttttgattacaatgagagtgtctttcctcccttcctaagaagactcgaagccccccagcgttctgctagtttccagcagggactcagctgtgggtctcagccaagacaccccaaggttgacaagaatggtgaagggtatggtcaggaggaaggggcctctgctgggcctgctcttgtcccactgggcatattcatgtcacgtcatccaggttaatatgaagcgacagccagccagacctccttcttccaaagcaagacagagcctgaccaccgaagcttgatcctacaaaggcctgtccactgaggagtggggacttggaggtgaagggaccttcctgcagcatcactccctcccctgccccggcacacagagagtggacctgtatcgggagaggacagcccgggatggagtcgccggcctggctagggaagtattgcaaagttccagggaggagtggaagcatcacaccccatcccggcacctcaacttcctgctgcttatggtgacccactcagtcttgaggcttcagagttgccatcagcatcaaccccaagctgtgccctgtcatgcccgggatatatgcctagggctgctatgagaaatgcaggtctctgaagagtggccttttactgagttcaccattggaatgcatccacaagtggaaagcctgacaattctcaaaacccactcctctggaagaccacctaaggggtgccaggcagtttgtcatcccctcagtcctgtgtcagcaccaattgaggaggtcttacgttggcaggcagtgtccctggcagcccaggatggcctcccaggcccagaaagctgctgcttgaactactaacgagctggagcagagcaggagtgggttgctttccaaaatgaattactgtgctccattcccatatgcatgccacaaacctgcccatggggcgcatcacccagggaagtgaggggaggaccctaggtttaccagcaaccatggccaggcctggagaatcccagaccacagggctatgagcccaggcagaatgctggctctgtggccaggatccaggccatcccttcttcctggccttcgcacttcagagcaccatttgcagtgtgctgccattcacatttgcattctacactcgggagagggcagggcagctactggccattacagagagaaagaaactccacagagatccactccctgcatgactagggccagaaagcaaccccattttctttctccctcagttccttccccaatgatgacctctcagagcactttcctcagtagcaggacatgcagatgggctatgctgatagcatttgttaactagtggcccactccccatttcttatttaccctttcaggccacagcaatttcctgagcatcagtctgtgcta

SEQ ID NO: 318533 - DNA, 4001 bp, Homo sapiens
gaaattaagcttggcaagcatctgcctgggggtttacattcactaaaagcgtgattatccttctgtcaatcatgggggaaaataaaaaataaaagtgtgggcagggcacagtggctcatgcctgtaatcccagcactttggaaggccaaggcaggaggattgcttgagctcaggagtttgaaacctgactgggcaacatggtgaaacaccatctctacaaaaactacaaaaactagccaggtatggcagcgtgcacctgtggttccagctactcaggaagctgaggtggaaggtttgcttgaacccacgaggtcaatgctgcagtgagcctagatcgcgcccctgcactcctagcccggatgacagagtaagacctggtctcaaaaaaaaaaaaagtcaaatcagaaattaaaaaaaagtgatttttttccctcaaaaattacccctagcccagagtatgttcacctctagatcttcccctaggaggcagcacattacagtacaataattgtcaaatacagagagccgttagcttcttaggaccatccctgcaaatccaaggatgagatccaggactccacacgctagatgatgctgaacgagtgagcttaggaccacacttggagaatcactggatgtgttctggaagtcaaacagatctctgttcagatcccagctatactgctcagcagtcatatggcaatggttttgtaaaacttcactgtactcagcatcaatttctgacctgtaaaatggggtaacattacctaacttgctggtttgtaaggctaacacaactacctaccacagtgcctggcacatagcatttactcaataaacgacagctattagtctctgtcccttgctatatcctgccttgagattcctgattttaaagggtccattcctttcccacagctttggccctccatttcttattgattcaattttcaaaaacaaaaagttctgcttaatctagtattgcatatcacattagttgtagatttcacataaagaactgttggggacaaggagaaaagacaggttaactagaatgggcgccggaaggcaatttaagttctgaatgtttctaactcactgtgatccccaatctgtgcaaggaaggagcccaggctgatagtctatgagtttggagagctgggtacaagtcctagctctgcaaaagacttgctgtgtatttttaggcaaggctctgggccctctctgtcttctcagtgtttccatccatccagtgaaataataccaacttagtgtgtgagtccgaaagaacaggtcctgattttgtacttaatcgggtgtgtgatttttaataaccaagataaccaagccgtctcgcctgtgccggcctcagtttccccatctgtccgaggtggtggtggctcctatctcctcgatccctattccagatatctaggttcgagacggatcaacgaggactggaaaagcagcggagtgcgtggcacccggcgagatacggcgagatacgcgggatggagggcgggtgggcagccgccagccagacgggcaggcccggatcaccagggtgcagtgccactcgcccggccccggaccacccgggaaataacctgacgcacgccccgctccacggcggcgacccctgatctgggattctaccgcgcggggacccaggcagaatgactctgggaggggcccgctgaccgcttggcggccagcaccgctccctccctcttccctggtccgcttccctcttctcacctctcgggtccgggccgctgcaggcaaccaggcgccgcggcacgcgtcttccaccgtggcctgactgaggtggacaccgcggcgccgacagagctatacctgcctgtccctttccccgcccatcgctcggactccgaaggaggcggggcccggctgccgggacctacgggcgcggcgaggacgcaccggcgaagagatgccggaggcagagccagtgtaaacgcccgcggccgaggccgtcacgtggtactgccgggcgagcgacgctaccaccagccaataactcggcccagaccggggagggtgccgccctctgactactctcctcctcgcgattggctgccctggacagaagagcacaagctggaaggattcttagagaggttccgccgctgcttccgtggcgttgactcctccgcggagagagcggatgaccggcctcggcggctagcctgtggccagggtgaaatagcaggagaggcgcggaagcgctctgcccagagttttgaagtgctcagcgtttgcgatcggccacctctttatccagtactacttgggaccccgttccctcccacccgcctttgtagaacgggaaattgaggccccgaacgggaaaagagctcctagaatgttagaggctcttgcctcactataactcattccccatcaaagattccagtaaccggaaggctaaaatgtaaattaaaaggccgggcgcagcggctcacgcttgtaatcccagcactttgggggaccgagtagggaggatcgcttgaacccaggggttcgagatcaacctgggcagtatagccgaaccttgtctctataaaacataaaatgtaaattaaaatgtaattgtagtttttgttaaaatccttagtgggtttaatggcatttgtaggtaaaatcaaaccctccctatgccaaggtactgtgtgcttcgggcactcatctctgcccccctccctcgctgatctccacccatactggccccctttgctcgccacgcttgttctctttagggacctaaacattggttctggccatcagatttcttctggtctctcaggtctcagccaaaacaccagccctctccatggcgaggccgtccctgaccaccctgtgtaaactagccacagccagtcacatcctttcaggtcatcttgatttaattatctgcctcgaactggccactattgagtatgtattaatttgttcattcctcaccttgtttgtagcttgcatgtgcccactagatgggggtgaaggagggcctgtgaaggaagcatgattaacttcctttccttccctttccggtgaacgtcttcacagtcattcaaggaactccctttcttatctagagatgatccccaagtttctgtcacccatcagattcagagtttccaaaacgtcataagctgtcttgggaatcagaacacaaacacttgggttctactcctgatgctgccccttgtggctgaagacaaatcatttcacctcaatgggcatcaatgttttcacctttcaaagggtagttaatgccctagcacccagagtcctggagagggtcaggtaaggcaatcagtgtaaagtactttgtttaagccctaaagactgcacaacaagcagaataaacagtttctggatgtttatcacgtgcctgcgcagaactcttcacattcattacatgagttaatcctcacaacagctttagaggaggtgccatattatgattcttcttttttttggtgaggaaatgaggctcagagatgttaggtgatctgcccaacgtcccacagttaataagtgacagtagcatgattttaacacagtcacgtctgactgcaaagcccactcttaaccactacactcactgtgctatgcaaatgcaagaatccactccaatccttgcagctgacatttattcatttatttgtttgttttcttgtctgtgtggggaagccaggaccttgcatataacaggcaccaataaagattggccaaatttggccgggcatggtggttcatgcctataagccacttgagctcaggagttagagaccagcctggacaacatggtgaaactccaactctaccaaaaatagaaaaaagtagccaggcatggtagcatgtgcctgtagtcccagctactcaggaggctggggtgggaggacagcttgagcccagtagacagaggttgcagtgagccgagatcgtgccactgcactccggcctgggtgaca

SEQ ID NO: 318534 - DNA, 4001 bp, Homo sapiens
gtattggtatgtatctattaatctaaaatacttaaatattttcattatggtccttgcaatggatcttcctctttccgcaccttccttccccattgaagaagactctgcataaaccatttagattacaccaaataagtatcatttttcatatttcacttctatttcattaagcaacccatcttcctagcttctttactaattagccactaaaccccaggcttttctttacagttcagtgaaaatacgtgtagcctaagatgtcctaactccaaggcagggggaggaggaagggtagaacttagtcaaaaaaagaaaaggatgcatggaaggataagaagaagaaacagaaaggctcctagagtctgccaagagcccacgttctggctcacaggtgggagcgcaaccttgctaggcaagtcctagcttgcagacagtataaaataagagcagacatgaagaaaggaattcaggtaccttcctttaaacatatctcttctgcaaatgtagtcatccctgataaagtacaattagaggtaggtagacgtgtcacaatgaagtcagataactttcctattcaccattttgtcagagctgataaaatttagaagtgaccaagttctctgtgtgttcttgcactcactgaaggaaccaatagcagtaaaactgtccctgtctcaaaatggtaggaagcagagatttcataaaagttttctgaaactacgtgcctgaagggaggagacagttgttaaaccagcatagaatcataaaactattttgtactcttaacatgcacacttcactcacccaaaatattagttacgaattatcctaaagaaaaaaaaaagggtatgaaagcaggtgggctgccattctgtataggcagaccacaccccatactctacctgcgcccaccactagggctctgggcccacaggcgcggatgcaattcaggagggagttggagcgaatgttggtgttgagaaaggccaccacgcagcccagcttggcgaggccgaaccacacgtgaacgaagtccggctcattgctcatcagcagagccaccgtgtccccctttttcagagaggaatggttcaggaagacatgggccactctgctgctccttttgtctacatcctgataggtgtagatgtctccctcatagatgatgaaaggtttccgaggttgtcttttggcatgactcaagaatttatccagcacagtcaccagctcccctctcttttcatacttcttcagccgaattataatgagcaccaccttcaacacgaaccagaagtcatcccaaaagtaagggaacaggagtttctgcaagaagtgcaggacgaccattccagcccctagaactgttagccatgacagaagcatgggggcaactgggccagaagacagctctgatctcagcccccaccagcgtccttctcttccaggcacagctctccacggagaccgcagatcctcactactcagggcttacacctgaagttcttgtcagcttttccggggcgaagcgggatggggaggaatcctgagaaacagaatcgtaggtttgcaccgaaaaggtcgccccaagtggtgctgaagattaagcttgggtcactgggcggctggaaagcagggagcctccgactcctgcgagaaaccaacacagccaccctcaggggtcttggaatctacaaccccagcgctgcgccctcgcctcccaaccgcgacagcggcccgtgccctgcgagttccccaggactttccagacctcttctctgtgagggctgagtcagtcctccctgcttctgcgaccctaaacaaacctcaccaccctcagaagaaggtccagggacagaagcttttctcctctcaggtagtctttcccgcgagcttgagttggaggctgaattcgagccgggaaaagctgggatgatgatgactgagaagcgcagcgatttacagtctctacgcaccagaaaccgcgcaggggctcagcaccacgtctcggtccgtggcctcagggccagcgggttccagggttcctgagcgccgcccccgtcctgccccgcccagccccgcccagtccctctgacgcaacgggtcccggagaactgctccttggtgacccacgcgcccgctggaaaggggtgcccctaccccagccgcagctcgcactccgagtgtcgttaggctagcctagtgtattctcctccgaaacatggtgggagtgttgcctgcccaccttcggcctccaggctcagggctaaccacatcccctggcgtgccgcagccggaacagcctgggccccgccgccagctcctccctgggcgcgcgtccggccacctagagaagtgtggcgcgccgacctgctcacaccccagggaggaggccccgcgactggcgtctccggcggggaagaatgtgacagtcccgtggggggaaacccagggatctggaaggcttggggtcacaggagaaccagagttgctgggattgggcggcgcgggggccctggcgaggctgataaggtataacagtgtcgcacaaaggtcatccattgaaccaattaataactagaaaatggaaagaaaagaacaaacatcaaaaaaactgcagggagagagaggcagggagggaggaagagagggcaggaatatttatgaactggacagatccaataatattttgtaagaaagaaaggaatatttggacaccacaaaattgtactgttctttacaaaaagtatttttgaaaacatgttgataggttggtttttacatttatattagaactctatcgttagagagctaagacagtgcgttttacaaaatttggcaacaatattgattgatttgagagcttcagtcgatattcgtatttaaaaataaaaacaaagtttataatgctatttgcagtccttaaaagtaacaagatcccccctccctgagacagatcatttaaagaattatgtcttcaaactaaggattctaaagggagtggggaggtggagtggagaagtaacaagttagtggaatggttaataaaattttatacgaagatgaaattttactaaagatcaaaaaactaaagaacatttcattacactttttttttttagcagacaccatcatcccagctgtctgcttttaagtgagtataaatggttaattgcttgtgttaaaatagttaaggaaggcctcaccttgttaggtgtttctcccttctgcctcatgttctgcagatggattctggctaacctcagattctgtaataaaagaaaaactgataattccaaagacgagctccagtttattaatctgaaaatgattactttgaagtcacagtgaagagctcttaaagccaaaggaacataggctcttaaagcccttttctgtaaatgacaaaaaaatgctttctaaatttactcagaagctttgatcttttcgattcagaaatatctttttaattaagaaaatagtatcaagtagtttataacttaaaacattagtttacaacttgaaaagcatctttgacattctattgttttctcttctagctttagtctaattaagtcacctccaaataacaacatttaacgaacacaaaagaatatggagcagttggtctcagacttttgtagttttaatgagtaaaatctgtccttctccagtggaaaaaataatacagaaagataggcgtggcatttcttttattttgctgcacttatttttcttatcatggacattctaataccatcctaaggcatggaactaaatttttagcaactacagatacaatgaatctagaatatattcagcaccataaatgtgagcttgtttgacttattaggaagaactacaagtaagcatatgttgggccagactttgtactaacccaaaccaattttatgcctgaaatctcaccatggaagacataatcaatgaaaaatcttgggacagttaacagtattgtgtatattcctatattagcccatgtacct

SEQ ID NO: 318535 - DNA, 4001 bp, Homo sapiens
ttggtatgtatctattaatctaaaatacttaaatattttcattatggtccttgcaatggatcttcctctttccgcaccttccttccccattgaagaagactctgcataaaccatttagattacaccaaataagtatcatttttcatatttcacttctatttcattaagcaacccatcttcctagcttctttactaattagccactaaaccccaggcttttctttacagttcagtgaaaatacgtgtagcctaagatgtcctaactccaaggcagggggaggaggaagggtagaacttagtcaaaaaaagaaaaggatgcatggaaggataagaagaagaaacagaaaggctcctagagtctgccaagagcccacgttctggctcacaggtgggagcgcaaccttgctaggcaagtcctagcttgcagacagtataaaataagagcagacatgaagaaaggaattcaggtaccttcctttaaacatatctcttctgcaaatgtagtcatccctgataaagtacaattagaggtaggtagacgtgtcacaatgaagtcagataactttcctattcaccattttgtcagagctgataaaatttagaagtgaccaagttctctgtgtgttcttgcactcactgaaggaaccaatagcagtaaaactgtccctgtctcaaaatggtaggaagcagagatttcataaaagttttctgaaactacgtgcctgaagggaggagacagttgttaaaccagcatagaatcataaaactattttgtactcttaacatgcacacttcactcacccaaaatattagttacgaattatcctaaagaaaaaaaaaagggtatgaaagcaggtgggctgccattctgtataggcagaccacaccccatactctacctgcgcccaccactagggctctgggcccacaggcgcggatgcaattcaggagggagttggagcgaatgttggtgttgagaaaggccaccacgcagcccagcttggcgaggccgaaccacacgtgaacgaagtccggctcattgctcatcagcagagccaccgtgtccccctttttcagagaggaatggttcaggaagacatgggccactctgctgctccttttgtctacatcctgataggtgtagatgtctccctcatagatgatgaaaggtttccgaggttgtcttttggcatgactcaagaatttatccagcacagtcaccagctcccctctcttttcatacttcttcagccgaattataatgagcaccaccttcaacacgaaccagaagtcatcccaaaagtaagggaacaggagtttctgcaagaagtgcaggacgaccattccagcccctagaactgttagccatgacagaagcatgggggcaactgggccagaagacagctctgatctcagcccccaccagcgtccttctcttccaggcacagctctccacggagaccgcagatcctcactactcagggcttacacctgaagttcttgtcagcttttccggggcgaagcgggatggggaggaatcctgagaaacagaatcgtaggtttgcaccgaaaaggtcgccccaagtggtgctgaagattaagcttgggtcactgggcggctggaaagcagggagcctccgactcctgcgagaaaccaacacagccaccctcaggggtcttggaatctacaaccccagcgctgcgccctcgcctcccaaccgcgacagcggcccgtgccctgcgagttccccaggactttccagacctcttctctgtgagggctgagtcagtcctccctgcttctgcgaccctaaacaaacctcaccaccctcagaagaaggtccagggacagaagcttttctcctctcaggtagtctttcccgcgagcttgagttggaggctgaattcgagccgggaaaagctgggatgatgatgactgagaagcgcagcgatttacagtctctacgcaccagaaaccgcgcaggggctcagcaccacgtctcggtccgtggcctcagggccagcgggttccagggttcctgagcgccgcccccgtcctgccccgcccagccccgcccagtccctctgacgcaacgggtcccggagaactgctccttggtgacccacgcgcccgctggaaaggggtgcccctaccccagccgcagctcgcactccgagtgtcgttaggctagcctagtgtattctcctccgaaacatggtgggagtgttgcctgcccaccttcggcctccaggctcagggctaaccacatcccctggcgtgccgcagccggaacagcctgggccccgccgccagctcctccctgggcgcgcgtccggccacctagagaagtgtggcgcgccgacctgctcacaccccagggaggaggccccgcgactggcgtctccggcggggaagaatgtgacagtcccgtggggggaaacccagggatctggaaggcttggggtcacaggagaaccagagttgctgggattgggcggcgcgggggccctggcgaggctgataaggtataacagtgtcgcacaaaggtcatccattgaaccaattaataactagaaaatggaaagaaaagaacaaacatcaaaaaaactgcagggagagagaggcagggagggaggaagagagggcaggaatatttatgaactggacagatccaataatattttgtaagaaagaaaggaatatttggacaccacaaaattgtactgttctttacaaaaagtatttttgaaaacatgttgataggttggtttttacatttatattagaactctatcgttagagagctaagacagtgcgttttacaaaatttggcaacaatattgattgatttgagagcttcagtcgatattcgtatttaaaaataaaaacaaagtttataatgctatttgcagtccttaaaagtaacaagatcccccctccctgagacagatcatttaaagaattatgtcttcaaactaaggattctaaagggagtggggaggtggagtggagaagtaacaagttagtggaatggttaataaaattttatacgaagatgaaattttactaaagatcaaaaaactaaagaacatttcattacactttttttttttagcagacaccatcatcccagctgtctgcttttaagtgagtataaatggttaattgcttgtgttaaaatagttaaggaaggcctcaccttgttaggtgtttctcccttctgcctcatgttctgcagatggattctggctaacctcagattctgtaataaaagaaaaactgataattccaaagacgagctccagtttattaatctgaaaatgattactttgaagtcacagtgaagagctcttaaagccaaaggaacataggctcttaaagcccttttctgtaaatgacaaaaaaatgctttctaaatttactcagaagctttgatcttttcgattcagaaatatctttttaattaagaaaatagtatcaagtagtttataacttaaaacattagtttacaacttgaaaagcatctttgacattctattgttttctcttctagctttagtctaattaagtcacctccaaataacaacatttaacgaacacaaaagaatatggagcagttggtctcagacttttgtagttttaatgagtaaaatctgtccttctccagtggaaaaaataatacagaaagataggcgtggcatttcttttattttgctgcacttatttttcttatcatggacattctaataccatcctaaggcatggaactaaatttttagcaactacagatacaatgaatctagaatatattcagcaccataaatgtgagcttgtttgacttattaggaagaactacaagtaagcatatgttgggccagactttgtactaacccaaaccaattttatgcctgaaatctcaccatggaagacataatcaatgaaaaatcttgggacagttaacagtattgtgtatattcctatattagcccatgtacctgtt

SEQ ID NO: 318536 - DNA, 4001 bp, Homo sapiens
ttacaggcgcataccacgtccaactaattttttttttttttttggtatttttagtagagatggggtctcaccatgttggccaggctggtctcgaacccctgacctcagatgatccacctgccttggcctcccaaagtgttgggattacaggtgtgagccactgcgaccggcctgatatgaaacttttatttaatctactgtccatagtccagttttgtcaattgacccagtaacatcctttaaagcacttttcccctactaccaaatcagaccagaattgcctattgcatttagttgtcatgtctcaagaattaacatctgatatgctgttatttacaaaatgagatgctcaaaatagattagaaaattaaatttatgctacaaaaatgcagttggtttaagttctgtcctatgtggtgttcttcccttttcataacaaatgcttatgttgggcgggcgcggtggctcatgcctgtaatcccggcactttggaagaccgaggcaggccgatcacgaggtcgggagctcaagaccagccacaccaacatggagaaacctcgtctctactaaaaatacaaaacattagccaggcgtggtggagtatgtctataatcccagctcctcgggaggctgaggcaggagaatcttttgaacccgggaagcggaggttgtcgtgagccgagatcgcgccattgcactccagcctgggaacaagagcgaaactccgtctcaaaaaaaaaaaaaaaaaaaaaagttacgttataatgctattactacagttctaaagaatttatcacatttatcactttctttaaatatcaaagaagtatttattccagaatgggaagaactcgttaaaaatggaggcaaagaacaccagttccagccaaattgcagggctgtattttgtgcattttcgacactatctcagaacttaggaaggatacactagaaagtggtcgctgcacctgttggtcccttacttttcgggttggtgggagaattgaagagaggaagtgggaattttcactttttactctatgaattgctttgctgtttagatttttttttgacaacgaggacacatttcttatttaagaacaaaataaaaaaagaaaacggggctggaccctcgatgtgctcagttaatctgaacatccaagttcccctgaacatccaagttcacgtatgtactttggtttcgtcgcctgaagagagctgatggtgacaccttcccctaatttatgcagggaaacgtcagaaaggttaagtagtcgccagactatttcagggagaaacagccaagagaaaggcttctcacagatcagaaaaacctctcacgtgaactggcgggcagttctaagactgactgtctgccttgtaacccagaaattcaagcagaagctttttggctttagcgccttccttctgcagcaggcacccgaagagcccggggagcccggaggcagcctgcgcgcagggaggcaggcagggggagagggcgcgccgaccccgggacgtcccgggctgtcagcggagaccggagggaggccggagaaagtgcatcctgagcgacccggccggtcgctgccttccggatcggtcccttaccgagcgctgggtacgtccaccggcccaaggccgccgccgccgccggggccggccagcacgtccccgccgtatttctcctccatcccggggctcacgagccgccgccgctgcccctgtcgcggggtctcctcatgtctcgccgctgccgcggaacagcgggtgcaggcgcgtcactcccccatggcagagaccccgtcgggctcctgcaggccgggccgccactgccgccgtcgccggctccggctcactagcacacacgcgtcgggactaggccgcgatcagttccggcggcgccaggttcccgggaagcagcggcggtagggacgttgccaagccacgtcatcaggcccagcaaccctcactcccgggggagtgcccagccttgcgtctgcgcaagcagaacactcgcctttcctcgtcccttaggctcctcccgccacgttgtgtcgcattgaagctccgcctcctatcagcctctccgggtggcgctccctgtgcacttacctgtccctacagtgccacctatgggccgtcagaagtacagcggattcctgtagggcagagggggagggcgtggaaaatgtacagcgtgtgtgattaaacaaagctcaccaatcttttcctctgcgttagggattctttttttttttgttttgagatggagtttcgctcctgttgcccaggctggagtgcaatggcgcgatctcggctcacggcaacttccacctcccaggttcaagcgattctcctgcctcagtctcccaagtagctgggattacaggcatgtgccaccacacctggctaattttgtatttttagtagagacggggtttctccatgttggtcaggctggtctcgaactcctgacctcaggtgatccacccacctcggcctcccaaagtgctgcgattacaggagtgagccaccgcactcggcctagagattcttaatctaggttaacataccctctgcctctaagtttttgtgagtatggatcatttttgtgatgagaaggcccgaagtcttaaaagttcacgtgcccttcccccaaccagagataactatttttgaagctgtagagaatcaattacaaatagtggtacggccatttcttttgaacaatgcctttgatggactttggagaggagaaactagtattgaccaaaatttgcctcctcagcaaactatcccagggcaattttctaggagtgaccacgtgcgaaacttcatggccttctctcctactcctaagggaacctaaaggcaatttccagatttctaaagaaacattcttatcctgggcaacatggcaaaaccctgtctctatcaaaaatacaaaaacaattagccaggcgtggcatatgcctgtggtcccagccactcaggagggagaggcggaaggatcgcttgaacgtgggaggtcaaggttgcaataaggcatgatcatgctactgtgctccagcctgggcaacagagcaagaccgtctctggaaaaaaaaaaaaaaagaaagaaaaagaaaggattcttctttgccacagggagcctggggtcatctatcaaataaagtaacggaggaaggtgactgcttttgtggctttttgtgtggggcctggagtactggtaaccgttgttgctagaggccctggaatccaactgtgtgaggacagaacataggagaaggaagaggattttgttaagtgttgctgcaaactgttttgtctcctttttgaaaaggaaagcgttgattttctttaaattctgcctgtgaaactgtgtaatccaggcacatctgtaaaaacaggtcaggtagtgttacctgaaaagggggtccccatccagaccccaggagagcttggatctcacgcaagaaagaattcgaggcaagtccatacagtaaagtgaaagcaagtttattaaaaaagtaaaggaataaaagaatggctactccataggcagagggcacagtggctcatgcctgtaatcccagcagttgggaggctgaggcgggtggatcacctgaggtcaggagtttgagaccagcctgaccaacatggcgaaaccctgtctctactaaaaatacaaaattagtcgggtggggtggtgcatgcctgtactcccagctactcgggaggctgaggaggagaatggcttgaacccggagatggaggttgcagtgagccaagatcgcgccattgcactccagcctgggcaacaagagtgaaactccgtctcaaaaaaaaaaaaataataatagtaataagaatgcccaacctcctgggaatgcagccgagtaagtctcccccttgttttacccagcccctattcaagatggaggcactctgggtcaaacgcctctgacaagtaggactgggtattataaaggttattt

SEQ ID NO: 318537 - DNA, 4001 bp, Homo sapiens
ccaccttccctggggagcatgagccagcgttgtccaaggcccttcaggaacccctcccaggtctcctccacccgggccctacctccagccagctggaaggccgagctgagcatgtccagggagcagacgaagaggtagaggaaggtgagcatcagtggcaccttgagcagcatggcgccagcctggcgcagcttggggaccagcctggactctggatgggggaagccatgagcatagtgggcagaggccagggcagggactgctgccgcctctgccacccccagcccaggcccacctggcttctgctcctcctccagggccagcttggcaggcagtggttcatggcgctccaggacctccccacaggggcaggtgtgctcagcaagggccacagggcccaggctggggaaggcataggcagaggtccccgggatcctgtgtaggactagggagggagcctggtcaggagccccagggccccaaagtggggaggcggggaggaacaggcgggggaagtggcctcatccgggatgtgggcaaccgtgggcaaccagggtccagggtgtgggagcagcacttaccctgagggctgggcacgtaggcaaaggccgtccctcgcatcacatgccccccacggactgggagtggggagacagcaggggaccccagcctctctccgtaggacaacatcctgggcacccactatgaggtctgcaggtcagtgggtctcagcaacgctgaatgacaatagctgtgtccgggacactcatgcccacacaccctcacctgcacaaacccccatggcgcatgattccaaatacacacctagcaaagcacaccctccatcctcaccacacacacacacccctccgagactcacacgcacaaacacacacccagcaaaccacaccctccatcatcaccaccacagccctccgagactcacatgcagactcacatgtgcacatctgtgctgggcacctgcatgtgagtctcggaggggtgtgtgtggtggtggtgaggtgatcattcattcaccattcactcattcaatgagtattattgagctctagcccaggctccgaaccagaggcttggatatagcattgataaaagacactgagaactgaggacgcccagcctgtttggggctggagggggccagggaatacgtggtgttggcagtggctgcaggtgtgggctggggctgggccgggcttcagttttgcccacctggagagcaaggaggagctgcagacacctgccttctcatggggtcagctgggcacacacggagatcccctgggccggatcccgagttcctgggttcccctcacaatgaattcctttccccatccaccccctcaaggggcaatgaacaaacactgacaggcttgcctcagcccccccttgtccccgcactgccccaggagtcttggctattggggtggagtgccctgatctgcctcagcactccccgcattgtcccagcgtccttggctgttgtaggggtgtgaagagttgaattcaagtcctgaaggagcaggagtcctttttttttttttttttgagatggagtttcactcttaccgcccaggctggagtgcagtggcacaatcttggctcactgcaacctctgcctcgtgggttcaagcgattctcctgcctcagcctcccaagtagctgggattacaggtgcctgccaccacacctggctaattttttgtatttttagtgcaaactcgacctcaggtgatccgcccactcggcttcccaaagtgctgggattacaggtgggagccaccgcgattggctggactgacatgttatatggggcgcggtgggggtgggcgcagataggacacagatgaaggggctggggtgctgggctgtttcctactcagagctgggggtggggttgggatgtgagggtcctgggctcaccttagaattctgtgtttcagcttctgctcagcagctcaatgaagcctccaggaccctgaggagaactgagaccctcctctttatactcttgggtcaagggcaaagtccctggaaccctagctgccctccctctgtcccccaattaacctcacccctgagattcctcccagttaattgctaatcgtcagctctgcatggggaatctatggtcaggttcttcccatcaaccacgacccagacacatcccccgcctgcaggcagagaccctgatgccactcagcaccttgttcccagggtcccctcgttcctggcctgacaggactccccagggaatgacccaaacatcctatggccttcggaggttgcagtgagccaagatcgtgccactgcactccagcctgggtgacagagtgagactgtctcagaaaaaccaaaccaaaccaaacaaaaacatcctatggccttgccaagcgtcggggtgtctgtaagtctcccagggggagctcagaggagagggagtgtgagatgaggacctaagctggaaaggccgtggaatgttgaatcgtggcaggtctctaatgcccgaccatgggtccaggatgtgagtctgagtgaatgtggagccgctggccagactgggatgggcctgatctgccttttagaatggcccccggggtggaacccggatatatggaagggagcctggaagcggaggggccagttaagaggctaatggtccaggcaggagatgatgaggcctgaactccgatgggaacggaggggctggggaggacaggtgcatcccagggacatctgaccagtagaattggtgacggggagggagagaggaaaaggaaatagatgggagtcgggtctctggatctttggctagggctgggttcatgcccaggtaggagggtgtcgctgagtcacggaaatgcaatcagttctcagttcttgtgtcagaatctctgggtccttgggcttgaaggtgctgttaatgtcacatcgagtgtctccacctatgagcaaactgacacccccacagcgggcccagagaccccggcccacgtgacctgtttctctccattcccccgtgcagttcagacccttggcaggagcagctgaatccaaggtgctcctggtgaactgggggtgtttctcctttttaataaggttgtgctttttgatatttttgaagtttgccttccctgctgtcacggagctctgggtttagtgggggaggcagttagctatcgatcaaatccatcaagagatataattccaaaatgctgctgatttacacagccaccacttctaaagatttattttggggctacagccctagtgaaagtgagaaaatgctggatctgaccagagctgctgttgggactcatacaagcagcagagaaggcagctccattccagcaccaacgtatctcttgccagcctctctgccatttcagcacctccctgcctactgcctgcctcctccctggccagtgacagagtctgtgtgtccccctgggtggtgagtcccaccttgtctgtgcacctgggctctggccatggcctccccagaccttttctgggctgagagcctgcctggttgggggtgtctcgcgttgagaaaggaacccagcaggaggagctgttttggagggaaggtgccaagctccgtctgctcaggctttctgagcggcctctggcacgagcagttggctctgcaagccagaagcacgcactgtgcttctcaccccaaacctgggcctcctccttcttcctgatcttggtgagcggcacaccgtccatccatctgggtcgggcaccaagcagacatccttgctgtttccttcccctccacttcctcgtttccaactcagtcctcaattctcccaattttattgctccaggagctccctgatcttttgctgttagccatctctgtggccacctccctggactgggcctgtcatctcccctgggtcattgcggtcacttcccaagtgctctgtccatttctgcccttgctgcccctgatccatgctccaaagcag

SEQ ID NO: 318538 - DNA, 4001 bp, Homo sapiens
ctggggaatccagataaagtgtctccacctgaaggctgagctgctcatcctgcctcttccatggcacctagagctagtcgggccccttgcgtagcaactgcaaatagtcccttaatgtcttctccacgttgggcacagcatatgcctgagccgcatagatgccagtgcaggtgcccacagcaaagcccaatactgctgatgccctcagtttggccaccacatagccagccaggaatcccttgaggaacggggaggacaacagcgagccatcctgcagagaaaaatgcagaaggaaacttagctaggctccttcctgactgtccaggggctactcaagctgggattagagcattccaccaccagctcctcctcaccctggacaaccgtggtattttctccagatttttcccaaggttctggggccagaaaaagaaccaagcagttctgatcacacaatctcagaaccctggggtcagaaagctccaaccatagaactccaccgccacacaaggtcagagatgcccctagccctgccggtttctccagcctcatttcctagcatgctccccaactactgtagccaaatggacctcctttcacccctcatgtttataatgctacttcctaccacaaggcctttacatatgctgttctgcctggaatgttctttcctcccctcttcacctacttaaccactacttaagatattagttcatgtgccattcagaaaaattgtccttagggtgactgagaataggccctcaataatcacttgctgaagaaatctctaccatccatttaacactctcaagagcatgttgggcaataaagcctaaggcaggggtggggtgggacagtccttacctggcccactccactgttgacttcgtcttctacacgccgctgcaggctttccagctggttcttgagaaatgccaggtccttaagcttaggcagagaatcctaggacaagcgagaggctggctccagcagtctgactaagccccaccccttgctcaattccatcagaagctgggaattgggaggggatggggtgagccagaaagaccttttcctataaaagcttcctgagatggcagtggcaaagaaagacaagcattgaaaagcacagaattcaaatgagggccaggaagggactgacagatgggatctgaaccagtaacttacatcaaccttgacaagaattttatatagcaagcagtatgtaggaaaggcaggagggacagctagggacctttaattaggtccatcaggaaaccactactgactccattatgagctccttgaaagtcgtgaccagtctgtcttggctactatgttctagtgcctgacatttagtaaatgtgtgggtaatgctgagcttctagaccaatggtgagtaatggaccgaggcagtttcctggacaattttattgtcttggttcctggatgggctttacctctttcttcccaaggacatcccaaactgaatgtgagtgactggatgtgactgagaatgacaaaaaagactgtcggcaagtgtgtaagtaaatggactgagtgattttgatcgcatataagtatgaaattcagaatgtatgcaaaggagtgtttgaatgagggtggtgtgagtgtccgtgtgattggaaacatcgtgtcactgggaagaaaatttcgggagctagggaatggggtaaagtgaggagtgtttaagggtgaatgtttttgagtctgtgctagtaacgggttcgtgatggttcccaggaggggacatctgggggatccacggctcctcccgcctcgccgaatgctctccccacaccactccacactgttgaggcagttgacaggagccgcagaagaaacaagggacatcctcactcctgagccgctccagagtcgcttctccccggaactaaaaaggtcaaggagagtgaagaccacgcccggctgcagatcacccccacggccactcaccttgtcatccgccatcttccccgccgaacttgttgcgcaggcgcatccccgcctccctcgtgccgactgccccggccatctttacggagggcgaaggcacttccggagcatttttggaaagggggaggtgctttcctagtggccaagtacgcctctctcagatacttccacgtgaccccctcccgtcgagtctcaggctgcgtgtgagcgcactcacgaccggggcgcgatgatctcactcgtgcgcgagtgcgcgcggcgcatgttcggcgtgtcggtcttcaggcgcctgatgagttcatagttgggcggtggtgtcagcggtttcgctggcgttcgtgggcctcccccggacccacacacggaaacacgcaaccattcggggatccagacgcccgtttacacgcaccacccctgggcgggctgtgcggctcaggccctcccccgggaccggcccgtgtcccgccccgtgtcccgccccgtatttgtgcggcgccagctggccccgcagcctgcggcgcagagaggctgggcttgcaggcgcagtagctccagaggtcgcgctgggctgagagtgcgggccggcagaggctggcggggagcagccggggttatgctgggcaaggattacatgctggccatcattctggtcaactgcgatggtgtgcacggaggggcccggtgggaagaccaggagctgagggaggacgagggaatccgaaaggctactctggggctcaaagacggtgggggatacctctctgtgtagggaccagggggcgaatgaacccggtctttacatgtgatgtcttcaagattgaggagcctggatcttcagcctaagaactgacccattttggggatggagaggggattatgacagcatgttattctgaactcacaaatcatatgctccctcctctctaatccggtgttcctgtagatgacttgtggggggaccacagtctggaggtggaggctggcctgcctcctggctggaggaagatccacgatgctgcaggtacttactactggcatgtacccagcggtagcacccagtggcagcgcccaacctgggaactaggagatgcagaggacccaggcacggtaggtagagtgtgaggaggaggtctgagcccatgtgtggacctaggtctgctgttaaactgactaactcccactctacagggaacggaggggatctggggactgcggccccccaaagggagatccttctccagcctggagagttcactggaccggaggtaacgggtggcccaggcaaaatgaaaggcttggggttccatggtgttcaaaaatgcagctggacccatggtctgctttccagcccaggttctggattctgtcacatgttttgggttctgttacgttcttggctctgtcccaggttcttaactgtcagtattttgagttttatcccttgttctaagctcttgtttgtagctacatgtttttcatattcttggtcctaacctatcatgttctagaccttggccattaagtcctctgttctagggtctcttgtcccactttggggttctggtccacatattggaccctgttctattttgtgacttttattttttattttttgagatggagtctcactctgtcatccaggctggagtgcagtggcacgatcttggctcactgcaacctccgcctcccaggttcaagtcattctcctgcctcagcctcctgagtagctgaaactacaggcacatgccaccatgcccagctaatgtttgtatttttagtagatatggggtttcaccatgttggccaggatggtctcgatatcctgacctcatgatccacccgtctcagcctcccaaagtgttgggattacaggcgtgagccaccactgcacctagccttgtgacttttattctatgtcctgtgtctgggtcctatgtcctgaattttccctcaaattctgagtcacactttatgttacgttaatatgtcctgggctctaccctgctctggttttatatttctgg

SEQ ID NO: 318539 - DNA, 4001 bp, Homo sapiens
tacaccgcctttggaacagagaaaactctgagcacttcgaactgccacaagaggaggctgaatgaacagctacatgccttaaagggaaaacaaggactccagagcaggcgaatataaacgatacaatcagaaaacaaagggagaggcttaaagctgttatcagcacagcctctgctgcacgtagcctccatccccagacaaacacaaagtttgtccctttccacttgacttcaagaacatttttaacgaaaacatgttctaaatgtacaagtaagttaattactgtaaacgaggctctagacaagagtcagaagagggccctgatcatgtttaaaataataacagacagttaaaaatcattttcagctgttagtatttagcttagacataatacagagataggaagaaagaggaggaggattttatagcaacagaggaataagcagaggaaactgcttcctacacaattagattaagtcttgttgcaaggctgatactcagtgtacacagcgggtaaaatctctcggaataaaaaaacaaacagaccctggtcaggggcactggctcacacccctgtaatcgcaatactttgggaggccaaggtgggaggatcacttgagcccaggagtttgagatcagcctgggcagcatagtgagacctcatctctatttaaaaacaaacaaacaaaaaaacaagcctagaaagatgcacaacatccagatcacagcagaaggggcccttaagaattcaattccatcactgtctagactgagaaacccaaacgcgagtcacttaaggttgccaggtaagcggcagagctaggacaaaatatcctgattccccaatctctgttctgtccattgcaccatgatgctatcttcagcaaaattcaaataactgcaaaacgtccatccaaataagcaatcccaaatctgacaagttacagaaaaaataaagcaaaggtctttacattcttcaagttaacgtcagggctctccacaacctcggctcagccacctatcttcccagaagcacattccgattcatatttcatattttggtgtgacttacatagaatgcaggaaggttagaaaccaaacctacagaaggatgagtttgcagaaaaataatgaacaaacagggaaccacacccagagcaaatccaaccccagcggtggaaaatgcagacagctaaaaagggagaggactaaaagagaaagggacagaaaggagtgccttttcacaggtgaagtttcccgcaggaggcggtgtggcgaaaagcaaacagctgctgaagcttaggaacatttgcattctagtcgcaggtctccgggtctccgattaactcactggatgaccttaggcaagcccttaccccttcccggagtaagggctcagtttctccaactgtcctaggagggagctgcaccagacgacttcccagcgtccttgcagttctgacccaaagacccattatgagcctgtctcaagcagcgctcccgcagcgggcaagacatttgctggaaacggggagacctgtgcgaagcgtgaaagacgccctagatggtcctttgggttatcttcaccatctaccccagtttcccccacctgtcagtcaaacaggacggtgagatcccaaccccacgaggtcaagggagatagcgcgagggacaagggatctccacgcttcgcccaattcacagaggggtgtcagcgtcgtaccgcagctgcggcccggggacgccaaggagtcgcggacccacagcccgggcggatccagtgcctgacctggagcatctgccacgccgggaggaaggcgaggtgggtcctgcccaaggcggcgagcgccgccagccggcagccagtggaggaactcactgctcgggttctggccccagctccggctccggctctggcttcagcacagcccacccttcccgggttcagtatcagcccctcgccatcctcctttgctgcccggcagccgcttccggacctcatcacgtgatcccaccgcccacgccagaggccgaggtcacgtgctcccttgagcggccgcgccttttttctcactgagctccggagctctgctccacagcaccacctggcgacctattactgccactgctggaaggactatgttcctgggcgctggggactgcgaataggaactgaacagggcattgatcttgggcatggggcagagtccagtcgaagagcactgtcccttgagttgtgggtttgtgaaatattgctaatttttacactggctgtattttcttttacacatctcgatgagtttgtattgcttttataataagaaatatgcatatttttaaaacttccaatttttcagaagcatacacaaactatcatctgtggttgctactggaaatggaactgtggggtagggcaacattatcttttaatacattcaaatttttaaagtaacatttttaaatggatggcaacatttcagtattgtattatctaggcttctccttttacctccttgttacagacttttcctttaacaattatgtaacaaataggcttcaagtcaaaaactgtcacaagagacagagaagatcattgtttaataataaaggggtcaattcatcaagaagacacaactgtaaatatatatgcatgcaaaattggagcacctaaatacatacaactaatattaatggccatgaagggagaaatagatagcaacacaatagtaggagggtcaatatcccactttcaacaatggatagagcaactagagagaaaataaggaaataatgaacttgaattgcactttaaaccaaatgaacctaacagatatatacagaactttccattcaacagaaacagaatacacattttttctctaacacacttgaaacattctctagaatagaccatatgctagtccaaaaaacaagccttaaatttaagaagattgaaatcatattaatattctttcagaccataataatatgaagctagaaatcaatgacaggaggaatcttggaaaattcacaaatatgtggaaattaaacaacacgcttttttttttctttgagacaaagttgcgctcttattgccccatctggagtgcagtggtgcaatcttggctcactgcaacctctgcctcctggattcaagcgattctcctgtctcagcctcccaagtagctgggattacaggcacgtgccaccacgcgcgactaattttgtatttttagtagagacgaggttcaccatgttggtcaggctggtctcaaactcctgacctcaggtgatctgcccacctcggcctcccaaagtgctgagattataggtgtgagccaccatacccagtcctatgcttcgaaacaaccagtgggtcaaagatgaaatcaaacgggaaatttaaaaaatattttcagacaattgacaatggaaacataacataccaaagcttatggaatgcagcaaaagtagttctaagagagaagtttatagcaataaatgcctacattaaaagagaagaaagagaccaattaaatagtttaacattatacctcaggaaactggaaaaagaagagctcacaagacccaaagttaaaagaagaaaagaaagagcagaacagaaataaatcaaatagacaacagaaaaaaaaacagacaaaatcaataaaactagagttgattttttggaaaaaattaaattgacgtaccctttgctagtctaagaaaaaaaagaagactaataaaataaaaaatgaaagtgaagacactacaacagaagcttcagaaataaaaagaatcatatggggctattgtgaacaattatttgccaacatattggataacccagatgaaatggagaaatccctagaaaaatacaacctaccaagattgaaatcaggaagaaatggaaagcctgaacagactaataacaaataaagagattgaagatgagacagggactatctgactttctggttttctgtttaaacttcccaaca

SEQ ID NO: 318540 - DNA, 4001 bp, Homo sapiens
tgtgggtgtccacatcgctgaccgagcactacaccctactcgccaggctagcaatgggcttgttttgcaactaggaaagggtcagcgggttactttggaaatttctaactaaagtacttaggaaatcagaatttaactttgggccactcaaccaacttgaaaacatagtgcggtaagtcatgcaaagcaccaaactgggagttgggagacatgggctccaactctaactcctttctttttggtcaccttggactgtcatcttattcacagcagccaacacttacagacactgtgtctggggtatttatgctcaaatctcccaggaggagagaactatcattgacagaggagaaactggacacaaagaagttccagcatttgctctagctggtaagcagctaagtgggaattcgagtctgggtgagccaaccccatcgttgccacgcttactcagcccgttatttggcttctccccaagccacgtgtctccctttagctctcacttgctttattcctttgatccttaagttgctgaaattgccatcaaaccttgtatcagttcaggacacaagagacaggtggttccctcaaggcctctgactgagaaaatgcctctacttagcagtggctggccccaacttacagacagcacactctcagggtcactaatacttagcaacttccaggactagccctggggcgacagcacaggcagcagggccagtcactgtgtccatccctaaattgtcctgctggatggctgtggggaggggctttgcctgccccttacagtccctccctgcagtgcacccccgagaaacacatcctccgattttgtttccatgcaccctcctttagttcacactgccacctgttttgcatgtcagaaaactggaacttagagaaggagcagagaaaccacttgaactcaggccttctgattctctgtccagtgctctttctactatctagtggtgcaaaaactttcttcttaaagcagcagaacctcttcactaccacaccccacaccttttgttcctaagtaaactagcaagtctggttgggtggtggggtcagatgtggggaagggagctgcagccctgtagcttggcttccctctttttttatgttttggaagccttgtgaataacccccactccccactccctggaaagtggaaaaaactagaactttccacaaagtgtgttttttagagtcatctatgcttctcagttgaagtagaggccaggcttactgcaggaaggaggcagggaggaggaaatacttagtggtcagtgaggccactgtggttttaagctcaggactcaccttctcctccaagtagttagggattctacctctatccccaatcttaacatcgctggccaggaacaaaaatgtggctttagggccagcactgaattctagcccttatcctgccaatgactcagtatgtggtccagggtaattgagcctcagtttccccacctgtgccttttgggatctggatcactatgtccctaagggcttttctgacagcctttacttctgcctcagcttgactcagcccatgactgcaccttttgcaaccttggtttctcatctgcacagtgggttgagggtcagacacacccacctcagggtttttgccaatgcaagcttcaggctagaaagcagaaatagggatggcagaaaacagcactcacgttatgcccttggtcttcttcaagcctgctgactctgaaggactttcatccaagaatgtagagtccttgttctccaacttcttggcactttcaggaggcgacataaggtccaatttgatggcaacggctccctggggaccctcagtactttttgtcacagacatgactgcttaagaaacaaggagctcggggtgacaaagaggtctgctctggaaggagggaagcaggaaggtgtctagtgtagatgtacaccccagcacagtggtgtgtgcccgggctggctctggccaagctggaacgaggccccgcccacctccctggagggcacctcttcctgcctggagaagccagtggacgaggactcctgggaagaggaggagaggaaggagggatttggaaaaggcatcacccattcgtattggtattacttaataataatcataatgataactattatactgataattttaataacaaatatctattaagccctgtactaagggataagcaatcctctaagtgttttatctacattttctcatttaaccctatcaattaagtaaggagaaaactgaggtttcttgaagtaaaggaatctgcccgaggtcagatagctagaaagtgacagagttggaacctagcccaatttgtcaaggttttcaaccagtaacctatttctgtctccaagaaaatacctacaaatccctctccttttattcatctcagggtagaggtttccatgtctcactggctccacagtctgctgtaagacatcccttcttgcagcaccccattcttaaattggaacaaaaaagggacagtcactcagtcatctctaattaattcttagcttttgtgaggctccatggagtgagtaaagagtgttcttctggaaacggggaagaggctgagattgtatgactcccagccacagtttgctgggcaagatactggcgccaggaggtggtgagatttgtctaaggtcacacatgaaatccaggatagaactctgcagctaaagatggtcttgggcgtttctctagtatcccactctctgtcattatctctgcttcagtgcagatgaacaggccaaaatttcctcctccctcaaaattacagcttttgactcaagccataccactctctcctccatcatctcatccccaaaactaacatttcttaagggcttattacatgccacaagctttgcttagctaatgtcactgctaactggtagcatccaagacagatttgtcaggcccctcccttacatggggctctttccaaggtcctgtatgcaattttgaatggacaattttgtattgcttttttcttaaagaggtcctccttaccactactttccccttctccatgggataagcttcaagctccacaaagcctggctacttctgtgggttagctttgttagtttgtttttacagatgtggaaattgaggctcagagaggaaaagaataacttgctggaggtcacagctggaactcggtaaatccgaactccccgctagccaggttttttttggttgttgttgtttgttttttgttttgtttgtttgttttttctgaagcctgcagctttgaccacagcactgtctcctttgttttaatgctggccccaccctgccagcttcttgtcctgaatcaactgaaacacttgctgtgatttgagaagtgttattcccttgtctggcaccattacatggcagtattactggtctgtgaagtagcaggctgcatcctgtgacctgctcgtttacagcctgagattccacaatttaaatttgtaatctcagatttgatgtcgcaggtggagctctgtgttcctgctcgagcaaggtcagtaataagattgttgaggagcttgctatgtttagatatgagctagttcttgccttcctctccaggttttgagaagaactctgaattatcttcaggccttttggaaaggggtggctggaatatcagtgtttggccagagctcttcccaggcatcgtcagtgaaaaaaaagcttgtagggtggggctccacaccccaactcattgcaccacatgttagcaggcaggaggtcttctcctagggtggggatgtccaaaataagcccttccaacacgagtggcccaggcatccgaagccctgggttccgctatggctctaactatgaagctgtggcaacccttggaaagatattattccccttcaaactccagtgtcccctttgcaagatggatactagattgtagatgacttccaaaggcatgagaaccccaagggcttgg

SEQ ID NO: 318541 - DNA, 4001 bp, Homo sapiens
tgcatgaattactctttctccattgcaattcccctgtcttgataaatcgtctctgtctaggcagtgggcaaggtgaacccattgagtggttacattataacaagtgctttgataaaaattatgcactcttgtgctattatttcatcagaaaaaattcctagaggggtattattaatcaaagggtatatttatttatatttcattatactttaaagaactagattgtaatacttacagtacaaaattcaaaagataaaacgcaataatccaaatccttatgaaacaaatataaatctcttttctctcagcctccaaattctcttccccagaggcaaccactgctgtcagttttgtgtgtgtgcacgagttgtatactttcagacagcatttgccaaataaatatttgtatgttttatacaaatgacattttacgatttgacctgtaacattgccatctagaaagataccaatttaattcttcccaaaagatgagagagggcatttcctgatatccttatcaacactggggattgtcatcgataatctctttgtgcccacagttgttaccgatctgatgattaccagatagcagtgtgattgacagtaagtcctagaagaagagttctgttgaaatcatgtcctttgcagggacatggatggagccggaagccagtatactccgcaaactaacaaaggaacagaaaaccaaacactgcatgttctcacttgtaagtgggagctgaacaatgagaacacatggacacagggaggagaacaagacaaacactggggctggttgggggtggggggcaggggatgggagagcatcaggataaatagctaaggtatatggggcttaatacctaggtgatgggttgataggtacagcaaaaccactatgacacacgtttacctatgtaacaaacccgcatgtcctgtacatgtatcctggaacttaaaattaaattaaatttaatttaattaaaaaaaaagagagaagagttccatgtgtctgagtttggggcagtaaaggtggagacatggggttagcaccttttgttttctggatggatggcatggggggttggggagaagaggcagagagaataatggcagatgtgtgaggagaagaaggcagccagagactgtggaagaaagaaagggaggaaggaaagggcagacagcctgagataggaaactgttcctggagacaagctgctcatgttgagggtggctgctctagctgggttcttcgtaaaaactgggaaacagggctagtagccagagccacagggattgacctccttagattctgaaggtttcatcttttatccacgcatatcgtgttaatggaataagcgtgttaaggagatagatgaaggaagacatagtccagagttgcaaaaacagcagtgcttgacctcaggcctggaagggcggtgcggccacttacgatagtccagcttctccagcaggatggacattctctgaagtaatgctactgctgctctctgagggtgactgaggtccgttgtccaaggagttcagctcactgttgtagtcccttccaagcaatgacatcttcaacacggtgggtaggtggcagaggctcagggttaaggctctgaatgagcctctgatgggtctttctccagagaaaccatggctgctgacctgagatgctggctcctaaccccaaggatgcgtgctgctggctgaagcctgaagtgcatgaatcagggaagcggtggtggcaggagaggctgatgttgatgatgcctcacctggctcttgggggacttatgaaagacccatctcagtcaggatggtcctcagtttcactcgcaattgcttgcccaaccaggacttgcctgggcttttggcctctcctagtttagcccttgctgctgtagggcaaagtgaacagtgtgactgggaggaagaagacaccattggattggaggtcctggtgcctggacgtggggccaggctcagtgcttgtctgtctttggcaaggaaaaaaccagagctacctcacaatggaggctgcccagccaatgagctgcagcagaatcctgggatgcagatgtggcccaacagaacataatccagctaccatgttccctgtttggggtgaagagtggcttgtaaggcccagttcaaatgccacctgctcagaatttctatacaggaggcgtatggcctgccagtgatttggaagggagtgcaggtcatgtttaaaaaaaatcatttgttcagaaaatatttattgagcatctaatatatgctagaaactgttctccatgctgggaatatattagggtagaaaacttactacaatctctgttctcatggaatttacaatctggaggggctgggggagacagacaataaacgaaacaaatatatcaagtatctgttagtaaaaagcggtatagagaaaatccaggcaagggtaatggagagtttcagctagggggagggtcgcaattttagattgggtgatcagagagggcctcacctagaaagtgacatttgggcaaagggctgaacaagatgagggaacacaactcatgtaggtcttgggtaagaaactcctagcagaggggcaagaagtgcaaaggtcctgaggcaggagagtgcctggggtgttttaggaatggcaatgaggtcatatggctatctgggagcacacagaggagaatggattcgcctggtttgtgcctattgccctggcataattactaatggtgcctcccttcattattaaaagtatcctgcagctgagcgaggtggtgcacacttgtagacccaactactcgggaggctgaaatgggaagatcgattgaggccagcctgggaaaccaccctaaaaatgaaataaaataggccacgctcagtggctcacacctaaaatcccagcaatttgggaggccgaggtgggcagatcacctgaggtcaggagttagagaccagcgtggccaacatggtaaaaccccatctctactaaaaatataaacattagccgagcttggtagcatgtacctatagttccagctacttgggaggctgaggcaggagaatcacttgaacctgggaggtggaggttgcagtgagcggagatcgcaccattgcactccagcctgggtgacaagaacaaaattccatctcaaaaaaaaaataaaataaaataaaaagagatatcctggtttggatgataattacatggtcacaccagagatgtggttaaagaggtaatgaaagcgggatggagtgggtgggcaggatcttgtaggctattgtaacaactttggattttactttaagagagatgagaaatcatggagggttctgagcagagaaatgacatgacttaaacattttgacaggatgtctctggccatttttttttttttttttgcgagcagattgaaggggtgcaagggatatcaattaggaggctattacaataatccaggagggtgttgcagtgacccaggtgtcggtctgtagtggcttaaaccagggtggtagtgaaagagatggtgaaaagtgactgaattctggatacttttaaagataaagccaagaggatctgctgatgaacttgaggtggggtataaaagagagaggaatcaaggaagactccaatatttttgatatgagtaacagaaagaatgggactggcattaacaaaatcgcgtcctgaagctgcttttgcagagcaagcaccagcactggactttgattgcacgtttgtttgggatgactgcacagattgcttatgaagctcatgggggccaaggtactccccacaccacctctttgtgctgctgtaaaatcagcactgggagcttctctcttcctctgaatatcagatgaaatatctctctcttctgatgcccaaaagactttttctcaagttgaaaataatttcccctcccctgttgcacttatgcatttattattttattttatttttattttttgagacagggtct

SEQ ID NO: 318542 - DNA, 4001 bp, Homo sapiens
aagagtgccacagcatacctaggttgtttgaagggcagtaggaatgctgcctgtaccccacttggcttatcagagcacctgaaatgttctcagttagaaaaatcttgaaacttttggttaggacttcatatttaccggattctccatgttaaaatgcaaatagccatggaaatgtaatagactaagtctctgacatatccaattgttttccattataataccaagctgacaacagagccctggagggaataggacagataagtactggtgaataaggggcagaagaaaaatatggtttacaaagaattgcctaaggggttaagtctgagtgaattcctgccctgggtaatactgggcatacagagaaggatatgaaatccctaggccctggggaaaatggaagaagaggaaacagagatagagaaagactgaaaaacaagagaagctcaaaaacaaattaactatttcacaatctgtttgtaggctagctggatgggcaacttccccagggcatagtccgagaatagcagcaatcctgaatatgcagcaacatcaagcaatactgaaaatcaggttctatctttggctaccagaaagtctgagaaaaacaggaaagtaacctcttagactggtacttgctaatggaatgtagcacatatatcaagataggagacttctaaacctttctgtccctccactcacattccttattccacccccaaatcagggggaaaactggtgggggaggggtatgcagaataaaaagtaggcctgcatagtttgaaaaagccccccaaatgacttgacatatattattcccctataacaacaagctccttcctccacctaagtttagttagaccccagttccactaaaaggataagcgaaccatcatactttcagtccaaagcagttattaaaattatgtgatttttattgccacctagtggaagagatagaaaaccacaagctaaactgaggataagtaatctaaatatatacttgacatactctgacagccaaagacagtttctcaaagtatggtaatatgtaagatgattgtaagtagcacaagaataaatgctatttaaactagttggtatttaatgcaatgcgtattagaaaaaaagcataaacaacacttcaaatccatcgttttacaaagctgggttgaggctaaattaaccctaattttaaaaagtaaatagatttttgaagaaacattcacttatattatacaggtactattgaagatattgccaaagtcataaggtaactctaaaatgactacagttttggaaatagttgtcctaatctggttcttcaaatggaagataattttcccacagtgtagatgagttttatttatatatgtaatgtgaagtaatccatattttaacagaaataacaatgtttgaaggtacttacattttttctcattaaatagtttgttttcctaaacaaattattccacaagcaaattagcatttagtactgctaagtctctatatttgcctttcttaaaacatgcttacctaggtagttatgccatgattgtaaatagctgattccctctcatttcaacaagtttcattatagaaaatatattgccatttaatctacgcagttaaacaaatttacagagaactgtttgaactcctgccaacttactgtaatggaatgcactttaatgacttacattctgttgtcacagtggtcaattatttatcacagaatttagaattttcaagaaaaccctgagcattcaagtcagcattcattagtgcttatatttactgacattggattatataagtaagaatcaaaagtcttatttcattatcttttctgatggccactataaatgacaatgataaatttctcatgtgataaatttcacatttccacctctagttttaagaaagactaaaaacttaagtatgtgcgaatgaaaataggattatcaagattagcttaaaccaaccatctttcatctcttggatgaagacccattgtgactcaaaaaaataaggattctgttgacattaaggaataggtagggttgctgattaattgttgggtgtctacctaacagtatctgccacaccatcccgcctaaagcactcagtttccctctgagggggcaaccatcttacagtttcctatttactacccaaaacttcatttatacatattatatttatttatttttacccaaatggtggcatactatacacactgctctgtacttcaatttttcacttaacaaaataagttgaagacttgttccattttgatatgtaataaagccacctcctttttaagaggaaaaaatattccattgtataaatgtgccacaacttatttatccaatcctgtaagaaattttgattgcttttaatctttactactataaaaaatactgcattacacaaccttgtacacatacaatttttgacaatgtgaattaatgcttagaagtgaaattactgatccatataaactttggaataggctgctggcattttaggggggaaatcacattaaatttatggattaaaatttgaagactatgacatcttcagagtcttcccaatgagagcagaatatgcctcatttaattctttttattacatcatattttactgattctaatatacatatttaaacacttctaattaaggatgaatctcataatctagaacactttttcatcactgccagagccaggcgtggtgactcacacctgtaatcccaacactttgggagggcaaggtgggaggattgcttgagccctggagttcaagaccagcctggccaataaagtgagatgcaatctctgcaaaaaataaatttgaaaaattagccaggtgcagtggtgtgcacctgtagtcccagctacttgggaggctaagatggacaaattgcttgagcccaggagttcaagaccagccccagtaacacagcaagaccccttctctacaaaataaaatttaaaaaaaaattagctggtcacagtggcatgcacctgtagtcccagctactcaggaggctgaagtgggaggactgcttcagcccaggagatcaaggctgcagcaagccatgattgcaccatcacactccagtgtgggctacagagtgagaccctgtctcaaaaaaaaaaaaaaaaatcactgtcagcaagtgacaatatgatagtagttattcctgatggcatgacaggtaactgccatccgtggtcatgtcagacaaaccatttaaggaccatttgaggaagacagatgggtcatgttcttgttagaaaaccttttgtgacatcttctggtaagatcaggaaagtgcaagcatcaaaacttaagtgtcagtgacctggaagaaaatcttttcaggaaatgttacagcaccagggttcttaatggcactaaggacaattctgtgtgtgtgtgtgtggtgggggaaacaactattttgatgactctacatcaaaaaataattcagaagaatcatattctaaatgtgaggtgtcagtaataccttaatcaatatactttgtttctattttcatttttataattgcacaagaaatataggataaaatatcacataagtccaagagttctcccttttcccttttcccttcccttcccttcccctcccctcccctcccctccgctccccacccttctcctctcctctcctctcctttcctttcctttcctgacagagtcttgctctatcaccaggctggagtgcagtggtacgatcttggcttactgcaacctctgcctcccaggttcaagtgattatcatgcctcagtctcccaaatagctgggattacaggtgtgcgccaccacgcccagctaatttttgtacttttagtagagaccaggttttgccatgttggccaagctagtctggaactcttggcctcaagtgatccacccacctcagcctcccaaagtgttgggattacaggcatgagccaccgtgcgtggccca

SEQ ID NO: 318543 - DNA, 4001 bp, Homo sapiens
gggattacagatgagacgcataccaccacacctggctgatttttgtatttttagtagagacagggtttcaccatgttcgccaggctggtcttgaactcctaacctcaaatgatccgcccacctcagcctcccaaaagtgttgggattacaggcgttagccaccgcaatccgccgaaccttctatcttaacacgaagtttgtagttgtttatgaggcagagagatttttctcaagttaggacatgggtaattttgacctattgaaactttttttgtttagtttttgtttttgttttttttgagacggagcctcactctgtcaccaggctggagtgcggtggcacgatctcagctcactgcaacctccgcctcctgggttcaagcgattctcctgcctcagcctcctgagtagctgggactgcaggcatgtgccaccacacctggctaattttggtatttttttttagtagagacggggtttcaccatattggccaggatagtcttgatctcttgacctcgtgatctgcctgcctcagcctcccaaagtgctgggattacaggcgtgagccacggcacctggccaaaacgtttttaaaaaatctttctcctcagcagctgcctatcctacatatgtcagatctttgtcatgtctgaaggtattaaaaagaaaaaagaggctgggcgcagtggcccacgcctgtaatcccagcactttgggaggccaaggcaggcggatcacttgagatcaggagttcaagaccagcctggccaacatggtgaaaccccgtttctactaaaaatacaaaaattagcggggcgtggtggcgggcagctgtaatcctagctactcaggagggtgaggcacgagaatcgcttgaaccagggaggcggaggttgcagtgagccgagatcactccactgcactccagcctgggcgacagagcgagactcttgtctgaaaaaaaaaaagaaagaaaagaaaagaaaaaagaaaacaaggtggaggtacaacttacaacttatagtgtgctcatctacagagcacggcaatggataagacactgcctgggagtcatgacaattaggtgttggtcgagtttgccattaaatggttacctggtgttgagtaggtttctccaactcggtggacctcagtttccttctctgtaaaatgaggagaatgcgcttgactagctgctctcaaacccctcttccagctttactatgctgagatgtcaagctacccactatcaacacactcactctcacaactgagtcgtgtgaaaagcgtggcgagggcttaccagtcatggccctcaccccctctgtggtcctagctcaaggcccaaagggggttcctccctcatgttccccctctagatgtccccaactcgggatggagaaaggtgctcccagccgtgatcgcgccacctcactcaagcccaagcgacggagcaagaccctatctcaagagagagaaagaagggtgctcccattcctgcaagtcccacaattctcctactccctccttctctcacccgagggtcagggtgttcatttaccccaaccctatcttttctctaaggctccagctgacaccgactcccatagacactcggatttcctcagaccccgagggactcctgactttctttccctgagcccttgaggagcgcgcgccgtgcctccggagcagtctccgcggctccaggctatggcctccctgagccccaaaagaagagacggttccgatgcgctgcaaagaactatcccaggtgacagccggcttcgccccaacttcaacccttcccgccgccttccctcggataccttcccacctccccgaggggcgagtttgctagacgtgggaacgtgatctacctgagcaggccgagccttcaacctcggagaactagacgagaagataaagattcccttcccaaattctcgcaatttgcgaccgcggggctcctagtccaaacaggaagcggcaatagcctgggtcgcaggggccggcgggagttggagttctgaatgcgccaagcccgcggtcgctgtcaaacctctcgccgctacggactacaactcccagagggctctgcgacggccagcacgcccatcaccgcagggcccagccccgaggcttcaggaggctgggcagccggcgcgcccaggtgggcgagtccagtcggaactgcagccccgagtttgctccagttccttgtcccggctggaggctgggaggggtagtagaaggaatgcaatctcttgccattcatagagccccggaggccacgtgagaaaacgctgatgcggcacctccatcgagggatcacccctcttttgggctttcctggcgcgtgttgtatgatctggttacgtccttggaccctacagacacaaagggaagctggtttgaaaaaactgttgagttggcatgctccctccgtcgtctagatatttgggtttgttttttaaaaatgtgtttgcaaattagtctctaggctaaaaggggctttagaaggattttagaggcccaccccacatacccagcaattttccccaaaacctccccaagtaaacatacagtctaagtaaaattaatgtgcttgttatgaaaatcagttcaaggtcagtccctgaaaagcatatggccaccctaagctcttcttacaaaggaagccagtggctctttttgtttctttttcttttttctgtttaaaccagaagaaacagtgtctgtaatgccagaaaaaaaactaaaaatttagaccggctccgtggcttatgcctgtaatctcaccattttgagaggctgaggtgggagaatcacttgaggccaggagttggagaccagtctgggcaacatagggagaccccatttctacaaaagaatttaaaaaattaactgggcagggtggcacctgcctgtagtcaagcttacttgggatgctgaggcaggaggatcatttgaggccaggagttaaggctgcagtgagctatgatggtgccactgcactgcagcctgggtgacagagcaagaccctgtctcaaaaacaaaacgaaacaaaacaaaaaacctaaacttgaaaattcaaatttaggctgggtgcgatggctcacacctgtaattgcagcactttgggaggctgaggagggcagatcacaaggtcaggagtttgagaccagcctgaccaacatggtgaaacccgtctctgctaaaaatacaaaaattagccaggcgtggtggtgtgcacctgtaatcccagctactctggaggctgaggcaggagaatcgcttgaatccggtaggcggaggttgcaatgagctaagattgtgccactgcactccagcatgggcgacagagcgagactcagtctctaaaataaaataaaataaaaattcaaatttaacaaatagctaacattgaatgccaagaattttacgtgtatatctttttaagtctttaccacagttctggaaatgataatatctctttaagtctttatcacagctctagaaatgtatatttttcctgtcttacagaaaaggaaatagtcccagagaatttaagtgccttgtacaaggctaaacaactactaagtggcagaagatctggaattcatactaagatcttatcccaaagcctgcgtgctctcaaacattgcgtctattatggagggcttgacaaatgcaaggcaaacgatttaatgaatgttgtctttaagggagataaaagttgttttgctgatggtattcttgttcaaaaacttttttaactgttcattggccctgccttcaagtcagggctggtcaagtaacacaagtcagtaatacattcttttgatagtttcagtgatagcaacctttcttttttttctgcattccaggctgagaaaataatttcaagcaaggctgggaaacacaaaagtaaatagtatgaaatgatgtcagcaaaaaatgggaaaaaagtagggaactcaaaaatgaataagctggc

SEQ ID NO: 318544 - DNA, 4001 bp, Homo sapiens
tggtaatgggtttattttgggggtgatgaaaatgttgtagaattagagagtggtaatggttgcacaacatactaaaggcactgaattgtacacttttaattagtgaaatttctggtatgtaaaatatctccttaaataaaaaagtatgcatgcttatcgcaagcaattccaattctattaaaaaagctgagggagatgcttccaatcccagccccagcaaaggtcaggctttaaggcctccttttacgcacttctgcacatacagacacacgtgtacaatggtagtcaaacgcagtgcttctcaaagtctggcatattgaactatcgcttgtatgtcttgttaaaacacagattgctggccccatttcccaagactctgattcaattggtgggcctgaagggggcccgagaaactgcatctctaacggtctctgctgatgctgaggggcaggtcagaggccacatctttgaacagcactgatgcagtaaccaactttcttcatataatttcagctcctcacaatttttaacagctggattttcattctacggatacgctgtaatcgtttacccaatctcctataaaagatacattgttgtttctcttgtttccatttgctttttaaacttaagaatagcatagattatatacacgttttaaaaattgcagtataaaattaaatgaacaataagtctacccgccacttctcacctcctgtccttcagtaatcctccttagagtcaacaatgcttatcagctttttgttcattctcctggaaatatcctacatttgtacatttacgctttctttcaaatatgtacaaatgataattgattatcctgcctcataatcaccgattctgctagcttgagagttaatgatctacaaatgtgtgctatttttagcgatcctttttgcaatgcaactttattgtactaccatcaattactgattaattggtagctgattaatggctagaaaaaatgcctaccctcaggtttgcttttgtccagaatttgcaatgccagaaaggtcctcttgagctgatgggcttatgccctacgcctattaaaacgctctacataaaactatgaacagaattaacttatttggatacacaggtgacttattgtaaatatttatggagctatttggcagccagtcaatttgataagagtattaaatagagcataatgggctcaaaaagtaactcaattgataaatatgtaaaaatattcaattcgataaaatagatacaaatttaataaaatagatacaaatttaatcctatttttaaatcttcacaacaatgaaacatatttattttgatatttctagaagtagaggctccccaaccacagaatctgggccaaatttgtcaaaggggaagttcattgtaacctaggagagatcaattctaacaaatttctaggaaaggtcaaacacatgaacatcctcctcctgcagaggtacacactaagacacatatccctgtctgcccaccttgtgcagcccacttacctgctacaacagtagccccattgaggtacagagccatgcccacgagcatcatgactcccagggtgaggatgtagggtctccggcggccccacctggaccggcagtggtcgctggccgatccgaccacgggctgcagcaggaatcccaggatggggctgaggaaccacacaatgctgtacaggctgctgggcagacctacgctgagcaggactggggtcacatacgctgcctccaccgcgtagcagaactctcttccgaacatggccatgctgtgcatgatgagtctgctggtgggtcttttaggcggctccacagagtcaaaggggccatcatcagctagggatttatagatgtggcggccagcctgcccactgttgctacccatggccactgggagaggaaccttcctgcgagcccaccacctcctgcgtggtcctagggtctgtgtttcaaactggatttgacgtggagcctggccgagcaaccaacagagatggtcaggctgggggaggggctcaaattctttcctgcctctaagatcacaagttatgatgagagggagggggtggtgctggaaagcatgacagagattagcagctgtgaatcagccctctggctccataagacgttggaatacttttctaaagggatcctcctttgtactgttccctctctctttctctctctctcacacacacacacaattacacgtgatcacacacatggcttctctccctctcacacacacgttattacacgtgatcacacacatgggctctctcagacagtattacacatgatcacacacatggtttctctctcacacacacatgctattacacatgatcacacacgtggcttctctcacacacacattattacacatgatcacacacatggcttctctcacacacacgctattaaacgtgatcacacctggcttctcacacacacatgctattacacatgatcacacacggcttctcacacacatgctattacacatgatcacacacatggcttctctcacacacattacacatgatcacacatggtttctcacatacatgctattacacatgatcacacacggcttctctcatgcatgttattacacatgatcatacacatggcttctcacacacatgctattacacatgatcacacatggcttctctcacacacattacacatggtcacacatggcttctctcacatgcgttattacacatgatcatacatggcttctctctcacatgctattacacatgatcacacatggcttctcatgcattttattacacatgaccacacacatggcttctctcacacacgttattacacatggtcacacatggcttctctcacgttattacacatgatcatacatggcttctctcacacattattacacatgacagcttctctctcacacactattgcacatgatcacacatggcttctctcacacacacatgctattgcacatgatcacacatggtttctctctcacacacgttattacacaacgatcacacacggcttctctctcatacacattattacacatgaccacacacatggcttttctctcacacacactattacacatgatcacacatggggcttttctcgttattacacatgatcggactcatggcttctctcacacacacatgctattacacatgattgcacacatagcttctctctcacacacgtgttattacacatcacacacggcttctcacacacgttattttacacgatcacacacatggcttctctcacacacgttattttacatgatcacacacatggcttctctctcacagacgttattacacataattacatatggcttctctctctcatacacacatgctattacacatgatcacacacatggccgtgaggtaataaagccttattacatagagtttgtcaaaatgtaaataaattgatatcttttcataaactttttataaatatagacattctattttttactacaagttttccacacacacagctcaggagtgaaataactagatttaaaatggtggcaggtcacacccttcttcaaatcattagctgtgtcagatcgccctgatatttctcctcgtggtacttaacacattttacaatgagataattctgggtttattccatatcctgtgtttgtctttgatttcctcaagagcggagaacaggtctgttttgttcattatggtatccccagcaagtatcatgatacctggcacctagtagatcctcaataaacatttgctaaaggaattactgagtgaataaaccatacacactgcattttgtgctgcctgtctgctcagatctatttcctttggtgctctttatcttatggggctacatttccagggttcccttgttttctggcttctaggtagatttggctaatgggagacactggtaggaagactaggggagagagagaaggaa

SEQ ID NO: 318545 - DNA, 4001 bp, Homo sapiens
ctgactcccactcactcagtagcctcacctgcttgggagggacacctcagtaagggaccccagtaccacagggttccgcagtcgaacaaaggctcccagtggctgtgccaggaagcccagctcccctgccagcacagtccctgcctcagctcctggaggtagcttctgtctcagggggttctgacactggatgggggttcaaggagacacagaatatgaaaggttatttggggaggataagatctcaaatgatgagaaatccagtggagagtagacttttgttaatttctaacccctctcccagccactggaaagggaccccaaggaagggccacaaacctgttccctcaggggggcttcctcattgtcagaagcctttcttggatgagtagagcctacaaaacaggattatgcagtgattaagaccacaggctttgggggtggatccaccaggattccctaatcacttttgccactgacaagctgtaagaattagagtatacccttctccactctgagccacagttttctcaccactaaaatggggataattgtggtactatttacagggtggttgtgaagatcaaatgagatactgtgaagatcaaatggtaggcctagtgcctaccaagtacatgtcttcacagaactctcttacgattctagccccctgaatcttctccccacaacattaccaccagtttcctcttgctcatgagtcctgggttggagcctgaactaagcctgggctacttctagccctggaaggtgcaggggagatctgagaccctgccacaccagggtcttggtcctgggcccagggaggggctctcaccccagcagggcctggtgcctgtggtctggttgtaatgctggggtctctgcagcagcaaggcctgcaactgccctctcagctctgggctcagcgactccaccctggtcacctgctctggagaatggattgggggtcatctccttcctgagagttccctgccgcacactcttccccttctccctctgcccagacacctttcccttctgggagtctcagaatgccagggccaatgaacttgctcctccaccctgcttttccatgtccaccctgtgacaagggtagacaatcctaggaggggtagggatgggctctggaagatttcaagactttggaggggaaatcctggggaaaaggcatggctacccaggcccttcctgcaaaggatcccagcctacccacgagctccaggaggctctgagctgggcagtccagcagtacaaggccctcggccagcaggctgcggagcttctggaggctgggcagtgccagggtgggcacgtggggggcactccaccggcctgcagccacctccaacttctcctcaaacagtacccacctgtgatgaaggtgggtagacagtgttattgagggcatttctcccatgtccaggagcagagatgcagaggagctagggaaggcaaggcaatgagggcatcctgggcccagtggtgtgaagtctcccccccaccctggcagtcacccctcatctagggtcttggggatctcaaaactagactgcagaggaggctgggcatcatggaaggtaagaccctgaaataagggaacacagctgggaaaatcctaattttgggcagccccataagaagcgctgggggacatataggaggctccagctggggaaggggaaggatcccacagaactggcctgcatccaacttacctgcctgtctctctccactccagcgcctggggccagcccagcagctcattcagctgaatgaagagcagagggtctttgggtactcccagttccttgctctctgtgtctgaggggccatcagggctggggccggtgccagggtcagggttgctgtccagctcccctgaaggaatatttctaggagcactggaggcttcaaacccttcctggcctggcagcttcatttccatgaggcttgcacagaatctcagaaccagtacagtcctaggttctgaagccaggggccctctggctggttgcatttataatgcatcccccactgcagcacaacacaaacagaacaaggcctgctgactccagactctaccggtcacctactcccctacttgcttaccccaccccctgctggcataagagtatttgtaagactagtctggcctttcccaggctctccagaaatgcccaacctggggccaaaatgtgtatgtgcatttcctgtggtatcaggtctgatcccactgtgttttgtgtaaagaaacaggagtaaatgattggcttgggtctgaggacttggtacccccagattttgctgcccccctcacttgtatcaaatataaataccaaacacccaggactgttttgggtgtcaccaacacacccctggggccacagacacacctatttggacaaacagggacctaataaataattgagtccatggaagccagacagggtaagggagatagcaggcagaggacctgcccattaaatgggataatggtggaagacctagtgtctgagtcttaaattcttttcttttctttttttttgagacagggtctcactctctcacccagtctggagtgtagtggcacagttatagctcactgcacctttgacctcctagctcaagtgatcctcccacctcagcctccaaggtagttgggactacaggtgcacgccaccatgcccagctaagtcttttattttattttattttatttttgagacggagtctcgctctgtcgcccaggctggagtgcagtggtgtgatctcagctcactgcaaccttcacctcttgggttcaagtgattctcctgcctcagcctcccaagtagctgagattacagacatgtgccaccaggcctggctgatttttatatttttagtagagacagggtttcaccatgttggccaggctggtctcaaaaactcctgacctcaggtgatccatccgcctcagcctcccaaagtgctaggattacaagcgtaagccactgtgcctggctgcccagctaacgagtcttaaattcttttgtccaacaacacttaggaattccctaatttagctgtgtccctgggatctgccctgtgaggatggaggagcccactagggggtgtaagtgaaggagttcctggagctaaatgagcaaaggaaaatgtggtccattatttgcaaatcctgttgactctatcttcaaaatatacccataatccaaccacatctccccacctccagcactgctaccctgattcaaacaaccatcatttctcacctgaattatttcagtagcttcctggtctcttgtaataacccccctgcttccactcttcctcccttgcccaaagtccatcctccacaccatacatgtcctttcaaaaggcagttgagccacattactcttcggttcaatactcacccaacacactcccattactcctagaagaagaagaaaaaaaaatcaagctccttgtcgtggcctgcaagattcacaccctggccccaacccacctctctgacggcatctcacaccagcctcccctcgctcactcctttctaaccacactggccttcacctgttctgcaaaacctgttcctgcctgaggatctttgcaggatctattttctctgtaaggaaagcctttcccccatatccttacatgacaatctgtgacctaggtctcatctcagacgttagctactcacggaaatcttccttttccatcctatcctaagtttctttcttttttttttttttttttttttttgagacggagtctcgctctgttgcccaggctggagtgcagtggcatgatctcggcttactgcaagctccgcctcccgtgttcacgccattctcctgcctcagcctccagagtagctgggactacaggcgcccgccaccacgtccggctaatttctttcttttttttttttttttttttgtattggtagagacggagtttcaccgtgttagccagta

SEQ ID NO: 318546 - DNA, 4001 bp, Homo sapiens
tgaagtccccgcgcagctggcgggcagggctgttctccctcctcagcagcaccccaggtgggggcctccccagctttgccccagcgtggagcagctgagtttaagggaggctagtgccagacacttccagtacactgcaggcgcttagcaatggtaactgggtttcggtgggcaaggcatcggcgggcaaggcatcggcgggcaagtcatcggcgggcaaggcatcgacgggcaaggcgtcggcgggcaaggcgtcggcgggcaaggcgtcggcgggcaaggggtcggcgggcaaggtgtcggcgggcaaggcgtcggcgggcaaggcgttgggcgcgtcggcgggcaaggcatcggtgggcaaggcatcggtgggcaaggcgtcggtgggcaaggcgttgggcaaggcatcagcaggaaaggcatcggtgggcaaggcattggcgaacaaggcgttggtgggtaaagcgttggccggcatttccagctctgcgtgaagcctgctgcccccacaaccttgcatgctctggtgactcttagcagatcgagccgcagcacaggcagcgagggccccgggagccagggacgcctctgcccttgggctttggtgctttcagaaatgccttcaaagggactctcatgatgagaagatccaaggcccaatgcaccctctccagccccaaagccccaaagagaccccagtgccccgagggtggcagtgacgggtgtttctttttgttttttccatttgtgcgcatttcctgcattttctgcctgttgagaatcttttcttaagcaggaggaaaaacactttaaaggagtaaccttataacaagggatagttgtgcggggctctcagggaaggagctgagggcccggggaacaggctgaccaagcagcccggcctggcctgaggaggaccctgcggcctgggaagcccctgcccgtgttgcctggggaagacctgggtgtccatgcgtgatgttgtacgtcggctccctgagagcagtgattcatgcctgtccctacatcctgtgtcgccacatggagagcagagtgtgacccctgcatgaagagaagcaggcacagggtgaggggaggctcgaggtgcgtgggagcctatttcagtcaccaatgcacttctgggggtggtgagtccaaggtcactaaagtcacccagacagttctgaacatcctggcaccccccacagggctctcccagagaaccaaagccagggaggcgaggggtgggcccccaaattcctgcaaagaacctcggagaagggcacctgagcacatgtctggacacaccaaggctgtggtgaggaaacccagagcggattgtgtgttctttaaagaactgacgacattcagatggaagagcgctcactgtttgtagggtgtgtgtgtcgggcagggcggcccattcaacctgacgcctggcaggaagctgccctgaggtcccggaagaccatagtggaccccgaggggactggatcctccgtgctgtgggcagtggtgaagctgccctgaggtcccagaagactgcaggtgggccctgaggggactgactctgccgtgggcaatggtgcaccctggtttccaggaggagtgactctgcccaagcactggggatgcgtggcaggcgcctggcaggtcagggtggagacggcctcccctgcttaggggtctgccccaggacgcaggtgggtgcttacctcctccataggtctggcacaggtatgggaaccgccaaatgttccccagtcccacggcaaacccagtgcagctcaggaggtactgggccttgttgtcccacttgggcctctcatccccgaggtcgcaggcggccgggtccggttctggggcatgagccatggtgactgagtgccccaggcttcagggcaagggtggtgcctcactccacacccagcactagagagccgtctccagcctctgccgacgtttggaaaccacaagcagccccactgcagttgtatttattcatttctttaaaggaaaaccagtggagtgccgttaatgggtaactcaggtccaggccctggctctgacgccagggtccttccctggcacccacgtcctctgctccttctcgcatgctctgtgttccaggcaaacgccgggcctggcaccacccccagcaccatgaggaccgtttgcaaggacagcctcaagtttttttgttgcagacaccaggattcccaagactgaggcatattttaatcgttttaaatttcttatgttttatttaaccatttgatcttgagatacttatagattgtcactctgtcactgtcagaaacaactcagatcagatcgcatgcacccgaagcccggattcccgcagggatcctctcagctgctcttgggaggccgggggctgccctcacacccactgctgccctcgggccgctgggcaggacagggtgacaggcacccaccgtgcgtgggggcagagggctgagtcctctcctgtgctgggggcacccctgtccatgggtggagggttgatgagttgacgccgggtgagttcagctctaaggagctccccacagtgctccctggactctggggctcctccttgcagatgctcccgccacggacaggccaagggcccccaggcccgcaattgccccattccactggacactgcacccctcaaccgtgtggccacaactccaaatccatgagtcccagggcaggggcccaggtggacacatttttggaaggttcttatttgagtgagaggaagtgtgagggaagaagatgagaagagctggttggtccccattgtgaggccacaggcctgggccatggcctcttcggagcaagcccccaaagccagaccccccaggaggaggcaggagctggacctgccgtccccaccatcccgtctgaggtcactggctcactcatccctctacgtctggacaacagtaacttctagggtgagcatactcaatagaagggatttatttagaaatgtacactttatgcccataaagcctgcatttctaccacatttacagagacattgaaacctatgaaacaacgcatgaatcaggagatgtagatgagatgggagctcccgcccagggtcctatggcaggcacaccagggtacaccaatggatgccagggcacatcagtgcacacctgtgcatgccagggtacaccaatgcacacctgtgcacgcctggcagggcctcctgggcagatgccacagggcagcatattaatggggcactgatggaaattttctcgatccagggccaaagagcaggaaaagatgaggtgagaccctgttgaagccatcagcaggcgagcccctcggtggcatcacagccgggggcagaggctgtgatatgtccccccacctctgctgctgtggagtcttgcgcatcccagggcccagtgacagtcagcagggtgaaaggggctggtaggggactcagtgtgtgcagtcactgctggatggggtgctggaagggacgattgtgaccaggtttctgtgggtggaacatcatactggcacacaccaggctttcagtcctgcctgtaggaattctcagaacatcagtttaatgtaagcgtccagattcttctatggaaagcagaggtgacctgtccgtaggaactctcagaacaccagtttaatgtaagcatccagattcttccatgcaaagcggaggtgacctgtccgtaggaactctcagaacaccagtttaatgtaagcatccagattcttccgtgcaaagcggaggtgacctgtccgtggaagcagatgtcccaagtgccgactgcctttggctgcgatggaatgttgaaccccaatgggggcccatcccgtgacgggggcagggcaggcgccaggctgggcttcactgagtggtgcgggagctggaagcttctgggggctgcacggtcctccaaggtgccctggacacacacagtgcccaaggatggcagccagggttgagt

SEQ ID NO: 318547 - DNA, 4001 bp, Homo sapiens
aggtgacctggtggcccagccgaagggccaggtcaggggaagcttgtctggggtctggggagaagggcctgctggtgtccaccccaggagtgggaccatctgagacccagcacatcccagagccctgctcggccctcctcacctgggcctgcctgcccggaacccgctgcccgctgcccgctgcccgcacctgtccaccccagcatggcccagggtgcagcgccagcacccgctgcttgaaagctgctcgctcccaggctccaccgtgcacagcggctggtctctgggtgtcagagcggggactatctgaggtgctgggagccccatcagattcctgcccaagcccgcatcttagaacttgcccttctgtgcaaagacaaataacttcccaggcaggctcaggcagtcccaacccctcctcttcccaggaggcatgtgtctgcccctccatccccagtggggatgtgagcctgtgactcagtttctcctccaagctaaacaaactcagggtgtgggtgagcgcagggatcctccccacaggatagggccctgggggagggggcgaggacagtggccaggaagtcccctgaggctttggtgagctgagacttggggactgtcagggactatagtatcggagtggccaaggtcccccgacctgcctccagtggaaagtgcaggctggaccagaggctcatgaagcgcccacccccgcaaggcagtgatcaactccttgacaatgctggaggcgaaactgattcaggaaaagcccatttctgtttttctttaaaaaccttcacatcacaaagcccgcgtgagagacagcagctctccatggtgagaaggaacagggccccctgagggcagactcctctaaacggaggctgagaccttcacggcccccccgtgaactgccccagggcagcaggaagcctgtttcccaagggtgcccggccctcctggaccttccgctgagaaagcagcaggtttatgagggcagcagctttggggttcgccaagcccaaggctgagttcaagtgtgggggtcctaggtacagccccctgccaggcctgggagccacttctcagatgctcaggaccactgggcaggaacacaaatgtcacctctgtgccagcagcggccatgcctacctgggccgcaggagccagaggaacgaggagcagtcaggcttgtgtgttgggtgggcacagcggctcccggcctccaggcctgagggcacctggctcaagagccaggcccgagtccacaggctccggctacccactctgctcctctagggtcacctgcccccaacccagctacctcctctgctccctgcactggcaggtgtccgcctgtggggctgggacgagaggtgatgcccaggagggcccagccccgcgtcctccgaggaggggctgtaccgggagaaacacccttcccccggccccaccctcaggccagaacgttccaggactgccagtctggaacacagggccctccctggagccccacacgaagtcttggggtcgtgccggccaggcccatctcctcaccagcagcctaggaaccgggcacgggggcccgtgggggccccagctccccccacaccctgcggcttctcctctcccctccgtgcttggggagccgagggtccggggaggatgtctgcccagggcctctgcgtgtgtctgtgcttccctggccacggcctcgcccgcagccccgcccggccagcctacctcctccgtggctctgacacaggtaggggaagcgccacacgttgccgaggcccacgcagaagcccaggcaggtgagcatgtactgcgccttgttgtcccacttcggccgggagctggcctcctcctgctcgatggtctccagctcagccagggacgggatccgggcgtctaggccggggttgggcagcacgagcctcaccatggtggtcgctggacggctccgcacacagcaggcagggcagaagctggagggcgagtggccgtgggccgggagccgggcactttatagagaacctttggcacctcgccccaggcacctgggcagaacggagccagtcgtcagcagatctgcagggtgcgtctgcggagggactgttaatgccttatctgcagagacgcccggccccggggccagcagagccacccactgccttcgggcaaccggaggctgctccgtgggcgctggccacccctccccctgcacaaacgcacacacaaatgcgtacaaacgccggtgcaccccggggagaaagaaccaaggcaaacaggatgctggctctgccccggtctgggagcccctggctgccgcacacccccacctgcaggacgccgggtgggcctctccacagctccctggagcacaggcatccccggcccccaccccagtccagggagagggaactcagcgggagcaggggccctggggcagctcttggtctgctcacaccaagcacagcgaggccctggacccctccagcctggctctgggctctagacggctgctcgggggcccggcttcccaccagtccccacggaaccacggctccttgggatgtggcctgaatcaacctgagagtggggttcccgtggctgtgccccctgggccacagtttcattctggggttcgtaatgaacttcataatgaacagctcacgctgcccaaccccagcctggatgcccggatcccatccctggctgagctggagaacatcgagcaggaggagttcagctcccggccataggttcaggacccagagccaccctctagggcagcctcgtccccaagggccctctggggtcacgggggatggagggtcctgtgtcatggaacctgcagccaccccagatccccaccttcccggtgactgcacggtttctgtccttctgtggagcactttgtggggggcagtcctgtgccgggcatgggacagcgaaggagatggtgttcctgctccccagcaaagaggccgtgcagggaagccacagggctgaccacggggtccaggaggggcaggaggaacgttgcggggagttcaggagaggatcctgggggttgtgtctccaaagccagagtgggattctctcctggttttccgcacagggagttggaggccatcctctgtcgggcgctgcccgtttgggcccccacttgggcctcccctcacgtctctcccatctaggagacctcaagctctggaatcccggaccagccttcctgaggccagggacggtgccacaccctgcgcctccccaggccttcctcccgttgcctccttcagcctctgggctcacctccctgggggccctcgctggccccctgcccccactgcccacatggctccttccatagccggggccttcccggcaggcatgggactttctccctagcctcctggttcctttatctcagtctgcaccgctgggcgataaggacccagagccgcccccgcccccacctccaccctgcacagggctcatcgacattcgctgagtaatggagatgaaggcgctgggggcgtcactcagagatgagcgagtttaggcgcctgacctttgcccctaggacacaggaactcagaaagggaggccagaaggaagagatcacgtttgcatttaaggactcctggcttccgagcacagcgcagattggagggaagggtggggacttgggaagacagagagagaaagacagagacagagaaagagagacagggagagacagaaacaaggagagacagagaaagagagacaggcacaaagacagaaacagagacagggacaaagacagagagaggtagagacagagacgaggagagacagagacagagaaagagaaacaggaacagagacagagagagggaaagacagagagagaaaggcagagacagagacagggagagacagacaaagagagacagggagagagagagagacagagaaaaaagagagagacagagagaaagacagacagagaaaga

SEQ ID NO: 318548 - DNA, 4001 bp, Homo sapiens
ctcaccacagggctggggcactggcccatggaggcctcaagacagacactctggtttgctcctccttcccctgcacccctccccactcctatcaaagtgcaaggctgtgtgagctctagcgtggctttctactaacaatgcatggatatcacttccaccttcccccacacttccagagagcaattttacaatcttctaagagcattcaataatgtcttcatgactgttcatctgtattcttttttcttttttttttcttttttaacatgaggtctcgctctgtcacccaggatggaatacagttgtgattacaactcactgcctcaacctcctaggttcaagtgatccttgcacctcagcctcctgagcagctgagactacaggtgtgcaccacagcaccggctaagttatttttgtgtgtgtttttttgttgttgttgttgtttttttgtagagacagggtctgactattgttgccaaggctggttttgaactcctggtctcaagcgatcctcctgcctcagcctcccaaagtgctgagatgacaggcatgagccaccaagcctgggcttgtattgtttatactcagtaataaagagcaaaatttatataagcaaaatcagccactgtaaagagagtttagacataaccatcacaactgcttcctcaaaaagtgtctgtacaagccacatccacctagggcaggtggcaccaccccgcgtgagagagctgggcggaggatggacagggcttcatcgcgggaactagctcctgggccagcagggtaacccgggaaatcctgtccaaacggctacataaacccccctgcaacgctgagcaggagagcaggagcgtctacaccgccccagccagggcgacttctgtcatttggatccagcagcagcgtgtttcagtcgagcgcacgcacacacagacacacagacacacacagactcacaaacacacatacacactcacacacacacaggcgagcacatacacttacacacatacacactcacactcacacaggtgcgcacacacacacaacgactgaagcaggtcgcaggtggaggctctaacaggcaactttccctgcatccaagtttgcacaaaacctcacccatgagctatcacgagctatgccacgcacccggtgacaacctcaaccggcacgacccctccggtgggtaaaacacccgacgaaggggttccgcggcgcgagcaggaggccgcgttgggagagggcgtcgggtgcggagctcgcgagtctccggcaagccgccgccgccctggggccacctgaccccgctcctgaacgcggggcctcagaggcgagttttgggtctacacagcaaaatgtggcccgttagaaagcgtccttcctcaccgcgcccagaacaagaagcggcgctgcctggcgagtcctcgcccggcctccccgccctgcccagagcaccagcgcgcagcccgcgcccgccaccacccccaacacagacaaagcccccgcgagatggagcggcggtgtacaaaacccactccgatcggatctgggatgcgccgcacccctagtagggttaagttccacgagaagaaaccaggacccccgagtcacagccatagacacccacgcgtcccctaagccggtgactgcaccaggtgcccacccggttctgagcctggagcggggccaggggcagccctgcaccctcctcgcgcctcggacggcctcagggtcccatgtggcgctatcggggggcgctcggcacccgcgactgttggcgactttggagacggcgcggtctgcgggacgcggggaccccagactgtgcccggtccccggcccccgcccctgcgccccacttcggggtctgcggaaggagcggggcgccccgatgccgcgagcgacgctggcctcacctggccgcccgggcctgggctttgcacgcgagtcctggcgccgagagcgttccgcgaagcctcccctcccgctccgcagcgctgggcggtctcagcctcggcctcgggctcttatccagtagacagggtccgccccgccccgccctcccgccgacggggtcgccctcgcgtcctggctcctcctcctcacctccccgggccgcgcccccgcccccgcctcccggacgcagatggctgggagcaagcggcggccacggctccactgtcctgcgcgtcccggagcctcggacacggggtgcgggggcctgggggtccgagacgtcgcggatctagacgggcgccttccacgcgggaactgtctgggccgccctgcgccctcgcccgcacccctgggggctgccccgggcacccgctatcttcggacgcccagggctggcggctcccagctggacggggagggagccgagcggctgcgcgcggggaactgctgggaccccgtcgggccgacccttccctccctccccatcaggggcccctacggtggccccgcgctctggggaccacgtccctcccaccccgccgctccacgctctgaccagcgggctcgggaccccgccgaggactctgcacgcttcccggcgtgcgggctgcggagacgcgggtccttccgtggccttggggtctccgcgacctcgaggcgaccgaggtcccctaggcctagtccccgccttgccggcatctagtgcgcctgcatcggaaccgaggggcccgcctcgcactcgcctaagaaaaccatttcccgggacgggcctggaaagccctggcggttggtatccggctccagggccgaatggactccgaggctttccttccgagatgcccgggcgggatttcttccattcagcgcgcggaggaatggagcccccaggccgccaaggcccaggatgtccaggtccttagaaggcaccgaggtgagtggccgcgcccagctctgtgcgtcgcccctagggtcgcccgaaccccggcgttcctccccgtgtaccctcgatgctcccgtgagcaccctgccctgggcgtccaggcgagccctggggctctccagccattccagcctgcagcccgcgctcagcagtgagggaggcagggacccttggtgcctgactccgcagtacccgcccgcagcgcggtgccccaccccctgcgcccgccccgcactccccgcacaccaccactcccctccccgccccccgctcccccgctccccggctccggggctggcacccaggcagaaggcactcagggctgtgacttcacgctgagttggaatcaagtgggagcctagtgaccccctggggctgccatgacaaaaaactccacagcctgggggctcacacagaagccttcagttctaacggttccggtgtcccgaggccaaggcctggccgactctgtgtctggtgagggccgcttcggggttgcagacagttctctccctgtatctccccacgctaggggctggggagagctctccggggtctgttttatgagggcactggtcccattcctcagggtggagccctcctggcctgaccacctgaaggcctcctgacaccacctcccatcaggggtgggacttcatcgccagggaggtgaggggacttcaggagagggggatgtgccacctcgaagctgtagtgtgtcagtggctgccacagaagggatctctctacccctattatctccatggcacaggtttcaataaaaaggagtgagccagggcttggccccagagcagcagggttgaggaaacagtctcccaaggaaaagactttgcaggtgactaagggaggctgttaaataaaacacacagagagaatggatgttcaggtatattaaaaatacacaggccaggagtgagggctcacgcttgtaatcccagcactctgggaggccgaggaaggaggatctcttgaggccaggagtttgagaccagcctgggccacatggcaaaaccctgactttgaaaaaaaaaattagccaggcatggtggcccacacctgtagtcccagctactggggaggc

SEQ ID NO: 318549 - DNA, 4001 bp, Homo sapiens
tataaagtggggctactaagacctagcccctggaagtgttaaaggattaaatgagataaagcttgctaaccccccagcccagcacccagcaagagggacagggcctcttgtggggagggagggcagagagggaagagaaggagagtggaaaagaatggaaacaggacccaagagactcacaaatggtctcaagaagtcactcatgtcagtgaataaaaaagacataccagctgggcgcagtgactcacacctgtaatcccagcactttgggaggccgaggcgggcggatcacgaggtcagaagatcaagaccatcctggctaacacggtgaaaccccgtctctactaaaaatacaaaacattagccaggcgtggtggcgggcgcctatagtcccagctactcgggaggctgaggcaggagaatggcgtgaacccgggaggcagagcttgcagtgagccgagatcacaccactgcactccaacctgggtgacagagcgagactccgtctcaaaaaaaaaaaacaagaaaaagaaaaaagacacaccacagtggttccaagcccagctgccccagagcagagaacttgaatgaatgagtgtgtgtgtgagtgagtgtgagtgtgaatgtgtgtgtatgtagggaggttgataacaccagcccctgagaacagtcttctcacatctaccagccctttagcattcttccccacacctcacacacccagtggggcctgttttggtgcctccaggctagggcttagccagaggaggttcaggttagagaatgaacttgtccaaagtcaccaggcaagtggcagcggcagaaatagtattcaggagatctgactccttagttaggactggtacaagccagaaaacgtcccccagtattccccctccccatatcctgacagcttggctgagaggtccaatcccacaaggcaaggtagggagagcctgaggtctgggcccacagccactctcccataccagcttccatcttcattgatcatatcctcctgcctccgatagccccctccctgtctttgcctcccttcagccctgctgaggggcagcctggggtctcagcaggcaagctaagggggcggggagggagcaggcaggaaagaggagagtcttcccgcaggctcagggagccggcttcagtatggatgaccgcctcccactccccacccctcagatgagtccagctcaacgctcaggtattccaataccccccacacccggcaatcagctcctggcggggagcagcagggtggaattggggaagaggtgggtgcctggccccggccgcccctaccccgcgcctccggggactgcagacacctgttcataggcctggcccagtgaaccaggactcccctcatactacatcccgaaccccagatggcaggggcagaggtgggggcgcagaccgtgaccctgaccctccctgttatccagctgagtcgggccttccccagagcccgaagctggtctgggtgcatcctcagaccttccccaggggcctcgttgggggcgggtctctccaaccctcctccaggtgcacccccagcgcccccgccctcgtgccctaccttgcggaggtgagctccctggagcttcttcatcttggagagcgggtggccggggctcagctgccccggagcgcagagagcgagggcacgagagatggtccgctggccactgcgcctttgcccccgcggctcccgcgcaccggctggggcgggcacggacgcaggcgctgccgtctggcggctgcgggcgtggagcgcgggcagggcgctgcgaatgccttgtctgtccctgcgcagcgcccgaggctggggaagggtgcactgctgcgcccgcatagacacccagacagacagctgacggacggacggcggggggatgcgcgcgcccccgcacgcagagctgcggattggagagccctgagcgagtggggaggggggttcgcgacggaaaccctcggctttctgcgtgaccttgggcaagcgacctgccctctctgggactccctttccacagttgggcaaggaacactaacagcccacccccctgcgtcgtctttgctgtgcgaccttaggggataagaatctctcctctcttacaggagtgtgagcaattcaggaagatggagcatagaaaacatctagcacaaagagcctgacacatagtaggtgctcagttaacatttattcactgactgtgggttgcccacgccaccattagtccaattattcaatctatcagtatttattgagcacctaaaatgtgccaggtcctgaactaggtgtcctattttctcaacctggagagacaggtgtcgttactcctattctacagatgaggaagctgagggacagggaagttaagttacttactcaaagtcacggggctaatgagtgacaccagggacagagtcaggcttcatggacctttaggctagtagagtcttcaactctcctcctttccttaagatgaaagcaaaatggggaggtttgggtgagcagaagggacaggcaagtgccacagtgtcactgtgatctgtgacttagatgattagtaactggtttcctgtccagcagcagtatggcttctggaaagttctaatttcatatctgtaaaatgggccacgagccgcccatgcattgttgcctcagaatgttctgagggtccagtgagcctgtggctaggatgggaaatgatgagctggagcaatggcacacgttggtttgctgggactgactgatagacactagcggatcagtatatacattacaaattgtgtccttttcaccctcgcaagtgtcccagtttagacattaaccatacatctgtttggctcactatcagttgacacggtgggaggcctttggggagagatgagaataaggttctgctctctcccacctctggagcttgaaaaaaggttggaggggtttaagtcaaagcatggacttgggtaaaggcctggccaggctccagtccaccccttcccctgcccaggtcctgtcaaacttctctcccctttgagcctggccacaaagggcaaaccaggggctctccagacccaggaggaaggtgtctcctctgccccctgcctgctgacccatatggggccaagagtggctgtgagtgtgaagagaaggagcatttatggagccctactgtgtgcattatgaaggatttttgcatccaacatctaatttttaattctttccaactgtctgggaagacatgtttgtgcatctcattttacacctgtggaaactgtcccagaggagtgaagtcatgcactgggcgttggggatgaagccaggaaagctgtgggtcatggctgggaaaggcagaagccaagggctcctgaatccaaggaggcccaggcaggaaacttccccatccctcacccaaggcttgtcaatgcatcttgtacaaaagaggctcaaccttgctcaaccactccctcccattggcacttgggtttcatgagaccctttggaaggcacagagggccacagggacagcgagcagggatgaggcagttggctcaggagccaagaagactggcctctttatgacccttcctagcagcacctgctcctcccacttcacggacccagccctgggggagaagaagggagtggaccagggctttagcttcccttgagcagacacatcagggggtgaccactgagccactgtggcagtcactgggactgtgaggtgcaaatggatctaggcccatgcctttcagatagggaaactgagacccagaggggcaggatttgcaaaatcactcagtgattcagtaaagacaggatcatgtctataacctaggagtctgacctcacccaggctctgccctctagctcatacctctctgccaccatcacctccatccccacagccctggtggggaaagtctgccctttcataaaacaaacaaaactcaaagattttcttttctttattttt

SEQ ID NO: 318550 - DNA, 4001 bp, Homo sapiens
aaactgggagaggccccagcttgtacagaaattagatattcacggccgggcgcggtggctcacgcctgtcatcccagcactttgggaggccgaggcgggtggatcacctgaggtctggagttcaagaccagcctgaccaacatggagaaaccctgtctgtactaaaaatacaaattagctgggcgtggtggctcatgcctgtaatcccagctactcgggaggctgaggcaggatgtggaggttgcagtgagccgagatcgcgtcattgcactccagcctgggcaacaagagcaaaattctatctcaaaaaaaaaaaaaaaagaaaaaaaaagaaattaccttttcagtttacaccaggggggcactcccgtcagaggaaagcagggtgagctttaggactgggcggccgcagagcccaggttgagtctggacctccctgatgccccaggggcccttctcaaggaaatcaactgtaggaggcagccagcctcagagactcccccccggccagcatcccaagcccccagtggaaagcccagggaggacagcctgagcctggagagcaggcagcccggcggggagctgaaagacaccagggcgaggaggaggctgcggagaagggaggaggcgggagggctcagaagagcccttatgagacagaaagcaaacacacaaggggcctgaaggggaggggagaccctggcataaatagggcaggcggcaggcgtcactgaaggaaaaggcgccttctccaatcaagcctgctgggcgtaccaggttccaccaaggccaaggtcctctcagctgttctccccggagcctgtccctcccctgtcctgcgtgggcgcccctcctcggccccagcatcgaaacctcctctcgccccagtccaaagctgctctggaaacctgccgcggcgcctgctgctctgatcttgcttctcctggccccactcgggccccctaatcccccctccacacgagtgaccacctccctgccacccctggagagaccctaccctgtggaccaacacatgaaactttgatccccacgagctcctcaggaagctgaccttcctgtcaccttgccaggagctacctgccgtgcccacattactggttcattggcgccggttaagaagaagagaaatctgaccgaccgggattttctaaaaaaaaaaaaaaaaaaggaggcccgccaatgggaacgctgcgcctgtagggaggattctgctgggtttcatgcgggtagcaccgcttttcttttctgcccttgtaactcacgaaaaaacgccatcactccaaggacgtttctctaaaaagcctgagaaccccgaaggaaacccggccccggggactccctgggcgcgagcagcctgcagtctgcggggctcggagcggaggcggggcggagaccccacagggacccgggagccgggagtccggggctccgaggctgtgcccccgccggggaggggagacctcgggacccgcaggggcggcttagcgcggccagagtcgctcccgagtctcgctctgctggacccgagagccggactctcccgggcggccgccgcgcggctccgacctgatgcgcgcggccacaacgaagcccccaggcccagcagaggcggccgcacaccccgcgggcagatccggagaccccggggccacttaccgatcttggccaagctggccacgaggatccagagcgcgatgacgtagggatcctgcacgtgggcccactcgaaggtgaccacctggaagcccccgctctcgccgtgcgcgccgccgggctccacctcgacgcccccggcccgcgccagcccgcccagcgccagcgccagcagcagcccccggtcggggccccgggccccgagtccccacattgccgcctgctcagcgcagggctgggacgcgcatgtcgcggggggtcccggctgggctgggccgacgcgcggggctgggacccggcgaggacccggcgcgctccggtgccggtaccggctacagtccgatccccgcccgccggggtggcctttaatcccgcggccccctcccgccccggggcggagcctgcccgcccccgccgcgcactcgcgagcgcagacaccgccgcagctcccggcacgcccgccccgcccgcgcacgcccaccccgcgctccctggtgcccaccctcccccggagcccgcggcctggaggtccgggaggtcgcggcaagagcgagcccgggactgcgcggccgccttcctggggcgtggggagcacagcgcggggcagcgggacaggcggttccgcgcagctcctgggatgcccgggcagctgtgggtgcgctcgccccaaccctccttcataaacgcagggcctggggctgcgcagaccccacagggcggcccaagggtgcacaggggccccaggtgtgtcttcacacagcccctcgctattgtcttcagcaggaacctgcattccacagccggaccggccacttaccagaactcgggggcgcccaggccttgcgtggtgcgctggtaagtctctctgcccctcccatcgccagccagcatcccccaccccaggctctgagatgggagcccaggggcccccgtggtctcccctgccccatcccctgcctttagacctccgcccaaaacaattcgatacccccagggcttcacacggatgcggggcctctgcccacagcccgctccggcagcactggctctcttaagcatctcaggctccactgtgcaaaccacacccctgttttcctccaagcccaccctgcagccttccagccccagacctgggacgcaggtggacttctttcgctcacaaggtttccaagctcttagcatatctgctctactttcaaaatgtgcacaaaaccagcggcttctgggagcctgcagccacctgcaaaggctcctgctcggccctctacctgccccttcagtccctcctattgggaccctccctctcagaggaaaggctcaacgtctcccgggagctcagaccccagccactgcctgacccccacccccatgcactccacggcccacaccagcaatcggcgcctctcggggcctttgcacgccctgctccctctgtttggacggctcttgtgtgctcccttcctcagctccccaggggcttggctccaatgccaccttctggtcccacccgatacccactcagctcacaactgtggcagctaagctcccgcctcccctgcttactcggttggctccgggaatcagctcacctcccagccctgggggctgctggctttgaccttgagctgtctgccctcaccctgggaatgtctgctccacgagcaaggggctcatgcatacatcccaggagcttggaagatagctgggcacacaatagcactcgcaagatagtggctgagcggatggatgatagatggatggaaggacagataggtggacaaagggcaggtgggcggtggggtgggtgcagatggaggatggatgtgtcttctgacatctgagtgggggctgcggaggcctgaggaggacagtgctgagttcaatgacttcaccctgcaagggccccagtttcatgctaatggaagtggcccgtgtagcacagggaaggtgcattcagatggtgctcgcctggtgactcggctgctgagtggcgtggagggagggcagccctggcctgggccactgcagggtctggacagggcaccgggggagtggaagtgtgtgactggccactagtatggtcttgcgaggtgggagcatcggagtcgctcttggcctgtgtccctgccccacctgtctctgtcccccactccactcccagcctcttgtcccagagaaaaagccagcaggacaagaacaggattccctccagtccggagcttccctgctctttccttatggttcctgggtggagccgttaggaacgacgtcctctctgaagatgttgcccttgcattccacaggaaggccaaatttccaccagacca

SEQ ID NO: 318551 - DNA, 4001 bp, Homo sapiens
aagacattttttacttgtgtccaacttttttatcttcgcattcctttgacactgagatgcttcacaattaccaattttgtaaaactatgatcaagacattaatggaggggaactttggtagggacaagaaaagtggacagggaaataattcttcaacacaaatctaccttcagtagaagagctgcagcggacttgcaatcaataaatggttacttagcatctaatgcgcaaagcaaggggccctgggttccttgaagaggaagaataagaacaaaaagtatacttaggctttgacttagttttctattaacttaaaaaatgagctgtttccaaccctctaaaatctatatttctaaggttgtatttcttccaattaatccttgactgattatacagaaaatattctcggactatgactcaagtgaccaaaaaatatctacattccaattcagctaagcttcggcatgtccttcttgactcctctccacctcttctccacccttcctcaaagtcaactcaggttaacttcctattttccttcaacctctgtattgaacacaccagaagcagctttaaccttccctgtgccttctttcaagggagctgttctccctccaggatatcactcctccaaactgagcttagattgcaagcccctgagggtataaatctgaactgaatctgtaactcccaagagaacctaaaagagatcctagaacaaaacagatgctggataactaatgtaacacaatgaagattaaggctcaacaacgtcgggagcctttgctaatttactcactgggctcctctggtgaccacatactctcaaactaaatacactcacaaaacatgaatgtctgtatctaatttatacgatagatttttcatagctttcttccttgtaaggcatcccactcccacctgcaaacgtattactccttcccctgaggcaatgaaacaaatgtaaaagtaaaatacctttaaagagtgcctaggtaaatttttgtctttataatgtaaaataaactccccagggtatacctttcccaaaggaaggttcttgtaatcttccctgtaagtcttgaatccgctaaactgaggtaaaacacaaaagagaaaaaggcttgtattgcaagtttgaactgtagtgataaaggagaagctgaactttggaaggctggctgggggccggtaggttgaccttggtgagagcgcaagcaagttccaaacccggggccaccttgcagggcgcgtccaccgtcccacggaccccgcgcacctgccctctcccccggctggctcgccgtgcccacctcgctctccactggcccgagcctcaagcgggcgctggactttaccttgcgtgacggccaagaggcagtagtgaagcagaaagcctccaggtgtgttgcagcgctggagacattgaggatggaagttcctccagccgtaagacccctcctcaaactcggacagcgacagtgaccggagcttctcttcggagacattgggaggggctgaaggcagagatggctctggtgacttctggggctcctggggcttctgaagctcctgtggctgagaattctctctttgggggtcagaggacaaggcagagacttcgatttgggagggcgacgcagacaagcggcgcaggatgtctgggctggaggggacaaaagccaagttctcaatacctttggcgctcttcatgtctggatgggttctcccgactccggtgcttcagagcagcagagccaggtccctctctggctcctcccacaggcaggtgacagcgcccccgtgcgggaagcttcccgcctcctggccctccagcctccagcgcactctccgccaccgcctgaaccttcctactccagctcgcagctgtctggagcgcagagcgctgagcgggggcgttagcgccccagcctgtggctttggcgctcagctgtgcctcacccgtcgcctcaaggaccaaccggaaggcgcggcgtgggcgtgccacccggcggcggccgagtagagggggcgagagttctcaccccacagccttcgaccggagtccgcctccgcccaagcccctgcggttctgacctgagccttcagcccgcagcgcgcctcccttgagcccaagcactgggaacacacagagactgtgggagtctctggccataagctccccttgggtgctgacatgaaacctgtaaacagttgcatcaggagattgttcaggaaactatcttgcgttttcttcctttgctgcttaccaaagcagtctaggcttggactccaagaatcaagacgtcagaggtatactttggttcatgagcatcttgataagactcttgcctgtcatcctgttactggtagaaggtgtccaggttcttggcatcttgaagaaagaattgaagaaaacgcacaaacaaagcaaggaaggaatgaaggggtttattgaaaatgaaagtacactccacagtgtgggaacgggcgagcataggggctcaaaggcccggttacagaattttggggagtttaaataccccctagaggattccattggttactttgggtatgccctatgtaaagggagaagatgaagtaaagttacaaagtcatttatggcctacgccctatggagaggatatttcctgttacagctgaagtgtgaataggccttatgtttcctgcctccagaccctattttcctgcctcagtcctccttagaaaaagaaatccaccccaccccacccccatcaccaccaggatgaacatcacagcataaccactgctttgcttttccttctccgaaactgaaggaccagaaattgtctctctgctgtatattgcatatgtaagatatacagtgatgacaatcatgtaaataatttctaccgggccaggcgcggtggctcacgcctgtaatcctagcactttgggaggctgaggcgggtggattacctgaggtcaggagttcaagattagcctggccaacatggtgaaacactgtctttactaaaaatacaaaaattagccaggtgtggtggtgcaggcctgtaatcccagctacttgggaggctgaggcaggagaatcatttgaactcggaaggtggagggtacagtgaaccgagattgtgccacttcaatccagtctgggtgaaagagtgaaactctgtctcttaataataataataataataataatacatgtctaactgtggaataaataagaaaaacacttcgaagagcttaacaccattgtgtcatggtaggtacaatttagtcattcattctttcacttaacacagacacaaaaaattcttgtgtcctaggtgccaaacattgttctaagttctgggggtacacaagtgaacaaagactggcaaatacccctacccttatggtgcttatgttttaataggaaacagacagtaataatacatagtacatggcacataatatgataaatactattttgtgaaacttttgtttcaattatatatgctgtgtttactgggttgagagacagatataaaatatgtatcttactttggacagaggtacattctgttacctgtttcctcacaatcgagaaaactctagactggccagccgggcgcagaggtgcaggcctgtaatcccagtactttgggaggccaaggtgggtgccttgagtccaggagtttgagaccagcctgggcaacacgacaaaaccctgtctctaccaaaaatgcaaaacttagcctggcatggtggtgcacgcctgtagttccagatacttgggaggctgaggtgggagggtcgcttacaacctgggagggtgaggttgcaatgagtactccagctgtgccatagagccagaccttgtctcaaaaaaataagaattaaaaataaaaataaattctagattggcctaaaacatggggaaagagtagaagtaggagctaacatttaaaatgtctgctatatgccccattattaaaatctttacaaaagcagct

SEQ ID NO: 318552 - DNA, 4001 bp, Homo sapiens
ttttctagtatgggtcttacaacatacagccttttgattgcacttatttagacctagcatcttagagcaaaaaagagaacaggtttgtcaaattccaatgccatcattgaaaagaggctagtaaagaatcttgatgtaataggggaggtgagagctgtggtcaagtagagaggcatgccaggtctaaagtgttcaaattcaccttcttcaaaatatgtgggcaaaaataacaacctcaagtttagattctcttgtataaattcatagatgaggaaaaaagatccaatagagagtggctgagccagaatgtcgcaaatttgtgagcaggatcagaaaccatttaatgatcatagacaccgttttcaactttattttaaactccaggtgattcaacccagaacttctcagagttggtgaccaaacaacgataaatgactcaacaatatcctctctgcagctggctatctggaagccaggccctcatcacccacaatgtgtaggatggactgtgccagtcaggttctggaggaggtgaggcacccaagttcgtgccagccggttaacctgtttttgaaactacctttgcaaaaattataaatgaggaaattatgacagtgaaacagattggacctaatccactccttcttgcttctaacctttaaactccttgttcattcctgggcttaggccgaactaactttgggaaggaattcatttcacagtttgactctgaaacaaaattgataatagctcttttctgaaaagatccccttgttgcctggggactaatctgcctttgcaggactaacaaattatctacaagattagaaattaaggttaggggtcatgcagcctctggcgccaagagtctgaacctccgcaaattgctcctggggaaaacatcattattgtaaaaccgaagctcggtgcttgagatattttgcagacccttcactggatggttgagctgacaccacccagacaagtaatctgggtcaactagttctgccatcccacccaggaacagaagatggcaagaaaacctgacttcaaccacactatgattccctgaccaacctgaccaatcagcactccccagttcccgagcccctgccagccaaattatctttaaaaactctgatcccatcccagaatgctggagagactgatttgagcaataaaaaaactctggtctcccgcacagccggctctgcgtgccttactctttctccatggcaattccccttccttgataaatcttctctgtctaggcagcgggcaaggtaaacccactgggtggctaaactttgatccgacaacgccttgagaagtcagaaagcagcctcaggctgggccaccccagggcatgctgggccaccccagggcgtcctccgccatactccctctcccgcctccgccagtgcggccccagctgccctcgccacaacaaaccgcctccttcaggctcaccttgacatatgagcaggatgcagtagaaaatcatgaagcagcgaatgttattgcaacactcacagcaggtgctgactaagcagcccaaaccacagggctgctccaaactgtcatccacttctcccggcttcttggaaactgaggacttggcttttttcctttttcggaaaccgccgaaccttatcaaggcctctggaagtagtctcagataccggtgttttttcccgggcttcgaggacttcggggttcccttggccctcctgtccttagcaggctgggcccgcgcggcctccagcggctctactccccttgagacttcatcctggctcccagagtgccgggcgacgcctacgaacatggctcaccctgggcggctcctggcgacgcggcccgagtgctctcggctgcccgtcctgcctgggccaacccaaaggccagcctggcgagggcgtcggaggactcggtggccacaaggggctcttgccgcccaagcctccagagcgaacgtttctcctagggcaggaggcaaacgtcctcccgggggttgacggttgagaacttccaaagctgttttccttcttttcttccacgtgcggaaggaaaaaaaaaagctaaaactagattttgataactgctaacacagacaaagagcaccagaagcatggaaaaaaaaaaaaagtggaactgtccgtccccagtttccccagacttactttattatggtggctttccaactgaaaaatctcactagaaacaacctgaaaattgttgaaggaccaggagagagcagaagacattaaaacaacaacaacaacaacaacaacaaaaacagtttcaccacagtaaaagatttggacgcacaaaaatcagaaatcaatgtccgactgaatgtccttaagtgaagtgttttacacatagaaattattgccctacaaactctatcccaactcaagaacagaaaagattatcattttccaccttaaatgagggcacgagaaccagaggattattttttcaggtataaaaactttattgaagagaaagaatgtaagcgaagagtagtaggatatgaaacgtggctttctttttttaatgaaaatgcaacttcttattggttttcttttcttaggctgatatataagctctttaggccatgtatatgtggagggtgactttccaggagagatggcactatcttctctcctatggattagacattgtgttgccaaaaacaatttagctcttcaacaagattttgtgctgctccaatagtgctggcctggtagaccagggaaagaagaattaagaaccactgacctgaagcctgatttcgactctacactgcttcatgataataaatgtaaaaaaaaaaaaaaatccacaggaatcctaggaggtaggaaagacagtggggagtggtgggctcttattcttgtgcttcaaaaccagaataggtactgcttgggtgcagagcggaaaagacaactccattaaaaatgaatggtactgggaattttacttctacccagaatgtagaaagccaaataaaatgtaacccccactccaataataacaacaacaacaaagctggatagtatgaaaaaatactttttttatcagagagctacatttctatagctatggctgctgtaaagaaactaggcaaattgattctaaaggacaataagcccttcagaaaaaggatgggacacacaaaccattttacttttcaaagagcacagaaagaagaaaaagcagtcataaaggaagatagaaacacttgaaattttaatgaattcttaaaggccaagggaagcttaacagtttagaaaccctagaagcctaagaaataaggggagtctatacccgtttaccagatctttgtttaagggaaaagatttggtcgtggtagactgtccctgagaaagaagaaggaatactttccctcctacctccactgacccttctgctatccaaagcaaaagcagttttgcctctgggattgaggcaggaaactctcatgccctccagtctgtgacaaaggttatctgttacagaagaaaaaacccactgaaggaggagcagcaaaccatcctgtctatggcctaccttaagattgactgccaccagagagagggatagaaataaaacagtttgccaaaaagagaggagcaggaacttcatttcttcccaagaaccccactgaaacaaggcaaagcccgaacttgaggttcaggcattcagggcatgtccaaaattgaggctggaccagggacaacctagcttctgcctcgatgaggagttttgcatgagtgaaaaaacagcactccaccaatataggtgagtcaagagagcagagggaaaccctacctgtggtgcaagcatacaggacctgctgaaagctaagggtggaatggaaacactgacaaacataccttcaacattctttgatcagcatatttttattacataatgtaggacactgtcatccagctacaaaaattgtactctaagtatttaagtagaaattg

SEQ ID NO: 318553 - DNA, 4001 bp, Homo sapiens
tggttttcgacatgtgttaataaagattcggctctcaccctttaggattctgtggttcaacccaacaaaacaatcactgcacttgtggaaaaacaaaaaagtactgagccaaaggaaaaagagagcaccaggaataaggaagacagttctgctgagtctccacccagagatgcacaaagaagtggaagagaagaggaggtggggtgataggaggtgactagcaggaataacacactctaggacaatgcttgtcatcactactctcttccagcctgaagtcaagaaagcagagtggaagatccaggcgcctacccctaaggcacatgaggaaggggagaagagggagagcaagacacggagggaatctaccacactagagcaaaccctcacccacttctcggctgggttcccagtaaggcttcccacccactccagcgtttctcccccactcccttaccccaccccaactgcggactaagaggagcccaccccggagtccaagttttgaatctggtccgaggatcaaaatgataaatgtttccaaaacgttgacatatgaaaagtaaatatttggttgcacaattggggctaaaactagggtcaatccaccccattctccaagcgcctctccattcgctgccaagcccaggatctgaggctgagtgcggtttgtaagattataacgctcggtctcatttgaagggctgtcagcatttccattctccggccccttcgttcggggaggcatttataaccgagccataaaaaattcacccggggctgcaacttggcatctcccagactgcgctccaggcagagcgggttttgcgagcacccactctgaatctgtccagttcctcagaagttaaaccttcacccacactctcaactttccttgcaagggcagccagagagcggctggcccattctgatctccaagcaggtcaacagtctcgggccctctctcccgcctccgcgccttgacggcccatcatcctatagctttctccttcgcccgcccccctttttaacgagcgcagacccctgaccctcaccctaagaccttgaggctgcagtgctcttgcctcccctcgcctctcctcagctactccttggaagctgtcagcgggccctgcgtctggaaccctcacccctggagaggcactgctctttgcccatcgctgggggtttcgagacctctctttccagatctgaccaagcctacagacccccagctcggagagtgagggatcgtatccaggaagggatgagaatagagactgcatccagggaggccgaggggaaaggacggatctggcgcctggggccccctcggtgggacccaggtgggtggcccgcgtggggtggggcaggggtactcacaggcgctcagcgttgcgggggatgccccgaggaaccgcgcggaggcccagcccgtggcagtccacgctggcagcggagcaggtacacttggtggggcaggcgacggctggaggcccactcaggacgctcgccagcgccaaggccagcgccaggcgggcgcgcacggcggcgccgacccctgcccacccgggggccatggtgtgcagggccccgctcctggaggaggctgcctctgcggggcaagacgcgtggagcccgaggaggcgcgcggggagcgcgggcggcctggggagcgggcggcggagttagcgcggaggaggggcgagctcggtgctcaggcgcacggggcgcgggcggagcggggcgctccgggcggcggcggcggcagcaacagcagctccatcggcggggccggcgctgccccgctgcgcatcgctgggagtgcccaggtgcggagcgccccctggccccgctggcccgcgggccgggttggggacctggggcgagcgcaatggggcgtggcgcccggggaggtccggcttggggctgggctggggagcgcggcggctgcggctggggcacggggcggccgggtgagctggccggcgctcgctctctccattcagtgagcacggcagacaccggagacgcggggcccacccctccggcccccccccgaccaagaaacgccaactccgcctcccattggctgcgccgcgcgtcatgtcgactaagttgggaactttgctggagcgaccgagagcctggagggaggaggcagtagaggagggagagagaaggaaccagggaaggaaaggggctcggccagcagggcccctggaaagaaacactgaaactcattcactgttaagatccaaggacggataaggctcctgacacttttttttttttaatttttgcactgagctgagcactctactcatattctttacttaagtccacgatcttccaaggggtcgtctgaaaacagctcagagaagtgaagcgacttgctggaggtcgcacagctgctagggacgccaaaccatggcagtgtcgcccacgaagccgcttccctaccgcacctagtactcatggcagagatccacaattttgcctgaagagccttggttgacaccaatgtactccacagctacacacacacacacaccgtggtccatgttgttgaggtcactgctggcaaaccttacccggaaacttgccctgctttgcccagacccagcgcttggtggactggtaaaagtagtgatggcagcgacttggacccctggattgacaatgccttgttccatcctcgggtttctgcttcctgactgggtgactctgggccaatcgtgtcatctctgagccttcgttttctcaaatccggggccacagtcctacctggcctcacctccctgggttgtttggagcatcacagaagagaacgtgtttttgcaaaagtcattcgcagacgaggcatcccttctgtccccagcgccttctttcttccagcgcccgctttaaattggctaggtctgagcttttccagatgccagtggggaggggcgtgtgcgttagaggctccataaatacttgtaggaatgattttgtttgtttgtttgaaaggaaagggcaggaactggaggaagtattgcccagatttccttgaggtcccctcacactgagaaggcctgaatgagccctgcatatatatacacacacactggtgcctacgtattcacagccacgcacacactctcacatactcaggctcacacacacccatttatacaccggcaatcacacacacgtgtacatgcatgctcgcacacacactcacatagtgacaactatactcctgagagcgcttctcttttctttcataagaatactattctgatttcttctacctcattttccttcaaggaaactttcaactacttgaccacatcctgtgaatatatagtagagttgtagattttattgtattatacttagcagattttcaaagtcttagctttgggcacccacttgcgcgcgcgtacacacaaacacacacatacgcacactcactcaaacacacacactcgagtcccttcatcattcataaacacattaggtgcaatttactgctgttattcttgggaacggctttctgtacagatgctgttgttatcgccccctggtggctggcgagggtctatgctccggtcttcagggtgacttcggtatttaagaactctaaacatccttttatccctttgctctgaagctttcctccaaaccttgaaccaatttagtaccaggactgaggcagatgagagaaccgggcaagggcccaagggcacaaagcgtctcagactgtctggagcagaaaacagtacggttttctttgttttcccaaatgcatgctagagcatgttttgcaatcccttcgggctggtcctggatctgtgctctgagcgcagtgggggactgcgttttccatttaagctgctcaggggggtttcatgagccagactgtatctttaagggactttataggcattcaagtgtgacttttcctgggagaagccccttagaacagatggtgaggatttccttcagagtcaatc

SEQ ID NO: 318554 - DNA, 4001 bp, Homo sapiens
aacagattaatacaatgtcctactgcccaagcttaaaatcctccaatgcagtaccgtccaaaaattcaatacagcaccatctaagagaaatacaatgctagtcccacatgtaattttatgttttccagtagtcacattaaaaaagtaaaaataaacaggtaaaattacttttacaagattttatttaatgtaatatatccaacatattataattgcaaatttgaattagaaaaaaaacaactctgtctttaaaagttgatatgggttttacacttatttaaactaatcacatttccagtctcaataaccacaagtggctaataactatcataacgaatagtgacacctgggtgcgatggttcacacctgtaatcccagcactttgggaggccgaggcgggcggatcacctgaggtaaggagtttgagaccagcctggccaacctggcgaaaccccgtcgctactaagcatatacaaaaaaatcagccaggcgtggtggcgtgcacctgtaatcctagctactcgggaggctgagacaggagaatcacctgaacccaggaggccgatattgcagtgagctgatattgcgtcactgcactccagcctgggcgacagagctagactacgtctcaaaaaaaaaaaaaaaaaaatgacgctccaaaggattttatcattcgtactctaaaaactgacatctttttaacacacctacacggtccaccatggtctggcacctgcctaccttccagcctcaccattacaactatccccgcttccttctctactaactacatagaccttcttgtagttcctctagttcctctaacaaaccgtgctccctgtagacactgggcctttacacaagctctttcccagtggaaagtgctcaatgcctgggggtctacgatgcttctcaaaggtgttctcttctatgtctgacctatagaaaacctccacatatatttgtgtaacatataaactgatggcctaaatatactgcgaagagaagcacaacaacggtaaatttaatctttattaaaacagctaccatttctcgagcctaccgtgtatcacctcatctaatcttcacaataagcccagtagataggtctgatgaacaccattttacagtgaagaaacaggttctgagaggtaagatcctcagccaagaacacattgtagtaagaaataaggacttcaaacacaactctgactccaaagtcagttctctaaaccagtatgttatacttgtccacagaacattggcttctgggcctaaaatattaaaaactaaaactgaataaagtattatagtcaccaagttgtacgcactagtttccgtcgctgtggagggacctattttctccaactaaaaacagtaatagctcccacttactgagggcttacgtaagacactgtttagcgctttacttacatagatgttttcatttatacccgcatgataccccactgaagtcggatcatctcgacttaacaggaaaaactgaagctcaagtaaatttttctggcgaggaaatacagtctgtcaatttgggtactggaagcagctttccctgctcgcagtccggggattgctcaaggtcttcgaggcaccgccacaaaggcgacactctcatagttatcccgactgtttccctgaagacgcaggcctggcctggcagggcacgagtgccatgaatgggtctcaggacagtggcttttcggtcccccgtcctcgctccctcaacacctgagggctcatcacccccgtgaagatatatccaataattaggagccttcgactcattttctcaggttccccaactccccgtcgcccgcaagttctaacaatattttcttacccagccccgccgcagctagccccaagtccatccgacagaatccaagccaatctcgtaatgtttacttccggcttttcgcctaattccggcggccactgcggtaacttccggatgaccggcacatgcgcactaatttcctggcggggccgggggcggaggggggccctccagtgctcctgcgccgtgggaaacgcgagaactctagctgctgcgtatcgcgctatttacccggcttgtggggagtttcaagttgggcggctactttttggcttctatttaggagctttcttttagaatcggagaattttaggaagttaaaaaaaaaaaaaaaagaccagaacagacaagagcttaagcctcaccaggggactatgaaatgaatggggaagttggtgacgtatcagcttaaaaaaaaaaaaaaagcagttaaacttggcactaattagtagccaggctgtgtaacatgctggggatttggtgaacagtgtcttccctcagatttacatcagagtgcgaaagacaccgaaacaactattcagatttagcagctgtgaaaagttgctatgaaaagaataccaggtgctgtgagaacataaggcatgttatcattagaaaaaaatacgacaatttccattttggagaaacagtatctatgctatcccatcccttctttaaaagtatacatgtgaaataaaacactggaaaataaactaattttcgtggtagaatttcttgtgatttttttttttctttgtgctttctattctggttgttctccccctcccccccataacgtgtatcctttttgaatgtaaaagtaaaagtagctaccattcctgcctcaataaaatagcccaacataatagaatctatttttttcgtattaagaatttgcaatacctggagtttaggaacataaatattaattttgcttttacagggcagtagatgaagaaacagtgtcagagactagcgtgaaagtgaatagagtctatgaatcactcaggctttgtttttttccacttaaaaatattcctgaaatttgcttaggagtgttaaggcctaattagccaaaaccaccaggagagcgcatctcgaagaggaatcagaaagcgcaggacaagacagttgaatcttttctaagacttgaggtccctctggagggttctgaggaaggtctaggaaagccgggattggttctggatgggttgctgtttgtaaagaaggattgggagaaactgattagggactaagtgctgttatgagtgagggtggtttagcaattgagtatttccagtaataggaatagcaaagctggtctgagggcatcattagtaagaaaacagtggttattcagagagggtggttatggtttacagctgctgcatgaccttaggagaaacaatgctttctgttggtgaaaaaaagaagacatcctaagacaaaccttgcacctcaaaacctctgtagatagagaatccccacttggaagctataggtgttgtgcagatttagtcttaaaaattaacactttgagtgctgataatataatatgatgatgtaaaatttaggagatacaggaggaaataaaggatggggataaaggaaaaagaacagtgaagggacaataaaggtatgcatatttttctgtctttcctcttttcttcaccttaagttaggctcttttcttataacctagtataatgtccagcatttaataggtattcaataaatatttgtgaatgaatgaatcattcaatcaatattggtcctgaaatgccagggaaaaagagatgatgaactggcatatattgagaaccatgtctatgtcaggtatagtgtcaagcctttcgtgaaagagtaatatggaatcaactcctctctctcagctgatctgcagcttaaaatgcatatatggtgaactgtgggaagcggagtttgaatgacacaggtcagccttatgttttaatttatatcttcatcttgtagttgttcaatgtattccattttactatagaaacaggaaaaggtcgtcaactttttcaagcaaaatttcttttcatatctgggaaattggaattccttttttatatctttattatctctctgatattctcttgctccctggccaagcccttcc

SEQ ID NO: 318555 - DNA, 4001 bp, Homo sapiens
taacaaagatacatgggtaaattaacagcagtaatgtaaaaaagactgagggagcaacaatgtggaaagggaaggaaaggaagctgtataggaacaatcacacaaataatcatcaaaattaaactttataaatctaaacatagtatctacaacctttatgaaggttaagttttgttaaattgtctaagttttgcatttttacaattttcactgtagagaaaaaaatattaatagttaccaaaggaataaaagactaaaataatttgttatacatctgcaaatagctccttaaatttggaacactaatttcataatgatatttggatccataaatgtgaaactgtcacactgaatgtaggtactgttttccccacaatggatactactgcattggcatctagcagaaattgtaagctatttggaatgttactaaacctactgggactaaggttttcaatcttttgtctttcaaattaaaattaaaaactaattcactctgggcaattcaggtactctaaggaaattcaagtactctagttttaaatacgaattttcaaaaacgcaacccaagtaccctttcctctcaacttctgtgaggccaagccacgacctccacctattcaatctttgctgctagataacaacccttttggtagtgctaggcaacaggcatgatgtgacaaacctagacatcaaaacttttccacagaaagataaggtaaacaagatatacttagcgccacacccatttaaatgcacaagcaaccaaaattgctccctccccccgcaacaccccccccccccccccaaagctccagctggtcaggaaacattgtctttacaatcaagataaacatctggctcagggtgttcagccattcctcacctacaggcttgcctaagccccattctccaatgccatcaccaccagaaccggaacattctgttgggaagccggcaaacgtccaaataccccaagtatcctcgcccgagttctgcaaccaaaaatctgttttggctactgagcatgctcagacttaagacgggcgcgccacatgggagttttcaaagcttaggctccaaactccacgtagtaacagcagctgaaaggaggagaggggaaaaggggaggggaagagactggaatattaatttgagccctgatattgaagtataggacccggccagcggctgaatatggtgaaggcaaaaagacgctgctttggcattctctttgcagcacagagaagtttacatgaagtagaagaaatccttgcagtggtgaaaactgacatggcaagtggcagaaaccaggtctaactaccagctgattgcagtagccggtcacaactgcccagagtgtaattcccaccgataagcgcggatccttatctttgaaacacaaagcgacggcggcacggattcatcaagccattggacagcttcgcagtgcagcagcccaggctgcccggccgagcaccgcagtcctatcaagggtgtgtatccagggtggtacatccgatgagttaggaaagcaaaccgctccccaggacagcgcggggtcagggggtcccctccagggcgtcccagacgcctccctccaaagtctgggcggtaacagcggggctgggacgagggccagccccggccccgcctcaggacgccccgggcagccagcgaggcctccgcagccgctgggccgcaccgtgtccgccagccgggaccccggcaggccaggactcggcctacctcccgcccgacaggccctgggtcgtttccgctccgtccgcggccgaacgcccccgcctcggcccgagtccgccggggcagagcctgcagcccccagttcccctcgcccgcgcgcgccggggaccctcactcactcgcgagccggctaggcgcgctctcccgacgccgtcgctgcgcttctcctcgctgcaactttattagcagctcggccgcgggacacgcgcacggcgcccgctcgcccaggacccggatgagggagggagggagagggagcccgggaggacgcccgctggggtcggcgcatgcgcgccagaggcggagtgaccgctgcgggaccgagggaggggtgtcttgcccgggcggctgaaagaagcctccgcgccgggctccgcgccggccaacgccgacttccgatcagctggaggccttcgcgtcgatggccaggcctgggaatgggaatcagatagctcccaccaccaccacagtaggcgctagaagcttccactaaccaaatcagtatacattgtaataaaattaagtaattgtccttgacacagacaactggaggttttctgtcacatacaaagtgtaaacaaaaacatcttcagatacgacttagctacttttattgatctgtaatacaaatctgaatgaagagtcttctttctgtgcaaagtagcttcaaaacatgtttctgagcatcttacagcttcttactagatgcagcactaaaacccctcccacggggcaatcctggaacccttgagggcctgtggaaatggagcgagtgcccaccctggagttccaggagtgggactgcccatacactggatcgcaaccccagttgttcaagacacatagcctctccacctccttgtggggagggagatcccgtggggacccagcccctggacaggcggggccactgagttgcagagacaccatccataggcttatatacaccaccccatctcctggactctcttttctaagtaattggagctcttctcgatgctttttcctccaaatttccaaaaccgtcagtatttcctagaatataatattggtaccacatagggtacccgatttgaatagtactagtaagaaaaagcttttgaataattttgtttttatttgaaaaggtcaatactggctctccaatgttctattataggttttctttttaaaataagtaaaaatcaaaatcggggtcattttggaatgctctttgacaccctaatccaatccatcagaaattctactgactctttcttcaaaatttatcctaaatctgaccatttctcacacctcaattgccacctccatggcccgagccagggtcatctcatctgacacacaaatggcgcagccactattttgctccaggctctagaagtttatttctgtggagaagaaactaaataaatgtccagaagtctctgcattaggggtggccatctgaaatggtgacagagggctagtaaaggagtgaaggggaagtgggggaagagaccagagagtgagtgtctagttccagagaccaaaggggtcactgctatttcattccagccaactgttaccatagggaaatgtgggaataaggacccagtgttggcagatattctgatttttcaagcaaagctggaaatttagatttttatgtgaaaatctcaattatatctgtttagcaacttctttctatttttctctctctttgcctgtctcctgcccgccccccaccccgctcccttcctctcactctgttagacattctggaggccaactacatgcaagccaaacaaaacaaatccatggtcccgatttagcctactggccaccagtttgcaatttcaggtctccatcttaaacttctttactacatcataaactttgagaaagtaaagtctgtgtactttaactctttgtcacactcactgattatttgttgttaattcagaagtttccagcccttggaaggcaaatatttctggagcctgcatgggtttacaactcccagaagtgcatataatcctgccttggaggatacgttttttttttttccagaactgatgtttgcagagtgctttgttgaacattataggacataacaatttggtttaaatattttgtatagtagagatactcctcacttcaaacagccaataaaatccttcccaaaacaaattatttgctgttttgcagtcactgtacatacgtcagaagaatttgtgattacaagattccttttcata

SEQ ID NO: 318556 - DNA, 4001 bp, Homo sapiens
actatgcattctcacatgcctcctatattcaagacaaactttatttaggaggaggcttttataaaaatcttgagttttctgtggtcattccaggaaacagctgaatacagtttgtcattttttgacatatccttagtattactaattaacaaaaatacaaatcagcaaatttggtgtttgaaaaggacaagcaacagagcatgtgaaatgctcgcagagaaggagagatgactatttccccgaatgggaaggagagggtaagggagtcatgacatcgcattaatatgccaaagaagcaaaaagtactgtgctattttatgccctttcagctttgaggacctctgttggaataagcctaatttaataaatgagaaagtagccttaacagatgccatgtgttttgttcctttttgagtgtaaggaaaaggcaactggcaaatgaggattatgtgacttgagtgacgttttctattttgccccagaggcttttctccctttcatgtttgtgtcaaccgctattcaaagtggagaattagaatacctgggtagggaatgagtgtatatacatccacttacaatttcaactggaatttttttaaaaaaatcatctaccttatgcttgagtagtgatcccttaactttgtcctggtgttattagtgacccaatcacgacttcagatgacccttggtagtctgtcttcttgagttctactgtacacatctgagagacggtttaaattctgtacaattggctagttggaaagaatacaaaaaataaaacaaaatttaagtcacaatttcaggataattgtaataaaattttaaatggaaaatttctatattgtatatatgcaacctatatgacatctaaaattgcctatccggtatagtaacttaatacgtttcttcctcatttgaatttacaattgcaaatgccctgtaagaaaatcctaattactggaaatcaagtattttactaagttacttatttcaataataaaatttttttagttcattgacatacgggagacaagttggctcactgactgacttacacagcgtatccgttcctagattttcaatttttatactaaaaatgttgccactcatttatttactggattaggtacaccactacaaaatcaaacagctcatcttactctttataaaggtttttttgggtccatcatacaatttgtgtcctttacttaaaaaattagaagacataaccaaacaaattatagtaattcacccacagtcccattaccccaagaaaactgtgactagttttaattatatcttccccacgattttcaactgaacacacatgaaagtgcctaatacgttaaatatcttagctcctggacttcatacgacctcacccatacagttagaattaggtactactgagatcgatctgccttcaccttctccagcccagtagcgaataaacaatgtaagtttcagaaataagcaaaagaactttgcagtaaaagagccatggtccacaggccacacatctccctgcaactcaacttcggacccaaacgctcgcgcctccacactttcaggaataaatcctactcttccgcccaaaacggatcgaccaggctcgatctcccaaccagacccgcgtggcccctgcggctgcaacgggtagcacttgacggccgtccgcacttcctcctttgtctttcccttattccttacgtttctcccttgctcactcttccctccttaccctatcggggctgcagacccacggaggccacgttcactcctgcccgtcggccttggcaagcgcgggccccttgtcgcgcagagcggagggtcctgggagatcctgggttggcccagccacaccttgcgccgccgccgtttctgctggacaccaggagaaaaccacggcagctgcagccaccaacttcccctacatagccccacgggatcggatcccactccccactcaccgccagaccggaagcaggaaggcggaagtcgcggcctttgcgtcccgcccacaggcgacccgagccgccagccgggcgtgagtaagtctagggcccagtttccggctgcgccattgctgtgtgggtcttgggacctcgagttggaggacgcgggagggtgggggcgggggcagggcagcgctgagatttccggggagcggcaggtgaggccgcgcggggcgggtgacggcacccgggcgggctcctttccaggctggagcccgagactgccacgtcctgcggggaccaagtggtgggcgaggaggcgtggagcggcttcaggactcgaggagcggttccgaagcagctagggacttttgcctttgccccccgaggtcgatcggaagacaacccccatcccctgctgtagcgggacagttggagggtcatgggtgggtgaagtgtttggctgagggaaactcagaccaaagagcagcggcaagaaagcagttgggtccccacaaaacgcccgaagtcaaggtgagggtcacacaacgactcttgacgattccggcgagttcatcctggtgcacatcccactccatgcctctctcttctggttggacaatagttacatccttacgaaaaggaggcaagctactgggccttggtggatccactcaaccttgttaccaagggacatgccgccatgctatgtgaaaaggggggttttgttgtttgtttttaatttaagtatctaattcgtttcacgaaagaatgatcaataccggcccagagtaaacttgataagtaattaaactgtcagggcatagagttcccatagaggtgcttgttctttcaatacacaaataaagggatgcaaaagtcaacatgcagaaagggtgagttaatattgtcttctaatctacaggaactgaaagattagctaatctggtttggttggtgaccaaattttgtgattgcttgcactgtttgactacctctgacaaatgttgcaagacctcttcactgattctccaaagactatagaatgttctctttcaggagcaagctgcgacatgtttaactagtttaggtaaaacaacaataactgttatttaccagggaacaggcttttggcagataatctaacgatctacgatactgttcgttgggcatatgttaatgtttgtaatgttgtattaccagcagttgttttcttactcctttttatttgaaaacctggatgatagtttcaaagcctatgctgcttaggcctagcctgtaccttagtagccagaaaaagtagactcagtcactggattgtgtgcactgaatacttacttgagataactgatttttctaaaacttccccaagtcttgaatccaagatgtgggcagaatgtattattttaacatccttcgttccagaggccaatgcgtgttttattttaatcatgataggtggttttcccagttactgcctccggatacttgcagtgctgcatccctagttaaaagcccagaagtcttgggcaggaaggaagggcatataaagagaaagcctttgtagttctttagctgtaatctagaccaggggtccccaacgacggactggtacctggtttgcagcctgttaggaacggggccgcacagcaggaggtgagcgatgggtgagtgagcatttccgtctaagttccgcctcctgtcagatcagcagcatcattagattctcatggtgcgaaccgtaatgtgaactgcatgtgcgagggatctaggttgtgcgctccttatgataatctaatgcctgatgatctgaggtggaacagcttcatcctgaaagcatcccccatccccgtccatggaaaaattgttttccacgaaaccagtcctggatgccattaaggttggagactgctgatctagaccatgcctttacaatctaagtttgctcatctagcttcaagttacaggacagtctgcaagaccaggaacagcataggggttgccacagtggagctccttactgcagtctgcattgccttaactaaa

SEQ ID NO: 318557 - DNA, 4001 bp, Homo sapiens
aaaggtatacatggtatgattccatttacatgaaattcaagaacatagaaaactcagctatgatgacacaaatcagaatcactgctatgaagggtgggatgccaggtgggcggagccccaaaagagcctccctcagtgctagaaatgttccatagtttgatctgtgtgtacacccaatgcaaaatcatcacactgtacatgtaatattagggtcctttttcttttcttaacaatattctttaggaatcttttcatggaagacacacactaattgtcacaatctttaaaatggctgatgagttttcgtggcctggaagctcttctatgtgtctaaccagtcctctatcaatgtattttacaggttgatttcttccccggcattcttgctgctggtttccatactgtgctgcatggaggcaaagggaggaacatggactaggattgagtttgagtccttttccttgtgtcgtcttggggcctgagccaaataatttctctgagcctcagtttcttcatctgtaaaatggattttgaaatacactgcaaagtctttcaaaaaagaagaagtggctcacacctgtaatcccagcactttgggaggcggaggcgggtggatcatgaggtcaggagttcgagaccagcctggccaatatggcgaaaccctgtctctactaaaaatacaaaaattaactgggtgtggtggcgggcgcctgtagtcccagctgctcgggaggctgaggcagtagaatcacttgaacccaggaggaggaggttgcagtgagccaagatcgcactgttgtactccagcctggtgacagagcgaggctccgtctcagaaaaaaaaaaaaaaaaaaaaaaaaaaaaaaaaggaaacaatgggactctggtagaatcaaggtgggaaatgctgtggtaaacaaagctatgcagacttctttgttgcaggacttctcagagccttccttacgtgaatgagcagcgtcagtcttcaggaggggatgcgggtatgcagccttccccaagccacagaattctgtaaagaatgtttctaaaaggagcattcctggggtctggtgtctatggaacactttttaggaaaagccgcagcatgatgggtgcccatgaaggcccctgttatacgctacaaggtccagcatatagaaggcgctcggtgcatgtatagtaaattaatgagtgaacaagtcttttgaaaacagagacagcagagctcattcattcattgctctgcttaaaacccgtcaacagcttcttcttatcctcagaataaacccttgctcagggttctcatagcagatgaacctggtttcagggagttctaaaatcagatggatgtgttttcaaatcctgatatgtcccagttgtacggcccttttgcctttctgggcctcagattaccctctgtgaacgaggttgatagcatctaagagatggggtgtggatgcaccaggctgtgtgcagcaagcattaatgttttccattttgacgaaatcccacatgagttttgaatttcagccctgagaatgaatcctccaggagcgctccaattcaggagtattatcagttcattcgttcattcagcatctacttggcaccaagcaccatgctaggcactagggattcagcagggaactaaacaaaaagcccagtcctcctggaacataccttctgctggcagtgctgagaatttaataagacagtgtcagtgatggccccggcaagaagtgcctaggcccctaaactgtgctccatcagagtgggatccagggacggttgggtccaagattcattccgggctttgagggacttctagtctgtctggagtggcaaaaggagcccagatgggaggaaagcagcatgtacctggcctggcctcacctgcttctcgtcatcacagtggctgccccttctccgttcaagcagctgggctgccacctgctctgctgccacctgccttctgctgtccacttgctgggttgccatggcctcagatctggctgcctgggtggaccacactcaacagacagaagggcacccttcccctcccccacctgtggtcaccaggcatcctgcaaacattgagttctgatgtcacagaaggtagggacagcaaggttcccacctttccaccaccctgatttttagtcccttccctcatttttatttttcacatgagtgtagaaaacaaagatcaggaagaaatgcatcaaaagattatgtttcaggatgatgatttttctgattattttcttctatatttgcaagtttttaataaaaatgctaattctaaaatataaaaacaatagtttgggtgcagtggctcacacctgtaatccctagcactttgggaggctgaggctggaggattgcttgagtccagaagtttgagactagcctgggcaacatggtgagaccatgtctctatttttaaaaaattacaaaaaaaaaaaaaacaataaaagctatttttaattgaaaaatgtatggagataattgtggattcacatgcagttgtaagaaacaatacagagagatcctgtgtaccctctatgaatttttcccccagtggtacagtaatatcctgcctcactgcagtaggagatcacagcctggatgtggacattgatacactctaccaatcttacgcagacttccccagtgttacttgttctcatttgtgtgtgtgtgtgtgtgtgtttaattctaaacaattttgtgtaggtttgcttacttaggacaatagtcaagacacagaagagtttcaaaactacaaggggctttgtgctgcttcgtgatggctgctgcctcccgaccccacccacactgtccttaactcctggaaatcactcatctgctctctctttctaaaatttgtttattccaaatgctacataaatggaatgaaacagtatttaacctttggggattggctttaaaaaaaaacatagtataattccctggaaattcatccaatttgttgcatgtatcagtagttcattctttttgactgctgtgtagtattttgtgatatgtgtatgccataatgaaggacacgttccaaacctgttcaaaacccagctgcctccagtttttgactcttgcgagtaaaggtgatatgaacatgcttgtacatgtttttgggtaaacgtaagtttcatttgtctgggataaatgcctgagagtgcagttgctgggccatagcatcatggcatgatagttttataagaaattgtcaaactgttttccagaatggctgtgccattgtacattctcattaacagtgtatgagtgatttggtttctcctcatccccaccaatatctgtttacactatttgttctttttttttttgagacagagtctcactctgtcgcccaagctggagtgcagtggcacgatctcggctcactgcaagctctgcctcccgggttcacgccatcctcctgcctctgcctcccgagtatctgggactacaggcacccgccaccacacccggctaattttttgtatttttagtagagatgggatttcaccgtgttagccaggatggtcttgatctcctgaccttgtgatccgcttgcctcggcctcccaaagtgctgggattacaggcgtgagccactgcacccggctgttttcactattttttaatttaaccattttgacaggtgtttagtaacatctcattgtggttttaatgtgtatttccctgatagctaatgatgtttaacatcttttcttttttttaaattttattaagcaattttttattattttgctggagacagtgtcttgctatgtttcccaggctggtcttgaacttctgggctcaagcaatcctcccacctcgggctcccaaagtgctgcgattaccggtgtgagccaccatgccctgcccgaacgtcttttcatattagcttatttgccatctgcaccccttcctcagtggaacatttgttcctgtcttttgcccatttactaattg

SEQ ID NO: 318558 - DNA, 4001 bp, Homo sapiens
gattccagctggtccagaagaaacaagtgcagctgcataagtaagagcccagcctggccctcaatcagaataacagcccctgaggtttgtttcaatttgtggggggggcggggggggttacacctttcatcctttcactcagtacatatgtatggagcacctactgttagccaggccctgctccaagagctgagaatgcctcagagatgacgatagacaggcagtccctaccctcaagaaactggcatgggggagactagggagcaaaacaaccagcaactggaacaactacgtcctcaggaaagggacagctaaccagcaggagggagcttgaaggaagccttctctccaagatactttgctcatgtcctttctcctttgctttctgcacgcagaaaatgttttcccaatttcactgatggaaaaacaaggatggtgaagcagttagtgacagaaccagggctggaacccgccactcctgactccaaactcctggcgccttctacacggggcctcgagaaaagcgggacaggtaagtgcaaagacccaaacccagcgcagcgcccaagcaggtgctcaggcccgggcgctgaaccctgacgctgggcctggagagccaggaggtggcagtctgcccgaggaggaggcttcccgagaaggcaagggcagcggacccggagagaagccagtctccgagtggggctggggttcgcccacccaagctccgcctcccccaggcccaaaattctgtgcactaggaggctcgaacttaagagctgacagcaggagaaaaaggagggggtgagggcaagaaatacaaaagtgatgaaaagggagaaatggggaggagagaccggacataaagaagaacgttgggagcccggggaaaggggccgcactagaggtaggtcgcgaatccgaagagctccgctctgccagagccccacaaacaatcccccggtggccccactcaccccagatggcggcgagtctgcggaaagttcctgggtcagggatggctcggtgcttctcagggtccccaggactgcacgggatctggcagctggaagcgacccccaggcctggaacctcagccctaggcagctcctggaacgtgccccggctcctccgagccccgggaggcgggagagcgcaggagcggccaggacgcgctgctggctctggaatgcgcggctgctggggaccgcccccggaacgcccggtcccggggccccggcaactccagctcagctcctcctccagcgtcccctgcgggctgcgttcggggagaaaggaacctgcgagagaagggagagaccagggcgtctcgggctccccttccacgttgccacacactcgccgcgtagccgtggacatgtcgcttggcttctgagggtctcccctctctggattgtaaaccgagagggttggcctaaaatgtgtcctccacgacctttccagctatagagtagacatgggaaagaaagcctagcaagtaggtttggacagaggagccgggactcagatcctgctttgcgatgtccgaagtgtagggtccttcggaggctttgccactctgtttcattctctgtaaagtgggaaaggtaacacctgtctcccagtcctgttgtgaggattggtttagaggaccagtgtgaagctggttggttctctgccataacatgacttggagcatcctgtttattttgtgataacaatgaaatagcccaatccaaggtgatcaagagcccattagaatccagcatctgagaggcttcccacgccactgtgggtggcccagcttccacgcaggacaatgccaattctgtaatcttctgccccctctatgtcatccatggagtgaggggggactcccgtcccatgttggcacccacactttttaattcacagtggttttctttaatcttactcttctgaaaaaaaggagcacaagccttgactatcagtgagaccttgagcagtcttggagcccagtagtgttttggagggtttggaaagagccatactgccttccccaggcctaaatttgatatggtgtgggccccgaacttagaacttactccatgctgtttcctctgattcagggatgaggtcagcagaaatgacctctaaatcatcattatcacacgccagtttcttaagggaaggacagtgaggatgaaggggattcacatgagaaatgatttgagaaaaaccctaagggctgtcacccaacaacatgttttattcaaaagagatagtgtgggaacctaaaaacaaggacaacccaattctgaatagtttaatacaaagctctcatttaatagtaaaaaaagattgaaggaggacaatcttttttttttttttttttttttttgagacggagtctcgctctgtcgcccaggctggagtgcagtggcatgatctcggctcactgcaacaggaggacaatcttaatatgacattttccctggttagtgaaggggatgagagttcctttgggtggacaactggtaactccatgtgccctgctgtgaacattggcttccctctgggacaaggcagaagctcaggcctggagccagctgagtcctagtctccctttccatttagcaatttattagtatctctttaatatcgacttgccctgggaccctaaaagcaagccagaaataaagtatgaatccccacaggagcataccatgttaagtctgctgcctaggctagactgattttgcaaagagagcactgaagggaagaataatggatgctgtgttgggatgcaggagtgggggaaatagtcaatttcagcaacaagcttttgttacagcaaaagccagaaaacagctcacaacttccttggtcctctattacaaccactccaaagagaaaaccatcaggacctgaaagaaataagtaatactctcttagagagcccctgatactttggggaacttgtacagaagaagttgtagtctaatgacattggctgccatcaaaagacggccttggccaggggcagtggctcatgcctgtaatcccagtactttgggaggccgaggcgggcagatcacctgaggtcaggagttcgaaaccagcctggccaacatggtgaaaccctgtatctactaaaaacacaaaaattagccaggcgtggtggcgggcgcctgtaatcccagctactggagaggctgaggcaggagaatcacttgaatcccagaagcggaggctgcagtgagccgaattgccccactgcactccagcctgggcaatagagtgggactctgtctccaaaaaacaaacaaacaaacaaacaaacaaaccactgcctaaagaggcccccattaggatgcaatccatagcaaataccctctttaagaatcatatctacacgagacattttcttttcatttttcacttgtacaaatatatttatttacttttggggaataatatgacatattgtattagaaatcagaaaaccagtatttcgagtctgtcacccagtagcccacccaagctccataaaatagtaaaatgagacctattcctcacatctggtacaattatgatgagtaaatattttattcatatacagcagacccctgaataacatccttctgttataacgttgatgaggaaaaaaaattgtttccctgctgggatcaccgtctgtgtggcatttgcatgtcctccccatgtcttcctgggttttctccaggtaccccggtcagtttcctcccacatcccgaagatatgcatgttaggcaaactgctgtgtctatgtagtcccagtgtgaacgattgtgggtgtgggtgagtctgctctgcgatgtgatggcgtcctgtccagggctggttactgcctcgagccctgagctgccgggacaggctctggccactgaactctaaactggaataagcaggtaaataattctcttccttgtttttactaatctttcttaaatgtatgtatggttcacaattatttcagtgttcaa

SEQ ID NO: 318559 - DNA, 4001 bp, Homo sapiens
ccatcctatctgcccattcacgtatcatagatgtgttaactatatagctgtcaccaaaagaaccgctaatgtttccaacaaaggccaaatccatcccttcttacctactctaggacattgctctagccattgtcttctttccgacatcaactttcccattctcatctttcctatcaacccacaaacatgctgaaacatgttgctcctatcttagtgcagtggctcacactagtaatcccagtactttgggaggcagaggtgggaggatagcttgaggccaggagtccaaggctgtagtgattcatgattgcgccactggcaccccagcagcctgggcaacagagcaagacccccctcttttaaaaccacacacacataattaaaattcctcttaactcacttccccctccatttattgcccaatttctctaccctccatttataataaaatttcgtggtggctcactcctttaggcccagcgactccaaaggagggtcgcttgaggccaagagatcaacgctgccatgggctaggatcatgccactgtactccagcctgggccacagagagcgaacttgtctctaaaaaaattttttttaaatagaattccttgaaatatgcctaccgatgtttttattatttatttatttatttatttatttatttgagacggagtcttgctctatcgcccaggctggagtgcagtggcgcgatctcggctcactgcaagctccgcctcccggcttcatgacattctcctgcctcagcctcccgagtagctgggactacaggcgcccgtcaccacgcccggctaattttttgtatttgtagtagagacggggtttcaccgtgttagccaggatggtctcgatctcctgaccttgtgatccggccgcctcggcctcccaaagtgctgggattacaggcttgagccaccgcgcccggccgtttattttgttttaagacagggtctggctctgtcgcccaggctggagtgcagaggcgcaatcacagatcactgcagcctccacctccctgagccttccaaggcctgaaccttccaggtagctgagaccacagacgcgcaccacaacacccgtctaatttttgcagactcggagtcacactatgttgcccaggctggtcaaatgttgccttggatttctcttctcctactctccaactcactccagccaaattcacccctaccatgctatgcccaagactgaactcctgagaaacctgctctactggcaatcttctctttcccacctcagcaaaaggcaactttatcttttcaactattcaggataacctccgttatcgaatctatctgaaaaacctgttgcctccgatttcaaaatatacccagaatccaaatactttcactctgttaataacatcttgttctgaagttcagatcatcttaacagactcctaagtggttcccctgcttcaccctggcctaatgcccccacctcccccacaccagccagagaggagtgaacaaaataagctactgccaagtcgcggcagggcctccactcaacgctatcaaggagcccaaactgctcgaggaaggagcttgcggatgtggttcgcagggaacggagtgggaaaagacgtagaaaaacgcggaccacaactccagtgagcggatcgacttgatgctgtcccgaggctgcggaaggagagttgggccggaagaagggtgctgagagcgctaatagggagactgcactggctgcgacctcacctggcctgtgccgcgccggaacagcacggaatcctcctgctccgggacgccgccaccactgccgccgctgctcatcgccatagcaaacccgcgggtgcgcagcgtggggccccgtcccttcttaagagtgacgacttccgccgcccggggcttctgggagcggaacagtacggtggccgggaggaccgcttgtagtaacttctcacgctttctacgagtggttatcgccctcccacatttgtggcgtgtatatttttcatttctctcaatcctttcatttcactgtgttatatttcctttccttttttttttgtttgtttgttttgagacagagcctcgccctgtcgctcaggctggagtgcagcggcgcgatctcggctcactgcagcctcgacttcttgggctcaagcgatcctcccacctcagcctccccagtagctaggactataggcgtgcgccaccaagctcagctattttttgtatttagtagagacggggtttcggcatgttgcttaggcctcgtctcgaactccagtgtgtgtgtgtgtgtgtgtgtgtgtgtgtgtgtgtagatatttattccccctcccccttggaaaagtaaatgtaagctcctactaggaatttaaaacctgcttgatctatataaagacaaacaaggaaagacaaacatgggggcaggaaggaaggcagatccttaaacactagaagatatttgatcccccaaccttatttgttgtttgttttgagacggagtctcgctctgtcgtcagagtgcagtggcaccatctcggctcattgcagcctcgacctcccgagctcaagcgatcctcccgcctcaacctcccaagtagctaggaccacaggggcacgccaccacacccggctagtttctgtatgttttgtagaggcggcgtttggagcatattgtgtaggctggtctcgaactcctgagctcaagatattccgcccgcctctggcatcccaaaatgctgggattacaggtgtgagccacctcgcccagcctccagtattcttttttttttttgcgacagagtattgctctgtcacccaggctggaatgcagtggcgtgatctcagctcactgcaacctctgcctcccaggttcaagcaattctgcctcagccccccgagtagctgggattacaggcgcccaccaccacacccggctaatttttgtatttttagtaaagatggggtttcaccatgttggccaggctggtcttgaactcctgacctcgtaatccgaccgcctcggcctcccaaagtgctgggattacaggtgtgagccaccacaccgggcctccagtattctttattaagcatctagggttgctaaatggcttatatgtacatagtatatatatatttttaactccacgaaaggaactttgagctcttcccccaaaatacccttggcttctatatagtatacaagaaatatctgtggaggaaggggagaatgggatgatgttgaccaagtgtacaaaaatggtaactctgtagaggtaatatgtggaatgtaatcatttcacaatgtatatctaaacatcaaatggtacaccttaaatatatacaatttttaggggtctggtacggtggctcatgcctataatcccagcactttgggaggccaaggtgggtggatcacttgaggtcaggacttcaagaccagcctggccaacatggtgaaaccctgtttctcctaaaaatacaaaaatcagccgggtgtggtggtgcaggcctgtaatgacagctgcttgggaggctgagccaggagaatcacttgaactcgggaggcggaggttgcagtgagccaagatcacgccactgcactccagcctgagtgacagagtgcgactccatctcaaacaaataaatatgtacaatttttatgtgtcaaaaaagttaaattgtcacaagataaaaaaaaaaatttaaatctcatgtcaggaaagtaatgtgccaaaggtacatctcacagataaacatgaaaacctgccctccagcctgggcgacagagtgaggctgtgtctcagaaaaaaaaaaaaaagtaaaaaaaaaagtatgtttttataaagcttgcttagatttttctgaatcataaaaattctcacaattgcatttgatgtcaaaatttaaacaaattacctggacatattacatgatggttaaaaaaataaatttaaacaaaatatagaaccaggtttctttttgtttttt

SEQ ID NO: 318560 - DNA, 4001 bp, Homo sapiens
ccatcctatctgcccattcacgtatcatagatgtgttaactatatagctgtcaccaaaagaaccgctaatgtttccaacaaaggccaaatccatcccttcttacctactctaggacattgctctagccattgtcttctttccgacatcaactttcccattctcatctttcctatcaacccacaaacatgctgaaacatgttgctcctatcttagtgcagtggctcacactagtaatcccagtactttgggaggcagaggtgggaggatagcttgaggccaggagtccaaggctgtagtgattcatgattgcgccactggcaccccagcagcctgggcaacagagcaagacccccctcttttaaaaccacacacacataattaaaattcctcttaactcacttccccctccatttattgcccaatttctctaccctccatttataataaaatttcgtggtggctcactcctttaggcccagcgactccaaaggagggtcgcttgaggccaagagatcaacgctgccatgggctaggatcatgccactgtactccagcctgggccacagagagcgaacttgtctctaaaaaaattttttttaaatagaattccttgaaatatgcctaccgatgtttttattatttatttatttatttatttatttatttgagacggagtcttgctctatcgcccaggctggagtgcagtggcgcgatctcggctcactgcaagctccgcctcccggcttcatgacattctcctgcctcagcctcccgagtagctgggactacaggcgcccgtcaccacgcccggctaattttttgtatttgtagtagagacggggtttcaccgtgttagccaggatggtctcgatctcctgaccttgtgatccggccgcctcggcctcccaaagtgctgggattacaggcttgagccaccgcgcccggccgtttattttgttttaagacagggtctggctctgtcgcccaggctggagtgcagaggcgcaatcacagatcactgcagcctccacctccctgagccttccaaggcctgaaccttccaggtagctgagaccacagacgcgcaccacaacacccgtctaatttttgcagactcggagtcacactatgttgcccaggctggtcaaatgttgccttggatttctcttctcctactctccaactcactccagccaaattcacccctaccatgctatgcccaagactgaactcctgagaaacctgctctactggcaatcttctctttcccacctcagcaaaaggcaactttatcttttcaactattcaggataacctccgttatcgaatctatctgaaaaacctgttgcctccgatttcaaaatatacccagaatccaaatactttcactctgttaataacatcttgttctgaagttcagatcatcttaacagactcctaagtggttcccctgcttcaccctggcctaatgcccccacctcccccacaccagccagagaggagtgaacaaaataagctactgccaagtcgcggcagggcctccactcaacgctatcaaggagcccaaactgctcgaggaaggagcttgcggatgtggttcgcagggaacggagtgggaaaagacgtagaaaaacgcggaccacaactccagtgagcggatcgacttgatgctgtcccgaggctgcggaaggagagttgggccggaagaagggtgctgagagcgctaatagggagactgcactggctgcgacctcacctggcctgtgccgcgccggaacagcacggaatcctcctgctccgggacgccgccaccactgccgccgctgctcatcgccatagcaaacccgcgggtgcgcagcgtggggccccgtcccttcttaagagtgacgacttccgccgcccggggcttctgggagcggaacagtacggtggccgggaggaccgcttgtagtaacttctcacgctttctacgagtggttatcgccctcccacatttgtggcgtgtatatttttcatttctctcaatcctttcatttcactgtgttatatttcctttccttttttttttgtttgtttgttttgagacagagcctcgccctgtcgctcaggctggagtgcagcggcgcgatctcggctcactgcagcctcgacttcttgggctcaagcgatcctcccacctcagcctccccagtagctaggactataggcgtgcgccaccacgctcagctattttttgtatttagtagagacggggtttcggcatgttgcttaggcctcgtctcgaactccagtgtgtgtgtgtgtgtgtgtgtgtgtgtgtgtgtgtgtgtagatatttattccccctcccccttggaaaagtaaatgtaagctcctactaggaatttaaaacctgcttgatctatataaagacaaacaaggaaagacaaacatgggggcaggaaggaaggcggcagatccttaaacactagaagatatttgatcccccaaccttatttgttgtttgttttgagacggagtctcgctctgtcgtcagagtgcagtggcaccatctcggctcattgcagcctcgacctcccgagctcaagcgatcctcccgcctcaacctcccaagtagctaggaccacaggggcacgccaccacacccggctagtttctgtatgttttgtagaggcggcgtttggagcatattgtgtaggctggtctcgaactcctgagctcaagatattccgcccgcctctggcatcccaaaatgctgggattacaggtgtgagccacctcgcccagcctccagtattcttttttttttttgcgacagagtattgctctgtcacccaggctggaatgcagtggcgtgatctcagctcactgcaacctctgcctcccaggttcaagcaattctcctgcctcagccccccgagtagctgggattacaggcgcccaccaccacacccggctaatttttgtatttttagtaaagatggggtttcaccatgttggccaggctggtcttgaactcctgacctcgtaatccgaccgcctcggcctcccaaagtgctgggattacaggtgtgagccaccacaccgggcctccagtattctttattaagcatctagggttgctaaatggcttatatgtacatagtatatatatatttttaactccacgaaaggaactttgagctcttcccccaaaatacccttggcttctatatagtatacaagaaatatctgtggaggaaggggagaatgggatgatgttgaccaagtgtacaaaaatggtaactccgtagaggtaatatgtggaatgtaatcatttcacaatgtatatctaaacatcaaatggtacaccttaaatatatacaatttttaggggtctggtacggtggctcatgcctataatcccagcactttgggaggccaaggtgggtggatcacttgaggtcaggagttcaagaccagcctggccaacatggtgaaaccctgtttctcctaaaaatacaaaaatcagccgggtgtggtggtgcaggcctgtaatgacagctgcttgggaggctgaggcaggagaatctcttgaactcgggaggcggaggttgcagtgagccaagatcacgccactgcactccagcctgagtgacagagtgcgactccatctcaaacaaataaatatgtacaatttttatgtgtcaaaaaagttaaattgtcacaagataaaaaaaaaaattttaaatctcatgtcaggaaagtaatgtgccaaaggtacatctcacagataaacatgaaaacctgcactccagcctgggcgacagagtgaggctgtgtctcagaaaaaaaaaaaaaagtaaaaaaaaaagtatgtttttataaagcttgcttagatttttctgaatcataaaaattctcacaattgcatttgatgtcaaaatttaaacaaattacgtggacatattacatgatggttaaaaaaataaatttaaacaaaatatagaaccaggtttct

SEQ ID NO: 318561 - DNA, 4001 bp, Homo sapiens; identical to SEQ ID NO: 318559

SEQ ID NO: 318562 - DNA, 4001 bp, Homo sapiens; identical to SEQ ID NO: 318560

SEQ ID NO: 318563 - DNA, 4001 bp, Homo sapiens
ggaattaggaaagttgtgacagagtagacagagaaatgcatttgctttagtcacttccttttggatatcaacaaatggtaaccgtcaaattcatgaatgcagcatcatttcaaatctactatctgtaacttttcttcatgaaatgcttgctacggagaaaatgaaatttacattcaaaattataccccttcttttcaaaatcccatgctatattttatttctaactgaggtgtccaaaagatccttaagagaagcactatcttttactttctgattccagacctgttaatgcatacatatttagttatgggtaatcctcagttaatactccctttccagagagacttccgcgatcagtaccgaaatattgcaccttccaaaaagtcttgaggactgcttaaaggtgtctccttgtactctaaccatgctgaatgtaatttaacattgagatgcatcagaaacagtcaatagactttctctcccagatgtgtacacattagcatactgctttcctacaccttgttctttgccttttaaattttcaatatgtacaaatgaaatacagatttcaacccattcccaattgggatgtctgctccataaaagaaaaataggtttttcccttcctacagattcagcaacgaaagtagtgcttgaaaattacgtgtttagagtgacaccttggagaactgacatactgtgcacacatgtaatcctcataaacttccccagacagcccttatttcattttgcaaactgcaccctggccaggctccacggcacgtggtgtgtggcgagactgtcctgcagcagttctcccgtcctccgggctctttgatgggcacttgtcagtaacagccaagaggaatccgatcctgcctccagcaagtgaaaaggggcaccgacagtaatgcttccttaattaactttcccaaggaaagcaacgttcccacaggaaaaaacaacacgtttcccccctcctagccgtccattgaaaatgagcaacaatgctgttgcctttttgtttcctaagactttcttcgctgcaagcagtagcgtgttcctcaaagaatgctagtatttcctgtggaaactgtatggctgccagtaatggctcataattttccctcttttctcttcgtaaaaatgaaataaacaaaatgtggcctttgacaattagctaaaattgggttcaccccacttaccacctgcagatgaaagtcatcgccaagagacaaggccaagagagaaacattcccctctgaaatccacgcggaccagcctgggacgcagaacagcactagagggaggctggcggagcccgggctggacagggcagtcggggagctggtgctgatgagcgaggggcggcagcaacaccagacgtcccttttctacagctattattaccgttgttagtactgtcgctattactattacttcgcccctccttatctcagcttttccgagccgcggaactgcccatccctgcctgcgataagatcccgggtgacagcaagaataagaaccacatgaggcgggcaaatgaaaagaacaatcctttggaaaccgaggcgggggttgtttccccctttccccagtaaagcagccgctgccgccaccactgttactgttactatagagacctccccctcaaaccctttctgcagaggcgcctctgctgcccggagcagccgagactcgcggcacaaaggggtcccggggcttggggagcacggggcgacacccgccggggtcgcctggtgcaaacttggaaaggctgagccgctggctgcccgcctcccgcctccccgcggcgtccgcttgggacctggactcacccggggcgcccggcgcgccggcggctcaggagcgcgaagggactgactgaccgaccgacggaccgcagcggcaggagcagaacagcctcagccgaagtaggcgggcggtggaggcgctgccgcggccccgctacgtcacaatgcggcccggccgcgggcgccgctccccgggccccccaacgggcgcgcgcgggcgggggcagcctgggcggccgcggcccgaagccggcgctgggggacaaggaacgcagcgcgggcgcccggccggggacgggggcgcggccaccactgccactgcggaggctgccggggccgccgcgccctcaggctgcgctgcgcccctgcggccgcccccaggccagcgagccccgctcggcctgactgacagcgaccctccccgcggcgcccccggctcggcccacgcccctccctcgccgcttcctcaccagggatcccccggcctgcccgccggctcctgtccacgaacctgctctttctttacctttcgctctttttacctcgactgccgttgcttttccccagctggggctctcctctcctccccgcctactttttgtccgcgcttcccacttttctcctcctgccccccacccccttccttgcttcttggcctctccccctggaaatcgccccctcaccgtgatccaagcgttaaccgctgccatctcattggtccccagaccattccagggttccagcataaactgggagaagagactcgggaaggcggggaacggaaggtgggcattgccctgggaaactcatgtctgagaagccttttggcagagtattttgcgttggcacggagtcttcacccccacccctccccccgaagctcgcccacccctgaggacgtggccaaggagaggagggcaagggtggctttgcctgcctggaatgttctgtgctcaagtgtgggtggatggagaagatgttaggctgaaataaagactttttaattcaacgacgtttcagtgtaccaatggccctacagtaatattatctttacttttattgtctcttaattgttgagggattgggggtgggaggctgctggatgaggcgtaagcaacgcctgcagtggtgactacttctttccttatttccgaaatgaaatcaggggttgtggaagcatttatggtaaccttggctcgcgactgtctcgctgttgccctctggaaagctttaaatggtctttgagaaatctctttcccaggcgagatgacttggagaagttcactcagcaaagccattgaggaccacactcttgttccagggtatggctgcttgcctgatgctgccccagagaaaagcatgaggaagtaagtcttggtcagtttagaggcatcctcattcccatgcctgttccagaggacaagagcgacgccaagatcctaggacacccggcactatctgagtagtggcaatggggatgtgtgatcttgttacaacaaaaaaaggaaggctctggttgtttaaagctggggtttcctgggtaactagcctaagactgcctgcagtctttgtggagtccacagtgtactaggagggcatagccggagtaatgcttgccctggacctgttcggaccaggaccatcgtcattgaaatgaggactaacttgaatgccagcagaagacatttcacatgcgtctaattccatgtcctactgaaaacctaaatttctttctcggcttttgacataaacagccaagagcatgtccggcggtgttgtaatttgtttattgtaatttatcgtgtgtaagtcttaagtacatacatggaaagtggcttcacaattttaaaaatacacattatcccccagtagaaaatataaaattggatgacatcatgtggcactaaaaatacttgaaaatattgggtttaatttgttcacatctggttaaaataaaactgccttttttttttgcctagtgtaaacttcgagaaaagcacatcttgctttcatccagtagatatggatgggattggtgtcacccttgacatgatctacagagaacatacttcatttctattctcttaaatattttgacactctgttttctgaaaatcagattttaatttattgaaggaatcatttattgaagaattgtaaatggtcatctccttccaactgtcc

SEQ ID NO: 318564 - DNA, 4001 bp, Homo sapiens
cccatcgctctgacctcacctcctaccactacttcctgccctgcccccagctcaccccagggcctttgcacctggcttttctgcagccctgcccccctcttattactcagggatgaggcattctcttcagggagccactggatgtcaactcgcactgctgaaatgctctgtatcaccatcaggagatcaggaaccattctttcctgttcactgtgaaaccccagcatctgcaggatgcctggcacatagtaagtggacacaaaatatttttcaaatggccacaatccaaatatgccacgaccctgggcaagttatccaaccctggcctttcttctgataccagccagtggttgcaaggaaagtggacggggaagagagctggcaaaggtaaaaccacaagagttgtgatgcaggtggacctggaacgcaactcaactcggccttggaggtgctggagggaggcgccacaaggggaggggtggggcttcagaatctataaagctccgttcaaaccccagcttcagcatttaccagctgctgaccttgggcaaggtacttagatctctgggaagcccagtttcccttacctgtagaatgggccgaagcattacatgaggaaatggatgttatgacattttacccagtacttggcatacagaaagtgttcaacaccagataactattaataatggtaaaaaagataagaaaaaggaggctgtctgctttcatcactgcactggtccctggcctttcagctggagccccccacctcatcagcccgccccgtgtccccatttccggatacagacccaggcttctatgggctggctatgtcccctatgacccctgctgacctcgccccatctgctgactcatattctcctgcccagaacccccctccccgggacccggccccagctccacactgtcgggggacccccagccctgcagccccagaaaccccgccccttacccaccgacgtagaggacgccctccttggtcttctccgccgcctcggtgaccccctgcttggttttctccgcggctgccacaacgccctccttggccatggacaggcccttcatgaacacgtccatcctggcggcctggggagggcgatacacgggcaccggtgcactggccccgcactctcaccccagcccctcccgcgggacgcagatgcccccctactcccgagaccgcggcgcccttctggaccctgagccccctcccgctttccccccatcccaccccactccccagtgcgaagcctcagggccgcggagagtcctagcgtccttgaaacctggggacgcgggaggggccactgcctcggttatccgggccctgcaaactgcagccccgtcgaaccggagtgctgggttcggcgcgaatatccaggacccgcctgtacacgcacggcacagtcacacggtcatgcacacaaacatacaccacggacaagctcacgtgcacacacaggacacgcagacgctccaacgcgcacgaataccccgacccacatgggcgcggacacacgtccccacagccgcccgggcagctgcaaacaccggagcatactcacatactccggggtgcacactgacgcgcatcccccgggtctccctccattttccatccccttccccagctccctcctgtcgccccagtcccctctccatcctcatcccgttccccatccccggcgcgcggccgcctcacctggatgcggggccggggctggggatggagcggcggctgcggcgggcggacgcgggggctccgctaggccaggccggggtggaccaggggccggaggggggatagggccgggatcaggcgctcgggtcgcgggtcctgagcaggagcgcagcagtgcccgggtctcgggtgcgtagccagccaccgctcgttcctcgcgccctgcgagctcgcgcgctccggctccggctccggctccggcgctgcggcagctctgagctcagcgcccccgctggcggccgcgccgccccttcggcctgactgacagggggcggggagggtgacagcgcgtagccgatgagcctcccggggcgggcccgggacgcgcccctgggggccccggccgtaagactcgcgtagtctgttgggagttgagggagggggacaacgcggcgtgtgaagagtggggaagaaatcacgcgactggatttggagttctgctgggctcgaatctcagctgtgctttttattaaccgtgggaccttgagctactcggctctcctttctgaatgacagtttcctcctctgtaaaacaggaatggttaattcaacgaatgtttactgagcgcttagtccagtggtgcaggtttaaggctggaggcagcggaaaaggaaaacaaggttcctggtctcgggaagcttaccatgggggtgtctgtacgcgtgtgtgttcgtgcgctcagtggtggaagacaggacagaaaataaacggatcaacatccaaagcaacaaggtcattacagcttgtaagttgtgaaggtaacggtgatgtaacacggggactagaggaggggtgcttgagacagggtgctcagggaaggcctctaccagcaggtgaattgtagcagagactccagagaggcaccatgacaccacgatgggtgaggacaagatccatagagagtgcaagtgcaaaggctccaaggcaggactgtgctgacaaaagacagcgcagctggagagccaggatggagggaggtggagaacaaaaccacttttttgtgtgcttacggtggggactgtcaaaatgatcacagaatgccaggcacacagtaggccctcagttggttctatgatagaattatgcccaagaagctgtagtatcccagaggaaagggactctgacaacttaggggagtcaggaaaggacataaaaaagaggtgacaactgaactgtggcctgacaggaaggggactatttcatcgagcaggctagggagaaagagaattttaggctgtgggtacagcatgggcaaaggcactgtggccagaaatgcagggtgtgtaagtgacaggtaattaggcgagggggccaccagcagccagactgcaaaaaaaaaaaaaaaggaaaaaacccaaccaaccaaacaaaaaacattcacaggccgctggtagaactgcaaattggcgcagacattttggaaggcaatctggcaatgtttaccaagcataaatgcatgcgcctttggagccaacagctccccttccaggaattgatcccgtgcgactctagccatacatgcacacaaagatacctgtgcaaggatgttcactgtagcatgtttttttgtagcaaaaaactgaaaatgatctaaatgatcatctgtacaggactggctagctaactgtggcacatccacccagtgcaatgccacactatggttggcaaagatgagctagacccatgtgtgctgacatgggagtgtgccaagatgtggtggtaagtgtgagaagcaaggtgccaaactggaatgtgtggaatgagccaattttgatacaaagggaattatattttatgtataagtacttataattttctatgtgtcaaatatatattatatactaacatatacatacttatcacatactatatacattatacacagacaccttatatacaaacatacacatatttatggctagatatacaattcttttttctttcttgtttttttgagatggagtctccctctgtcacccaggctggagtgcagtggtgcaatcttgggtcactgcaacctccacctccagggttcaagcaattctcctgcctcagcctcccaagtagctgggattacaggcatgtgccaccacgcccagctaatttttgtatttttagtagagacaggttttcaccatgttggccaggctggtctcgaactcctgaccacaagtgatcggcccacctaggcctcccaaagtgctgggattataggcatgagccacctcacctggccac

SEQ ID NO: 318565 - DNA, 4001 bp, Homo sapiens
tcgaggaggaagctgcctgtcgagcaatccaacttacactctagggaaaagacccaggcgtccacgtctctgctcgcttcctcacctgtagaatatgattctgaaacccacagtggtactgctgtcaaagtcgcccctttcagcctgcacaatacactccatatcacctgctctaagggccaggctttacctttctgaacgtggatgatgtccgggaagttagccagatgcccctgatacagcgctaataggtccatgacgggatccaggtcctgcctgggctgctccgcgaagagctcgccaatggcgtcataggcatctccggtgaaggcgatagcctggttcaggcccaccgagaaggcctgctggtccagctcaaaggcctggctgaggccgcggaaggactggcccaccttctgatactcctttttgaagccggtcacctgcttgcgcgcgaactcgttggccgtgtggttgagctgcagcgcgctgtcgtccatcttcttggtgaagcacttgaagccgtcgatcttgctctccacctcctgcaggtcaagggcagcggcggggggcgtgctaagggtcaggaagaagttggcgcccaccatctcgtccttctcggccttcctcttgccctgcttccaggctttctcgtcggtgctgctggggcacgtcaggaagtgctggaagacgtcgcactgcgccagcactgggtggctggccatgtggttcatccaccagatcaggcccttcctgcgcttagagatgaagtcctcctcgaagcggccggtggcctgcttctcgggcaggtggggcacggagatgaccgggaacttctccgccaggcgcgcgtacagccagtcgaagtgcttgtagcgccgatgcaccggcacctgcgtgtgcgtgggcaccagcttgtaggagatgtagctcttcatgcccttgaacttggtctgcttggtggggtcgtcgatggtgcactggaacgggtaggggttctcctgccactcggggccatagggccccagcaccacgcacagcttgtccccgtccttcacgaagcctgacgcctcccccagcacgaaggcctccccgccggacttgacgaaggtggagaagcgattgaggttgcggctcacggtggccgagctcttgggccccgacgggtggtgctgcggggggaccgagccgccgcgggaacccagggacaggtcggagcgcgtggacaggcggtagcggccggctgcgcccacacccgccgaagacgagccgtcgaggtccgggtatgctccgctgcccagagcgcccggctcgtccgccaccgtggagctgtcgtcccactcgtcgtcccagtcatcatcgctgccttggctggcctggtagccgccgtagagctgctgaggcgacggctgcagggcgcccccgccgtacgggaagcccgcgccgggcggctggaaggtgctcggaggcggcgcctgctgtggctgcagcagcgcctggaaggcgtcaggcggcggcttgaaggaggcggggggcgcgacaggcaggggctcgaagcccccggggggcacattggcgtagcgggccggggcgcccgggccgccgtctcccgccgggccaggctcgggggcgcggatcacctgcacataggaggccgggaagaggccgcggtcgccgcggctgttgaccccctcgagccagccctcgatgtcctgctcgctgcacaggctcagcacctcgtgctctcgcagcgagatctctcctgggttctccgacctgaagtcgtacagcgcccgggcgcgcagcgccatggtcccggcgccccgactggcggtcccgactcccggcgtcccgagccgaggcccacctgaggggcccgcggtactgctcgagccctggcgcgcggactggagccccgaaggcggcaaacccacgctgcccggaccagccggtcgcgccctccgcgcggctccgctcgcagcgcctccacttcgcagcgccgactgccgcgctgggccgccgcagccgccgccggtcgggggcggggcccgcggcctcccacgtctccagctgcgctaatccacggccgagagccccttgccaggcgagagcaagcgatggccgagccgccgagcccaccgcccgcgtcggctttgcggcggccactgccctctagtggccggtgccgcgaagccgggcgccgtagtgagcgcggctgaaggaggtttctactccgaagtgaattatctgagatttctttaggcttttaagttaaacattctctagaaagtaagttagcatttgcatgcctgataaacgttcccactctgagcgctcagtgaatgctcctagaatggcaacccagtcatgtaataaagcattttgcaatgcgaattagtgattgcactaagaaaacaggatgcctctgcggaggagctgttcacctacagagcaggctcccttccctcttctgctcaaggagaggagattggcaagaacaaagtaagggccagggaaggtgctgtgattgacaaaattagaagcaaaggatcatgtagagagggaggagctggagagtttccagtacaataaatgctcacacatttattacatgcatgtgtcgcctatcctcccatagatatatgtagtgcggtgaatgagagctcaaacttcggagccaggcttctgaatttcaatctgtgttctgacactacctagctgtatgacctggaacaaggcacttatatcgtacctacctccgggggttgttgtggggattccatcataaagtaatccctattttacagatgaggaaagtgaaacaatatctggcagggtaagcagatttgaagggtttgttgctgcttttgctgctgttactgttatttgggggaagcaaaatccctggcctctttcacaaagggaataggggtactaaactaacaattgcagggtacatgcaccaggaagcgtcccaatgttcacattgccactcctagtaagaggtcagtgaccatccatccatctgttgtctctatgtctcactatatttatattatttttaagataaatagaacaaaaatcacttcctgaaataatcagctccaatctatcgttgccttgtttcctatcttcctttccttcagtgtataatttgcccaaagctttttcttctcttaatcccctcttattaagtctagcctaattattcctttgaagacacttctaattgaggttctgcattcatgtgtcattaatttcagcctgtcctctgacccttttcaaggaaacctgggaaacgggccagaagagtgtacaattattctaagggctgtggtattgtaagcatcttgcacaaaaacacaaacccactataccagaatcactcccacagtgtttatcctaatgcaaaaccttaattcaattcagtaagcatattctaaattacatttttagctgaaaattctgggttttgactattctcacagtaagcaacagggatcattgaatttcaatgccaacatttcatgtggtcagaaacatgaagtccacattaactaaacctctagaatatgactcattttacttctgaaaagctaacctagaatatgtaagataaataaatttagtttcgccccttctgttcgtttagtagttactttttagattagagttaagtacagtaactttgggcttatttcaggtgtgaaaattccaggagtttaaggtgatgattttttacagactggttgagctactctgtagaaatggtggttgaggaattattgggtgtccaaggttgtttgtagcactggggcatgggcgtctgcaggtgcttactttgtaggagtccagtgggaggcctctgtgcttgccgcgcatcaggcttccagaaggatgaggacaggctgtcatgatgtttggccctatggccactagtggcaggaaaacccctacctctagagggtcttagatatgtagaaaattgtgctccagtatta

SEQ ID NO: 318566 - DNA, 4001 bp, Homo sapiens
ggaggaagctgcctgtcgagcaatccaacttacactctagggaaaagacccaggcgtccacgtctctgctcgcttcctcacctgtagaatatgattctgaaacccacagtggtactgctgtcaaagtcgcccctttcagcctgcacaatacactccatatcacctgctctaagggccaggctttacctttctgaacgtggatgatgtccgggaagttagccagatgcccctgatacagcgctaataggtccatgacgggatccaggtcctgcctgggctgctccgcgaagagctcgccaatggcgtcataggcatctccggtgaaggcgatagcctggttcaggcccaccgagaaggcctgctggtccagctcaaaggcctggctgaggccgcggaaggactggcccaccttctgatactcctttttgaagccggtcacctgcttgcgcgcgaactcgttggccgtgtggttgagctgcagcgcgctgtcgtccatcttcttggtgaagcacttgaagccgtcgatcttgctctccacctcctgcaggtcaagggcagcggcggggggcgtgctaagggtcaggaagaagttggcgcccaccatctcgtccttctcggccttcctcttgccctgcttccaggctttctcgtcggtgctgctggggcacgtcaggaagtgctggaagacgtcgcactgcgccagcactgggtggctggccatgtggttcatccaccagatcaggcccttcctgcgcttagagatgaagtcctcctcgaagcggccggtggcctgcttctcgggcaggtggggcacggagatgaccgggaacttctccgccaggcgcgcgtacagccagtcgaagtgcttgtagcgccgatgcaccggcacctgcgtgtgcgtgggcaccagcttgtaggagatgtagctcttcatgcccttgaacttggtctgcttggtggggtcgtcgatggtgcactggaacgggtaggggttctcctgccactcggggccatagggccccagcaccacgcacagcttgtccccgtccttcacgaagcctgacgcctcccccagcacgaaggcctccccgccggacttgacgaaggtggagaagcgattgaggttgcggctcacggtggccgagctcttgggccccgacgggtggtgctgcggggggaccgagccgccgcgggaacccagggacaggtcggagcgcgtggacaggcggtagcggccggctgcgcccacacccgccgaagacgagccgtcgaggtccgggtatgctccgctgcccagagcgcccggctcgtccgccaccgtggagctgtcgtcccactcgtcgtcccagtcatcatcgctgccttggctggcctggtagccgccgtagagctgctgaggcgacggctgcagggcgcccccgccgtacgggaagcccgcgccgggcggctggaaggtgctcggaggcggcgcctgctgtggctgcagcagcgcctggaaggcgtcaggcggcggcttgaaggaggcggggggcgcgacaggcaggggctcgaagcccccggggggcacattggcgtagcgggccggggcgcccgggccgccgtctcccgccgggccaggctcgggggcgcggatcacctgcacataggaggccgggaagaggccgcggtcgccgcggctgttgaccccctcgagccagccctcgatgtcctgctcgctgcacaggctcagcacctcgtgctctcgcagcgagatctctcctgggttctccgacctgaagtcgtacagcgcccgggcgcgcagcgccatggtcccggcgccccgactggcggtcccgactcccggcgtcccgagccgaggcccacctgaggggcccgcggtactgctcgagccctggcgcgcggactggagccccgaaggcggcaaacccacgctgcccggaccagccggtcgcgccctccgcgcggctccgctcgcagcgcctccacttcgcagcgccgactgccgcgctgggccgccgcagccgccgccggtcgggggcggggcccgcggcctcccacgtctccagctgcgctaatccacggccgagagccccttgccaggcgagagcaagcgatggccgagccgccgagcccaccgcccgcgtcggctttgcggcggccactgccctctagtggccggtgccgcgaagccgggcgccgtagtgagcgcggctgaaggaggtttctactccgaagtgaattatctgagatttctttaggcttttaagttaaacattctctagaaagtaagttagcatttgcatgcctgataaacgttcccactctgagcgctcagtgaatgctcctagaatggcaacccagtcatgtaataaagcattttgcaatgcgaattagtgattgcactaagaaaacaggatgcctctgcggaggagctgttcacctacagagcaggctcccttccctcttctgctcaaggagaggagattggcaagaacaaagtaagggccagggaaggtgctgtgattgacaaaattagaagcaaaggatcatgtagagagggaggagctggagagtttccagtacaataaatgctcacacatttattacatgcatgtgtcgcctatcctcccatagatatatgtagtgcggtgaatgagagctcaaacttcggagccaggcttctgaatttcaatctgtgttctgacactacctagctgtatgacctggaacaaggcacttatatcgtacctacctccgggggttgttgtggggattccatcataaagtaatccctattttacagatgaggaaagtgaaacaatatctggcagggtaagcagatttgaagggtttgttgctgcttttgctgctgttactgttatttgggggaagcaaaatccctggcctctttcacaaagggaataggggtactaaactaacaattgcagggtacatgcaccaggaagcgtcccaatgttcacattgccactcctagtaagaggtcagtgaccatccatccatctgttgtctctatgtctcactatatttatattatttttaagataaatagaacaaaaatcacttcctgaaataatcagctccaatctatcgttgccttgtttcctatcttcctttccttcagtgtataatttgcccaaagctttttcttctcttaatcccctcttattaagtctagcctaattattcctttgaagacacttctaattgaggttctgcattcatgtgtcattaatttcagcctgtcctctgacccttttcaaggaaacctgggaaacgggccagaagagtgtacaattattctaagggctgtggtattgtaagcatcttgcacaaaaacacaaacccactataccagaatcactcccacagtgtttatcctaatgcaaaaccttaattcaattcagtaagcatattctaaattacatttttagctgaaaattctgggttttgactattctcacagtaagcaacagggatcattgaatttcaatgccaacatttcatgtggtcagaaacatgaagtccacattaactaaacctctagaatatgactcattttacttctgaaaagctaacctagaatatgtaagataaataaatttagtttcgccccttctgttcgtttagtagttactttttagattagagttaagtacagtaactttgggcttatttcaggtgtgaaaattccaggagtttaaggtgatgattttttacagactggttgagctactctgtagaaatggtggttgaggaattattgggtgtccaaggttgtttgtagcactggggcatgggcgtctgcaggtgcttactttgtaggagtccagtgggaggcctctgtgcttgccgcgcatcaggcttccagaaggatgaggacaggctgtcatgatgtttggccctatggccactagtggcaggaaaacccctacctctagagggtcttagatatgtagaaaattgtgctccagtattaacaa

SEQ ID NO: 318567 - DNA, 4001 bp, Homo sapiens
tagtaacctaaatgagtacattaaataaggtgctgagatgaataatcaaaaacaaatgtgtttacaacttttacagtgcgttaaccaagataaattattcatgatcaaactttgcagacttactgaaaaaaggttgtaacactctgttttttaaagttttattcacatgggaaatacagattatagttctttctactcaactctaaacgacccccaacagaatgcttagccttcacagtattctagttcacactagggtcaatcaagtttgttctgattctcgctggtagaaaaactgtatcctccaaaaggaatacaggtcttaggatcctgcagacactttcaacacatgtacatgttaaagtagctgtatagtaagtagaaagggctaaaaggatactaatccccgaaaatatattctgcaagataatttttattaattttaggaggtgctggttttaactcaggcaaacatttactattaggtttgtgcaaaagtaattgcggcttttggctattaaaagggatggcaaaaaccacaattacttttgcaccaacctaataaatacacatgttcaagattttgtgagagacacaaagatgatcaggaaattaacactaagctgcagaaaacctataacctgaggggaggtggggtttgggtgggacactgcatatacaattagcagaatgtgatcagtgctgaaaactgtttccgggtttccagtttcaggtaactgaatttcagataatggatattttacagtaatttccaattgatttggtgcagagttaaacaagccaagaaagcttattgaaaatactttaaaagcaagtatagcccacagtaaacaatcctctgggaaatttcatacattttaattcacatacacacacttaaaattaggctgtgaggtgtgggtgctctcatcaaacgcaaagcaattcaaatggaactggatataaggagggcccaatacagttaagtttatagagggtgcttcctttgacaaaaacaggaacacacagcttcagagatcgctgatcaagcgagaaaagaggaaaaaggagtggagatctgtttctatttctcccttggtaacttcgaaaacacacacacacacaacagcagtttcctggactaatcctgccttcagctttacattttataaatactatgaccttttaaaagtctaggaactaaagacaaacaaaaagaggcaaatgcatttacctatttaacagtccaaatcagaagcagctccctcaagaggaaccagcagtccgtgaagggccattcctgggaaagtgcacccattcgttccccacagaccctcggcccctcagcgctcacttcattgcgctcccctggcagcggcacaccctccctctggaaaggaaaagcgagcaccccttcaaaagagctcggtggaggtttactgggatgcagagcaagcccttctccggcttgaagaggaggacgtgcaagagacaccgaggaaggccagctgagctgggaaagcgccgctgcaatgctcggttcggttctggcccctctgaggattaggtcggcacccgcgggccgcaggctgctctcctgaggaggccctgcgctcagcccaagcacatccctctgacaggcaccggaggtggggctcgcgtcacaggtgtcaccccaagacggtccttgcaaacacgggggatggggagggacaagtcggggcaggggaaaggtgagacgcgcggcagctacgcagcgcagcacccgcagcgacgcggtctcacctctagggtggagacagtgctggtgaacaggtcctctccgtcctccagatcctcaaagtcggtgggcttcccgtcccccagcggaggaggttccctctcggccgccatcttcgctcacccgaacgactgcgcgagctgggcctcgcggacccgtcacgtgagcacgcacggctgggcccgcgccgacccgccagcctccccgcccccggccggcctctcaaggccccgcccagccgcgctcggccccgcccccggcctcttgacggcgcccacccggagggcgctgcgctcgccccgcccctttgtcccgcctcctcccagaaagtctgggacgtggccctcttttcgccaccgacttgctgacccgacttatgtggcagaatcttggactttattaccacatcaccttcttggcgggactaggctaaataatttctgttggcactaccagtttttaaatcttctgtaggaagtggtagagcctgggcaccagtctctgggcttggattgcacgcaggctgaggcgagatggagtattggtgagcgagagacacgtactgtctcttagatctctctagaactgtccaatagaattttctgacatgatggaaatgttccctatctgtgctgtccaatacagtagctactggcaacctgtgacccctgaacacttgaaatgtggccggtgtgtggaactgagttttaaaattttatttaattttaattaatttaaatctaattagccacatgtggccagtggttacctatttagtgattgcagctctagataacgaaaggactctgaataatttctcgtctgcgattcactccaattttatcataagccacataattcttttctcaataagtcaaaaggtctagaaaaatgataggaaaatcaatggatgattcttaagagcacatagtcacattccctggcctgcaaatccaccaccttatggaaagtctggagtctgtcatggatcaaaaacttcaacctcttatgaaagctcccagcttgacttgaggtgattattatacacatccttaatttttacatgtgtctctatttattgcttactactttctgtcttatgctatggtcatatatattcccagcttatcttttttagtggacacctgaaataggtgaaatataggtcctgatgcttgttacagagacccacattaaaagtggtttgaaaaatgaacaagtttaattaattgtcccttatgtaggactagggctggtgtgaaggttctatgagatcattcagggacatgggccccttctgttgttctgccctccctaggatgtagtctcttcctcatggttcaagtcagctcaccaccgcagttacatcacattccagccagcagaaaaagagtgaaaggaaaacaataatgtcaccttccttttaagggcacagttcagaagttgcacacaccacttttgtccacattcctttgaccagctcgttagctacatggccatgtctagctacagaagacattaggaaatgaagttgttatttctaccgctaaaaattaggggttcacttaccctagaagaaagtagggaactagtggtctctgctagtgcattcatggttttcatggtagcatacctgaactttcttctcagctgtgagttttctccacctcagggagggaatacatcacctaggtttaaaccaaatacagcatcaactccttagtctcagtgatttgtgggggatcagaatcaagtgccttttccctaaactctcagaagctttgattgtctttctttccttagtcagcctaaactctatgagccagaactgcaataattgtcttgctatttttctcagctcatcttcttccttggttccttgattttctgtttcatcttctctgaaatcccaaattcagccatcaatttctctaatcttatatccagattgctaaagtatttgcataatgaatcccaacctcagattgaagatcctataagtccattatttccaattctgagttctacactgcctaaatatcattagttgtttcgtttccaattccttcaactattcttcccagcataggtgctaaaaagtcattttctcctcaagtataccaccatctttttctcttcattttcatcaaatgatttagcctcctcattcaatgacaaaataaaatcactgagtgaatcacttcactttcaagtacgattg

SEQ ID NO: 318568 - DNA, 4001 bp, Homo sapiens
gatgagttaggattttttttaagcaaatatttaaagagcaaactctcatcacataagcaatcttcaaactctcccgaatttgtccaaaaaagagctccttccacatcagtttaattcacaacctggagtgtggcacatgcctggtcataaatacaaataataaaaagatacataaagctttgggagaaaagcacagctcgtctaatagaagaaaatcaacaatgggcaatgagccttaattatggtctatttcaaagtgcttatttctgcaggtaattaacttttagcttgaaccggtaagatcaacttcatcttttctttgaaagccaacgcctctaacaagcagcctttttatcttcagatcctaaatgaatgtcccaaagatggtaagccctccatgactgttgatagtgctgatgggagaagtgagatacctgggagaagcaacaacaagcaaggttttaggcttaagagacttggataaaatctccaagaaaaaaaaaaaaaagccttgaacaaactcgagggtttgtttgtttgtttttaaggaagatacagactatttaacgaaatgtgaatgcactggaaaggattatttatataaataactaccactatggaacacagctccctctccctgcattttccttcccaaggaaagcactttaacaacttgtttcagaacacttggatccagcagtctactcaattctaaaaacccaccgacttcctggactattttttcaatcactgtttttcattctaaatcttcctttgagagggtaatttagtcccaactaagaaaacacaatggcccaaacagactgtcaccaaataccagtaatatttagaggaggggagaggggttaaaatattctccatcaaagtaatgtaactggtgtttagcaagtgtgtgattgatgtaaataaaataacaaatctttcagactgccctgcaatctttcttcaaccctacaggttctttaacaactggaagtaaattcttccaaggtgtacacacactcagacatttctcccactagcaatgactgtccaggaaagaatgttttgaattcattgggaaatctccaccaacaattcacttagtaaacgtgttgctcaaagggcccatgccctggtctctgccctccccttcactcttgagagcaggggtcctgtttcacacttctcggtgaccacagtcctaggtatgaaacaggtgctcagcaagtaattttgccatttcatggaactgcacaactcaaaaagaaaaatctttggaaatcatctaaaatcaatacacgtgtttagtttggctaataaacagctgcaaattatgatttaaaaaaaaaaaacaggttttccagctgaactaattgtacagaacttggaagccagcgtgaatctgccgcgaagctactactgtctggactgagggggcagctgtgccagaaaggaacgcagcccatcctgggctcccgaaggcgggcggcggggagaatggctagtgccgcgtccgaggactgcagctcgtccgggaggagagggttggaccccgaggggctaggggcgcccgcagccgccgtgcccgggaggggcgcccgtttccttgacaaccgcgccaagggcgcagcccttcctctgggccgggggaggggagagaaaacgaggggaccccctgcgccaaggcggcggcggccaagggtgtttcctgggcgcagcagccgcaggcctggctcgcggggccctgtccgcccgcggcccgcgcctaccgtgtatccccgctccaggtcgctctcttcatagcgaaaggacgggatgtagacctccatggccgcgccggccagccggctgagggcgagttgggggcaggctcacggccgcggccgccgctccgcccacggccgggccgccccgcctcccgccccgctgcgcccgcggggccccgaggctgcgggccggactcaggtctgcgggctgacccggccgctcccgcgccctgggcgtgccgggggccggaagcagagggcgcagggctccaggcgcctgggtttcgggcctaacgggcggtggagatcagctgggcccgaaagaggcggggccagaaaacctgagtctgcagaaacggggtgtgcgcgccaacgcgctgggcgcggggactgggccgcacccggcgctccctgccctgcggactccggctggagcttgatttgcagtttgctagacgccaccattaagagattgccagacagcaaagaatagaaagagtggcgcttttaacttttgttttggttggttgaattttttttttccctctcggctggcattaacagcggtgaaccagccggcttataccaagactctccgaattcccttcgattcgaaggtcagcgtctcctgagttagacgtcgaatctgagaatggtggtgtaccacagagctcgaaagtgagcccgaaagttggccggtcactaagacaaacgctctggcttcacgctgcagttctaaaatgccgcctttaactgtgaagtactttttaactgtgagggaaaaatagaatacggaaaaaaaaaggactgaacccgtgcctcggaccagggtctagtaggctgaaggtacctaaaagattaagtgtcccggcgggggaggcttgattatcaagttagtcaagtaaacgttgggtttcttctttaggttagcgcaccgagcagaatagaaacgtggacgtgacttgtaggtcactgagaagtgacctcagccatccaggaaaaaaccagccagcgagctttcttggactgtaaacaattgcacttaactccgtttgtccttgagtgcagaggacatttcagcttagcaaactctagactttatgatgggaccctgagccgtgcaacagagggataaggcagcttctcgttttaggaacttacctgatgtggacccctctacattagtctcatctgaagatccgtcctcctaacccagcactcacacatttgcagctccaggatgtgcccttctctcaaaactgtgccttagctgtgccctgtgactacacacctttctttcacttctggccagcacctcctgaggtaactaaccagctctgcggacgataagctatctgagttcagagcccagcttgtaggttaccttaagcctctggtgactatacactgtatgtatgatttatttatctaccctacctactaggttttagggcaagcatgcttttaaaaactcgtcatctcgtggttggcatagtacccagcacgtaacttacgtaagtactcgtctttacaaaactagtggaatgcagcaggtactatgttcggtatcacataatgtctcatttcatctctataacaatcacatggccgggcgcggtggctcatgcctgtcatcccagcactttgggaggccgaggtgggtgtatcacctgaagtcaagagtttgagatcagcctggccaacatgatgaaaccctgtctctactaaaaatgcaaaaattagccagattacagggtggttactcacccctgtaatcccagctacttgagaggctgagtgggagaattgcttgaacccatgaggcggaggctgcagtaagccgagatcacgccactgcactccagcttgggtgacagagcaagaccctgtctcaaaaaacaaaaacaaaacaaaaaaccagtcacatgaggaagcgttatgataagacacaacatgagtttcaagggcctcccacctcagcctcccaagaatcaagtttttaatatgctttccataatatcctacaacctgttagtagcctaaaatatatattttggtaatggcatggctcacccatttacctgttggacttaggcagaaatgtgtgattccatgaaggtctgataaatggtccaaatgatatccatttgctgtattccactaatagctgtgtataatttacttttcccttgctgaaaatgtatacaaactatcaatgtgtgggtgtgttct

SEQ ID NO: 318569 - DNA, 4001 bp, Homo sapiens
gactgcgacgagcaggccacgatagatcaaccaggtggtagccccagggaccttcaggttgttggaggcaaactgggcactagaccagctaaaggccccggagtaggtcgacgagagatttctgagaaggctggcagaccaccgcggatctttgtctttttacgtggagccatgggcgaggcgctcaagaacttgctgaaggagctcgacttcttcaagcctcgggccaggtcctggagcatgaggtcgtcagccaggacgcccagaaatgcactggtggtggaactgaggatggtggcggccacctgtacggggcgcctggcagcaagactgccacttccaccaccggtcgcatctggctccgtggtgcctcgcaggcctggatcgccaagaaggcggcgcagcgcgtacgaggagccgggccgcaggtactggtaggcgcgacgcccgctgtgatcacgcacgtgcacctgggcacccagacgcaccaccagcagcacggcagcgtcctcgtggccgtgcagtgcagccaggtgcagcggcgtgtagccgccgtgggagcgtgcgttcacgtcgactggtgcgccactgcgccgcgcgacctccaccagctgcagcgccatctcgccgtcgccgctcttggcggcccaatgcagggccgtgaagccagacatgaagtcgcgcttggccgccaagccgcggtcgcgcagcagcagcccgtgcagctggtgggtccagcggcccccggcagtccgcacgagccactcgtgctcggacggctccaggggcaccgcggacggcggcggcgcggcgggcaactcctcggcgtcagggctcagcagacgcgggccggcgcgcgacaggcgcctcaggtgcggggagcggcccgggcccaggccgaggcccagaccggactcttccaccgagagccgcctcagcagcagaggggagctccgcgggctcggctcctccgacagctgccggcgcaggccgggctcctccgcccggaggcggagcgtggcgggggccgggacgcagcgcaccggcagcatacagggcttctgctgcggcggccctttcgctgccccgggcccgggctccgcgtctggcggatcagagcagggcgatgccgcctcagaaggggccctaggcggtggggccgcgtctgcggagggtctctcggtggcctgggctagctcaagggctggaagcggtgggtcggcggaccgctccccgggcggctgagcgggctcggaggccggcccccccggggtgtcctgtggctctgttggcagacccaggtcccctggcggctccactggccgcggcacccggaccaagggcggagctcccggggcagaggcgctccgcggcaagaccgtcgaagtgggtttcgacggctgggccgctgcccccggggggccgaagggtgcgggctcgggctccgggggccggggcttcttcctcagcaccacgaacttgacgccgtcgagctccttcaccaccgccacgttgttgacgaactgcttgaagcggtccctgcgggcggcgcggccccgcgggtcgccggcatcgagcagcggcttgaagcggctcagcagctcggagttgcgcaccttcccgccgtgctcctgcaggaagcccagcaccgccgcctggctcaccccggcagccgcagcggcggcggcggcggccagcgccatggtggggccctgggttcctggctcccggggcgggtgggcgccgcgtcgccgcgggacgcgcgggagcggggttccgggaggcgcggccgcgctcacctggtgccttccccgcggccagccgggcgtgtccccgaagctggacctcggtcgcgccagtgccgctgggccggggcgtctcggggcgaagggcgccgggggccgcggggagcgcccacccccagcgccccgccgggccccggccttcggggtaggtttctgcctttgtattctgtccaatgggcgcctgcttccatcccccgcgccgcgctcgccttacaggtgacagctgcccccgcgatgcagagggaaccggagcagaaattcccgccgccccccgcccgccccagaattaaaggcgcagcgctccagctctggtctcggttgctaggtgggtgtgttccctagggacgccgcggtccgccaaggaggaatggatttttattcctttaataaacatttaaccactgcaaaacaccaagcgatgatttcagaacaatcttttttttttaaaggtcgtcaataccactccagtttttttttttttttactgtgtttcatgcaggaaaacggcttcatgagatttacagcaaaaccaattcactctgcgcggcaatgcacgttactctaggtttagagagacgttttcaaaagcaattttctcatggtaagagaatacattttcacgtagaatttggggtataaaaccacaggaaacataaacataacaggaaaacatagaggaaaacataaagaaggaaaaaaaatcacttgaaatcaccattaacattttgaaatatcctctccctgtctcccatgtgtgtatgtatgtttatgctttaaagtaagaaagcaatgcggagtcatgccatggttttaaaccttcgtttgttccacagataggtattgagcacgtagtttgtgccaggacttttttttttttttttttggctaagatgcgtcagttagcaagacagatttaaaaacccgtgacctagtggggctcatgtgttggaggagaacagaagcatatggtgaatccgaaaactatatgatatactaaatacatgctatgaaaaaagcacagcggggtataacggatgagggtcaggttgcaattttgatctgggcagtcaggatagtactcgttgtgaaagtgacatttaaacaaggacttgaaggagatcagggagttatgtagacggggaagaggtttctagttgagggaactgcctggcagaggtagaatcagttccttaatttaaaatgcaggccgggcgcgatggctcacgcctctaatcccagcactttgggaggctgacttgggcggatgatctgaggtcaggagttcgagaccagcctggccatcatggtgaaatccatctctacttaaaaatacaaaaattagctgggtgtgatggcacgcacctgtaatcccagctactccggaggctgaggcaggtgaatcgcttgaacccgggaggtggaggttgcagtgagctgagatggcgccactgcactccagcctggatgacaagagcaagccctgtctcataaataaataaataattgcagtactacaaatatatctaaccagaagcagcatattgtagtagctgagaaaacaagactctggagtcaacattctacacttgagttctggctctaccttgggcaaatgccttgacttctctgtgcctcagctttcttgtctgtaaaggaatgaggaaaatagtacttacctgctcagatggttgagagaattaagtgagaaaataaacacaaaagacttagcataatgcttggcttacagtaatcatttgaattattattagtagtatagtcactactattagtattactcaaaaggaaaacagaagactaaaatgtaaagggtcccctttccccaatccaatccccaggggcaatttctgagttcagccctgtccccaagatgcaaacaatttaaacatttccccctcactttatattgtgagcattcctcccaatgacaatagctagtctagtcttcaaaaacatacaacttttaatgatagcatcaaataaatgtagtattatactttgttttcttgttcttcattgtttatattgtttctagtttttaattcttataaatgatgctgttgatatataagactttgtgcacctttctgagtaattccttaggataggctcctaggagtagaattcgcagggcacgcaccatcacacgcaacagcatcacacccagctaattttatt

SEQ ID NO: 318570 - DNA, 4001 bp, Homo sapiens
aaatcttaaaataagaatttgctaactatatatctggaaatactgaatagaaataaaaacattatttgtacttgttactgctgcaactagtcatttctttaaaaataatatttatggctcattctactgtattcttttcaatatttctataagtcattacctttcagaggaataaaccctaaaatattacattgaatcacgtattgttttctgctagaatatttattattcatttttaaagatagcctctataatcggtataaactttcctgtttaattataatcacttttttcattcaacaccattatttcttctatttcttgatacatataaaagtactgagctgttatactacaatatttttaatcttgattatttgtagcatataaactgagggctatgcgctgtctagcaagaatatttctatttttgtgtacaaaaattagtcctatctaaatactgggccttaaaatcgattttttaaaaaatacttgagaatcttgaaggcattcgtgtattttactgctatatgtacaagtcgatcagaagtgatacctgtgcagactctgccctgaaaacaatcagttccattactttacttttgtagtttagacttgggaactgctgacaaaacagctatgggcaacacagacgcagttttgaaaacccgactcccctgctgtctaatacctgcatctgagggcaacacggtgagcgggacatctttggtttcaatttttacagaaggctccagtagggactgcattttagtaggcactggtgtcagggggaccttggtcaatcttatcagctctgaaggcggagctccctgaaactggatccgggccccaggggggaccgtgtggagcgtcaaagggatcctaaggtcttgctggtgcggcccaaaggcaccggacgttggggccaagatgacctccgcgctgccatgaaccaggccattggacgcgggctccgcgccgagcctgcagtcctcgaggagtctctcgggttcctccgttttgatcacaccttctcggatggctgccgggcttttgcctgccccgccttgcatcgagtctctcatgacctcctccgcctccagcttgcccttctcgtcccctcggaagtagccgagggccggcccggggccttccaacttgaccaccctggaggctctaggaccggtttcgacggcccctcgaggccccactgactgatccaggctgggccccagcttctgcttcttggccttgacatgcagcgccaggggctgcaccgggtgcaactcgggcctggaggtggcgccgtctgacgctgtcggcggctgcaggagccgcaggtcgggcctgaactgcaacagccgcgcctgcgcggacgaggcagcggcttcctcgttctgggcctgaggctgtggtagcagcaacacctgctctggcttcacctgcagcagccgccgcaccgcgggctgtaagccggacgccactgcctccccgcacgacgaggccaaggtcgcactggctgccgcgctcagtgtgggagacgacggagggggctccatggctgctgcccaaaaggaggtgccctcgaccggcagcgggggcggagcgggacgcaacgggcgcggctgaggcggcggctcgggtctggctctctccatgggggagggggacgccccggccaggattgtgagctcagccgtttgttggcgaccttccccctccccctttcggttaagagccttgcaaggcctttgctacccagaaccctacgcggttcaaaacgcagctgtctgtctgggcctcacccaatcacaacgaccgatacccgtggacggccaatcacaggcgggttttccggctcttcctggtccctactctcgcctcgtgctgagtcctcgaatcacctgccatggtaggagccgccgcacttgttgcacattttcgttctgactctcttgtggagttctcttacagccgttgtctttagtcatccctcccccacccggagctgcgacaatggcgttgcccaggaaacgttgcgcttccaggccgctgacatccagggaatgaagtcttgcgtcacaaggggagcgacggccttgtgcacgcgctctgtgcggcctgagtaatctgtcggccctgagtaccaccagggcttttgaatctttgccaagggagaatggggaagattttgcaacttatcaataacctattagctaatgttgctggggaggatcttcgactttgtgtgattattgtgctaaagtttcaattaatcaccaggccctgtggccctacttccaaaatactatacatcccaaattcatccactgttttgtgtctctacctgccattatcctgttccaggctcccagcatctttcactgggatactgccgtaaccctgtaaatagtctccctgcttgtcacccttgccccactacactccagctgccagtgatctttcgaaaacgcaaatctaaggttgtcacacttttcctaaactttccatggctccccactgataatgtaatgaaagtctaaaattcttagcaaagccttaaaaatcccccagtggcttgggatctaacctcctactactgctactattagattggtgcaaaagtaattgtggtttttgccattaaatagttattgagtctttgggtttcagccacattggccccatcatcattctctttctactgcagggtgtttaaacatgctcagcatgctactctttcctttgtgtctccttaattcctcctgcacatttttcatattgcagctcaactgggacttcttcagagaagcttttactgactctgaaaatcagataaaatcttggtctacttatacctctatcacttggtttgcttaccacaatttgtaattagaattttcatgtgatgattccactgcctctcccactttagactataaagtccttgaaggcagaacagtttgtgttttgcccatcactgaatccacaatgcagaccattgagcctggcatatagtactcaataaatacttgttgaataaataaatgaatagcgactgtgatagggtaataataaaatagtaataatcactacctgtgttaagggcttactcttatgctagacactgttccaaatcctttccatgtttatgtttctccttttagtaggattgtgtttatttccattaaacatcaccaagaaaaacaaaaagaaatcctgtattaacatttgctgcatttctaaatgacattctggccaaaaactatagtttatcttgacgtagatgatttttgcaatcaagacaagttatcactcaaagaccactccaatttattgtccaatcctctggtaacaaatgtggtcagtaggagttcttatacctggcagatagacaagggcaatggttttcaaacttttatctcaagaactcattatacccataaaaactattgaagatcctgggctgggcgtggtggctcactcctgtaatcccagcactttgggaggctgaggcaggcggatcacttgaggtcaggagttcgagaccagcctggccaacatggtggaacctcgtctctactaaaaataaaaaattagttgggcatggtggcacatgcctgtaattccagctactcgggaggctgaggcaggagaatcgcttgaacctgggaggcagaggttgcaggagccgagatcgtgccactgcactccagcctgggcaacagagcaagaccctgtctcaaaaaaaaaaaaaaaaactattgaagatcccaaaaaagcttttgttcatgtggatttcatctatcaatatttaccatgttgtaaataaaaacaaattttaaagatagcaactcatttaaaacgtcaacaataaaaccattctgtggtaacacattttcataggaaaaaattatattttccccaccttatgctcacaagagaatgaagtgaaaagagcaaatattacattaggattattatgaaaatagttttaacct

SEQ ID NO: 318571 - DNA, 4001 bp, Homo sapiens
aaaaaggttaccgtggcaactcgcattcctcggagagtgagtcaggcagagaagagccttctggtgggtgggacttggagaaagtttcaaaagttgattccttctccaggcaacccccttcttctcctccctccccctctttgctctaggctatgtcgatgtggcagctgatagctgagagttaactctctctttcctcaaccactcccttttcagaaggcttcatcctccagcaaatacacacatttgttaccagtcctcactccatccccacgtcatgccctctaatccatttgagaatatcttaaagctgaaagctgtgaccacccatattcatcctctctctctctctctctccctctctctctcacacacacacacacacacacacacacacacacacagtgcatacaatttttaggggcttagagatggcttgaggcccattcaaagaccactccatagaccctggttaagaaatcttcctttgaatattttagaggacacaaagcaccccaaagagccttcagtttcagccttctttcattacagatggggcactaaatccaggggagacacttacctaagatcacacataaaatgcatgcccgaagcctgtgtcctacttctgctttgcttctcactaaaccaccagcacttggggcgtatagaaatttaactctaaagcattactagagaaaacattttctctaatgaaaaaaatgctgtcctttcctgaggaaaatgcatgcctctctgttcccttttgggcagactgggaatcctggaagacataactcatcccagtgccccccttcccttggagtccttggagtccctttccctaaggaagtccacttgacagccagttcacggagccagtggcggcgaagaaaggtagtggatttgtctgaagaagaactgacaccctgacaggctggacactagtcttgggtggattacggaaggggaccctggaattctctccctcttcccttccccctttcccccttctgagaatatctcccccagcacactccacctcccattacacccatgtcttggttgacgatatctgatgtctgggttttcagatctagataaactaagggctactgcctgtgtttaccatcccaaggaactcaggacaggaacaacacctaacccaagactgaggttgtgatggtgccatttcaggcagaatggtgctgaaatttgtgtattggggggacggaaggtggtgtttgggagtgaggagaattagaggaaaacagaaggcttcccagaggtgtggattaatggtgaagcctccccctttgcctttcagagatcaactgattgttcgtgcaaagtcccttttggaaaacagaacccctgaccgagatctggaggacagactccggttgctggccaggtccctgtggcagctgtgatgggatcagattcccaggaaaggaggaggctgccacatttgcaaagggagcaaagaggacaggcaggcagcctctgaaaccagagacagacacagagaaaaacagagagtgagaaaatgctcccccgaagacatagtgagattattttctgtaaacctgtaagggaagacaaagttacacagtgagtccaccttctgaaaagcaacaggcagacaggaccgagggccatgctcttaaggggagccgtgatggagccgggaggagaggcgcatcctcagcagagcttccctcccttgcacacgagctgacggcgtgaacgggggtgtcggggttggtgcaactatagaagggaaaggctgggcgggggtcacacatacctcagtggcaggcaggcaggcggcaggcagagcgcgctctccgggcagtctgaaggaccgcgggaatgtggaggggtttagagacaggcaacaggaaaccactcagagctctgggctgggtctatctcccctccaccccgtggtccctcctcctcctgtctcctccttcccccggcctcctccttctcccatagccaaagctgtctctgtctttcatttctttcctcctctttttgcggtgggctgtcctgaccaaacgtcccaaccctgcctgcctcatctgttccggggctgctgcctaaaccgactcacagagtgccagggctggacaggcctggagggatgacccagaacagcctctttcttgttcagagggcaagtgaggcctggagactgcaaggaattacccaatggcccccaggggcagaaccaggcccaagtgtcttgatcttctaaccagtgagctttacaggagtcctccctaatattaggcaatgctgagaagggccaagcaattcaagggggttgtatttgccacaaaggcaaggccaggacttaccactgtacagacaagacaagctgctactagtggtatcatccttgatgatttggaactggtcttaaaaaaaaaaatcccactcaaactccacttgtaccactaatagacacataagggattagacatctagctggtggacctgtgccaccagtattgaacagataaggtaattgatgatattgatgataatcataggagtaacaatagccaaagtttactgaggatttaataatcttcacagcaaccccttatcttaggcattgtaattatgaccattttaataataaggaaacatagatgctaagtaacttgcctatgatcacctggcaaaaagtggtatgagagggctgattctacgtttcaacttgggtcactcctgttatatatgaactgctcagtgcaacaggtcttggttgaatgtttattttgtgcctaacactctgggaggtatgagaattaataaatacctggtccttgtcctcaaaaagttttgtggtttccggtttttttgtttgtttgttttgttttgttttgagacagagtctcactcactctgtcgcccaggctggagtgcagtggtatgatttcggctcactgcaacctctgcctcccgggttcaagcaattatcgcgcctcagcctccagagtagctgggattacaggcgcacatgccacaacacccagctaatttattgtatttttagtagaaatggggtttcaacatgttgcccaggctggtctcgaactcctgagcttgggcaatccgaatgccttggcttcccaaagtgctaggattacaggcgtgagccaccgcacccagcttagctttgtggtttcttaaattcttttttaatttttttagacgagttaagtgcagaactgagaagggaaaaaaagtacaaggaattcaatctgtgactgtgaacaatcaatcgagataactcactattcaaggagctttggatcttgctgaaaggttgtgccttacacatacacccacttacatgagtggtacagactctaaggcttatcccagggcttcagattggtggattcctgaaagaggtggacctggaagcatgggttgggtttgaataccatggaaaggaagaaggcagagaacaccctcatgatacacttccatccgctgtggcccctgtctctcttgccattctctcctcctaccactgtcctctgtgcccacgctgctccagccatgccaacttccttccagtccttcaactaccccaaagcttctcccaccccaggattttttttttttttttgagacagactctcactttgttgcccaggctggagggctgtggcgcaatctcaactcactgcaacctccacctcctgggttcaagtgattctgctgcctcagcctctcaagaagctgggattacaggcatgcaccaccacaccaggctaatttttgtatttttagtagagacagggtttcaccatgttggccagactggtctcgaactcctgaccacaagtgatccgcccgccttggcctctctaagtgttgggattacaagtctgagccaccatgcccagtatctttgcatttgctcttacctctgccagagacactcttccacctgattttcctgtgcctattct

SEQ ID NO: 318572 - DNA, 4001 bp, Homo sapiens
tgggtctcctagactcccttaaccagccccccttctcagagggacacacagaagccagagcacagggagattctggccaccttgctacaggggctggaggttctcagaggccgacctttcttttttcttttttctttttttttttagacagagtctcactctgttgcacaggctggagtgcagtggcatgatctcagctcagtgcaacctccacctcctgggttcaagccaattctcctgtctcagcctcccaagtagctgggattacaggcgcctgccaccacgcatgcttggctaatatatatatatgtatatatatatttttttgtatttttagtagagacagggtttcaccatgttggccaggctggtctcgaactcctgacctcaagtgatttgcccgccttggcctcccaaagagctgggactacagttgtgagccactgcacccatcagaggctaatacttaatgagcctgcctaaccacagggatcctgggaaacgggggaagattaggagaccgcagaggccattacttaccaccagcttcttctccactgcctggaactcttctttactgacaaaattttcgtcctggagaaccatctgcaacagagcctggctgagggagggcctggggctggagtagaaggggcgccctctagggaccaggaccaaaagcggataacaggatgatgctcgtggtacctaggatgagactgaggccttgggaagggagaattcagttccacagataaactgagactcagctctaagtgctgccctcaaggagcagccagtctcatggaggaggcagtccacagttagcacttctaacatgttgtgtgccttgatggggagacataaggggatctggggctcagaggaggccccaacccagcctggggaagggtcagaatcacttccggagaaggggatgttagacctgagatctgactgctatatagggtgggccagaagagggatagagagaaaagcactctggatggtggggacacacatgccaaggtcagctgccaagaggaagacctgggtaccttcagggaatcaaaggcaattcagtgcctagagctccatatattttgttgaatgagagcattagggtagcaaataggacaggtctctctcccctttcccccacattcaacttcccagaagggaagaaattgtctaagaacaacttagaatgagaagtagatgtgaagccagttttatttctgagatggagatacatcctaaccttcttatcaagacaggaaaacaaaaccagaaaaaccatgaactccagatggccaggattctatcatgcctacccaggtaatctgtgactgcaatgctttgcacccattagctggggtttgattgagaaggcaaaagctaaggcatgtaaagttcttggaggcccctaagttagcgctggcaagggccaaatctgcgcttactgcattcaacacggcactgcctttgactctcgggaatggtgtccataatagaagggatgacagtttctctgcctgcacaggagggccatgggaactcagtgacgtcatctccactgaaaatggggaaactgaggctcagggactctctaccagctcttgcagcaaccaggcaaacggaagggagaatatggcttgattttagttaaaattccctggttcaggaaggtccgcccctttttggctccacccctaccgactgagcccggcctcctcctgatgacgccatgggccatgcgttctagccacggcccccgcatcggaacaggttctggccccgcccccaccagtgaggcatccggccccgcctctccccaaactcctctggctgcataccacgttcctcagctggtggattagttcctcctgagactcaatcacgtcccgcagttgatctaaagcgagacacacagatcctgaccccgccttcgaccacccgaggggcgtcgccatcttccgcccccgccagctagttggaaatggctgcctcgggggtgatcctcgccgtcgcccaccaatgagaatgcgacgccacagagcaccctggcaacggggggcggggacttcctatgttagcggggcgaggggccgcctcttaaaggagccgcctggagcggggaaactgctgacaacccttaaggcatttaagtttacaggaaattgcgcttttattgcgtcttctgtttctcacgcagtcctgagaagccggcagggcccggcttgtactttccttgcctgcgagcaggcaacactcaaaacagcagccctcagccttcacccagggcctgttaaactgcatgaccacgaagcaagagccagcataggcaactcctgcatctttagcttctcatgcctctttctccaaatctttatcctaatctccaaatttcctccattgtatgagattccagcctcctggaacacacttagtacttaggggtcctaagcctaagcacggaagatagacgaagataaaaaatgagaatggctacacctgagatcaaagtcttcatactctgataccaggctctgggcactagagtctgcactagagtcatgtgccaccacccgaggaggaggaccctgaagagattaggaggactgaagagggcttgaaggaggagagtttagtaaaatgaagtcagggaaggatacggtgattacgcacactcaccaagtctctattgaaggcttttttttttttcttggaaacccaaataagattaggtttggagaacatcagagcgaatatatattgtgttcactatttcgtggcaccgttatgtttatattatttcatgtgaccctcatggaactcctatcagcccctttttacctaggctctatgagaatgagaatgaataacttgcccaaggtcactctagtaagttgtggaacggagttctgctatgggcagtttggttccagggtccgtgtttttgtttgtttgttttttgagatgtagtctcgctctgtcgcccaggctggagtgcagggacgtgatctcggctcactgcaaacttcaccttccgggtttaagggattcttctgcctcagcctcccaagtagctgggattacaggcgcccgccaccacgcctggctaattttcttatttttagtagatacggggtttcaccatgttggccaggctggtctcgaactcctgacctcaggtgatccgcctgcctcggcctcccaaagtgctgggattacaggcatgagccaccgcgctgggcctggagttcatgttcttaaccaggatgttgtgctgcatttgtgttgcacgtcatgggtggaagttatggaatttgatacccccaagtaggaaatgactatactaacaaggagtttggaaaaaaagttaccagtgactatgaaaggaggcagaaagctcagggtaagtcattcaagccgctccccaaaaccccccggggggcctgacaaacttggccatccctgtggttctctcagcgggagcccttgttttgtttcttgcgtttattttcatggacttggagacaaggccatctctgctgacctctctctctttttttttttttttttttttgagacggagtcttgctctgatgcccagggtggagtgcagtggtgcgatcttggctcactgcaagctctgccccaaccggggttcacaccattctcctgcttcagcttcccgaacagctgggactacaggcgcccgccaccatgcccggctaattttttgtatttttagtagagatagggtttcaccatgttctcttttttttttctttttttcttttcttttttttttgagatggagtcttgctctgtcgcccaggctggagtgcagtggagcaatcttggctcactgcaacctctgcctcccaggtttgagcgattctcccaactcagcctccccagtagctgggattacaggcagctgctatcatacccaggtgatttttttgtatttttgtagagacggggcttcacca

SEQ ID NO: 318573 - DNA, 4001 bp, Homo sapiens
acccattctatttccaatgttaatgtccttgttcttagctgtcatttgcaacaaaatcttcctagaagctctgcctccattcggatctcattaccactaaaaaagtatttttgttgtgcaaactgaatgtcatttccaagcccaaaacctttctgtggctgatatctgtgttacctataagggaaagtccagtctttttcacatggcatacaaagacctccaccccgttttctactatttcctatctcaacccttctatcctacatgcctgtaatttatatttatttgacattttggaaacatgctatgctgtttcctactttttggcctaacccccactgccagtggaatatgcttccctgcccctacccactgatcccacccttttctttaccttgaaaactactattcatccattgggacccaacttaaaagcatgcttcctccatgaagccttctttgaccttcctcagtagagtcattcactcctctaaattacatacagagatgtaacactgaccatattctaatgcaattactcctttacaactctatctccattagattaagctcattagcggaaaggatcacgtcgtgtttatctctgtatttcctctctccagtcccaagcaatagtgaggtgtttactaaatgtctgatggctggttgtctgcaggcgtggttaaagttagctctaatatccctcctttggaatgaaatatgtatactttgtgattactgtgttaatcagagtgctttttgttaactgccaggttttggttatatacctcatgtttgacattgtcaagagtctgacttctggataagtggattgttcctgtaccatgtaccttcacagcatattctattccaactatgatcaaaatgaccgaaccacatttttccattaagagctgtgtgcctttgagtaaattaggttacatgtgttccctaaacaagttgttactttttcctgactttatgtctcttcaaaatatatacctccctcctctttcactcccaatattttatctgtttcaaatcctttttggaacagaggtttaaaaaatatacatgtataccttatttaaattgatactactgttttctttccttattaaacacacatccatgttgtatttatctttccattgttacaatttatctcaaggttttgcactgatttgacatagatttttgctaaagtgtatctaggtatttttctgattttacattgcaattgtagtgttgagagactgccaggtgtttaccctaatgacatagttaatgtctttaaacttaattctcaatctacctcacttcttggtccacaatctctctgcttcccaaagacccctcttaatgagtaatatttgaaatttgtttttctgaggcaaaattagtgttttctaaagttttgatcactgatctcaaaatcaagcattaaataatgggtatgatactaaaaatagaatatattttttctattccttttaaaggttataaaatcacattacctgattagactgtgataatcttaggatggtgggaaattcatctttaaactcatctacaaggtccatgattgctttctggatcccctcgactaagacaaaaagaggttaggaaaaagaaaactttgaaaacatcccctaaatgtttcaaaagaacatgaaacacttgatcaaattcctagatgactcggaaagtaaaggaactctaggggatcttattcccaattgttcccacacccatacgccctttacaacaagattgtgtatacttcttccagaaaagttcttcaacacctgcccacatatccacccaacaggtttgattggcatggtgagttcttgcttgggttcctagtccttaacaagcttgcaggcctgggtaatgcttgtcctagtctgccattagtgaaagatgagggtagccttccacttgggaaagccagcaaggacagaactcacagctcactgctggaattctttgttactgtacaataggcttccgagaacctgctacagaatcttctgacatcactctggcagtgagaggaagaggagtgtgtttggaggcataagggaaggagtgaggggattgaataataaagtacactaaggagttctatgatataagttgaaatttgtcccaaattctgcagtgataccacaaataatggatcatctgagaacaaaaggtccctttgaaaaaaaatggcatgtgctttaaaagaaatgctttatatatgatgccaaatagaaaagaaacaccagcagtgaattcagaaagacttctgaatagattgtttttgcttcaccaatgaggatcactaggtcaaactcgggcaaaactgtaaagtctttggtttctctgctttataatctcaatctcttttcttcatcttttaccctcctagtaccctcacatgtcagatgaccattagttcccccgatcaaatatgggaagaacttgataccatgcagacttgattgactgcctagttttatatatatatagtttgtttgtttgtttgttttttgagatggagtcttgccctgttgcccaggctggagtgcagtggcgcgatcttggctcactgcaacctcagcctcccgggttcacaccattctcctgtctcagcctcccgagtagctgggactacagacacccaccaccacgcctggctaactttttgcatttttagtagagacggggtttcaccgtgttagctaggatggtctccatctcctgacctcatgatccgcctgcctcggcctcccaaagtgctgggattacagatgtgagccaccacgcccggccgacagcctagttatattttagtgtgaatgaaatagttggttaacctgaatcccattctaatttgaagccctcatatttaattgcagctagaccactttcttcagcaagcataaagccacggctgctgaaagtgtcttcatgggaacagtttgggaaagagaaatcttcatcccaggattcctctagcatgggaagcctgaaaatccccagctctcatggtgttcttagtccacaatctgccttagaacaccctccgccataccacattcacctctcctaaccaaaatagaacctgcttgcctctcatgactctcatggttaagataactatgcccttaacatttggaaagtgcaatccatcggtacaaagaaaatcatactagacaatgatgaatacacacgctgggagtctatgagataatgaaatactttatctgtcctagcaagatagttggtcatcagcgtccactgcagatgaacacctggcagatccttctctttctggtcttcctccctgttctccattctcctcccttccaccatcccctagttctttttatccactgattccaatgtcattgcccaactggttttacccaattttcttctcttttcatcagtcctctccctcctaggcatcctataaaattaacaaatctagaggaaaagcatttctcaggctaatgtttactgcacttaaagcataagcaactctttgtgtttgctaacaacgtcctttttgtcttttcttacttaagagccctctccccagaagtagagtggtgaaaaatgacagacggtgatggagtaagaaaatctcaccctgcagcacttacattatgaccttataatattttggtttgtgtttaattatcttcttatgccaataatcttatgcatcttatgttatttcagataataaacttagacaaaagaacccacaatgtctgtttttttcttgttaattcttcattatgttattctttagagttcataatagagtaccccataattataaaataaactaggaaacaattaaaaatatctccaaataatttttatgacagctgtacagatttatctgtacttaaaaggctttaatacagaagaacagaacttttgttttgcacacagctttgaagaaaatgaacattttacataatcacatatagaca

SEQ ID NO: 318574 - DNA, 4001 bp, Homo sapiens
ttgtactgttcacaataacttacattcgttgaggatttaccatttgccatgctaactgcttcaaatatattatctcatctaattatcttgatgagcttgagttaagtaaatactgtcatctcaactaccaaaataaaaatagggttaacctcaagacattccagccaggcatatccagagaagccaaaaaaaatttgctttagtttattcaaaaaatttgctggaattcttattgtgtgagacattgtgctagtgttgacaacacaatggcaacctaaaacaatattcctgtcttcttgaatcctagtctattagtaaaagacattaaatcaagtaattgaactatcaagttacaagtatgataagtgcaagagagacagatgtatgctacctgagcctgtaacaagggggagctgtcctaatctggggggcagcgcgtagaagggaacatggacaaaaaaattttcctgaggaagtaacttttcagcagaggtctaatggatgagaaagagttaacctatcaatctacaaagagagatagccgtggttgattaaaaactactaatgtgtgacagacattgtgcttggtgctttatacacattcttttttttttttttgagacggagtctcgctctgtcgcccaggccagactgcggactgcagtggcgcaatctcggctcactgcaagctccgcttcccgggttcacgccattctcctgcctcagcctcccgagtagctgggattacaggcgtgagccaccgcacccggccgctttatacacattcttattcaatcttctcaacaacttcaagaggttgaaggtatttccctcattttacacatgcaagctgaggcatagaaagttttaagtaacttgcttagggttacccgcaagttaagacgcgaagtgtgatgggaactagaatctacctagaaaccatggtgctgcaaccatttttcctgtcctgcttctcaaaaatatagcacacacaaagcatttgggacacaggaaactctgggaatcaaactgcctgagttcttaccccgcctccactactcactggctgcatgaacttggacaagttatttaatttctggtttaatcatctataaaaacaagcacaataacacccacctaatcggttactgaaaggattaaatgagataacgaatgaaaagcaattagggtagaatctgacacacggctggggcagtgctgtccagcagaaatataacgcgagtcatgtacgtgattttaaatgttctaggagccatcatgatttaaaaagtaaacaaagatgaaaaattaatttacatatttaaacaaatacactcaaaacatcatttcaacatgtaatcattataaaaattattaatgagatattactccttatgcgctatctctgaaacccaatatgtatctcccatctgcaccatttcttagttcgggctagaggctaccgtaccgcacagcgcagatccagtggcggttataattttgaggacccggcaaccgacccaacgttccatatttgtccagaatccctgagggcggcgaggtggtccagcggaagataagaccggctcggaacccagtgtataagaccccagggttccggggaaggagatgtttcagctaaaggcctcggccgagaccccggcccctagctttctttagggcctgttcgactctccccactgccgctctccacacccacctcccaccaggccccttgcccctacctctcacgctagtcccctgctgccgcagccagcggctcctaatgggagctcagggcgtccacattgaggacgctaactccacagtcgccggcccattcgctcagctagctctcgagtaagcgcctgggatatttgaatgcagttcccgcgagaagtcccacgtctcacgagacgtccgcccaagccgcgcggaaaggaaaaaccaagagaaacgcccaatggagcgcccaccccctcctacagctactgcgcatgtgcaagtggcgcgccgtgggcttggcgcaggcgcaggcgcagacgtggctccacataaatttttccttgggctggtttcctgcatgtcttttaagtatttgcttttagtttccgtgttttggtgttttgtttgttcgttttttttttttttttgtttttacgacaatgccttctaggggaacagtgtcgctgggctgggcggtggagagacacctttggcaccatcgtgcgatctcatgcaccctaccagtggtaatactggcgttaatatttaagttcccaccatgtgttaaagtttacagattatctcagttaagcccgcagccttatgaggcagatattactcctcgttttctacagagaaaaagcccgaagaaaaaaagtgccttgtccaagtggtagaactagaattgaatgcagtcttagagtccaagctgtttgcatgtgtttttaataataatattttgtaaccctgatgcctattcaaaaattgaagcgatcagaaataataatagataacatttaatgagcactgatgagtcctagtaactgttacatgaatcatgtcgttctttcgagcccatcttttcttgcctatttgagaacttggctctaactgctcttttttgcatcttcagttttttcttctctattggatcttccctatcagttcataaacatgctgcagtgattgccataaaatcatttcatgatttcattttttaaaaaatcctccttgacaccaatcggcaaccaccccatttgttttcttctctttataacaaaatttctggggaaaaaaaatctttacatccattatctccattttcttaccttttgttcttttgtttgtttttcccactttaaccaggatttggtcccaaccaatactatgaagtggctcttgttaggtttaccagtgattcctaccttgcaaaattcggtagtcaatatttagtcctcacttctggtgaaatttgacagagttgcttgctctcattgatttgagtctttatgtcttgggatgccacactctccttgccctcttcttctcagtttcttttgcagactacaatttctgcctgagctaagccagactcaaagggttgatctgagctttaagattggcaacaaattgctcacagtgttgtctcacagatttatctgggactccaatgaaccagatgctcattcatttgtaatcacacctatgttcttggagaaatgaaacaaataccattttccctatcactgaacaaagattccttaactcaggggccaggaaaagattgttctagcttaggccaatcatgactggctgcaattaggtaatctaaaatcgatctgaacttattttttctcctttgttacaagagaaggtataccctatgttattaatgtttcttcctattctattttaaaaatatgtattttaaactattaattgagtgactgcaatgtgttaggcatagtggaggaattcagagatgtggtaaactcgactattgcctagaagatgctcgcaatatagtaggagattttaaaaaacaaatagaacttacagggctgtaaatgctatgcaagtggtatgtgccccacactaaaggagttgtgtgaagggagaggtatattttgtctaaatgttcctttaaaacttcccagtgcatgtgacacttcaagcagggccttgaaggatggcagagctaaggaggggtgcattctaggggaggggacagcattaggaaagtcttagaggttaccccatgtcataataaaggtcattctttagggatggcctgaatacaggactgccaataccaccactggacgctagatgtcacaagtgaaatgaattctagatgggttctacttttaagataacttaatggaacttctgattcacaataccagatgcagatctccgtactcaggcaaggtccgcataccatggcctaaataccaaaggtcaggaaaaagcaaaaaacagcaaccttgtatctg

SEQ ID NO: 318575 - DNA, 4001 bp, Homo sapiens
agcccttttatgtttatcctccacctctcaaaacctaaattcccaaaactaattaaaattataatggcatctactgtttttattttatgtatctttattaatttcatttatttctcctaaaagtatttcaaaatgttgcaatagagtcctggggacttcagcaaagggtgttttttgtttgtttgtttgttttgttttttgtttgttttttgagacagagtctttctgtgttgcccagactggagtgcagtggcgcgatctcggctcactgcaatctctgcctcctgggttcaagcgattctcctgcctcagcctcccaagtagctgggactacaggcacccgccacgacgtccggctaatgtatttttagtagagacaggatttcactatgttggccaggctggtctcgaactcctgacctcatgatctgcccacctcggcctcccaaagggctggcattacaggcgtgagccaccgcacccggcccgggtgtggtttttactaataaaataaatgaactaaattaaactaagcaatatgtaactgcttttcttttagaagagtacaacttaagggcatgatattttattttggctcctatggtgagacaggaataagaaacaataaatgctaaatattgtcctcagtccatcatattttagcaaataaacagttggagacacaatgggataatcgtagaataccaggaaagaatttattgcagttcacagggagtgtgtagatggttatttgacaaagaaagagtctgaggtttatgcctcaagaaatgcaacaggagatgctccgtgctaaagatcctcatgctgagagtattaataactactttgcacccacagaaacactaccgatctagcaacttctgtagataagctaaggttgaactggcaccactgcctctctggtagcaagctggtgttaagcaagttcttctgggaaaatggactgaaatgacttgccctgaaaacctcttcccttaagcaaaaaaagaaaaaaagacaaacaaaaccaactgaaaaatgaactcctgaagaattacagggcagtcaaggaagctgccagcatgtaaaattgtctctgtggttgtcagacttggaaactttgggtggcaactgcatggttaggataaaattaggttggtgaataaggtcagctttgggcaagagccaatagtgaccagaaatagctagtttgtgatttggggcttaaaatttactaaaatttgtaaatgttaacatattctacattaacttatttttcacccaccctcccctgctggtcagttaagtatggaaagcattattaggtccattttatagagaaggaaacacattcagagaaggtattgtaacttgtccagtggcttcatatttcatcgactagccaccacaccatgcttctgcttctggtgatgtgaaggaggcatcgttggggtcagactacaaagtccagcaaagttccctctccacagaagcaaaggagaccttcctaaaccctctgattgcctagaaccacatcacaaagtcagaatgcctgcgggttgggcccaccgtgacaagggtaactcgagagcggcagagtggggacgtgacaaggccttgccctggctggggtgagctgtagggaggtggcgggacggacctggggcaccgccgagccgagttgctcactgtgggatgctgccggctacgcaggtgccccacctgtgcagctcgcgccctgcccgccaccttccctgagtgcgctgcgctgcgctgcaggctctgcgccccgctagcccctcagacgctcgcccctggccgtggtcactcactcacggtccgggacaccttcaactccttgttgagccactggcacaggatctccgacatggttcagccggtgcctcagaccgcaggcgggggcttagaaactcgccaggaaccaagcctgccagcccgcgtcctcctgtagccaagggcaaccctttgctatggaagcgtatccaggctggaactaggcgaaaggccttagagaagaggggacgctagggctcagccgcagaggacagaaaatcgtgtttcgccacctgctggcgggtaagacctgagcgtgcgccagcgcaggaggaagccgttgggggcctgtgagagaagttagggagcagtgggtgtggggagaggcgaggcgggaacacttagggacacagcaggagcttcttaggtgagcagaaagtaaaaccagagtctccgcagggctccgtggctcacgcaaataatcctaccactttgtggagggggtggcgctcgactgagcctgggagttcaagaccagcctgggcaaggtagcagaaaccgtttttttttctgtaagaaattaggcggccgtggtggcgtgcgcctgtggtcccaccagctcaggatgctgacgtggaaggatcaacccaggaggcggagtttacagtgaaccgagatcgagccactgcactccagcctgggcaacaaaatgagactctgtctcaaaaaagaagaagaaagaagaaagaataacaagaaggagaaggagagggagaggaagaggaggaggagaagaggaagaacaggaggaaaagaagaaagagaaggagaagaaggagaacaaggagaaggaggagaacaaggagagatcaaagaagaggaagaagaagaaaaaagaagaggaagaaaaagaagaagggtatttggggtatccatcaccttgagtatttatcatttatatacgttggtaacatttcaaatcttctcttctagctattttgaaatatacaatgtatcattgctaactatagtcaccccagttgctagctaacattagaccctatttcttccatctaactataagtttgtacccattcaccaacctctcttcatttccccttcccaccctcacatcctttccagtctctggtactcataattttgttctctatctccaggggatcaacttttttagctaccacatatgagtaaaacatgcagtatttgtctttctgttgcctggcctatttcattgaacataatggcctccagttcatccatgttgctgcaaatgacctgttttcattcttttccatggacaaatggtattccgttatgtatatataccattctttctttttccatttgttcgctgatggacacttagatttattccatatcttggctattttgaatagttctgtgataaacatgtgagtgcaggtatccctttgatatactgacttcttttcctttggatagatacactgtagtggaactgctggattttatggcagttctgtttttagttttttgagaaacctccatactgccttccatagtggtcatactaatttacatccccaccaacagtatgagttcccttttctccacatcttctccagcatctgttgttttttgtctttttaataataaccattctaactggggtaagatggtattttattgtggttttgatatgcatttgataattagagatgatgaattttttcatatacctgttggccatttgtacctcttcttttgagaaatgtctatccgtgtcctttgcacactttttagtgggattgtttgtttttttagtgttgagttgtttgagtttcttgtatgttgtggatatgagtcccttgtcagattaatagtttgcaaatattttcttccattcaatgggttgtctcttcactccgttgattgtttcatgtattgtacagaagctttttagtttaatatagcccccagttgtctatttttgttttagttgtctgtgcttttgaggtcttattcataacatttttgcctaggccaatgtcctgaagtgttttccctatgttttcttctagtagttttataggtttaggtctaacatttaagtctttaatccatcttgagttgatatttgtgtatgtggtgagaaatactgttcagctctactcttctgcatatggatagccaacttatccagcacc

SEQ ID NO: 318576 - DNA, 4001 bp, Homo sapiens
gcaaaacgtatcatgtagagaaaataattatccttaaatcatctcttgacagattttgctgtcaaatgagttacaaaatgaaacaaaagaaaaacttctgaaacaaaacaaaaacaaaacaaacccctctgtggggtttgaaatgatgaattagggactgtggacctgtagatacttcacagagttgttatgaggaattaagaggataatgcctttgcataaggctcatagctcacaccaggacaacaaggggttaataagtgcctgtgcctacttctactattgctgccatatggtggctcatgtcaaatttgggatcaactacgtgccctttctctttccttatattggtgtaatctttccttattgtatgttcaatttataggaaatttctgaaactgctcttacattaacttcttttctttctttctttctttctttctttctttctttctttctttctttctttctttctttctttcttttttgggatggagtctcactctgtcacctgggctggagtgcagtggcatgatctcagcttactgcaacctctgtcttccgggttcaagtgattctcctgcctcagcctcctgagtagctgggactacaggcaagcaccgtggcacctggctaatttttgtatttttagtggagagggggtttcaccatgttggccaggctggtctcgaactcctgacctcaggtgatccacccgcctcggccccacaaagtgctgggattacaggcatgagccactgtgcccagccacattaacttttcttacagggacaagccatccgtgttggaggccacctgtcttggacccacaagagttttatgaatgcctcccatcagctcttttcactgatagacctctaagtctcgttttccagaagctttgctcttctctcaatctggcactgatcccctacagcaatcattaactaaatgttcaaacataagacaaggaagcatccagttgagaaacgtgtttactggaagaaaaaacaaatgtttcttgtaacctatgaaaatcaaagaagaattctgtagctaaaggtagtagtgtatatctggggacaaaaggtcaattaatgaataaccacatttcagataaggaaatatagaatgctgtggaacaactatagcaagagggagagtgtatgaagatcataaaaacaatttcagtagattctggcttctggtcccatactcttaaccaaacctcttatgtcttattaatgaatttattcttgccaattcatatgatcttttttactttttctcacttttctagatgtgttgtatatgtctccagactctagttggcttcactgtactgtgaaacatttccatataatgccctgatatcatttcaaacttttatactttataaaatatatctgattattttttaacaattcttctttcccaaatttctccagttctcttgagagcatagccattatttcaaatctttggtttagagtctcctggggtcttgttctttgcttttccatggctcttgatctaatccatcatcaactttcctaattcatctttcatctacattcatctttctattcatcttccatcactctaggcctacagtattcccccacggttccccatggtctctcctacttgctataggctatccatctcatggtcctgaagagggagaggacctggattgatgacttgatctgcctctcaccaacactgtgatccctgtctcctctttccctcaccagcctcctatttcccctaacatagtcactggattagtctgctctcatactgctaataaagacatacccaagactgcgtactttataaaggaaagaggtttaattgactcacagttccacatggctggggaggcctcaggaaacttacaatcatggcagaaggagaagcaaacacatccttcttcacatggcagcagcaaggagaagtattgagcaaaagggagaaaagtcccttataaaactatcagaccttgtgagaacttactcactgtcacaagaacagcatgagggtaaccacacccatgattcagttacctccccactgggtccctcccatgacacatagggattatgggaactacaattcaagatgagacttaggtggggacacagtcaaatcatatcagtcatcaaaccacgttaaacctacttgactctatctccatatttgttttgctgattcttcctccattcagatgattatcaacttgttgaagttgcctaactgttcattgcatcctgctattttaaaaatatgaaagtattttaggatagttttagatttgtcaaaaaattgtaaagtttgtacagaaaatgtatggatatccctaacccagttttccctattcttaacattttacattacctgggtacatttttcaaaactacaaaacaaacactggcatattaccattaattaaacactatacttcactgtgatttcagtagtttttccactagtattcttttcctgttccaggatctcatctaggatataacatcacatttagtgattgtgtttccttagtctctctgatctgtgacagaacagactaagaaaacacaaccattaaatgtgggaaaaaataactgattgtccttagtctcttctgtcacagattagaaaatattaaggaaaatcagttattcctcgtttttcattacctggacaagttttgaggagtagtcaggtattttttcaaatatccctcaattttttaaaaatgtttttctcatgagtagactggagttagggatttggggaaagaacctctaaattaaagagatcagatacctttctcatcagatattatggatacatgctattaatatgacatcacccgtgatgctaaactttatcatctggtccaggtggtgtttctcaactataaaactaattttgacccccttttcatagcccattatttggaagaaagccagtaagtgcagcccacattggggaatgaggagttaagcttcaactctttgagaacagagtatctccataaaccatttcaaattcctctataaggaacatatgtctctttctctttattgatatattcatgtacttagaaaaggatttatatcagtataaatattgagatagagaagtacaaagtctcgtgaatatgtatttaatattttggttataattcaataatacactatttattttggtggtcaaattgttccaggtttggtcattccattgggtgagctttcagactggctcctatagcactttgacatacttttattttgtgtttattttgtttgttgaaaattttgtttttgggcactacgagatgctcaactctctctctctctctctctctctctctctctctctctatatatatatatatatataatatatatgttttaagaaaacatttaaaaattgttatatattttaaggtgtacaacatgtttttatatacatagttaaacgactactacagtcaagctaattaacacattcatcatctcacattgttaccttttttaaaaaaatgataagaatgcttaacatctgtctactctcttagaaaatttctggtatacaatgaaatattattaattatagtcctcatgctgtatgttagatattcagacttttttttgttgttgttggagacggagttctgctctgtcgcccagtctggaatgcactggtgcaaccttggcttgctgcaacctccgcctcttgggttcatgagattttcctgccttaacctcccgagtagctgggattacaggcacccgccacaatgcccggctaatttttgtatttttagtagagatggggcttcaccatgttggccagactggtcttaaactcctgaccttgtgatccacctgcctcggcctcccaaagtactggaattacaggcatgagccaccgtgcctggccgatatctagactttttcatctgtataactttgtaccctttggcctcccta

SEQ ID NO: 318577 - DNA, 4001 bp, Homo sapiens
tgcaccattctaacttctgcttccattgtcacatcttctctgacttgggccctcctgcctccctctgataagaatccttgtgattatattgttccacctgaatagtccagtataatttttcaatcttaggatccttaactaaattacatctgcaaagtcccctgtgccatgcaagtcaacatattcacaggttccagtgattaggacttggatattttggggaggcattattccatctataattagcaggtaacataggttttgtttttatacattcatgatttttactactgaactctaaagacacatatcaacccaacatcaatcacagaaatagcttttttcattggcttatttttcattatcatatttatcatatcatttatcatatttgaaatccataagaaaatgcatcattttttctaggaaaaataataattatactgtatattgcttacaataaaaaaatcacaattttctctgctctagaggatttcttttgaattgacagaatagacacgaggttgtgactccaccatgtagaaaacaagtctggtttttctatttaagaatatacattttaattatacccagtttggactgcactggcttacatttcagcaaaatatttcccataaaagtaaaaaattactcgttttctttcctataactttaagaaaatcagagtttatctcccaaaacctcttaggttactcacctgagaaagccacatgtgtcaaagtagagcataccaggaaaaatataatcttgtggggaaaggcagccatttgatctcatataagactcttctttgataaggcctgtgaacatgcccaagattgtttttagtttcccccacagctagcttttccaatgtgagagaacacaataccctaaggtgataccattcctgtacacttgccctggtgatttatactgacctggtctccaggaactcaggcctgagagagcccttttgctttcaagaggaagatgaaaaacataaaaaaatgacttttttttttctgccaaaaactagctgacaatcacagttctggcctggaagaaaaattaggcccaatattcatcagggctgactcaaagtctattacctatacataggttcaccctacaattatctaattatctcgctgttaattacctaagctgctgccttcttgttagtgaatacagacatgtaaagaattcataagaattctgaggtaacaggtgtaaactgagagctgtcctgtacaatcttggacatataaccctataacatgtgattccctgagatggaccagtttctcccacacttaagccctttatttcccagctaaatttctctttgccaggtcagtcacatgggctcaaatataaagaatgggttaaacatagaattgttggtcatgcttaataaaaattgtgtataccttccctgatgcaagaatcagaaaaaaaaacaaaaaacatatgacatatgaccttgaattgagtgagatgctagaaatcagagtttggagttagagagatggcagttcaaattcttggtttaatgtctctgagaagtgtaggcctcagaaagtatgaacttcataggatattgaaagaatcaactgatattaatataagtagagtttaaacatattaaattgacaatttgtttagcccaacttttctttgctaggagtgaaatatttaggcccagggagaagataccttccccgtccatttccttaacttgctcacgccctactctatccattctgtctcctttcaaaattgtagcaggggcataaagagaaatgaaggagaaccataaataagtgtgacattttctctactttaatatgcagaggaaacaaaaggagggtgttagaggaaaaagagggaaacccactgacagagaggaaggctgaagagatcccaccgctgacttggactaaggagagagaagtcaaagagtggttacctggatgaggtggctgaatatgggcctgctcttgtcactttggatgtcacaactagccttgagaagagctgctgttccaggagtctgtcacaactagccttgagaagagctgctgttccaggagtctgtagccaaggacgtacagcagtggaggctgactcatcgcatagctgagtgaccaattgcttggcatgagtttactttaatggctgtttctgagtttgatccctctccggaaccaacccctctgatgtgtcctgttccagcaggaagagacagacctggaggttctgtacttgtgatttctggttgtggatcctgagaacaagaagtactgggatcctaaagttctgacatttgcaaagcagattaatgacctaccacattccagatcatttggtgattttgtgtgtgcgtgtgggtgtgtgtgtgtgtgtgccaaattcaaggtggtcccagcctttctagtcttctctaacctttcttctcagaagtcgcacctgttctgtctttctaggatataattttttttctattagcctgggtaacaccccaaccaataaagtttgcaatatccaagcctcctaatttctctacttattagcttatattaagcttcagcatgagcaagcctaaaaactcgccattatctggaaaagttctatttcacaggctttaatctctcctagagtagttagcactcttttgtggctttgtgttcctgtactagcttgaattccacagtctgacgttaataattagctccttaacacgtccatcctctcttgatgtcctgctctctatttttccttctttcttccaagttgggataaattcagcttcttattttcctgctccagaccttggttgtggagaaagatagaaaaagttccatacaggggactctgtgatcctgctaacatcattatttacctaagctctttagactccagtgaaagcttctgatttaatgtcatgtccctactttatgccacatgtcccataccattttctttgttttatgcaatttatttccactatctgatcccattccacccacatgactttgagtggaaaacttcatctcttcattgctgagtaaacaaacttcaggatgaacaagccctgtccactattttcccttttactttaaaattctggaatttttatgatctacgtttttttcctctgtttttattcttcactccatatcaacttacttggggatctacaccttcattcattcttttcattctgtcggcacctggctatggagtttacatttctcatcatatttactcctcataataatcctgtgaggtatataccactctgagtcttgtataagagaaaaagaaactgagatagggataactcaaagggataattcatttgctggagctaccaactagctactaaccatgctagaatggacagagatgacattcatgccaaagaccatgttgacttgctatctctacatttgctctaagtttagaaaaaaaaaatcccttcaatttatcctccaacagtcttcttagaaccttaccatggatgccttgtataacacatttcacctttctggtaaaaaaaaaaaaaaaaaaaaaaaaaaaaaagtacccctcttcctttcattaaatcttgcttttcccaaagccagtgattttaatctcttcaaaatactgccttctaatttattagaatataggctctgttaaggaaaaggccttgcctatatctgttaataatttttaccttgtaatcacagtgaagagcattgaatttgccacatggtaagtattcagtaaataaatagatataaggtgaaataaagtagtccacccatcccttttttattcggttgtttactgtgttcttggatatttttaaaaatgtgtcttcacagatgtaatttagagacattgtatctagtccaccaaaaaaaaaacacctaattttgatgaaggagtcacataaattttggaaaagtaatatttttataatatagttcctttatacatgaatatga

SEQ ID NO: 318578 - DNA, 4001 bp, Homo sapiens
atctttctcagcagtcaactcatgacagacttttttacaaagaagaaataaaatttaaaatttatgaattagacaaaagcttaaggtgctaatacttctaaagggaaggaatacagtgatgcaaatgtgaatcaaaatgaaaagtttaatccctcattcatcttttccctcacttatcaaatatcgattgacctcacattatatgcagtgctcattaaggtagacgaaaatgaaaaagatgtctccattttgccctcatccaagttgcaaacatagtttgaggctctgttcaggtatctactgttcttcacattttcttccatccatatccagaagttgccttctgcattcacaacttacataggcattctctgtacatctcaagacatttaggagcattcttttaagtcattgtttccatcagactgtgagctccttgagagccaggaccatgttatgcccaagtccataggctcttaagaacctgtcatgctcctggcaattgtcaatactcttcaatatttctcaggcactaaagagggttctctggtgtatgtatgagtgaatgttgtctgggttccaagtttggatctctactctggggtactgtttcagcagtgtatccaccaccctcgtacaaataggccttgaagactattacgggtgaccttgaggcattaagtttccacagtaacaattccaaaaaaaaagaactcatattataatgtaagtcctggggggaaatttaatggaacattaccttaataattccacgtggtggccaccagtgtctagggcctgaaactagagaatacatgaaaatagttacagaatttaattcctgttaaatcatagcttaatctgttggcagaataaacgagttctaatttattatcaaggaagttttcagcaatggaaaacattatttcatttatacatgtattcattcatttttttaaatgtgaaataaatcttttactcctaattgatatcagcaggggactatatagatgcatcactgtttcataaaggctggcagtccagtgtactaaataattttcctaattagcttggacttgagaggacttagagctggtaatctatgtatgaaagaaataagcaatgctgtaactttaaagtgatcttttggcccaatcatcatatttttttaggcatgaaagacacctgggtaatactcaggaattcttggtagatatgtgaaaaagcaagctctgcagcccttgaggctaggcctctttatgactccctacatgatttcttctctagaagagggcacaaaagataatggtccagtcaaatacacagcaaatcaaacactctaaattttccagatgtgatctcatgtatgcatattatattgctagtcacttttacatgttacctcagtgagtcacccaagcctccttgccctcatgagttaaatctcataatcggcatgcaaaagatggcaaaacaaaggtctctgcccattgaatcagtcttttagactctctctctctatatatatatatatgtatgtgtgtgtgtgtgtgtgtgtgtatatatatatatatactctgagtatgtgtatacatatatatactctgagtatactcagagtatatatatacatgtgtgtgtatatatatgtatatgtatatgtgtgtatatacaaatatagagacagagagagtctaaaatactgattcaatgggcagagaccttcattttgtcatatactctgagtatatatataaatatatatatacatatatacactctgcaacacgtcaatggataatttatatatatatacacatatatatatattcatcccagttaaagaacaatttcaaagcattctctctcagattatgatgtaaaagcccacaaatcaatttcaactgctggccaagaccagctaaattactcaccagaagataacaccaaatgtatcaagataaaggacaaaagtgagaatactgggaaagatttggccatttttcctcctggtgtgtccttggaatgatgctctgaaatattgtctcaggttgttgccctctaatacaatcactaaagtagagacaatcaggatttaagatgacttttacaatgaagagccatctctactccacccattgtatcctcagtactatgtatttggaaagcctattccattcttcttcagaaacaaatgtttaaaaagttaaaccttgaataactatcttgattaaaagtatagagctcagtaacagatctttgaatactcagaagtaaatcataggttactctgtgggcataagtgtattattttagtgggaaaacattttacatgtcatgaaaaagcaactccttacctgaagcttcacctaaatttatcttttgaggggatgcaaaaaaaaagatggggctattgaggtccctagacaacatgaacttctcaataagtggagtggatctgtacttgctcgtcaagcaaagaatacctctttggattaagacaaagatttctgatgattcaggcatgcttgtctataccaaggatcttctgatgttgaatcccagactctttgaggacattcacagggagaaaaatcattatctgccatctcactggggtcccacagctattttaatccagacacagaaagggaaaagtcagagagcaaatcctccctcgggatggactttccttgtagcaacatttctgaccccagagaatggaaactgcagtttccagggcctgaccaaggaccacatttaactgttcctccattcctaattctagaaaagtagcctggtcttccatatgttctctaggcttttatctctgtctgcaacacatgtcaatggataatttatataaactctgctgatgtgctctgatgtggcaggtgttacttaagacattaaaatgtagccagagtattctactctcaggatgattgcaagttctttgtacactatgaaaggttgcctaccatgcctactcctggcacaatctgggacaccatgttttgctaaacacacccccatctcatcctgatattttccctggcttcctccagaaatggaacaggaacagtacaagttcagctgcagccagaaaactagagcaaaacacagaggcccactctctccatccctcatgtcacagctgacccacctcagaaagaagagaaaaggaagaggaatataatgtgctccttctaagaagcatgtattagggccccaggaggaaatagagtaactgctgcgtaggacagaaaagtcactgaggcattgtgtgctggactgagcaggccctggagatccatcattcagattgcatcaaacctcagcaggggaagacctgaggagggtaagaagagatcactggaaagggcagccattagcaggcaattcaagagaggcaatagcatgagaaaacatcccacagtaggaaagagcaagcagaaagaatataacatgttccacaacaataattagtatcaagaccaggaccagtattaggaccagaatgaaaacatgtgtggaaacatctaataaagaaaaggctggtacaggaggttgcagtgacagatgagatccttggataccatttgcagtagatccagccttgtgcctgtagtaacccagagcctttgccattttaacagggaagatatattattatagcttaaggtcctcctattatctgaacttctggcctctaccattccttctgtaaaaagctatttttcttatacaaagaaaatatatgctcacttagaaaatttataaaatagaaatatacaaaaaagagagggaggcggagcaagtagaaacatacaaatagaaatggccaaatagaaatatgaaaaaaaagaaacatacaaaatgaaataaaatatataaaacaaaaaatatacaaatgaaataaaaaggtgtgaaatcttacaactcagaggtacctattaaatatatataaaattatattcttccagtttaaatatatatac

SEQ ID NO: 318579 - DNA, 4001 bp, Homo sapiens
attatttaacgtaccatatgttttgctaagctacttattaatttgtctgttttcctacactaaaacgtaattttcagggcaggaatttcatctattttgtttacttaaaaataaccccagcatctcaaacagggtctgacatctaagagatgctcaataaatattcattacatgaactatatacaccgactatatacaagatacagaccaccctcttttgcataatgattactagaaaatttatttcagcttcctatgtggtgtatcatggcttgttgagatgttaaatggaacaatagtagttttccagttgatttattttttgtttatgaaattttaaaatgctcctttaacatgataaattgcctcttgcagacatccatcatcattaatatgttgagtgtgtgtgtgtgtgtgtgtgtgtgtgagagagaggctcatgtcctgattcataaaaatctgtttctgtgtttttaacaaaagctattagtacctaccagtataatatgtttgtattattaacatgaaggtgttggccacaaaccacttttctttgggaatcttggaatgaattcaatgaacagaaaaagcaggactaacctgatcttcattcttactggcagcatctgggatgaaaatatagaaaccaaagttaaggaaatgtaaaatatttaataaacaaaacaaataatccatttaatgcagcatcttgattgctttaatgacaatatgttgtaaaaccgcaaatggtttttgaacacattaagatttatcatggcaaataaaagaagggcactggaccaggagattagtatatatactcacaaaggtctaatcactcagaaagttacaattactttggaaaataatactcatgtgaattctaaccccatcaaaatagcttatcttcaaaaggtcctttcggagtaataaatgccagcctcccttttaaaattacaatataacatacacacaaaatactataccaattataattttgaaactatattatagttgaaactataatatagcattacatttataggatatatacataaaatttaattttctgaattctggcagctctacctccttattacagctgcaaaagttagagatctgacagaaggtaagattaaggtcacaggctattatactctctcattaacataggctcttttgtacctacacacctattttaggaaaatgggcattatttgtatatgatttcagactatctatgagtttctctttttaaaaattttaatgtttcagagcaacgtaagtctaggcaatttgtgttctcttagggttaaatagcaaatataaaaatctaccttccagctcccacaaaagtccctcactctttgggagaaatgctttcaacccatttagcatttgaaaacacaagactaaaataagctagaagataccactgctttaaaataagaacagatgattgaattttaaaaaatatttcatttatacctataacattaaaatacatatattatttacaattaagttttaaatgtctattacatatataagaatatgcattatgaattgatacatttagcaagaggaagatgaagaagaatctattcagttttctgaattaataaagaattaatggaagaatttctcatggttagaaaattcagattatctcaaactacttgccatttctaaagataacaacataattataaagccacatatataaatcttcagaactctgtgtctggcaagacatttcaggattatacatgcatacgtaaacattttttggcaggagtagggggagaaaagtcccttccccagggctttgagatgtgtggcaagaggcttagattacacacaaattgctcaccttgtatgaggcaaagagccaagggcagaagcactgacactgtggctatcttcatgttgaagacgatgcaagtcgcctacaggtccactccatgcattgctcagctggtgcagtatgactgaactcggggcgatgcagtttacttttataaagcactggtgacacccacataaaaccagttgttcaaggtcatgggacttatataccacaccactttagcttccatcctttaggatcctgtcagggtgtcaggtttgaacagagaatatctatttctaaagtaggaatgttctttcatggtacctcccccagaacgcaattgatggagtccacagaccctactcaaagttgaatattctataatcctatataataaccgaattcctcagaaataccagatatactacctcgtagacaaacatgtttctgactggactcccttcataagtgggagaggagaggaaaggaagacagattggttgtcctaccagtcaggtatagatttaaagatttccacatccagagaaatccagggttcctgttctgaagtgtctgagttcagtgtcacagactcatatatatgttagagttgaacgaccctaaaagataacctggcaaaattctaatgttgaatatatagggaggcaggaactcagaggagcaatgactttctcataagcagacagtttagttggagcaggcagaggaggcatccagcacttgcaagcagaccacacatataacattctttcctctctgtacactgcttcatccttagacattagaaaaggcaggaacgttggaaaaataaaacttgtatgtaactacttttaaaacttctcaatctgcaggatattttatattctgaagccttattttatatcctagccaaacatcataatcataaacattggagactcagtttaactttccatagcctatgattacccatattaccgtttgaaaaatttggctcaatcagttttctctaaatcatatttcttcctgtatcatcccattatttagtctcccaaaaagaaaagaagaaaaaagttgttaacaattataaatgtgtaaatgtaacatttttctagagaaagtttcttctctttagttgcttctttcatcctacaagtaacaccttttttctaccagcttattttgccctaatagcttaagaaagcacctgaagaaacatgtgaagatgactgaaaccagagccaaattgtttcattccagtacttctcaagatattcacatccacagaagaaaagttcgagactttatccaattaaaggcctttttatgatggttccagaaaactgatcaaagttgcccaacttagggagtatgccaatattatgagatttatcacagtgagataatacgtcctttcttttttctctcatgaaataatttatttcctataaaaatataatcactgggccaggcacagtgtatcacgcctgtaatcccagcactttgggaggccaaggctggcggatcatgaggtcaggagatcgagaccatcctggccaagatggtgaaaccccatctctattaaaatacaaaaattagatgggcttggtggtacgcacctgtagtcccagctactctggaggctgaggcaggggaattgcttgaacccgggaggcggagggtgtgtgagttgagatggcgccactgcactccagcctcagcgacagagcaaaactccatcaaaaaaaaaaaagatatacacacacacacacacacacacacacacacacacatacatatatatacacacacatatatatatatatataaaatcattggtttcaaggtctgcactattgttgtagcttggctcctttccaatggaatagtaaaattagtgaccacggaaagcaagttcaaattccattattgttacaggttagaaaatcaaagtccatcatagcttaatggaaagagaatgagacagggtttcagaaatctgtttctattctatgtagtcttttcaactatgtagggatagaaatgaacccagctttgaagcaagctagaaatgggtccaaatcttgaattgttagccatgttgccttggacaagtcacttattttctctaagcctcagtttcctaata

SEQ ID NO: 318580 - DNA, 4001 bp, Homo sapiens
attaatattcacaatgacggagtccaatttagtactctttttattaaactttattatggcaataatgttaatagacatttgttaaacatgcactataccccatccactatgttaagcattgtacatgcctttttctcatttaattctccacacagagatagtcctttatatgtttattttatatataagtgaaataaacatcagagagttcacaaagctataaaatgaaagtgccagggctaaaattcactttactctgtttcagcattaaggcccttaggcattatggcctcccaaatactatctagtatgtctgtgaagcatccatgctttggtaaactgtattagtcaaccagatcctgttaaagatcaattcacctttgtaaagagaagaaaaggaaataacaattgatttctgagactatctttgcagctaaactttacatagtcagatatatatttttctgccatctcagcaactgattgaactacccattaaggttatttggctttagtagtcaagcttactccataatatcacaggaatcctttacccattttttttgtatttctaagtgtatttgtttttgtaattatgaccagctacagtgaacactggcttctctatcagctaaatctcattgattttttttttacttgtacatccatttaaaatcttgcatagtagtaaaattcatctgctactgtcacacaaaatgatacataagatatggaaggtcccagggcttagttttatttctattattttacaaatgacaaaatatctcagaaaattatgttatttctttaagtgacacaggccattaatagaagagatgaaactaggtcttaggtctaaaaactagcatttgctttgtgccctacaacgtgaaagagtagaataataaggaagaaaatagcttatgatggacctgctcattccgatggttctgtcttaaaaaacataaccttgaagtatgattgtgctttgaacctcactaaagtgtccaaagatattctccttctctaagattatttagctcaccagaaacatatgtttctgcattctaagtttcaattacatattttcaaagatttttctcattgagtttccaatttccccattgtcttaatttaattatttgaatgtctttgtaataataactaaggggaggaaaatatttctttgttctggaaagcaaaaccaatatttaatgcaattatccatcctccaatctagttttatggaacaaacattaaatgtgatggcaagagaatctgattcaaattccagattctaactactagttgcaagtcttttgctgattttctcaatttctctgttccacagtttcttatatgaagaacagagatagaaataccttattatgagtctcagagacaatacataaaatcccttcgtacatgcctagaatatagtatatgctcaacaaatcacagtaattttaataattattaccataaccattgtcgtcatcacaatcattatcatcattatgataatctctcagaattggtcttttacatcaaaatcattaggatttaaaatatgataaacaactactcatcatatccagttcagtataaatatgggatcttaattttaagaaaaaacttacctgttaaaaagcagaaaagagccagagagaggagcagaaacatgcctgacagtttcattgtgtcagttagctcactcagatcaaggctgctttgtccagctgaggttctctgtcaagacaattcccagaaagccctaaaatacattcagaccacatgagtcctatgcagtttatgcatttaatggggcctgccaacacattaaaaaaatgcttcatgctccccatcaatcttaaaaattgggacaattatgtgtgtcgcacctcagatcttattaatagagaatgtcattttctactggtagcctacattttcctaacaaccaatacatcctcccggctcttctttctaaagtttcactacattatagggatgattcactggttgacttccacttgattcttatatttctttcagacaggtcctacatgtctgtggtccaagtgagtaaccacaggataatggaatcttgggtgtaacttggatttttagagtccagatcatccaaggtgtacctaaaggagacagatattccacactgtagctagaactgcattagaagaagcattttctgagcaggaatcagcttattaatttttaaatcattatagcagtcaaatgccagtggttgtccagttttgagtcaaaataaatagggaagtcaattattttctttaatttgtaacaaaaatttgttttttaaagttactgaatttaattttcttttttttttttctttcttttttttttttttttttgagatggagtctttctctgttgcccaggctggagtgcagtggtgcaatcttagcttactgcagtctctgcctcccgggttcaagcgattctcctgcctcagcctcccgagtagctgggactacaggtgcctgccaccatgcctggctaatttttgtattcttagtagagacggggtttcaccatgttggccaggctggtctcaaactcctgacctcatgatccgcctgcctcggccttccaaagtgctgggattataggcgtgaaccactgtgcctggcctgaattgaatttttgaaatgagcaatatatttccttttacttttcatataaaagttagatgaatcacattatctttcatggccaatttaattgcaagatagatcaaagagtgcgatgccacaaccttctttcaggaaacagcaacaaaaaagaatggttgtagtgataacaagaacgtctacctcaaatcataaactgctattgaaaatatcatgagggaaatcatcttaaagtcctttacagaaagatgtaggtcagatgttaaaagtattcaaagacactactgaaaaaccttaaaaactatatttaaaattttcttgaatcctttatgggaagaggagtcaaaatagctagaaaaacaaaatatatgggaaattgcttaagtcatgaaatttaaaaacaacagttgtacaatttacccatttgtgatctttaagtatgttttctcattcatatgagataatataaagatcagttcctaaaactaaagcattgcatagcatggttttaggtactgctgtgaccttcctccctctttccattctacttcctatgtttcttccttctttgaccacctttttttccctccttctgtgactagaatgtacagaattagtctaataataatcatgtccaaaagtgacaaaagtttgaaagcataaacaaatagtaataaaaaaaatcaacataacagtggtagtcgatcatatgccatcattaaattcacggtgatgtttctaaacttcctgtttaaacttcttcctctctccccagagtttcatttttggtccttgcttctcatattcacctctacactctcagtcactgttcacctaaatattaccatctccctatcttccagtctttccttccctgctttcctctgatcttcaagagttcttttttaataggtgattttttaatagaattattcttatttagaatgactctgtcctctttttcagaatgttttcaattctctatcctcaacatttacactacctaccacaaaaacgcttaggaacatgaaagcacatattaagtattggctctggatagacatagggaaggaaatattatatcataaatatatatagtttaagaaagaatctggtccctaatgattgaattatcctttttcttaggtttctgaggccatatgaaagtttttggttttgttttaatacaacctaaaggaaaaggtaagaaacattctctgggaaatcacttaattggctctttaaataagaaggtgaaatactagaagttaataaattaaaggcaattattcacagactacataaaattatagtcgtttggctgca

SEQ ID NO: 318581 - DNA, 4001 bp, Homo sapiens
gggactagtccaagctggcagagcaggtgactctaccctgtctgattgtgcaacagtcagttttctatccccacctgctgttctgggtgggaataattataaattacagcttatagagatttaagctggatcctggaaagtagaagcgtttgtagtagagagcactgactccagatctcattttcttcttatgaggtactcacaagctctcggtacacaagtgacattcattcccataggtgatgtagtcagaaccacaaactggtaggtatgtgatggggcaggggatggccaccactggatacttcttgtaaatgctgcagtccacctgtgtcatatacaagcaaatgtcctgtttttctcccagaccccaagctaggccactattagatatactacaagggctggaagtcccagctcagatattcagatgttgcttggccacttctttaagtactagtgttatcactatgacaaatactagcactactggtattctatttttttctgctacactcagttaacaattgctgggcatttctgggctaggcgttaaacttaaatcttgcatgaattttcttgtttaatcttcagaacaactagagtaaattctactattacctctctttacaaatgtgaaaattaaagcttagaaatagagataacttgttgaagataaatgctggtaagtagtagagttaggatttgaatctagagcctgtgcaatttatcagggtacttttgctctgccttttacacgttatgccttttatgaaaacatcaccaacttctcagctggaaggcggttctcccttctttaactctggcatttttaaaaaacatttttaaaatatggttgtttatatgtatgtcatatttgtttagttgccttctggagaacaggtaccatttctccatgtgtgtttgcctccctctcgaatccccctaaacataatttatcctacatatatgttgactaaatgacagtcaatagttattgacattaaaatgttattcaacatacttactttttttggagacagactagcagcttctgaaaaagagatacagatgaagatgttaaaagtaaagcaaactttaaatctcattaattaatataagtttcatcctatataattactctacatttcctttagcaatgagattcagcacactctccatccttatgcaaaatcctagttgtttgctgaggaagttgaatggccaatgggttaggttaacccttggtttaggtaagagaattataaaaatttcctctatttattgatcatggaatgttttctgaacctcatagtgtttttgataatggccaaagtcaagtagcaataagaagtattaaaatcatcactcctaagagcctgaaggatcatctctgatatcctttccttcccaattgacataaagaaatgcaattgaatgtctttatgtggttggaaacactttaattaatttttcacagtataaaagtctaattgttgacccttggctttttgagacttgtgttttattttaatccccccaaactgatttgggaagacatccaagtttttctgtatctttgcactaagaaatggtatatctaataacactgacaacttccagtgtccatatgaacatagaaatggaagacttacagagaaattagatcattttttgttctatggatgcaaataagaatccttgaaagtgaagacattggactcaagtctctcaaactccagatggaacataagatcctattacaaaccagtacactttaaattcttacaaccagatgtttctgagatgctcacatcgcaggagggattatttatgaaaacaatcttaatggctatatagggcactgtctgaccttaacttacctgagctgctacagaaatagaccactgtacagagcagaaggagacccccagtgatcttcatgctggaaatggctgtggtgtagaagctgctctgagattgtcactacagctgcatcgaccatatcccaggtaaggggtcatgtttatatatatgcaaggcttggtttctccgcctttcctgtgaggtcatccagaggatctcaaagcacggtgccacaccctgggctgtgttacagtccttgttactgaactgccacttcttatctgaccaatgatttgattatttgaggtaagaagtattttctatcttccccaaaggtgggactgttaagaattctaaacttcatgaactagaagagactaagtatgagcttcttgacttagttatgaaataagtgaaaatctcaaacctcctttattttacgaaactggaatctattaaaccccgattagactgattacacctacgtttatatcttggcacctggggaaatattgtttatttttgaggcaatgaaccaatgaagcaaactgggacctaatggaaggaacactgacattagcatttatgaggtatggagaaaagcactaacataatacttctgatattttctacctgtataatcttggataagtcgttatatgctgtgagcctttatcaatccaaaaggcttggttatgtcgtgataacatgtaaccacaagatttctgtgaattaaaacaaaactttgtttcttactcaagctacacttgtatggtagtcagctgttcatgctacattgccttcactgtggatgccaagtgggcagagtcatcactatttggaacactgtagtcaaggtgaagtgaagttgagttcgttctcaaggagttctcattttagcaattaaaacttccagcccagagcaatactgctgtcacttcccctcatggtctcgtggccatcacatgctttgttatgtatggagtgagtgcaatcaatctgatgtggtttagctgtgtctccacccaaatcccatcttgaattgtagctcccataattcccatatgttgtgggagggacctggtgggagataattgaatcatggaggcagtttcccccatactgttctcatggaagtgaataagtctcacaagatctgatggttttataaggggtttccccttgcacttggctctcattctctcttgcctgctgccatgtaagacatgccattcactttctgccatgattgtgaggcctcttcagccatgtggaactgtgagcccattaaacttctttttctttataaattacccaatcttgggtatgtctttatcagcagcttgaaaacagattaatacacagtcttaccttgtcctgacctgttccctgacctgaaggttggatgaagaactagaatagttggcaaacaacagagaccatcccagagactgagtttcatcccagtccaatagggcctgttgttagccacaatagagttcacataattggaatcatatacataaaagtctgctctaaagcacagtgcatttaataatattattgtgattgttattattatttacaaaccaagagttaatgctatgagttgctgacattagattgtaaactgtattgtccatgcacaactgtccaaatagctgcagtttgcttattgagtttaaggacatatgtatgaagacctgggggaaggcagtagactgtcccactagtttactgcttggcaggtttattttagtacattctaaaactagcatctacaagacatattaagtgactaataaatgatattgcataatctctaatattttactcctatatctgtttgggaggcaatgtaatctagtagttaagagcatgggcattgagtagatcccatttagaatctttcttctaaaaaatgttgactgtgtgtcttttagtatttaggttaacatctgatactttagtgtcttcatccttatgacagaaataatatttacctcataggttgttttgagtgttaaattagattttacagacacacactctctcacacacacacattatacattcaactcttgaacaacatggcgtccggggtgctgacaccaccacagttgaaaaattaacat

SEQ ID NO: 318582 - DNA, 4001 bp, Homo sapiens
gcatctccagcttgttttgtctgagaggtctaggcatgatattttattaattgtggactatctctacttgaatagcttggaatatactcaaacttaaagttgaattcttccttccctccagatgtgcttcattaattaattcattcattcattcatcagcttccatacacctcctgttatcgggctaaggttagtggagctgatgcaaagataggtatgcatggcataatggcaggaggaccttagaggctagtgcagcagaatagaaacagcagtgcctgatgataagtatatgccagcgtgatttcacttcctcttcttgcctgctcaaatcccagggagacagagtttatgtgatactcaacaatgtgatgggaaactaccaagctcgtaactttcagtaatcctttacatcctctcacagctactaaatcatgaaggatggcttgaactcaggcccatctgactccaaaatttatatccttaaccctattattttctttaataggtaaaacagaagcctcaaagacataaaataaatttcccaggccccagtgtcacacagttaataagcaacagagtttagagtggaactcaaattgagtaccaaataagatttttgctaccacacctagattttttcaacaatactcattactgtaacctgagtcatgaatggaaggctaaattaaagtccttattttctaagacagagaacaaagatatgtgtgacccatttaaaaattataagaatcatgacttgcccttattgagtttcactctatgccaggcactgtgctaagctcttttcaaatactatggcttcaagtcttggaataatgttataagtatgttgcccatggccacgtgatcaaaaacgtggaattaaagaccaggcctttctaaatttgttgctagtgtctcaccaccttgttctactctctccattttagaaagatctgcctacaatttttgaaataaaaccagttttcatacacataaagtaaatattcaaacatatagaaatttaattactgtgtagtatcaaatatttccttactgatattgactttaaaattacataaaagtaggatgggtgtactgaccatctgtttcgtctgtttggcacattctatacctggaagaaaaacaaagacaaggcaatattaaactctggaagaacctaatcttactagaaaaagaatctttgatttatgctttagctttcagcctgtcataaaaatgtaagtctctcttcacaactgtgtatcagcattgtatcaaaggttgaagctcttcacacgtatctttaaattttttttcttttttggagtgggagtggaatctagtcaaagaaatggaaaagatgccacgatgaatgagaattttgtcttaatcttttttacttcataaccagagctcagtagagacagaagaaataagtgagtcatatttagggagatgtgctattgtggacaggtgtagatgacagatgttggaacagtggttgaaaattctagggaggccaattttaactcaataatagaagaatagcccatggtgccaaacaattgattgtaatgttttatgaataaatgagttccctgtaaatggtgacatcaagtcaaagcagagtctggatgatcctctccctaaaaaattatacaaagtattctcatgaataagcatttgactttagatgactgttaacatccactctacccctgaggtgatgtgatttagcaattcgttggttgaggcaaaagattcattttaaaaagtttcccttattatttatgtgatgaattacatatatcccagaattacataggcagaagactgcatgagctattagtacaagggcaggggcagtattatcagagatactcactgaacatggttgcaagtgtcagagccaagagtaggactatggctgttgctctcatagtactgaagtggccaaggcagtcagatgtagggaaaagaagtgacctggtgtccgtccagctcactttgatcctgccttatatattttcaagaattcctgcctcaattgtgaaatagcaatttctaagtagtacaactccagaaagaggtcagaaatgtctgcgagccatggggattcttttcttgtgaaagacaggtaattgcacatgccattttaatagctagtccccaaacccaggctgatggatgaagaatgagatggtagctttgctttgaactacaattacgtacataatcagtggcatttttcatttcatacaataacttgcaatagacaagccagcaatcttttggccatggtttaataagttttaattgttccttaattaaaccatgagtcatttgaattctttaataaaggctacaaaagtgctgattttggaatgggctaggtttcagatagagtgactatgagaaaactctggaagaagctcttgcaggtgttgtaggtagaattggaggacactttatactactaatggaagtattagtatctaaggctgaatttcacatttatttcccttctaaagtaaagagatagctgaaacttattctggtatgatctggggacaagatcatcatactatctctgagagctgaaactttgggaatcttgcacacctgaactaattgccagctacaccactctccatgtgaccttgtacaagctatttatccgctataagccttggctttttttaatcttcatttgatcatctcataaatattaatgagcatttactctgtcttagagactgtattttatcttgaatatgccacagtccatgaaaaactgactgctctcatgtagtttgagaaagaccgtcttctttttttttttggagacagagtcttgctttatcacctaggctggagtgcagtggcgtgatctcagctcactgcaacctctgccttctgtgttcaagggattttcctgactcagcctcccaagtagctgggattacaggagcatgccaccacacctggctaatttttgcatttttagtacagaccggatttcaccatattggccaggctggtcttgaactcctgacctcaagtgatctgcctgccttggcctcccaaagtgctgcaattacaggcatgaacctctgtgcccaaccgaaagactcttatcttcttgatcaaacttatttaaggtcctctggacccttttcttgactaggccttggcattggccctcattttgtctttggcctccccagctcccaatttagtaaagaacttactaaatttagttttagtaaagaatcctactaaatcataatcatcccccccaattcttaatatctgatcacccttgatatctgataaagttccttatcctccacctctgacatataattgcttagcctgcctttagtaagaatcctattaggtctttttatcaagaatcccccctacccttaatgtcttctattaagttttctatgcactgaccccctcattattcttcttggctataaatccccacttgtccctgttgtgtccagagttgagcccaatctctctttcctattataataattctattatattagaattaaaggaatcaccctgcaaaggtgatgataatagcaataacagtaagcatacttactgagcacatactatgcctcgggtactagtgtaactgctataagtatactaactcatttaaatttcaaaacaagttaatgagacaagtattattacaatcaagaatttaaaaatgaatgaagtgaggtacagagaaataagtttttcaaggtcataagagtaagtagtagtcagggaagaggtgggactagactcctgaggcagagcttggacactggaacaaattgggaactagccaaaacaggtccagagcataaggacttctccataagacatgcctcacagtatgccatgtcagtttaccattgccatggcaacacccagacattactgcccctttccatggcaatgacctgacaaccccatagttacca

SEQ ID NO: 318583 - DNA, 4001 bp, Homo sapiens
aaacaaaaagaaacagtgcctttgaacattaaagcttttctcttttttactgttatgccttgggcacttttacaatatttaaggcttctcagaaacaggaattcctaatgttaagtaccataaaacatggtactcccaagtcccctagaagggcatggccctggccagctggggcagtccttgaagaagctggcagacgctcccacagaacagaggagatgccatctgctggaaagactgcaccagatgcctcttgccccacatccctggggcacacctggggagtggcagccagccttgaggcagaaacaggccgcaagtgtgtttctgcgtgtccgggagtaactttctccactcccagggctcccacggaggagcaatgctctgccacccagggtccctttcagggcaggggaccaactgcacgggctagttgttcctgtttcaagattccgagggtcaaaccaccccacctcccctgtattttatcaggcccattgccatgaccgcctccctcaacacacacacacacacacatgcaacacctgactcccataaatagctcccccataaatagcttggaccactcccagacccaacctctccagtagggattctcctgacacaccccagagatggtccacgccaccgctgccccggggaggttttctccggagctagggaaagtctaccatcacggttaggagaagtcggaagctcagagaacctctttctccacagctactggtgatctgtgctgtattttagtgcagtcacctcccgcagccctacgaatacacacacctgggccacaggtaacaggcaagcgcatggagccttcgaagttctctttaaagttcctttcaggcaagaccgcacccaggaagctgggaccgaccagcccccgcgggagatgcccacctgtccccctcccaaccacacacacacacacacacacacacacacacacaccccaaccccgcttcaggggtcccctccgagaggctccgcgccccccagggccgggtggcgccggtactcacgtctcgaaagcggttccagtacttgtcccggtcgtactgggagacggtgctcagccactggtcattgtctaggaaattgccgtggttggggcccgcgcctccggcgagcgcgtccaggtgccggctctcgacttggaggaagcaccacgccgcggcggccgccgccaacaccgcgatcgccggcatctgcggggcagggcgcgcagggcgatgagcgaagagggcgggcggccgcgagccccgggcacccaggcgtcccagcgccccagcccggaggcggggaccccgcggcgggcacgggcagcgctcgcgcacctggggcgcctgtcgcgcctctagacccagggacccctctcacgaatgggggactcatctacgaacgaggaggctgcgtcacgaatccgaggctgccgtccaactacaggggacccgtctcgtctattctccgagtgccccacagatgccgccctcctatcaggggcttggtacccctccccagaagcggggagcccgggtccgcacgccgcactcccacagacggtgcggtgcacacggctttggggcaggagaggggagaacagggctccagcagcacccgagctccggcaagcggggtgggggctgccagcagctgggggtccccggcgacagctaagggaaaggtctcccttgagcgccctgaggtctcgggggtaagaaaggcgcgcggaggtaaccccaggccctgaccctgccagccccctaggcggccgcggggaggtcccaactactccaagttggggcgcggggttcctctgggcacgtaccttgggggccggcccgggtcccctagtccgagttgctcgagctcccgcggcacggtcgccgggaaggctgatcgccggctcgcgcccctgcgctcctgccacacgccgccgccgagcgtctggccgctttgtgagcccgcagcgatgtgctctgctcgctcgctggctcgggcgcggcgtccgcgggcggaggaggccgagcgcgcgagccaaggctctggcgccccctggtggccgcgcgctgcctgcccgacagcccggccgccccagcccggaacgtggtcattcacatcttttttttttttttttttttttttaatttacttctatttttttttttaattatactttaagttttagggtacatgtgcacattgtgcaggttagttacatatgtatacatgtgccatgctggtgcgctgcacccactaactcgtcatctagcattaggtatatctcccaatgctatccctccccactccccccaccccaccacagtccccagagtgtgatattccccttcctgtgtccatgtgatctcattgttcaattcccacctatgagtgagaatatgcggtgtttggttttttgttcttgcgatagtttactgagaatgatggtttccaatttcatccacgtccctacaaaggacatgaactcatccttttttatggctgcatagtattccatggtgtatatgtgccacattttcttaatccagtctatcattgatggacatttgggttggttccaagtctttgctattgtgaataatgccgcaatacacatacgtgtgcatgtggctttatagcagcatgatttatagtcctttgggtatatacccagtaatgggatggctgggtcaaatggtatttctagttctagatccctgaggaatcgccacactgacttccacaatggttgaactagtttacagtcccaccaacagtgtaaaagtgttcctatttctccacatcctctccagcacctgttgtttcctgactttttaatgattgccattctaactggtgtgagatgatatctcatagtggttttgatttgcattgctctgatggccagtgatgatgagcattttttcatgtattttttggctgcataaatgtcttcttttgagaagtgtctgttcatgtccttcgcccactttttgatggggttgtttgtttttttcttgtaaatttgtttgagttcattgtagattctggatattagccctttgtcagatgagtaggttgcgaaaattttctcccatgttgtaggttgcctgttcactctgatggtagtttcttttgctgtgcagaagctctttagtttaattagatcccatttgtcaattttggcttttgttgccattgcttttggtgttttggacatgaagtccttgcccacgcctatgtcctgggtcattcacatcttaatgcagggctaaaatcagctttcaggcccaggctggtgcgagacagaagaggggactgaggatatgaggccaagacgcaggccagcatggaggcattctcaaaaggaaggccgtcgggttatctagatcaaaatcacctgggtggagagagaagcgaacttcctaaaaatgattcctgccccaccgccccacttgctgagtcagcattccttaggaaagcttccaagtctgcacttttaatgagctcccgaggcgttttttatgcatggcaaagtttgataaccaccgtcctgccattccctggataagtgaatatctgcactgcccatcccaagtcatgcacccacctgcatctctgcactcccatgccctatgccatgcttaccactgtcctgccccttgagaaccggccccagcactaacctgttgagttcccctagatgggagggaggggagagaggaaaaacagatcaggctacagggacagaacactgagaagcagaagtctggtcctgccccatcccccaccccgtttccaaataccagcaatgtttggtgaaatagggctggaagggacttaatgtcttcccctgcctgtatacaagtgatactggcctgtcacctttctctgtacaactacaccccattccccagacacctgagcgctctttcagaacaagtctgaccatcccatcacccctctcccctcaacacaaa

SEQ ID NO: 318584 - DNA, 4001 bp, Homo sapiens
aaggctgaaaatttcagagatgtttatgctccatttgtgtgaagatctggagaactccaaacattgtgaaatccaccagtgcaatattgggtagggcctcaggccagactgagctcattaagagattgataaacccgcagttcccaacttctctgagccttataccttccagctttgaatcccgagagacttgtcagggaggttagtgcctcggtcagctacagacacagacgagtgcttgctcccgcccctctgcaagttctttggcctccagtgtgtctggcctctcccaaaactggagagaatcacgccactgatttggaggcaggaaagaaggggatgccactaggtttgggcaccccactgtacactcttctttccagcactaaccgcgctggggggtacggaagccttgctgcgccagaaggcggcctcctgccctcacagaggccttggcaatatggatgcccctccagcagctggtgaaagaggcagccagcagctccctactctgcctaccatctagcccctccagcccatttcgcctctcttgcccatccttcagccctataagccacgcaaccattttctgtctcccctgcctctcctgcccacaaccccctgcccccaatcaaggagaattgagaaaccgtcttcttgcacaagagcagctactgtctaaatgctttttgatcgtctgcatggagggggaactgggcacagccctggacccagtgatggagccaagctctagctgccctggctagccaaacccgccctcacccagctcactgtccccggggtcttggcgattcagaatttgtcagaacataccgtctctatcctcttctctgtgatgtcaagcctggtaccaccaagaaggaaggagggaaagcaggagccttatctctcctacattcgcaacctcttcctccagctcccacacgcctggtgttatgtaaacgcaccttcaacccccaccgcagccctagcgcggcctgggggctccggggcctggcacagctcggtgcccgaggatagggaggtacagggtggccgaggagcctcaggccttacagaggccaggcaagaaaaagtcaactgcaaggcagttgcatagcataaaatgcggcagcggagcaaaggtcagacggcgaggaaccgcctcgccaaggagagggagtaggaatgcccagtcctgagccagcccctcgctgaccatcgagggagaggcagaaggggagggaattcagtccgtcacggctccgaagagaaagaaaaaatctacgtcgagcataggccgctacggcgggctgggagatacacggcaaagctggcaccgtgggcaccgagctgggaggtgggcgagccgcccagagcgagggcgccccccgacccaaacggtggctcctgaccaagcccagagacgcccgttccagcgttcgaggcggatggtggcaggagaaggaaagaggccaggccagaggcaaactcccgggacacgcacggggcttcccgagtctcagagggcggggaagccgggcttggcaatgcccaggggtcggaaacggcggtgccaggctgtgaacacccccggcgccgtgccggccgggccgagggcgtcagggagctgcggcgcaccgcagcgactcaaggaggcgcaggctgagggaaggaacactgaggcgcgcctagaaatagcgcaccatttgccccagcccaaggggggagtcgcgtcgcggctcagagaggggcagtttcagatctccaaaccagccatggacttactttgaggagctgcagggtcacaagcatcgccccacgtctgtgtaaatcctgaagccggggcaggttagccgccgctgtactcgcagacgccggtcggaggaaccggcaaggctccctgcgctccacagcgccagctccgcgctgtcagctcagctcgctacctccgcggcgatgttgcaaccactgcctgggaaaatggcttttttatgaatgggagggaagggagcgccagtgcgcacgcgtgccgttcgcgattctatgaatgggtgggcacaacagaccctgagcgcgcatgcgctccgctcctttttttatgaatggggggcgggaaaagatcttaacccgtgattgctgggactggctcaagctccaccaggagccgtcgttcttttacaaagaggggtggaggttccagtggaggctgttgttgcctttttttttttttttttaatgaatggagggcggcggcgactgctgcagctgggccagctgcgcgggctgcaccccctcccagcctgcgagaggaggtaaaggccaccttcacgccactgcgggcctgggcaggaaccgtcagtgtcgctggggggtgggggacgctgcggcctccggatcccgggttgagagcagggtggtggagggcacacctagatctggggatctctgccccccgcaggcagtcaaaagggggggcgggaggacccctactgggggccttctcttgctctagaccagagacgccaggcgggaggggtcttgaagctgcgtttaccaaaaattaggaaaatgtccatcattcatatcaaagggtggggtgaggattggtgagtgaatctggttctttttcctgaggctgaatctctcgtgagtgctggccgcccctccccccatttcttgggtgtagacagtgactgggcccaggcctcttccggctccagtaccccccggggcgattctggcaactcagccagaggaagcctggccctcgcctcccagcgttccccccgccccccgccccagtgcaatgtccgcagtgcccgggcgtctgcccgctctctgtcgccctagctaggtgtcctttctctgtcccagtcggtttcccagccctcacaggacgctggcctgaggagcctcggtccaccgaaggcccacggcccttcgctgttgtaggcgcctttccccaatatcccccacctctcaccggcctcccctccggggaagtgggagcggccgagaactggccaggtggatgggtggagccggctgcgccgaggatgctgccggggtggcctcaggattaaataacaacggggctcttgagccgcagaggaaatggaaatggctggggatcctttcttcgctgttaatgatggtggcgttggggggcgggggtgaggatcagctcaagccggtgaaaagaaaagcccccgccattaggcctgactccaggaaggcggggagccctcgcagcaggccctgctcctccctggaacggaggagcctgtagcctccgggaagtccggggcggggggtggctttgatgcgtggataagagcagagtctgggccagggcttggccctgagtcccttgtaaggtctgtcttgccgctgttctggccgcacggggagattgtgtggcagtctttttcttcctacgccactataggattgtgcttggctgttgtcagaggaaccaatgaaaggctcccagcccagggctgaggtctggcctagggctggggctgggactctagaggcaggcagcccaaggtcaccgagtcctagcctaaaatgccttctcaccattcggctcacccctccgtgtacttacccagctcctgagggcagagcagactctcccctagggaacctcagccttcctttcaggggcgagacctttctctaagaccaagagaactcttcgccagaaaaatgggtacagttgtccaggacttccttttaaggctgttgaagttcagtatcgccctctctgtcagctgtagaaactgaggccaagggtcctgcaccgggtatatggaagagctggtaaattgtagcacttattttctaggtctttgcaacctggctttactttgctaccaacccttctcagcatcacagacctaaaaacctgtttctcgcatgtcatttaagcattttaaacaatgaaagttgaagcagtaattttccagctggtgctcacccatggcccttgc

SEQ ID NO: 318585 - DNA, 4001 bp, Homo sapiens
ccaagatcgcgcaactgcactccagcctgggtcacagagcaagactcgtctcaagaaaaaaaaaaaatatatatatatatatataaatgaaaacgacatccgtaagctccaaatgtccacctgtccacagcctctgccctactatgtgttctgtctcctcccaccagcccccaactaaagcttcagtgagatgaggccatttcagagggtgatctggaaaaggtcatggagctgggcaggagggctaagggcaagagggcatttacactccactgaaagggagtgactcctgataaccaacagatgcctttaaagtctgctcactgtaactgaccaatatttgtccatgaagatttcagaaatctgctactaaaatccccaccctacacccgtactggccacatggcgtggttggtaagtgtgtgtgctgttcaccacattaggatttgctggagcctcgcagcacgtgagaaccctcccaagagatgggaaagaggaaatgtgatttcacactggacatctccactagttctttcccacccttctgggagacagagagggagagagaaagagaaatctttaactgcagccctgcctctcctagctctcctgacacccgccctaaaaaaaaaaaaaaaaaggctgaaaatttcagagatgtttatgctccatttgtgtgaagatctggagaactccaaacattgtgaaatccaccagtgcaatattgggtagggcctcaggccagactgagctcattaagagattgataaacccgcagttcccaacttctctgagccttataccttccagctttgaatcccgagagacttgtcagggaggttagtgcctcggtcagctacagacacagacgagtgcttgctcccgcccctctgcaagttctttggcctccagtgtgtctggcctctcccaaaactggagagaatcacgccactgatttggaggcaggaaagaaggggatgccactaggtttgggcaccccactgtacactcttctttccagcactaaccgcgctggggggtacggaagccttgctgcgccagaaggcggcctcctgccctcacagaggccttggcaatatggatgcccctccagcagctggtgaaagaggcagccagcagctccctactctgcctaccatctagcccctccagcccatttcgcctctcttgcccatccttcagccctataagccacgcaaccattttctgtctcccctgcctctcctgcccacaaccccctgcccccaatcaaggagaattgagaaaccgtcttcttgcacaagagcagctactgtctaaatgctttttgatcgtctgcatggagggggaactgggcacagccctggacccagtgatggagccaagctctagctgccctggctagccaaacccgccctcacccagctcactgtccccggggtcttggcgattcagaatttgtcagaacataccgtctctatcctcttctctgtgatgtcaagcctggtaccaccaagaaggaaggagggaaagcaggagccttatctctcctacattcgcaacctcttcctccagctcccacacgcctggtgttatgtaaacgcaccttcaacccccaccgcagccctagcgcggcctgggggctccggggcctggcacagctcggtgcccgaggatagggaggtacagggtggccgaggagcctcaggccttacagaggccaggcaagaaaaagtcaactgcaaggcagttgcatagcataaaatgcggcagcggagcaaaggtcagacggcgaggaaccgcctcgccaaggagagggagtaggaatgcccagtcctgagccagcccctcgctgaccatcgagggagaggcagaaggggagggaattcagtccgtcacggctccgaagagaaagaaaaaatctacgtcgagcataggccgctacggcgggctgggagatacacggcaaagctggcaccgtgggcaccgagctgggaggtgggcgagccgcccagagcgagggcgccccccgacccaaacggtggctcctgaccaagcccagagacgcccgttccagcgttcgaggcggatggtggcaggagaaggaaagaggccaggccagaggcaaactcccgggacacgcacggggcttcccgagtctcagagggcggggaagccgggcttggcaatgcccaggggtcggaaacggcggtgccaggctgtgaacacccccggcgccgtgccggccgggccgagggcgtcagggagctgcggcgcaccgcagcgactcaaggaggcgcaggctgagggaaggaacactgaggcgcgcctagaaatagcgcaccatttgccccagcccaaggggggagtcgcgtcgcggctcagagaggggcagtttcagatctccaaaccagccatggacttactttgaggagctgcagggtcacaagcatcgccccacgtctgtgtaaatcctgaagccggggcaggttagccgccgctgtactcgcagacgccggtcggaggaaccggcaaggctccctgcgctccacagcgccagctccgcgctgtcagctcagctcgctacctccgcggcgatgttgcaaccactgcctgggaaaatggcttttttatgaatgggagggaagggagcgccagtgcgcacgcgtgccgttcgcgattctatgaatgggtgggcacaacagaccctgagcgcgcatgcgctccgctcctttttttatgaatggggggcgggaaaagatcttaacccgtgattgctgggactggctcaagctccaccaggagccgtcgttcttttacaaagaggggtggaggttccagtggaggctgttgttgcctttttttttttttttttaatgaatggagggcggcggcgactgctgcagctgggccagctgcgcgggctgcaccccctcccagcctgcgagaggaggtaaaggccaccttcacgccactgcgggcctgggcaggaaccgtcagtgtcgctggggggtgggggacgctgcggcctccggatcccgggttgagagcagggtggtggagggcacacctagatctggggatctctgccccccgcaggcagtcaaaagggggggcgggaggacccctactgggggccttctcttgctctagaccagagacgccaggcgggaggggtcttgaagctgcgtttaccaaaaattaggaaaatgtccatcattcatatcaaagggtggggtgaggattggtgagtgaatctggttctttttcctgaggctgaatctctcgtgagtgctggccgcccctccccccatttcttgggtgtagacagtgactgggcccaggcctcttccggctccagtaccccccggggcgattctggcaactcagccagaggaagcctggccctcgcctcccagcgttccccccgccccccgccccagtgcaatgtccgcagtgcccgggcgtctgcccgctctctgtcgccctagctaggtgtcctttctctgtcccagtcggtttcccagccctcacaggacgctggcctgaggagcctcggtccaccgaaggcccacggcccttcgctgttgtaggcgcctttccccaatatcccccacctctcaccggcctcccctccggggaagtgggagcggccgagaactggccaggtggatgggtggagccggctgcgccgaggatgctgccggggtggcctcaggattaaataacaacggggctcttgagccgcagaggaaatggaaatggctggggatcctttcttcgctgttaatgatggtggcgttggggggcgggggtgaggatcagctcaagccggtgaaaagaaaagcccccgccattaggcctgactccaggaaggcggggagccctcgcagcaggccctgctcctccctggaacggaggagcctgtagcctccgggaagtccggggcggggggtggctttgatgcgtggataagagcagagtctgggccagggcttggc

SEQ ID NO: 318586 - DNA, 4001 bp, Homo sapiens
cctggcctcgagcgatcctcccaccttggcctcccaaaatgccactgcacctggccaaaaacactatatactttttccccccagaactccccctgcccccaggcaatgattaaataaagaaaaaaaaaatttcccttgtattctggtttttatttagatctttacttaattggacctttaacttctcactctaggctgtctatctaataattacaaaaaaaacaagcagattgtaaaggtgaaaagttatgaacttgatgtagacacaatggtcattaaagaccagacttacataactgctgaagtaatgagtaatataagtgtcaatctccttattctatagctctttcttggttgaaccagcagatctgcccaaggtttgatgattgatcatgactgacaagttggaggtaacagatgtagttttttaaggattcaccttttcatctgcttttggtattttctatcttaggctgctagctgacctcatttttcccctaagagcttttcttgcaacatgaatattgaactgggtattgcaagctttcttattaagacaaacatccaggcttctacaggatctgtcttttttccaaaatgtacccttcattgcttgcttgttctgcttatacatttctactttctttgcttctgatggcttctgatttttcttgtcctgtttatagtttatctgaattggcttctcttgcagagttccctgtttctgatgatggagttccttgagaatctctactctctgctgtaagatttggcattcattctctagcaaagctgccatcaactgcaatgaataggtgtcatggctcagtttcttcacctgttcctccagctcatgcttagccgacacttcattatttggctgggtttggaaaccgactccattatttccaagagtttcacttatgtctttctgagatttctgataggattttatcagtttactgagctcagtatgttgtttactccagtgttctgcttcctgtagtaactgctccatgttgttcctaattttcatagtttcttcttgaacattaagtctgttttttgctttttcctgactttgttgagtttcgttaaggacttttttttcttctaaacgatttaccaaatctcttgcaaaaacttgtgcggtgttctcagagttctggttttccattatcatctgctgtttcttttcattgtcttctttctctggggctaaactaacaggcaggtttgttgataacatttcattgattttgtcaagtcctctgatattttctttgtgggctgacacatcctcagtaatattggtttccaatatcatctcctgtttcttttcattgtcttctttctctggggctaaactaacaggcaggtttgttgataacatttcattgattttgtcaagtcctctgatattttctttgtgggctgacacatcctcagtaatattggtttcctcaaaaagttcttttgcttctgtgatcttctcttcaaaacctgccatatttttaagaatatctttaatttcttttaagagattgttaaacttctgtgcagtctgttgttctgtaacttgatggctgctattctttaggaaagggagagagccccaggaggaaggggaatgtgatccaatttcgaataaggcaatggtaatcctagggtccagatattcttgatgaggatcaggagtagggttaacggttttggagatggtgggcatctcagctgacttagcagagctggccatcaggacagaaggaaagcagaaaactttagagattccaggaaggacaggtgatggtcctttgtgcaaatgtgggtggagactgtggaatcaagcagaagtcagagaccaaagttaaggattaaaatttgggagatgatgtttaggtggaaggtggcatctcagacagccttgtggggaggaagggtgggaaaggggaccaaggctggggctccatctcttctcctctaggcacccggtgtttattctctggccctagcaaccaggtctttattttgtcactgcaccattgtggcctatccatagtgtctgtctcctttgtgtcacaatggaagcctcttaaattcctgcccagtgactcctgcatcaaaaccaaccttgagctatccctactcctcatgccagaaagagctctacaatagctcttcccctccttaatttctaggttgctattcatctcagtctaaatgcactcagttacttctctacgtcacctctatcccctcacaatcctgacctcaaccgcagcatgttttgaccacttaaggacattgctgagaccagtcctctctggtgaggtccccatcctttcatagcacctagaggctctattgctcccattctaggagagatgtgactgtaagagaaagttatccacacaaaacaaaaccctgagagtgacagccttttgtgattttaggaaagtaatgtcaggagtccctccattcaaaaatattctactgctccaagaagggactatctgaatggttataatagcaacacaattacaaactgggacttttcttggctttgaatataggcatcctttaagacaggcttggcaagcttactcacaaatcatttacatcaggtgatagaaaactttgactattacttttcacagtaacttatttggggattttttttttggctcttttattgatcccctaagatttccacactctacacagtaacttgttaaaatgacatagttatatttctaaagtgtttgattagaagggcatggtagtgtgtgcctgtggtcccagctacttgggaggctgaggcgagaggatcacttgagcctgggaggttgaggctgcagtgagccatgactgtgctacttagtgcactccagtttgggcaacacagcaagatctatcacaaaaaattaaaaaattggccaggtgcagtggctcatgcctgtaatcccagcactttgggaggctaaggcgggcagatcacttgaggccaggagttcaggatcagcctgggcaacatgacaaaaccccatctctactaaaaatgcaaaaattagctgggcatggcagcacacacctgtaatcccagctactcagaaggctgaggcatgagacttgcttgaacccaggaggaggaggttgcagtgagctgagatcgtgccagtgcactccagcctgggtgacagaacaagacactgcctcaaaaaaagaaattaaaaattaaaaaataaaaagcatttgaaacaggtaaattctctagtgggttatagaaagtaacaagtttattaaacttcttgcattttaataagctgctttcttgtctttttgttcttaggagtcaggtcttgtgaatatagaactcaatcaaagaaacatttcttgtgtatgactttttcctggccttcaaaatcttgctagcaagcactttaatagaaatttgcttccagtcttaagggaaaactcatactcaggttttttttcccctagagaagagaaatttatatgttttctttcttctccagttaccaactcattttggctctaattccccagagcctcatgctcatctttcagccagctgggctccaggccatcgtcactgactactcacagatacagcagggttggtctctgcttttacttgaaaaaggaactccttttctaattcacacaatgacagcatagatgctagcaactgtccttatgctttaattccatcttagaagttcagcattggttcttatttccccctttgactcaagcatcatttaagacaatttcttaatctccagcacaggggaatttttgataattaatttctagctttatcatactatattcagaaaatgtctgtaatgtttctaccttttgaaattgatattttctttctggcctaatagattatcagtgttcatgtatgttccctagatattaaaaagaaaatgtattctccatcctcttgtgcttgcagctttttaatgctgtca

SEQ ID NO: 318587 - DNA, 4001 bp, Homo sapiens
agtcccagtctctagttcggaaagttccaggagcactgagtggggagccctctcctttaacagggggcctcaggatccagcccacttcaacctctggctcggccacccccttcttggcatcaatctctctgtccagacccctcgaagctcccgattccactcagccccaggtgtgggccggggctgaactaggaagacaaagccgcattcaatctcagtctgagtccagcccctcgggcctcccccgggcgggtggggcagaggtccctgcagcctccaccaggaaccgggcccctaggtctgggaggtccaagccggcagcgggccaggcgctgcccaaagcctgcccagaggcggcgctgggccagtccctttataatttgcgcccttcctggttccacagaggattgaggaacgcctgaaattagaacgcaaatgggccgtgcgtggtggctcacgcctgtaatcccagcactttgtgaggccgaggcgggcggatcacaaggtcaggagttcgagaccagcctggccaatacggtgaaacctcgtgtctactaaaaatacaaaaattagccaggtgtggtggcggccgcctgtagtcccagctactcgggaggctggggcaggggaatcgcttgaacccgggaggcggagggtgcagtgagccgagattgcgccactgcactgcagcctgggcaacagagcgagactccgtctcaaaaacaaacaaacaaaaaacaacaaaaaacaacaacaacaaaaaaacaatgaaggcgtgggcccccatcaatatcgggctgggctgggcggggcgaggtggcccctacaccaccgggggcagggcccgttgctcccgttagcggcgctctcgggccgcccctgccccgggaagccggtacggttctgggctggtcactgctctgcatccacgagcatcggccctgataccgcctagaaaggcccatcgttcccgcctcccgggcccctgcgcgcctccgtccagaggcccagaggaagctcctgagcggggaagcgccctgggcggcagcgaaggcagcggtcgctcccggcttcaaccgcccagtcccccgcgccacccagagcccctcacgcccgggaaagagccccgagaacgtgcgaatggggtcggggtccgcgcgcggaggagatgttgctgagaagggtaccggggtcccggagcgccgcccccgccgcccgccccccgccccggctgcggtcgacctgcactcccactccagccttacctgaggccgactcgcacgagcccacgcggggctgcgggagccgatcgggatcccggccgccggcccccaccccaccccctcgcggcgccggcgacggcggtgctgcggcccctttaaatccgggccgccccgccctgcgccgtcgactccgcggcggccccagatccaggccccagatccaggccgggccgcggctctcgccgcccagcccagcccagcccggcccggcccggccctgccgcggaggcgaggccgccagtgtcccgcgcccctgatatctgcagtgagcctgatacctgcctctgcccttctgagcctgttcctcttccctgagtacagggcacaaagcttgcgccctgaggggcggccggcgcgctccctggcccggtccccgcccggccccgggccccccgcccctccccgacccggggccggggcccctgccgccgccgccgccgccttccgacccctgcgccccggccccggtcccccgggccatgcagcctcggccccgcgggcgcccgccgcgcacccgaggagatgaggctccgcaatggcaccttcctgacgctgctgctcttctgcctgtgcgccttcctctcgctgtcctggtacgcggcactcagcggccagaaaggtgagcgcgacccccgcccggcccgcacctggcgcacctgggcgtcggcggcgggagcgggcccggcggtggccgcggaaggcggccggaagccgacgcaggcgccccttccccgcccgggcggcgcgaggacgcccctcccaccctcccccacttgtttgctgctggagccgcggcgttctcctcgggcccgggccgcgcccgtgggtgctccggaccggactccgcgggcgcagctgtcccgacgctgagctggggacccgtggggttctcggagaggggcagagacccaaggtcacagaggtcccggaacgccagccacagccacctgggcaggagctggggcggcgtgagggacacaggcgcgagggcacccccccaccctgctgcctgctgccccgcgccggcctgggcgaccccggcgtgacacccggtcctgggactcccttcggcgcccagaacgcgtcggcagcatccggcctgtgggagggagggagggagggagggaggcgtcctgaggcagcccggcccctgctgccctgcgctcccgtgcggccccagcccgtcctccgcaccccgagcttcccgggctggcccccgccctccgcgtgcgcccagcgctcttgcaggcggagggtgcgggccgatccccccgcgccgccccgctggccggtcttggcgatggtggggccgagtagggcctgagccctcggaggcgctcttcccccggcctggaggttccgggagagtggcctcctgcctgcctgcctgctggaggcctaagcgggctgagtccagctgcccctcggcctccccgccacctgcttccctgtttccctgtcccggagcgccatcccagagaggctgcggaggagggcgagggaacctggacccttccggaccctccgagctccatctacccacgccgagctctgccagcacgcccgcctgccgcacttgttctgccagagcagaggcctgggctggccttggggctccagggccagagaggcatcacccagggactctgcggggagcctgcctgacacgggagggatggctgggcagaggccgtgctggcggggtatattatcaagggcaggcatggctggggcagaattctctgtaggtagggtgtgtcacctggggaaggacattctgggtccttggcagggtgactataaaagcacactggcatgaaggcctaggtggggccatatctgaagggctggggcatgctctttgagtcgtgggtagagccgtgagcccttgccctttgtcctgagccagtgtgtgcctcccgcagcagccacatgcccgcggattgatgtcaggagccacctctgcaagcctggcttaccacagggagccaggctccaggacagcagagtgagggagaggcactggctccatggcacccactgtgtctggggggcatccaggaggctggctctctgagggcctggggaacaggagagcaaagaaggggagcacttagattcacgagcccagcccctaggggatagaagcctaaggatcctgtgaggtatgagtatggggtgacataggcctcccttgtcgaggggctgtcactgtttctgtggtgacccagtagtaccaggtctttggaggcctcaagagaagctgggaatctgggctcttatgtgaacccatctcgttgtcacatgtagaaaatctgtcttaaacccctggtgaaaccagacgtagccagtcggaggccagattggaacctggcctccactttgcagccagcgggggtccaggaacttgagggaaggacccaggaagtggaatctgcagggaaggaaggaggtgggcagggaaccagagaggaagggcagcaggtgtgggcatcatcctggaaacgcaaggtcaagcccaggacggcctcttagaccaacgcaaaatggaccctggagaagggtttggggcccaatttcctatctagcccgtgcagcagctctgccagcgctcaaactgtggccctcggtcaagcacctgctgaggatctgcccagggaggcagacccttgggggcagcccggggtctcagccatgcagcgctcccagccttcaggc

SEQ ID NO: 318588 - DNA, 4001 bp, Homo sapiens
tgcctgtagtcccagctactcgggaggctgaggcaggagaatggggtgaaggtgggaggcggagcttgcagtgagcccagatagtgccactgcactccagcctgggcgacagagcaagactccgtctcaaaaaaaaaaataagataaactaaaaataaataaataaataaataaaattacaaaaaaatccaaaaaaatttgttttaaaatttttaatgagatgaggtgtcactatgttgcccaggctggtcttgaactgatgagctcaaatgatcctcctgccttagcctctcagagtgctgggattacaggcatgagccaccacacccggctaattttttgtattttttagtagagacggggtttcaccgtgttagccaggatggtctcgatctcctgacctcgtgattcgcctgcctcggcctcacaaagtgctgggattacaggcatgagccaccgcgcccggcctctgggtgactaagttttaacattaagtaactcattaacaatttctaaggccctttatgtcacaacctaagtgaaaagccattatcctttgccacaaatagaagacacctgtgaaaacacgacagtttcctctagaaggctcctataagtcccagtctctagttcggaaagttccaggagcactgagtggggagccctctcctttaacagggggcctcaggatccagcccacttcaacctctggctcggccacccccttcttggcatcaatctctctgtccagacccctcgaagctcccgattccactcagccccaggtgtgggccggggctgaactaggaagacaaagccgcattcaatctcagtctgagtccagcccctcgggcctcccccgggcgggtggggcagaggtccctgcagcctccaccaggaaccgggcccctaggtctgggaggtccaagccggcagcgggccaggcgctgcccaaagcctgcccagaggcggcgctgggccagtccctttataatttgcgcccttcctggttccacagaggattgaggaacgcctgaaattagaacgcaaatgggccgtgcgtggtggctcacgcctgtaatcccagcactttgtgaggccgaggcgggcggatcacaaggtcaggagttcgagaccagcctggccaatacggtgaaacctcgtgtctactaaaaatacaaaaattagccaggtgtggtggcggccgcctgtagtcccagctactcgggaggctggggcaggggaatcgcttgaacccgggaggcggagggtgcagtgagccgagattgcgccactgcactgcagcctgggcaacagagcgagactccgtctcaaaaacaaacaaacaaaaaacaacaaaaaacaacaacaacaaaaaaacaatgaaggcgtgggcccccatcaatatcgggctgggctgggcggggcgaggtggcccctacaccaccgggggcagggcccgttgctcccgttagcggcgctctcgggccgcccctgccccgggaagccggtacggttctgggctggtcactgctctgcatccacgagcatcggccctgataccgcctagaaaggcccatcgttcccgcctcccgggcccctgcgcgcctccgtccagaggcccagaggaagctcctgagcggggaagcgccctgggcggcagcgaaggcagcggtcgctcccggcttcaaccgcccagtcccccgcgccacccagagcccctcacgcccgggaaagagccccgagaacgtgcgaatggggtcggggtccgcgcgcggaggagatgttgctgagaagggtaccggggtcccggagcgccgcccccgccgcccgccccccgccccggctgcggtcgacctgcactcccactccagccttacctgaggccgactcgcacgagcccacgcggggctgcgggagccgatcgggatcccggccgccggcccccaccccaccccctcgcggcgccggcgacggcggtgctgcggcccctttaaatccgggccgccccgccctgcgccgtcgactccgcggcggccccagatccaggccccagatccaggccgggccgcggctctcgccgcccagcccagcccagcccggcccggcccggccctgccgcggaggcgaggccgccagtgtcccgcgcccctgatatctgcagtgagcctgatacctgcctctgcccttctgagcctgttcctcttccctgagtacagggcacaaagcttgcgccctgaggggcggccggcgcgctccctggcccggtccccgcccggccccgggccccccgcccctccccgacccggggccggggcccctgccgccgccgccgccgccttccgacccctgcgccccggccccggtcccccgggccatgcagcctcggccccgcgggcgcccgccgcgcacccgaggagatgaggctccgcaatggcaccttcctgacgctgctgctcttctgcctgtgcgccttcctctcgctgtcctggtacgcggcactcagcggccagaaaggtgagcgcgacccccgcccggcccgcacctggcgcacctgggcgtcggcggcgggagcgggcccggcggtggccgcggaaggcggccggaagccgacgcaggcgccccttccccgcccgggcggcgcgaggacgcccctcccaccctcccccacttgtttgctgctggagccgcggcgttctcctcgggcccgggccgcgcccgtgggtgctccggaccggactccgcgggcgcagctgtcccgacgctgagctggggacccgtggggttctcggagaggggcagagacccaaggtcacagaggtcccggaacgccagccacagccacctgggcaggagctggggcggcgtgagggacacaggcgcgagggcacccccccaccctgctgcctgctgccccgcgccggcctgggcgaccccggcgtgacacccggtcctgggactcccttcggcgcccagaacgcgtcggcagcatccggcctgtgggagggagggagggagggagggaggcgtcctgaggcagcccggcccctgctgccctgcgctcccgtgcggccccagcccgtcctccgcaccccgagcttcccgggctggcccccgccctccgcgtgcgcccagcgctcttgcaggcggagggtgcgggccgatccccccgcgccgccccgctggccggtcttggcgatggtggggccgagtagggcctgagccctcggaggcgctcttcccccggcctggaggttccgggagagtggcctcctgcctgcctgcctgctggaggcctaagcgggctgagtccagctgcccctcggcctccccgccacctgcttccctgtttccctgtcccggagcgccatcccagagaggctgcggaggagggcgagggaacctggacccttccggaccctccgagctccatctacccacgccgagctctgccagcacgcccgcctgccgcacttgttctgccagagcagaggcctgggctggccttggggctccagggccagagaggcatcacccagggactctgcggggagcctgcctgacacgggagggatggctgggcagaggccgtgctggcggggtatattatcaagggcaggcatggctggggcagaattctctgtaggtagggtgtgtcacctggggaaggacattctgggtccttggcagggtgactataaaagcacactggcatgaaggcctaggtggggccatatctgaagggctggggcatgctctttgagtcgtgggtagagccgtgagcccttgccctttgtcctgagccagtgtgtgcctcccgcagcagccacatgcccgcggattgatgtcaggagccacctctgcaagcctggcttaccacagggagccaggctccaggacagcagagtgagggagaggcactggctccatggcacccactgtgtctggggggcatccaggaggctggctctctgagggcctggggaacaggagagcaaaga

SEQ ID NO: 318589 - DNA, 4001 bp, Homo sapiens
acctacttgagccacagagggcaggagtgagaggcaagactacccccttgctctggcacctcctggaaggtgagtgctccgacctgggccctggaccacagccacatgcagggggcggagggcctgtgcacaggggcagcagctttggctgctgcacttatttagccttgggccagctgccttttcagaaacgtgccacctcattccccatccgaccaggcccatgtccgtcttcaactgtgggagatccctgcctgtgacctgctcctgaggggcccagccccacaaaggccttagacttctagtggcttgggagtaaaggagaagacaagggcatctgcctgcttccttccctaacaaagctgaaagacacgtatttgtatgtagtctccatttgtgacagatacatatgagctgaaatggctttaaagcacagctgtgcagaccaaaccacgccatccaccgagggcacaggtgaggcacccaaagatgcaaacaacccaaatgtctgtcaactaatgaacaggtaaacaaaacatggcctgtccacacaacagaatattattcctccaaaaaaaactagttctgatatgtgccacaacactgaacacattacactaagtgaaagaaaccacttgcaagactacattgtctgattctatttacatgaaatgtccaggattgcaagatgaatagatacagaaaggaggttgctgggggcatgtggataagagggtgataaaaggtatgtatggcgtttataaggtgatgaaaagctctcacactgaatatggtccacaaacctatgaaaatagtgaaaaccactgacttgtacactaaatgggtgaacccttatttcagttacagctcaataacatcacaatttttttttttttaagaataggagagggcctggtatgctggcagcgctccagagggaggtcctagcactgcaccctcccaggggccggccttggccacctcccgccctcctggccacaaccacctccctaaccccacccccagcagccactggtcacaccagcgcagcaggaaacagggcttctgtgccaacaccaacacttctgaagaacgttctcgtccacttgccaatgggaaaacatctgtactcgacctggctcggagcgttccgccggcgatccgtgcccttctcccaggcgctgtcgcggcgctcgcgagtcccccgcacccccgcgcttgtttacccgcgtcactccctcccctcgccggcgctcgcccggctcctccagggcattatctgaacccaccacctggcgcagcaaggtgtcagtgtaacccgagtgcccgcctgaccacccagtgcccgcggagagccagagcgttcgccccggcgcgtccttgccaaaatccccaacagcgcggggggtggagcggggcgtctgacgcccccaggctcgagcccccggccggcagggctccaccgccccagggggccgacgctgagcagcgggtcccggccttggtcaccactccagtcaccaggccggctcccatggccgaactggggacccatgcaggccaccgccatccagggagcagccagcgcagaccccctcacggcccgccaggcgtcgccgagaagggagggggcagccaccccgcggcaggaggccgtgtccggcctgcgtcaccgcccccgccgctccccggcccgctcaccgcggtagtgcgcctggaagccgccaggccgcagcgcggggaacagggcggccacccggctcagcagccgctcgcagggtcccggacccgccgcagcctcggcttccgcctcaggctcggggctgcagcagaagctgaagcggcgaatctcgcgcgccgcgtcctccttgcccagaaggtaggccttcacggtgagcgacgccatagcgagcggcgagctggcggaaaacgggccgtcccggtcgcagccgccgcgcggcttttgtagcgaacgcggaggccccgccccgcctcgagaggggcggagtctctcgcgccctccccgcccccgccaccgtcgtcgcggcgcgagagccgccctgcagaggccccttcactactctccccttccccgctacccctcgctccaggtctcccggccccctcattgctgacccctctcttcattgccccggtgcaccaaggaccccaggaaaccggccctggcactcatacaggcctgggctccagcctctgcacctgggatcagggtactggcgggggtccagcccctcgcccctcccaggcttgggcctggccatgactcagcaatatcctcagttgggggtacccagtgcagggagagggggacacagcccccatatcaggaggctgctaggtcgcccagtgggcactgctggccagaacaagctggctctcaggttgctgttccgaccctgccatggtcagcctgccgcggtggcagccctcttacagcgcatggcatcctcggtgatgggcagcgcatagcatactcggtgacggaccccgactctggcctgagcaccagagaagttcccagtttagtaggagtggagttgagaggtgctggaggaccagctaaggtctcctgagtgtcagtggtcgccaagtgttcactgtggtccaagtgactccttatgggctcctcaattcagcaggtaatgcccatggccctgtgggggctcaggcccgttggccttgtgggcagccaagggggtcagccaacagcctcctcagctaggaaggaagaaacactgctttatgccaccagagtaacctgtccgccagaactggggcaaggagaggggcaggacgagtggtcaccctctggagcctcccaggcaaggtcctgtgagtaggaggtcagaacctgctgggtccaactcatgccatttcagcccagggcttgcaggagctggagaaacctcccaggggaggaaacccagagggaggcaagagtggctggatggggccagtcaggtgcgaaggtgatgtgtgggtgtgcgcacagcaggggctggtccacaggtgtgaatgatccttcccggagggctccgaagtgggcaaggcttccaccctgcccagagcagccctgtggagagggttcaggcctctccctgcatccggcggtggagagtggaaaatgccccagggcctgctggagccactgccttgcagacaggggcaggggacacagaggggcgtgctggcagaggctgtggcctacagacaggtgctggccaagcgtgactcagcagcccaggcgcctgagagccacgtggcccccgccgagggccggctttcctgccccagcccccggctatggcccggtctgagcagggtgagggacacaaggaaggcctgtggctctgggaacatagctttgaggaagcgctcaaggcgccccactcacccccaagaaggagctcctttgctttctcgccatttggcccgtttgggatcgcgggaagtttccgcgggggctaggggcatgtgaagagactggggggggggcggggaggggagaaggaagcacagaagagggagtctttgggaagctggggtggacacccggctctggcccttccccgcacgccttgcggccccagcggccgccctgcccccacgcgaggccgaggcctcccggaggtaaacaaggcgcggcgggaaccccctggcagggccctctcctcccgccgcggaggtcaggtggtctggccggcagtgagtcagcgtcccatgaccgctgtcgtaatagggggatccccggcccctgctgccacccatctcagtgacctcttacctggaggctgggctggggagtggctccggggtcaccgtgagtcccctgagcaggaagagcgtgcagcggctggagccagacagacactctcccccttctcgcctctgactccttcccctttcccgatgcagtcccaccccgcaggctccccgcgtccactggccccttcccaccctccagggcccggcgtgcatgc

SEQ ID NO: 318590 - DNA, 4001 bp, Homo sapiens
catcttttgggtagaagtcagagttgctgattaacataagacacaggaaagtccctcacaaagaattatctggccacaacctatcaatactgctgagtttaagaaaccaagccttgtatcattcttctacagcaaaaagggtgtggagaatggagggccactgaaagaaccaaacctgagcccctttatgggggccacggcacagcccatttaatggcttggaaaattctcggggggaaaggtggctctcctctactttaaacttttcaatggcttctaactttatgtagattaaaatacaaattcctcatcctgctttacaaagcccactatgctgtagccagccactctgtatttcatcagtctctgaattggccaaacttattccttttgcagctgtttcttttgcttggaatgcttttgtacatgatctttgtgtggcttaaatgtcagcccctcagacacctcgttacccagtcatattacatcaccgcttattttctgtagcaccctcaccactatttcatctttcagcccatctccagtgctgcaacgtggacttcctgaaagcagagatcttttttttttttttctcactgctgtctagttcgccctcaaacagtgcctgacttatagaagtgctcagtaaataacagtgattaaatgaatgaaaaactgtgaagtctgacgattatcatatacctaagtgaagacagaatggacaaatgaatatgccactatacggttctggcaagaggtataggttaacaaagaaaaataacttcaggattaaaactatattaaaagccacaggtctggataagatcatctaggatgaaaaaatagtctttttaaatcaatacaccatttattaacctgagcagcagagaaggggctcggaaaagcacctgctctgagacccttactggagccccaaaacttctctccttaaggagccctcggggagagaaaaaagccttccaaacaggcttatgccttacacccccccccccccattctccgtctgtctccgagcacaggggccccacgcacctctgggggatccatcctggggtgcggcgaccctcttggtaagcagcgagcgcctgggtccgccggcctgggtctgcagcccgtatgagaactgcggcgggtcgttccagccgcgttccttgttgcctgcggaggcgagggatgtgtgaagcgagcccggaactccactgttagcttatactggggctgggggagacagagggtccatactaagcgccgcaaccgcccccagcctaggccggggcgacaacctagtgccctagcccgccggctgcgctcacccggcttcacgtacagctccgccatctccacttccgcttggccagcggggcagcgcgtcatttccggggcggcccctcacgcgggccagttgagacacgtccagggccaggcgggttgccggaatccgtggaggatggatgctggttcacaaccgtcgggagccgctgtggggaccctgcggcaactccctaagactcgaaggctccatctaatgaaccatcagggccctggtcacaaggcaccaaaggaggttgctgtccaggagccagtgctctaggaggcctcatcctctcaggagcaaattcaaacaaagaagctcctgccccacatacaccccgctgtgatctagccaggttgacttctacagcctcctcttgcattgccctgcacaatctccacattcacgtccggtagcctcactagtactcatcttccttcagttctcagttcagatgtcagttcttcaggaggccttctggaatgtctcaggccaggttaagtgtctcacttgagctcccacgaccctacaaccctctgagatttcgtaggtgtattacatcacatcttctgccttatttgactcttgttcgtttccctgtcggacagtcttagaaggtgggaccttgactattttattacattcccagtgcccagcttagtgcctggcacagggaactccttagaaaatatgtttgttgaatgaagtcagatctccatcacacccatgctgtcatgtgactacagagagccaccaacatcaagcacagacacaaagacactcatctcacacagggtgttagcccccagccctgtcccaggcccaatatactcacatccagtgaggtcactgagggatttttatttgcactgattttgctataaagtgttactgaggtagagccaactgtccagggttggacaggggcaaggaacacaaggacccaaggaaaggggagccagggtcctacgttgtggtgcagtgcctcccagtcatccgtataaacaataaattgggcaataaatagacggtggacaaggatcggagggacaggcagagaaggcttcaaggagtgacaggctataggccttgaggaataaaacggtacagagttaggcatggacccagagcctacttccccagccttcccagataagtttagggcatatggagcagagagggtttcagccggaaggcatcaagaaaagagaagacaccccgctttcgaggggttgcccctgcaccgccaacccctcctttgagcagggggaggggcaggggacctcctggggaatccatggagctggtccgcttgagccgcaggcgggcacgggcctgggcaccccaggccttgcctcgagctgcagaggccacaagacacttctggtactgaacctagggagaaggggaatgtgaggatccagctactttctgcctctagactccctgaaagcttctgcaggacagggaactggccaaagcttctgtctgataacaaggttggtagtcagccacatgtggagtttctagagcattcccaggtagctcaataacaaaatcataaaacatgtatcagacacttaaggagggcaggctggacactgctaagtgctttgtataattcagttatttatgaggggttattatccctgttttgcaaaagaggaaattgagattcagagagtatatgacttgcccaaggtcacacagccagagaaaggcagaaatggcattcaaacctagttctctctgattgcagagcctaaactcttaattacatgtaccactatgttgcctcttttccatctctcactggtggggactagtccctggcaaagcagattccctagtcaagggtaaaggtgtacaactcaaactccagccccaatgcaactgctcccagtcatctcatctgaacagctcaaaggtgtcctaattggccttcctacctcctattacgtcctccaaatcttttacccatactatagcttaagtggtcatcctaatccataaccctgacttcactctcgggctccagtgcttcctagtgcctccagataaactcatcaccctgacctatgaggtcccccaaacctggcttctgtcattctctctgatctcacctctcactacgtcccccttgcatgccagatacactagattctttcagatactctcatccactaatatctctcaccttcacagctaaggttccctgtgcttggtacacctgccccactccccttcacctggctaacttccctcttggactgtcggatttctatcacctcttacaggtagccttcctgacccctaaaggggccacctcttccatcaaccagtggtgtacaacttatttctggtctatcttggctctatcctaagtgttttgtgaaggcaagggctgtgccctctacagcactaaattctcagggtcagctatggtgtctgggaccctgtaggcacccatatttgttgaatgaatgggcaaactgaactaacgaagtataagcaacccacactcaaatgcccacagatgccaggaaataaacctaaatgagacaaacaggaacaatgccaactctttagggcacagcttctgcacaactctggctgcatgctgacacttacacgtgtgaactgagtgccagagctcttgatattttaa

SEQ ID NO: 318591 - DNA, 4001 bp, Homo sapiens
ttctgatctcaggtgatctgcccaccttggcctccccatgtgctgggattacagccgtgactcactgcgcctggcctctccttttttcttctttggccatttcccaatctcctttgctgattccttctcaaccttgaaatgctagagtgccctacggctctgtccctggccatattcaagcccatgacatcaaataccatccttgtaatggtgacttatttctctaattctggcctagaacattccccaaaagtaacagcctaaacttcacatggccccccaaaaaaactccccctccccaaaaccaccatccccagtcttcctatatcaagcaaaaaaattcagttatatggattcttcctaatctactcattcctactgaccttctccatctcatatccatccaactcctaccaccctgactcccacccttatgcaaatcattaaatcttgcctatattaccataatagctgtaatttgtctttccacttccctaaaatcttgttttcacacagcagacacagtgatctttccaaaatgtaaatcagtccctggttctcaagctaggaagatagtgcccacagggcaaatgtctggaaacacttttggctatcacaactgggtggatgctactgacatcttttgggtagaagtcagagttgctgattaacataagacacaggaaagtccctcacaaagaattatctggccacaacctatcaatactgctgagtttaagaaaccaagccttgtatcattcttctacagcaaaaagggtgtggagaatggagggccactgaaagaaccaaacctgagcccctttatgggggccacggcacagcccatttaatggcttggaaaattctcggggggaaaggtggctctcctctactttaaacttttcaatggcttctaactttatgtagattaaaatacaaattcctcatcctgctttacaaagcccactatgctgtagccagccactctgtatttcatcagtctctgaattggccaaacttattccttttgcagctgtttcttttgcttggaatgcttttgtacatgatctttgtgtggcttaaatgtcagcccctcagacacctcgttacccagtcatattacatcaccgcttattttctgtagcaccctcaccactatttcatctttcagcccatctccagtgctgcaacgtggacttcctgaaagcagagatcttttttttttttttctcactgctgtctagttcgccctcaaacagtgcctgacttatagaagtgctcagtaaataacagtgattaaatgaatgaaaaactgtgaagtctgacgattatcatatacctaagtgaagacagaatggacaaatgaatatgccactatacggttctggcaagaggtataggttaacaaagaaaaataacttcaggattaaaactatattaaaagccacaggtctggataagatcatctaggatgaaaaaatagtctttttaaatcaatacaccatttattaacctgagcagcagagaaggggctcggaaaagcacctgctctgagacccttactggagccccaaaacttctctccttaaggagccctcggggagagaaaaaagccttccaaacaggcttatgccttacacccccccccccccattctccgtctgtctccgagcacaggggccccacgcacctctgggggatccatcctggggtgcggcgaccctcttggtaagcagcgagcgcctgggtccgccggcctgggtctgcagcccgtatgagaactgcggcgggtcgttccagccgcgttccttgttgcctgcggaggcgagggatgtgtgaagcgagcccggaactccactgttagcttatactggggctgggggagacagagggtccatactaagcgccgcaaccgcccccagcctaggccggggcgacaacctagtgccctagcccgccggctgcgctcacccggcttcacgtacagctccgccatctccacttccgcttggccagcggggcagcgcgtcatttccggggcggcccctcacgcgggccagttgagacacgtccagggccaggcgggttgccggaatccgtggaggatggatgctggttcacaaccgtcgggagccgctgtggggaccctgcggcaactccctaagactcgaaggctccatctaatgaaccatcagggccctggtcacaaggcaccaaaggaggttgctgtccaggagccagtgctctaggaggcctcatcctctcaggagcaaattcaaacaaagaagctcctgccccacatacaccccgctgtgatctagccaggttgacttctacagcctcctcttgcattgccctgcacaatctccacattcacgtccggtagcctcactagtactcatcttccttcagttctcagttcagatgtcagttcttcaggaggccttctggaatgtctcaggccaggttaagtgtctcacttgagctcccacgaccctacaaccctctgagatttcgtaggtgtattacatcacatcttctgccttatttgactcttgttcgtttccctgtcggacagtcttagaaggtgggaccttgactattttattacattcccagtgcccagcttagtgcctggcacagggaactccttagaaaatatgtttgttgaatgaagtcagatctccatcacacccatgctgtcatgtgactacagagagccaccaacatcaagcacagacacaaagacactcatctcacacagggtgttagcccccagccctgtcccaggcccaatatactcacatccagtgaggtcactgagggatttttatttgcactgattttgctataaagtgttactgaggtagagccaactgtccagggttggacaggggcaaggaacacaaggacccaaggaaaggggagccagggtcctacgttgtggtgcagtgcctcccagtcatccgtataaacaataaattgggcaataaatagacggtggacaaggatcggagggacaggcagagaaggcttcaaggagtgacaggctataggccttgaggaataaaacggtacagagttaggcatggacccagagcctacttccccagccttcccagataagtttagggcatatggagcagagagggtttcagccggaaggcatcaagaaaagagaagacaccccgctttcgaggggttgcccctgcaccgccaacccctcctttgagcagggggaggggcaggggacctcctggggaatccatggagctggtccgcttgagccgcaggcgggcacgggcctgggcaccccaggccttgcctcgagctgcagaggccacaagacacttctggtactgaacctagggagaaggggaatgtgaggatccagctactttctgcctctagactccctgaaagcttctgcaggacagggaactggccaaagcttctgtctgataacaaggttggtagtcagccacatgtggagtttctagagcattcccaggtagctcaataacaaaatcataaaacatgtatcagacacttaaggagggcaggctggacactgctaagtgctttgtataattcagttatttatgaggggttattatccctgttttgcaaaagaggaaattgagattcagagagtatatgacttgcccaaggtcacacagccagagaaaggcagaaatggcattcaaacctagttctctctgattgcagagcctaaactcttaattacatgtaccactatgttgcctcttttccatctctcactggtggggactagtccctggcaaagcagattccctagtcaagggtaaaggtgtacaactcaaactccagccccaatgcaactgctcccagtcatctcatctgaacagctcaaaggtgtcctaattggccttcctacctcctattacgtcctccaaatcttttacccatactatagcttaagtggtcatcctaatccataaccctgacttcactctcgg

SEQ ID NO: 318592 - DNA, 4001 bp, Homo sapiens
aaagtatatacaaacagcaaagtctgactaatattcaaattgtagcaatggttgatcccattccaaaaaaaaaataaagcaatggtaaagagtttcaggcacacagtactcactaagcctctgatgaatgttgacttgcccttgtttaaagtgcaagtcatcaaagcacactgaggacacagactgcaccagttacagggtaaggtgctggttttcagggaactcaggtaccaaaaactgtgctgggtacaacactggttccaagtagtggagctgtgtactttctcttcgctggaatgcatgacaccaggagaaagaagagaggcttataaacacacactgagttcttcctgtctctctgggaagtgagtgttttaaggtgggaccccaaatcagaaaggttgggtaaactgcccatagtcacacagccagtgagttcaacttccttgggtgtagagacatcctttttaactgtgaagctttccagagcctgaatgaaaacgtttaaaatttaattttgaactttcgacctgtcgtttgctttggctgtgtaaaagccaaaagatacgacctggagagaaccccaacttattagaaggcttgaagatttcagacacagccagttttcaaatattcaaaaaaacaaaaaccttgaaagatttagaagtcatctttaagacttcgtttgtttaaggtttaaggttgctggctttccacccccacaatcctggggtcccttgcataaggtggacatgaaagtctctgaaagtgatcaagcctataaggagaaactgctaggcagttttaggacagcaggtttccagttgcagctgatcacttggctgggagaaaacagctccaccatcaccaaagataccaaaaggggaaccggcagaaaggagtagaaaccagtggccctcaagaccgaccatcagcattagactctaggccaaccccctcccccccgcccccacagtcgtgatctaagggaacaaaatctagtcttcatttttattttacatttttactttttaactctttatttttatatatttaattttgagacagagtctcgctctgtcacccaggctggagggcagtggcgagatctcggctcactgtaacctccgcctctcgggttcaagcgattcttccatctcagactcccgagtaactgggatcacagacaggcgccaccgcgcccggctaaggaaaccaaacctaggaccactgagtggctctttccagatcagtttcatcatgtttttttccatcactcccttccagtcctttgtttcccgccctttccagacgaatcccttctggtttccaaactcccggggccgggggactcggggaagggcacccgtgcagatgggggacgccccgggggatctggcagggagagggcatctgggtgggggaggcttcggggagagggcaccgggcagtgaggggagggtcggagaggacgccgggccgggagtagggtagggggccgggggccggggacgttaccgatgcccgtagtggacgaggaacatggccaggaggatgcagttgggcgcgctgcggagacgcggggcggactcgctggcgtactggtagagcggcagggccagcgagggcagctcctgcaccacccaggcggcccgcgccggcactcggagcctgtggctgggcagcgcgtggcggccgtacactgagttcgtctgacgattgcgcgcgaagaccgcgcagcccacggcgcactgcaggtaggcgagcgcggccagcaggcgctcctccgccacccccgtcgccgttgccatcgccagggctgggcagcgtgctccatgccccagaggccgcggcgggcaacatatagggcggcggcgcgggggcaggaggggcggctaccggaggggcggctaccggagtcccgcactgccgggactctgcagaaagggttctcaagtcaggcttctccggggtagccggggctgtgggtgcggccccgggggcggggcgagcacttgcgcggggagggacctgcaagcgccccacccacgccggggccgcagtaaccccgcgccgctctgcgcacgcgcggcttcaggctgtccgcggagctccttgagcccgcgtgggaaacctgggcgcttcgcgcggagacgcctttgtggctgcttcctggagcatttttttccccttagagctgttcgctgttttccctgtcacgccgcttttctgaaagacgggttgtgcgctttgggcttattcctggacggtccccaaaggtccccgaaaggaccaggcccggacacgtggggccttggtttccggccggaagtcccgggaggtgtagggctagagttctggccgtggcgggccggtttctgcgtgctgcgtgcgcggccgcgtgggctatggggcggcggtcgcggggtcggcggctccagcaacagcagcggccggaggacgcggaggatggcgccgagggtggtggaaagcgcggcgaggcggtaggagccgggacccggcgggcgggccaggggctcctcctgggcttcccggaccccgaggcctgcgaggcggcggcgagggggcggctccttgggcctcggggtagacgtctctttccttcctcagggctgggaaggaggctaccccgagatcgtcaaggagaacaagctgttcgagcactactaccaggagctcaagatcgtgcccgagggcgagtggggccagttcatggacgctctcagggagccgctcccggccactttaagaattactggttacaaaaggtagggaggcagtgcctgattttttgggagttggggccaggatgctggaggttaaaggcgacggtgttttcttcgacaagtgttacagtgccagagaaccgtggcgtttcagcggtttggattcaggaagcattgaggtggggagcacagggtccaatgaaatggtcacggaggtattgcaggcgcaaggttagaagacgaaatgaaaatgagatctgaggaagattcggctcctggggaatcttccaggagggaagctgagggtcttaccttttggaacgtaagagaatttatagagaatgcataaaaccccttggttctcccctcctccgcgccccccctccatctttgtagttacatctttctaaatgagtcgcaagtaaaacttaacggtaggatatgcttaggagagaaggaatgcagtgttgctcttagggctcaaacagtgtggattgcttaaattttgaaggcatacagtgtaaaagtagtgactaaagaatgtttactctccatgcaaaagttggttttagttttaaaacacttgcagtcttaaatttaagaagatacaatgtattaacttagttttttagatcagtttgaaacttccttatttttcaatagccacgcaaaagagattctccattgcttaaagaacaaatattttaaggaattggaggacctggaggtggacggtcagaaagttgaagttccacagccactgagttggtaggtaccacagtgcttcatgccgaatatttatttgggatattaatctctatcacttgaattatatttcttggtactgcatttgctgttaaagagcttgggtatactttgcaaacatcctaatgttctagtacctggtgcttttatcaacattatattgctacgcaagttttcatgcgatttgcgatttgcagctttatgagtcactgatttcagccagctcttcctagtacatccagcctcttcctttatgtcaccacttccgccagctcccttttacagcccttgttttctcacatcaaaactgttgcagagtggctgctttgccttcagaaaaaggacagacttagcttgacaacagtctcctggtaggtagtctcttagtgttttccattacagacaggttaccactgtctgctgtcaggttgtctcctggtacttcgcagtacagactgcaccagccaatgtagcatttccgagtctcag

SEQ ID NO: 318593 - DNA, 4001 bp, Homo sapiens
tgcaggatacggcactcccccaaacaattctcaattattctcaactattaagaaatgttctgagaacttaaattgagatggctgaaagcatttccaaaagttaagataattaaagcaataatgccacggttaatcaatcaaaatgtacgtgcgtgcacttatgcagtattctcgtcaaaaatgtattacctgaatctcgtcacgaatataaagatatatatatacacatatctctatatacctcatctatatatctcatctatataaactcagattatgagtcatattacaagacaaaatgaactacaaaacaaaatatcaatgtcacgactttagaatctttaaaaggggacgggactgtcctagattaaaggagataactattaatacatggattacttggcatattcaagggagacagtgttatctaattacatactagatcaaaagcagacaaaaaagcattattaaaataactggggaaattttaataatcaactgtagccaaaaacagacaaaatgctcgtaaaaggaacatggatgttcaatgtattactctttcaacttttctgtatgcatgaaatattccaaaacaaaaagcagagaagaaaaacttaaaaagtaaattttaaatatccacacaacttttatatagttatgcaacagcactgttataacctgagatagaaaactaaagaaaaataggtctaaatgcatcactaggaaataaatcaaaatttttttaaagaaataaatcttgggtaacaattaccccttccctcaaaggattttgatataatgaacaaaaaacggaggatcttaatactgtaagatctaccattaaaaaagaaaaaaagtttgtgtgcaagaatgtgaacaacctacaaaccccttgcgagttttctaaataatatcgtacgagggaaattttaccattccaaaatacactatctgggaagtggccgcgagctgtgaatgccagccaagatctggactttaaatgtatacgggagggataaccctgcaccgacttacactttttctgaaagctttgggacagtgtgacctttcaggaggaaaatttaatctgctgtcaaaagggctaacagacatgatctttgggaacatggatgcgctcggttagataaaccaaaatgctaagtttgtgcgaccgtcctgggaaacaaacacagccccagttccatcttgtcaccagcagcaggctttctcgtcagcaaaacggcctgacaccaaggccttaaaaactggactgtggctcaggcgcggtctccgcgattttcagagtggaaaaacgctctgagacgtttgccatgagggctgttccgggcccacctgcggccatcttaagttcggggggaaataagagggtgggggcacggaattcgaagacccagcagcgaacacaagtcccggaggcacagaaagggcaaccattctaaatccttggtaagggctccgtgcagtagttaaccccccaaatccgactaaggagagcaggacggcggaacccgggtgccctaatcaaatatgggcaccaaggtaagccggcgcgatcacgtgacatgcaccgcgcgcccgcgtccgcgctctcctccacgcctcggctcccgaggtctctatggcgcccgcgcccctcccccagccgagctccagcacttactccggggggtagagccgcagctcctcgatttctcctaggaaggaaaaaagcgtccgcatctgctcgctggtcaccgccgacgacagattcgtcacctgaatcaccgacgtgggggtgaggccgaagcctaagcccaaaccgaagccgccgccgctgttcatcccgatcccgctgccgttgccttcccgctccccaacgtctacgacgcgtcagcgacggagccgggaaagcggagaacgcgcggccgcgagcgcgctcccgctggcgaattcacagcgccgggcagatctagccgcccatttcacaactcccctgctcccggggctgcgcgcgccagccggaagcgtcgccccggcaacccggcggttctcgcgcggctgcggcctccagctcccgggtccctggggctgttgctgctcgtttcaccgcctggatttttatcggtgtttttgttttccccaaaagtcgatgagagtcttgtgctcatgtctacccggttccttccggtctcggattgggaaaccaagcggcctggcctactggtgcgggactgtaaagaaggaatgactcttggacaacacggaagaacacttgaccaaactatagggcagccttatcacatacaggcagcaccccaactccaactatttttaaaagttggcaggcgtcctaattgtgaaaaaaacaaaattttacaaaatgcgtaggttcaggttgaattaaggaaagaggcagtaagatgaaggctgtgcaggggttgtttataacctgtttttaattccctcgttccacaggtgttgatgtttattgagtgctatgtcccaggcactattaggcaagggcacgtaacagacagttaaagacagttcacatagaacttgcaacctaatgagagacaacagtagtgagtccatggcagctgctcccaaaatgccctccgcagatccctaagggtaccgagaccttttcagtaagttggcaaggtcaaaacgattttcgtaataatattaagagtttcttgacctttttcactttgttgccatttgcactggtaacgtaaaagattaaactgctgacaccttagcagcaatcaaggcagtggcgccagtcttgtactggtagttgcattttgtattcttcacatcatacaacatttaaggttttaaagtatgctagtttcactttaaaaatgtccttcacaaataactaaaaattgtatttttttttcaaatccatccttgcttacacgtcttttaaagaatatgtgtgaaaaaatggaaactactgccgctacatgcccaagtgaaatggttgtctccggaaaaagcactagtgtaattctttgaattttcacctaaaaatacaaattttattacacttgtatccaccagcttgagcttgacagcttgccagtacttaaagacttttctagtaaaagaagcattatattaacaatttatttttgactatataatgaaatatgtcaacatttttgtgatctttacaacttagtggacacctatttttcaaatggccagtgggtgccattacaaaggcaaaaagcctctggtatgtgcaagatagattgatggatttcagtgcttaattgatgtggtttcagattcagtccacactgcaatgaaggctaagaaactaccacatgtaagtttggtaccgtatcaaagaataatatctagaactatctggaaaggctataaagtagttttcccttttccaacaccttatctttatgagatcagatttccctcatatatttcaaccaaaacatatcacaacagatcgaatacacagaaaactcatgatcacaaagaaggaaacgtcagtcactgtggtctacttgagggtggagggtggaaggagggagaggagcagaaaaaattattgagcactgggcttaatacctggatgatgaaataatctgtacaacaaacccccatgacatgaatttatctatgtaacaaaccttcacatgtacccctggacctacaataaaagttggaaaaaaataaagaatacatagataggagaattcagctgtcttctattaaagcagacattaaaaaggtttgaaaaatgtaaaacaatgccactcttctcaccaattttttggaaaaatattttatcataaaaatgcatcattttgccttcaatctcggtttctaagaaaaaaatgcgtcatttctattaacataatgggcttataattatttttaaatgaatctcaaaataccaaatttctcaggtttaatttataatgtggatagtaataaaagcattttacagtccttaataatcttta

SEQ ID NO: 318594 - DNA, 4001 bp, Homo sapiens
aaacaatttaaatttctactcaactctaaagatgtcataaaataatttatgtgacactgcaaaacaatatattttcaatacaactactactattgcattttgtatccatttcagtccaaatttgcaaacacgtcttctaatataaggaccaggcaatgacaacttcattacgaagcagaaaacctgtgaataaagcatgtcagtattgctgcaaaacatgaatgagggatctagtattgcacttagggaaaaactagttaaggattttgcctggcctatatatattacacgtatgcaacaattttgcttaatgtgttacagtttgtgaaatacactaccgtaatcttccatatgtttaagtgaagaactttttattctctttgacttttaaattccaagtaataacatctgatttcaaaaaagtggcccattactgtcagttatggcaatgtgttgtcacccaaacccaggtttcaaccaaataaatattatgttgataatgaagaacattctccaatatatttcttctacctatgagataccttattaccacagccttgaaagcaagatttacaaaggttcatgtacaaagtattttactgattgattccaatgcctgcaggatacggcactcccccaaacaattctcaattattctcaactattaagaaatgttctgagaacttaaattgagatggctgaaagcatttccaaaagttaagataattaaagcaataatgccacggttaatcaatcaaaatgtacgtgcgtgcacttatgcagtattctcgtcaaaaatgtattacctgaatctcgtcacgaatataaagatatatatatacacatatctctatatacctcatctatatatctcatctatataaactcagattatgagtcatattacaagacaaaatgaactacaaaacaaaatatcaatgtcacgactttagaatctttaaaaggggacgggactgtcctagattaaaggagataactattaatacatggattacttggcatattcaagggagacagtgttatctaattacatactagatcaaaagcagacaaaaaagcattattaaaataactggggaaattttaataatcaactgtagccaaaaacagacaaaatgctcgtaaaaggaacatggatgttcaatgtattactctttcaacttttctgtatgcatgaaatattccaaaacaaaaagcagagaagaaaaacttaaaaagtaaattttaaatatccacacaacttttatatagttatgcaacagcactgttataacctgagatagaaaactaaagaaaaataggtctaaatgcatcactaggaaataaatcaaaatttttttaaagaaataaatcttgggtaacaattaccccttccctcaaaggattttgatataatgaacaaaaaacggaggatcttaatactgtaagatctaccattaaaaaagaaaaaaagtttgtgtgcaagaatgtgaacaacctacaaaccccttgcgagttttctaaataatatcgtacgagggaaattttaccattccaaaatacactatctgggaagtggccgcgagctgtgaatgccagccaagatctggactttaaatgtatacgggagggataaccctgcaccgacttacactttttctgaaagctttgggacagtgtgacctttcaggaggaaaatttaatctgctgtcaaaagggctaacagacatgatctttgggaacatggatgcgctcggttagataaaccaaaatgctaagtttgtgcgaccgtcctgggaaacaaacacagccccagttccatcttgtcaccagcagcaggctttctcgtcagcaaaacggcctgacaccaaggccttaaaaactggactgtggctcaggcgcggtctccgcgattttcagagtggaaaaacgctctgagacgtttgccatgagggctgttccgggcccacctgcggccatcttaagttcggggggaaataagagggtgggggcacggaattcgaagacccagcagcgaacacaagtcccggaggcacagaaagggcaaccattctaaatccttggtaagggctccgtgcagtagttaaccccccaaatccgactaaggagagcaggacggcggaacccgggtgccctaatcaaatatgggcaccaaggtaagccggcgcgatcacgtgacatgcaccgcgcgcccgcgtccgcgctctcctccacgcctcggctcccgaggtctctatggcgcccgcgcccctcccccagccgagctccagcacttactccggggggtagagccgcagctcctcgatttctcctaggaaggaaaaaagcgtccgcatctgctcgctggtcaccgccgacgacagattcgtcacctgaatcaccgacgtgggggtgaggccgaagcctaagcccaaaccgaagccgccgccgctgttcatcccgatcccgctgccgttgccttcccgctccccaacgtctacgacgcgtcagcgacggagccgggaaagcggagaacgcgcggccgcgagcgcgctcccgctggcgaattcacagcgccgggcagatctagccgcccatttcacaactcccctgctcccggggctgcgcgcgccagccggaagcgtcgccccggcaacccggcggttctcgcgcggctgcggcctccagctcccgggtccctggggctgttgctgctcgtttcaccgcctggatttttatcggtgtttttgttttccccaaaagtcgatgagagtcttgtgctcatgtctacccggttccttccggtctcggattgggaaaccaagcggcctggcctactggtgcgggactgtaaagaaggaatgactcttggacaacacggaagaacacttgaccaaactatagggcagccttatcacatacaggcagcaccccaactccaactatttttaaaagttggcaggcgtcctaattgtgaaaaaaacaaaattttacaaaatgcgtaggttcaggttgaattaaggaaagaggcagtaagatgaaggctgtgcaggggttgtttataacctgtttttaattccctcgttccacaggtgttgatgtttattgagtgctatgtcccaggcactattaggcaagggcacgtaacagacagttaaagacagttcacatagaacttgcaacctaatgagagacaacagtagtgagtccatggcagctgctcccaaaatgccctccgcagatccctaagggtaccgagaccttttcagtaagttggcaaggtcaaaacgattttcgtaataatattaagagtttcttgacctttttcactttgttgccatttgcactggtaacgtaaaagattaaactgctgacaccttagcagcaatcaaggcagtggcgccagtcttgtactggtagttgcattttgtattcttcacatcatacaacatttaaggttttaaagtatgctagtttcactttaaaaatgtccttcacaaataactaaaaattgtatttttttttcaaatccatccttgcttacacgtcttttaaagaatatgtgtgaaaaaatggaaactactgccgctacatgcccaagtgaaatggttgtctccggaaaaagcactagtgtaattctttgaattttcacctaaaaatacaaattttattacacttgtatccaccagcttgagcttgacagcttgccagtacttaaagacttttctagtaaaagaagcattatattaacaatttatttttgactatataatgaaatatgtcaacatttttgtgatctttacaacttagtggacacctatttttcaaatggccagtgggtgccattacaaaggcaaaaagcctctggtatgtgcaagatagattgatggatttcagtgcttaattgatgtggtttcagattcagtccacactgcaatgaaggctaagaaactaccacatgtaagtttggtaccgtatcaaagaataatatctagaactat

SEQ ID NO: 318595 - DNA, 4001 bp, Homo sapiens
ccttgtaagttatcctatacgatggcaaaatgaatgaagtacacagtctagaggaaccagactgacttcttgctttccagctgtctcataataggcaaattacttgatttctttgtccctcagtgtcctcatctgtaaaatgggaatattaatactcatttcacagtgcagttgtgaatattaaatgagatagaatacaatgtttgatatagtatctgacatatttgacttataaatattagtcaatattagctacagttactatctacttaatttctcacttacctcccatttgtatttgagttctatccacagaaaacatctttcattctgacatatttgacacataaatattagtcaatattagctacagctactacctctgtacttaatttctcacttatctcccatctgtatttgagttccatccatagaaaacatctttcatttcctcttttcacatatttcctcttcctttacgtatccagttcctccgactgcagtctcctctcccttcaagccacccctcctacaattcagatctcctcctaagtgctacctcctttggaaagtccttctgcccatcctgtatgtgtttggtgcccttactttgtgctaaggtcttgtattttccttgccatggcacttgtcccactttctgtaaatttctctctcttcactgctaaattctaagttctgtgtgaagcgtaaccatgtctaccttgctcaccactgtatttccaatgcccagtaccagtgcctggcacacagtaggcttaataaagagtgtacatttcctctctcacagctccagatgtactcctccgcaaacttcagttagtacaaaagcacagtgttccaataacagctatctgtagaaggaggttcaaaaaggctgccacagaataaagaacctggtcaaataatactgggaagtgcaggtttaaacaaagttagggttctgaaccatagtaattctatagttcatagtaattctatagcaattcatagtattctattctaatagaatagaatcttttctattactaaagtgcgctgggaatttccaagttgggaggtggggtggagaagtgtgtatttctgaaaatgtctcctgcaatcagtgttctgcagtggcaaagctggtttgaggagatgctttccgctactagaacttccaagtaagctggtagttgaggacgagaaaatcttttaagtaattattctgcagagttcaccgtttttaggtcagtaacttctggacatagaatttgagagttagaagaaatcttatatataattcaacaaagctccttctttttataaggaaactgaggcccagaagcacaaagcgaccaatctatggccacggagcagctacatacaacaggaagagctaggagtagaacccgcacacccggtgggtcctagcgacttctaagacaaacgatgcctccggttacctgggtcggccaagtgttcccacttcaagttttagttttaagccataccacagttaaggtagtttttctcggccgcttgcccccttaggcctacagttacagtctctccctcctccctcccttccacaatacactttccctgtaatcccaagcagctggggcttggctcctggggggaagatagttattttctttccttcagagtttatgtttggagtgtaaactttttcatgtaaacaaaacaaacctgtgaattttaaggcctccgcctaaatccccatgggcgctgctccgtacacgccgcaccctaccctaccctcccttgcgctcccttcggagctcggacgcagaggccctgtaattgctccttacctgggactgccatgacggtggtaagaggggtaactcgagcctctggctttcgaaaaggcgcttgcttcccgccagctgtgagaacaaggcacagtcaaagcggcgttttccttcccccagcgcagcagcaccctcgctacggtcgggaagggcctgtacgcctctagcgacggcagaaccagtagatgcggatgcagtttccggacgagtcatattgcagaagacacatggtccgaaccattactgatagttttggagggggagttagtttgatctgcacacgagagtagtgtaaacaccgccaacacttatgaagtgtcccttctaatattgtaatacaaataacataaataacattaagctatggtaactttacggacttttctcgttccctggagtacattggaataacccttctcagggttagcggtgctcgggtccggtaacaacatggcggcgtccgtgaggggctcctttgggcaggggtagtgtttggtgtccctgtcttgcgtgatattgacaaactgaagctttcctgcaccactggacttaaggaagagtgtactcgtaggcggacagctttagtggccggccggccgctctcatcccccgtaaggagcagagtcctttgtactgaccaagatgagcaacatctacatccaggagcctcccacgaatgggaaggtgagagcctcatctagggaacttggggtcctgggatccccaaagtgagatttcccggatttggggtggggagtgggtttcaggatctcgtggtaggaagagaccacgagaagtgttgtctttactcctgcatgtggacaatgttgcatcgaaacactgatgttggtacttttcaggatgtacttgaagaagtcaagtggagatttctctacctaccagcattccggtcctatttaatgctttaacccaactcatgcagccgatttctggggtcttaggtttttaaacagacatttttgagtttgatatattctttgcttaactaaggtcattcattctccatttcttctacaatcattaattgaacgcctgcgaggcactgggcactgtactaggcgccggagatacaaagatggatgggtaaggtagttgttttcccggaaaagcttatagtttagtttgtgagacagacaggtaaacaaaagcctgtatgtctgataagcgtgcttgtggagaagagaccaggttgctatggcggtactgagtagtgaacaactggggaagttaggaaaagcctcatggaaaagatatcttttgagctggttttaaaacctgagatgactgtcagtcagagaaagtgggaaatggggactattaccacattagaatggggaaaggtttctctgattgatttgatggctaatgtatgccaattcccatccaagatgtttgtatgctgtacaaggcagaagagtctgttgtggaataagtgtcacctgaattcttaaattgagacctagcttatatcacatatgaaatttgatgaatcagcatattggagaaaatgagattggaagtatatagttgaattaagataagctaaatttacacaacataccatcctgtttgttacatgattgcatcataaataatttatacagtcttttattcattgacatttgataatgtaatgagagcaatttaaaagtgaaaccaaaaatgctgtaattcccagcaaaaatgtaatggatattttatgggcagaccaattctttcaattctttgtttgaacttctcctgggcattgtagattagtatgtccatcccacccctcacctatcttatttaatatcaatgtgaaaacccaaaatacctacctcctcctatttccaaatgtttcttgagggcaatatcacccccagttaataaacactggtagagattgaatagatttaccatcctgccagacagggccttcacacttgctgttcctctgtctaatcaagtgttgaccttagcaaagagccctttcttatctactttctatgaaatagcaaacttcaatcatgccttgcatcccagcagtctctggcccccttaacctttttagtttttttcatggtatttattaattatttagtattactgtatccttcctcctaccttccccctatagaatgtaaggaacataagggcagagac

SEQ ID NO: 318596 - DNA, 4001 bp, Homo sapiens
ctgctgtattttttttttctagttggttgtcatttcttttctttggtaggttattcaatttttatgtagataaatctctctttccttttgtgggttttttttcccactaattttaaattataatatcctccatcatctccacttttttctgtcctttttatctccttcacattagaacacactagacttcagtggtggatgtgtgtagttcctgctttcacaaattcatgtaatcacctagtaaacatatgtgctacacatgatagacacataaacacaggaagacagaaacagttacataagtgtttccagaggagaaagcaatctgggtgcacaaagaacagacacctaacccagaccgagaggagttaatgaaggtttcctaaaggtcaaattttaactgttttgaagaagaacaaaagttagctaagtgtgaaaagagtctttaatgactcatcccctgtcatttccatcatcaaagtcattacaaaatttgatatgaagctccctggggttgaaatcccagggacattactctgatctttcatacatcacaggtaacctaatgcaaaatagcccaccaaacgctttctggcacaaagcacaagcttaatgtatgtttatgagtaaatagtaactactttcagcttccctcttcagcatatcctgtactccactgtcaactgaaatcctgactcgttaatctggcagcagagaatatatttcagttttatttccttcttcatctcacaagttcccatcagtgaagagttacttatccctgtattacccacgggttcttctgctactagccctttcctgcttataccagtccctctgcctggaatgacttcttcccctttcctgaatcactgactgcaattcctgtgcaagatccctaaagaccaaggacaagtatcacccatttcattttgccgcctttggaaacttttctgcattactaggttttggaggcattcttcacacattgttctgtaacacaggtgagtgttgcttagctctcttacttgagtataggttactagaaaatatgaaatatcccttacactactgtgtgtaatctaaacagtgacttgctcataaacgggataaagaatttcctttctgtatctaactgtgaggtccttactcgatccttatgtttccagcttactttaagactttggatgacattattttgttgaatagaagcagaaaccagagggggataagtggtagaaatggtattttgtcgacaccgcacactatggaagtgacggtggtgagaacaaatgtctgatgagaatggactgaaaaagcagaaaaaagaattgaggatagcaagtataaacagctctttattgaagttctgctgtaaacggaagcaaagaaataggacactaactggaagaggaaacgaagtactgagcatacagtctcattcaagaccaccaatttcttagaagctacagctcttactttctctctttcattttcgacaggcaataaagagcaggtaatgtgtactgaaagtttattaagggtcaggcacttgcaaatactttacgtatctcagttaatctcacaaccctgggacgaactatcttgagttccgctttacagacgagaatattgaacgtacaggctaaaggttcttcccaaagtcccacagacataaattcgtggggcctgacacatgtctctcactttagtcacctggagaccgaaaagggaaattaccggttgccaaactccaagttgcgggaaacccgcctgggcccaccacgaaagttcctccaaccgcaccctctatgcccgcctccgaccacgcgtctcaaaagagctggttttgaggacccttaaagtcagccccataggttcctcggcgctcacctcgttattgaggttcagagttcccggctgagccatggtagatgaaggaatatgatccgccgctgcctgcacgtgaaccggtctctcagaccgcggctgcgtcgccacgcccctcaacggaagcctcttctgtccaaaactcatccgccttctgctctagctgccgcctgggaacaagaaacattgacgcttggaagggaaaaccggaactgagacagaacaactaccggcgcagagggctacgcaacggaattgcgcgttcctatggaaaccagacgggggctggtagctgggcaacgtctagtttttcaagattcggtttgtgtgtgtgtgtgtgtgtgtgtgtgtgtgtgtgtgtgtgtgtgtgtgttcccttggtacactgcgctcgcattgtaccggccttggtttttctctctaatggctaggggggcgctgaacggcggtgaaagagctcttctgaaatgatcacttgaatgaacgattttttgcttccatttttttaaatctagtatttgtgaagatttctgcttttctaacaagcacacctttttaaatcctcgcagttttttgttacaacctgacattatagctgaggtgcggacatttttttcctgcacactatagaagggtttaaatttagggaataaacatttgaagcaaaaccaggatacacatttggtactgcctgtgggaatggctgtttattagccggcaagcataggagacgtaagggagtgtgtttgaattaggtaatatataattgtcaacaccttctagtattgaccattaaaatgtgtcaaatggtggtccaagagctttacataaattagctccaaatctccacagaaatccaacaagatagaaattattttccttttattaatattattttgttagagacccagtctctctttgtcatccaggctggtgtgcagtggcacagtcatagctcactgcagcctcaaactcttgggctcaagccatcctctcacctcagccttccaaataactaggactacaggagtgagccaccctactctgctctgaactattattttacagatgtggaaagtgacttcagaggcaccaagtgcctcgcccagagtcacttgcctgggactgtccactgctacaggacttcaagtccagctacataatacctggggtacagtgcaaaatgaaaatccaggcccctttattcaaaatgcaggaaaaacgtttcttccggcggagggtggtggctcatgcctgtaatcccagtactttaggaagcctaggcgggcggatcacctgaggtcgggagttcgagaccagcctgaccaacgtggagaaaccccgtctctactaaaaatacaaaattagccgaccgtggtgacgcatgcttgtaatcccagctactcgggaggctgaggcaggagaatcacttgaacctgggaggcggaggttgccgtgagccaagatcactccagactgggcaacaagagtgaaacttcgtctcaaaaaaaaaaaaaagtttcttccatagcgtctcttgactcatcatggtgtttgttaatttactatttaatacgatgctccctaaagcacagagacattaggttgtcagggcagaccctcaaaggtgcctgagacccctgccccaagactcaggtaggagtgtatacactggagcaaggtggcagcagttgctgggtggagacaggagagcaggaaaccagagaatccacctgaggagcttttggggacaggaccacacatgacctgagacaacaaggccttggcacatgttccattatcccactagacttcacttacaaaactcaaattcaaaaaggaaatcactaataatttcaagactgtgcccaaagcttagttaaccaaggcccacttctgagcctttgccgaagaaaccagccttgtccagaacccatgctgttatctcataaaactgaactccgcttagaatagctctgacttggtaaaagaaattggcattcttttagtttggtgcattatttggacacaaatggatttaacagatgacttcctgttggaccagtgttacatgaaggtagatttgccactactaaatagtacgctgaatt

SEQ ID NO: 318597 - DNA, 4001 bp, Homo sapiens
tggtatttttgagcatatgcggaggcgacagtgactgagagggaacataaagcaatcttcctggatgcttgtagtgttttcttttttgagtgcttgttaccacccagatgtactcatcatgggagaattcactgcatcaaacctaggtgtcttaaatctgtcatattacaaaatacaaatgacactttaataaaactcaacagggctgaactttctgcatgtcttcttcacacacttaaaaaaatctcaactacattctgaacattattaatgtatcgtacaatgtcataattttgatttcctatatcaagggaaacaccgtcataacctttgttttaaaaacatgtgaactctacactctgcccccactcctttacaaacaaaggctcattaagagacgttaaaaaaatatcccttcagctatgaattaatgcctttctggtttcaccaacactgaggaacgcaccccaattcttggctgtgttctcaagccctaaataaatgcagtgaagagaaccccctgcggctctaacaagattacgtggcccgaccaggatgacaccccccattccctcgaggatcaaggtgccagccatcttgcttaccttacttatggggattcgccttccctctgcgatggtcttcttattatttaaataagcaggatagatacaaataaacctgccatagacaatagcataagtggtatcactagagcagtaagaggcaggagaaaagggtcgggtggcagggaaccaaaggccaattcatgctgcctagatatcagatgggtactcccttttcaacccctcctttttctgcgtggcagttgaaaaatcaaagtacctcggagtggtcccctcgagcaactaatcagactggccgcgggcctactcctctttctgattgatccccctccctcaaccaatcagactggcacaggtcaatgggaaacgtctagagggtatttaaaccctagaaaattctgtaaccaacagctcttgggtagcttgctggagccggctcccaccctgtggagtgtacttttgtttaaaataaatctgctttcgctgccttgctttgtgtgttttgttcaattccttattcaaaacgccaagaacctggacaactacactcaacagataacaagtattttcaaaaatacattctttcggtccgtggtagtcgtcatcattgctggtacacctatgctattatttgcttaatgttatttctttaaattacctcactttaacttatttaaaaataaactttatccactaccttggatggaaaaaaaccacaggaatagaaacaaaacgacttgggtaactgttacattagacagagcagcccgtcaaaagttcctgagaatgggcccgccctcttatataaagtgtccgaggtattaaaaaccttaaaatttcacaaatgagcctttctgaacgcaacaatacttaaaaagaacacatttctcacactgtgattatattacttgatatcatgtccacgtagcacccaaaatccttgtctcgcgtacagataaacactaggctacctatggtcggaatttcaggagccctgagaagagcctggtggctgctgcaggattcagaaaaacgagctgccagggagaggcgcggggcccgtacagagcgagttggatcagctaggccattctggaggccgcggagcggagaagcgcggtgtagcacctgcagcaccacagcaagccccttcctttcggaggacccaccgcctcagaacccacctgtcctggtcggccggggaccgcgcggcagcgcaagccatcttcacaagagtctcaacaacccaggagccgcagggagaaacccggcagaaacccgggaggaacccggctctgagtttccgagacagcccgcttttccgccggaagtcctgcccaagaaatggttccgcgtccgcgatttctcatcgcctgtttgttccggcacctgtcgctcggcgccaggatctctagtctctgacgtggcatgaagacttcccttctcgcgagagaatcatgaaagcttctcattcctttcccaagccgggaagaccatgtggggcgcatgcaccgccactaaaaagggtttaacttcgaccctccctcgtttccagtttctcagcgagtatgggtggtactagctactctctgttaaggggcgaagactgtgccacgaggggaatctgtgtggttcaggatgcaaatatatgttagacagggaaggaaatactccttacgtttaatttttctccgttcctgggctctagagcttgctttcagtttggcaaaatggatttttgtagtggtagaactagcaaagttatagacgttgtgtttcagtgtgctctgcgttagaaacttagctattcaccttttaggccgggtgcggtggctcacgcctgtatcccagcactttgggagactgaggcaggtggatcatgaggtcaggagttggagagcagcctggccaacatgctgaaaccccgtctgtactaaaaatacaaaaattagccgagtgtggtggcacacgcctgtaatcccagctactcggaggctgagacaggagaatcacttgaacccaggaggtggaggttgcagtgagctgagatcacaccactgcactccagcctgcgtaacagagcaagactccgtctaggaaaaacgaaacaaaactattcaccttttaaaacttctgaaggataccatgtgccatcactacaggcatacttcattattgcacttcacttgctgctgcgagtagatactgcctttttacaaatggaaggtttttggcaaatccgcctgaaagaagttgcttggtgccatttttccagcagcgtatactttgtgtcacatttggtaatttttgcaatatttcaaaccttttcattatttctgttatggtgatcggtgatcagtgatgtttgctgttactattgtaatagttttaaggccgggtgcggtggctcacgcctgtaatcccagcactttgggaggccgaggcaggtggatcacgaggtcaggagatagacaccatcttggccaacatggtgaaaccccatctctactaaaatataaaaaataagccaggcatggtggcacaggcctttagtcccagctactcgggaggcaggggaatctcttgaacccaggaggtggaggttgcagtgagccaagatcacaccactgcactccagcctggcgacagtgcaagactccgtctcaaataataataatgttttggggcaccatgaaccatgcccagataagatggggaacttaatggataaatgttgtgtatgttttaactgttcgaccaactggccatttcccatctctctccctcttctggagtccctattccctgaaacacaacaatgttgaaattaggccagttagtaaccctacaatggcctctaagtattcaagtgaaaggaagagtcacacgtctcacatgtcaaaagatggaaatgattaagcttagtgaggaaggcatatgtaagccaagataggctgaaagctaggcctcttggcacctaacagccaagttgtaaatacaaagacaaaattcttgaaggaattaaaaggaaattacttcaataaacacacaaatgatcagaaagcaaaacaaccttattgctgatatggagaaagttttaggggtttggatagaagctcaaaccagtcacaacattcctttaacccaaagcctaatccgagcaaggccctaactcccttcaattctgtgaaggctgagaaaggtgaggaagcttcagaagtgggaagctagtagagggtggttcaggaggtttaagaaagaatccatctccataacatataacataaaagtgcaaggtgaagcagcaagtgctgatagagaagctgcagcaagttatccagaaaatgtagctaatatcattgacgatgatcaatgattagctagtatcatttagtggctacactaaacaacaga

SEQ ID NO: 318598 - DNA, 4001 bp, Homo sapiens
atgcagctcagaaaatatctcttgcaaaaaaacaaaaaagcctctctaatttttgttttgttttgttttgctttgctacatcaaggcctgatacctctaaatcctatgggaattgagtgtgttgctgccaacacaaagattaggaaatgttcccatccctagggcacacaaaactttcagggggagactaactgcctaaaccaaggagggaaactcagtcgcctgcgcattcggtttttatttacgcagctatttctgtgcgcaaggtaaccaaagtacctttgagagatgctctcagactttttctctggtctgaaccccctcagaaagacagggtgcgttcaacgacaaggataactctgaccctcagagtttaagtggttactgggaatcactgatctgttgcacagtttaaaaaaaaaaggggggggttcttcctcagtgatcacagtcactattcgttctcatttttagtaacaaccaaatcaccgttacaagtacacaagaatagcagcaaaccgctttgctttgcagtgtgccgtgacagtggcatcccgggccgggaggggctctgttctcgccagccgcctcttgggctcccaccgaagttaacacctgtatctccccacaactgtaaccaagcggctccttcccacctgaacgcttctcccctcccacaaaccccttttcggaccactggccctccccgccacagctgccctcctcgggcgcccccggcggctcccacaactcccctccgcgcgcccccgaccaccgccccgccgggcccgcccctcccgccgctcgggggctgccagcctcacaaaaagttcgccagccgccgccgcggagttgggtccgctgcgagaggcagaaacgccagcctcctccagcggatcccgctcctcgccaacacactttagctccccgggaactcggtccctctccgactcccaaacttcggcggcgtctccggcgcccacccgcccccgcccccgccccagccccagccccagccccgcgatgcgcgggggactgcgggcgccgcgtccgtagctggcccaggaaagcccggacgcccaacccgcacacgccctccgcgccccgcgcgcgtctccgcgccccgcggggccccgctcggccgctccacgcccggcttccgcccgccgcgcgcccggcaccgccgccctcgcctcgcctcgccccgcgctcgcggccctaagccccagcgcccaggcccccgccgccgcgctccccgcgctgcccgccccgaccccggccccgaccccggccggcccgccaaacacccacattcccactgcgcgccttcctccacgcagctgcccctcccgccacccccggcggctccccaggtccccggagccccggaccccagctctaaagttactttggaaggtgaacccgcgggttatttccctcaatcacccaaacaagtttccatcctcgccaccagcaccaccgccgcccctcaacacacccggtccctcccgccgacagccccctgcggccgcccgcccagcgcccgcacctcccgggaaagcgcagctccccgcaccacacgcccccatcgcggcacccctccccctgccagcccacccccggcgctccccgggcggagagtgtctgtgtctcccagagtgtgcgagtgcgtgcgtgagtgtgcgcgcgtgtgaaggcggaggtgggtgagaagcggagacacttacttctcccgggcctggctgtcggacgggacggcgctgctgttactcttgcctttgccgtacatgcttgtgccgagagcagctcccactgtcacgcacctgtcaacccatcacagcctccccgggaacagccccgtccccatggcgacccacgcagccacccccactattggccgccccacgccaaagctccgcccccttcgcccaggcaacgcgcgagactgacaggcctccccctccctctggccttccgaagcgcgcggtggcggctaagcctcagcggcagtctcctccctccttccctccctccccgactccctccctcccgccttccctctccgctctcctccctccacccgctctccttccccctcccccctccgaacccgggcgcaaggggggaattagaaactgctctagaaggattttaaacaactggctgttctctccgccgccacccctccccccgcgccgcccgcgctcagctcctcactggagagaaggcgccgggaggaggagaaactgcggcctggagtctccggccggagccggcggagctggagccgtggcggccccagacttcggggcgcccgccgagtccacgacagagccacggcctcagccgccctggggcccccaccagcccctctcccgctcctctcctatgcgtgaccccgcgccggtacccacgattgatttttgcggtcctcagccctactccctggggtgtcgcccccgccctgttcccagagggccggctggcgagggacacccgcgcggttccctcgaccttctggctgagcgaccgacagcgactcgccttctctcctggggaaaggctgcacctccggccctcggcgccgctgcggtggcggcgcccggggccgcgccctgcgccccaggggagcacccggcctggggtcggcctcctctgtaagaggtgagcggacctcccgaggaggcccggtgactcctgcggccgcagcggcccctgccccaaccccttcttgcacggagccccgcggcgccctggacaccccgccagatctgccgcagaagagggccccaggcttccccacccggcctggtttaacagtttgggtcagtgatgcctattcatcctgacccctggagtggaaaaggccagaaaaggtcttgaaagacttccctgtccttgcccgttagaataggccccagcgcgctccaaggtgtacaaagctgtgccagggctgaaaggctgcccgagaatgtttctgtatccaaatccctaatcccatttcagtaaacgcgcaaaagtttcagaaacacacacaatctggttcccagtagaactctgcatcatttatcttattgaagtccttgactgtaaaatcagacgggtgcaaatggggttagaaagaagatgggcttcacacggggaagaaggggacagatggggtgggacagggcgacatctggaaaggatgaatagacaagaagtagctatgggaggagagggaaatcggattcgcgtggaggaaggtaccgttctattccacacacacacagctttaagcatttagtaggaggatcataaaatgcatatggagatatacagatagatggaaaggaaagaaatgggtgtgagcattgacagaagtgataggaataaaacatcaacagatgattaaggaagggcagttagcaaaagtgagaggtcgagaatcaaaaacgcggttggcaaccagacataaagacgggaaaatgaagaggaaggactttctatactggtgttaatgacaaggaaaaaaacatgaggaaagtgaggtataaaaagatgagaagactagaagatacaggattaaatgaagaagccatagagtgtgatagcaaaagattaaaagtaatagaggacagacattatcgttaaaaaaaagatataagaaaaaaagcacttttattaaaaggacaaaaattaagccaataaaggaaatgaggggggaaaagtgggggaaaaaaatacactggcttaagtagattaatttccaagagatgtaatttgccatttctgacttaagaattcttctgtcagtttctaatgacctacagttattgggtggttaggatatggcattcatattcttctttttgtttctaatgacctgcaatgattgggtgattgaagcgaagctgagccagtcagcctctcttaatgaacttttgctcaaaatgctcaaatgtgtataaggttgccacagtttacagactcaacttcaaggttagcattatgtaattttt

SEQ ID NO: 318599 - DNA, 4001 bp, Homo sapiens
ccgaaccctcggagtcctagtgagccttggccgctttgtctgggatcaggcttatcctcctagcccacggcccgggagggaacaaagagcctcgaccctcaagctctagcctctgcctctcatcggagccccatgcgcccattcatcacctttctaaagacccctttgtctgcctggcaagcacaggtctgcaagggatgcccacgcccctgcccaaagtcctgcttttctaacaactgagctagattggattttcaagccacccagtcttgtgtaaacgacctcataccggtcttttttaccccctcagaatagaccatgtatagattcgttgatgcatgacgaccattccagcccattccttgctagctttttcattctcttccagtccgctttgactgtgctactgttttcctggttttctacagaatagcaagtccttctgtaaggatcaacctgcatcttgctcgcttaaataaatgcttattacctagggagcaggaatattaagaaatggagtgcaggaagtttaagagcatgtgtgtgtgttagcagtcccatctctctctctctcacacacacatacacacacacgcaagggctgttttctttgttttaatcaatgtcagagaaaaatataaactgggcaggcatctctgctggtgtgtagtttctgatagaggacgcctccaaaccggaacagggaggatttccgaaacaggactttgaatagagttgacaatcaggttcacatcctcagaaaaagccttccaagctatgtcagcaacacaaagttgcaccacctcctgggtaaacttcaaagacacagaggccagcgggtggaaggaagtgtgatatttagagaacttagtggggcgggggagagtctgaactcatctagacaaactaaaaaaaatagcagaaatatagtctgtgtgaagctacagtacccagtttctttctaaaactgtaaccatgacgcccatgcgttttagccgtagaagaacaaataaggaagtatccttagtggtactggagtttctaattcaaattataacacattaatctatccaacgtcaaatagaaaaaaaaaaagtagagaaacagagtatacctatttcctgctttctaagctttaacttcagcccttcgagaaaccatctatctccagtatctccttaggtgataggacattgaaaacaggcaaccgtttggtgaataaagacatttctcttgagttctgcccacagattaaaaggacaaggacacacgttctttgttgacacttctgcagtgacttctcctttggcgagagagcacccagggccaacacaactgtcaccacaaccacacagagcaagttgaactcatactgggaacagcttagagaagcacgcacatctcaacaacagcctttgttatttaattcatgacactaaccacgcgcaagctcaaacaaacacacatgctatcctaaccatcactctaccctctatattcacatttcatttatggcttgactttttgtcatatcctgaaatgaagctttgcatttacccgatgagttgcgtctcctggtgctcctcagttcttgctatttcttttgtcttataaaagatcaggagcagacttattgtgcagatcgtccacctcttcctaatggagcgcatcttgggtgcccgagaaagtcctggttgccccagctcccgcaccttctcttgatataaaggctccgttttggggagatagtcgcgggggtgaaatctgtaaaatgcgaggagagcttggagccgggatcccgggatcagatcactggggtcttctgtggccgagctccctctggtcctcgaacgctgcccagcgacctctcgccctgtttgcgccagctctgccagggtcgctccgcgccgcctccctggggctcaggtttcttttcagatgagacaccttgtgcattggaggtggcggcagcttctgcagctgggttcgggggcgtcactggcccttccctcttgctaggagataaacgctgcgcaaagccaatcaccaggctgagggggcggaggctgcttggagagtaacgtccccggctctgcctgctctgtgccgggagaggaagctcacagtgctacgcgcctgcgagctcgcgcacatacacatatacatacatacacacatacatacatatgcacacacacgtacacgcagaatcacacacactctcctgggacatcaaagcatcagctctctggacctgggagctccaagatagtctatccgcatctaggtgagagggcacctcgcctggggacagattacaaaagcgtcccgccagaggaatgcttcaggtagagctaggggtggattgcaagaagagtaccttctttcaatcgcttttgctaaacacacaccctcacacgcaaaaacacgccctccaaggtggagtgaaacggggtgcgggggtggggacggcggtggaaggaagaagacttttattactcaatctggaaagtgcaaatacacacatgaacctgttagccgatgggcccactctgcatgggtggtggacgacgaccctggctcaggattctgcaggaaacaagtgatgatagaggtgtcattaggaactttatggatatttatgcgcctccctttcattgccatttggaaactcctcacgcagaagtcaaggaaactccaatcccacttaaacttcattgcggagaaacagagttctgaaaaaaaagcagctaccatggacctctcttttaaacgcaagtacacccacacacattcggataccaaggaaggaaggaaagaaagaaaggaaagaaaagggaggggaggaaggaagagcaaagtcctctctaaaagtctcaattatatatatagcctctgattgtcacctctcctccgtcccaccatttttcgtacttgtattgggtggcagggacacttttcaagagttctgtgttcgattgttcactctgagtacctctccaccatcctccagtcgttgccctcattgggagagatgcttgctactctgctagtaccacgccttggttccggtctttactgttggctggtaggtcgggaggcacctctagcatgagacagtgtctggaagccaggatttccctcatctatatgcgccggtccccagctccctggtcgccagggtttctctccagttgaattccgtgttccttcaggttgaacagtagcttcagcggtttttcacgctcagaaatgatgaggcccaattccaatcttccctcccgccggaagtaagaaggggaattctgagttgcttgtcgcctgacagcttaaaatagcaacgaaaacagccagcatctttgcttaaaaacccaaggttcccgccagtgtttaccatacttcctctagagtttaagaagttaagaacttccgagatcttgaatttcctctttgcagcacagcgaacggggtcgggtataaaaatgctccaaggagcaagtaattacgaacgtttattgacactacaagtggcccacagggagcctttcgagtttattgatgtctaggcaaatccagcctgcattaatgcatttctgttagattgacttctgttagactcacttttcttctggcaaaaactgccagaataaaacagcttcttatttaagttaaaagggatccggggctgagggcaggggtcgggtgggagagggatgcatggttaggatgctaaattctcaaggataaactttgatttttaaacagtagacaactatattttagattataggtaaaacatcactctctgtcagggatagagtaatatgcatcgtttcattaaactcattatttcttaagcaatggttatggggcaggcaatgtgtgcggagatgggaacacaaagatgaataaaacttagcatctagtcagacacaaatcctactcactcaaagggggcatcttttaaaaataataatttacagtatggcaacatgaatcag

SEQ ID NO: 318600 - DNA, 4001 bp, Homo sapiens
tattcccttatcttgaccttatatcaggaaattatccaactctaacatttacacgtcagagagaacaggcaccacttaaccttatcagaatataataggttcatataaaagattttatactcttgtcagtcccatggccaaatgctgagtaatgtccacctccatgtttttcctttaatctttttgttcatgttttctatgcccatgcttttgaagctatcactagtggtgatagtggctgccatcatagggagggcagctgtctcaagttacttttcttgaggccatctatcagcaccatagtcttgaccaatccaactccaattattctcaaatatctgtcacagtgagatggcataggttctattttaaatatggaacataataaaacatttaacctgtaatgtaaagtgaatgccataaaaatctgtttggacttttgtagtacgactaggtcagaattcacttgttaaagaaatgcaggtatcagaacggtctaaccttgcattacttgattaatatggttttcacttccgtcaacagcttcagtttaacatgccatggactttccccaatgtcatacaaaccaaagctttgtaaattaaattatattttctaactaacataaaaatttcagcatatgcttgatttccaatcaatgttgaactgttaagttttctaactcagacaagtacagcagcttctcattttttgagactggctctggcaggagctcactatttaaagaaatgcaacatggaagtatatttctacaatatgaatagtgagccaacttactgttcaaacccctaatgctctaatacttgattaaaaaaaaaacctaatgctctgtacttgattttaaaaaataacaataacatttattgatcacttactacatggtcagtccttctggctgctttacattgcatttattttatttaatcctcacaacagtaatagtcctccttgagaaaatgtgtttcattatggtaaaggaattttagttattcagaagctctaggattggtgtaaatgggcatactttagatatcttgaggtcttccataagtgagaatagtagcttaatgtctatacattttccctgttttacagaaagggaaaatagcaacaggaaggttgagtcacttgtccaagatcacacagttcataagtgatggagccagaattccaacccagggcgtctgacttcagagcctaaagctctctcttgtaaaactgtggaagctgatcacaggctggaaaagacttcatataaaaaacctgggcccaccaaatatttgtcaagttttgtcctggctgctgaacctaaaaatctaaggtaatctttctcaagtgtaaattcgggaaaacaatgacactgatttggtgagaaattatttgagttaatacatttagcagggaccttggaaggcagtaagccctgggaaaactttgtctcttgtctttggcatcacctccgcgaagcctggtgggacgcggctgcccctgcgctgtctgtgcacctcctaagaaccaggaagcgcggtgacctccaaagaacaggactgtcccaaatcaagcgggattaccaccgcccctctcccatttaacagctgaggacactgaggtctaatggattccaagtacttaaataggtgagcggcgcgcaggggcgagttgcaagccctgggatccttccagctcgccgcttcccctcccaggggctcaggtttctctttcatctgtgaggtcctctcccgcccggacgccggggcccgccatccccaacgtccaccgcgagctccccagatccatggtctggagcaggtccagaagacgcacctggcaggacgccccgggcgccacagtcgccctccacacgggccaccccaatcctgccgcggctccgtggctctccttacctttacctgaggtgaagcaaggacgtggaagcagctacggcgcgctaccaagcacctcacaccgctctcaacagtactgctcagcctcccggcccgccgatgcgcaggcgacagcagccaacttgtaagtcaccgctggtcgcagccaactggaaggcacccagcgcctcagggcaaggcgggccgagcccccagccccgccccctggcccgatcccgggggctccggggagggggggctgagaggaggtggccggaacaacgtgcgcttgttcggattggctggcgcgggagcgtgtggagggctgattggtggccgataaatggaatgattccgcgtgggtgtgggctggcccgagccgcgccagggttccctggatgtctggggttgcctgcaggtttggattggttgggttgggttgtcctgtgatcacttaattgtgaaagaattttgtcaagcagtaaaccgactgggagaaattgaaacagaaggcgaagtgaaggatcacagtgagggataaggtccaaattcatcccgcttgtggatatcctagtatctcgcaactacgctactcctcccaggactaaaagtcaaataagaaaaagcgcccatgcagaggaggacgagctctctgcctcctgcttagcctgactcagaactgagagagctgggaaggaaaatgcatataaacgaaagtccctgccactatgtgaattgacctttagccaaatacgtttgtgtgtgtgtgggtgtgggtgtgtgtgggtgcgtgtgtgtgtttccatcctcagataaagagtttagagggcaaccttagaagcagagaaaaggaggaggtgtgacaagtggatttagcaactgcacagttttggagtttccatctactcgaacatgagaaagatttcttccagtggctgtgaagtcacccatctgatgggatgcttggcaaacagtgaatttcttcctttaccagagtagccatgatgcactgattagcgaggcttggtttgtctgcaaattgcgtttactaagatacgtagtttgagaaccaaaagcagggaagaatgcagtgctacaccattagtgatttctgatagacttgcaatgaaaataaataatatttcgtaaatttttaagtcggcctcaccaaaagaattaccaaatactacttgctagttattattggccgatttattttttacctccatcgtttatatgtaaaataatttgttttatatttatatttataatttcgtgtgacataatagaagagttcttcgtgtgttgtaaagctcctttcacttaggaattattggccaattattgaggtgctttggatggatggatgaatacgtagataaataatttgaaatggttggggaaaagtgctttgtaattaagttgtacctacttaattcaattacattgaatcctcttaacagccccctaaggtaggtgtgttttacaggcgaggagccccagacataaatcttaaggcaggttgcttaattactgagtggagaaactggaatttggctgaggtctgctggactctgaaactgggctcttagtctccataaaattcagatggtgcttggtagctctttgtcaaggcacctgtgaagaccactgggaccataaatgaaaggcctaattcctactgtgagggtttacacaggtttaatggtggagaggaataaatccacgtatctatttcaaaaaagtaaaaaagttgtatctgtcattattaggattcagttctggatactttgctcaacagtctatatattctcttgcaggatggtgtaaaacatgtttaaaacaaaattaacttggctttttttttttggacggcgggagtcattacatcacacttatgcccccatgggatttcttatcttccagccagtttctgggaggtttttgtttcttttgcttttgttcttcatctgttgccatttttcttggttagaatgaagtttgggtaattggaagccactctatcaaagtggaatgctactaacagcaaagcttcagattcagaaatacatatacaaatacatcatctggagctat

SEQ ID NO: 318601 - DNA, 4001 bp, Homo sapiens
ccttccgaaagcagtgcccccagggggaaagttcgcaatgccatttgtctcgccggcaaagttctgggatgtcgggcatcttttgaggagggggaagacgcggcacccttactgaggccggcaggccaggaagagaagttctccgggcgcagggcgcagcccagctccggggaccctctgggcctcccgcgtgccggccgggatgaagcgcgctttgcaccggacccgggattcgggggcgggggctggcgctggcagcgtcagacgctgcttcatttcccctcgaccctggggaggacagcaacaagtcctgccccagccatttcatcaccctgctagcacgtgcagattccgggccctcggagcccggcgcggacctcgccttgcctcgcgcttccctttgcacgtcccgtgccatcccaagagtttgcgtggccctgggtgggcgcctggctcccggcgaaacgcctggggcgcgccgcgtgggtgcacggtgtcctctcccagtagctcccggctgcgggggcacatgcacttacctgtattctgcagggacaggcggcctttctgctgggagctcctgtcttggggaccctcgggtgggttggtggcgtcggtcccccgcgccgggtcaaaggtggccaacaccaaagccagggtcatgaactggcccagccgctcggcacacatggttcttggtattaacctcccgtcgggagacctggatcctttgtgctcccctcttcctcctcctcctcttcctccttcgccgcttcccctcctcctcccactcttcctttttgctcgccttttccctcctcctcgcggccgcggctcggatagaggttacccagcgccctcccgtagctctccggagagcatgtgaccaggccgttagcagcgccgcgagtgcccggcaatggcagggatggtgcctcaaatatccctggaagctctggtgtcacttgaatgaaggagtcgagcaggtgttgtcccggcggctggaccaatccgagaccccggcccttttgacaacacggccgggaggcggggcctgcgctcaactactacaggaggaagccgagcgccgctgggagcgccggacaaagttgccgacctggcggcggccacgcgtttgcgtgcgtgtgtatgagtgtgtgtgagcgcggccggagatgcgtgcgcgtgtgcgggtgctccagggcaatggtcgaaaggactgtacaatataagagcgaatccaagctccagttgctgttaaagggggacggtgtgctctgggacagtgtccctggggcccctggctcgcgtcacacccacatcgggttgggaaagtttcctctttccgccgtttggaattcagtgagattcccagcccagaggacttgataaattgaagcagtttcctaggcacaatgatgctgtgggccaactgagcacacatgggaattcctggccttgtgacactttgcattaaaaagaaccccacgattgaagataggagcagaagcactagatacagtatttggtctgagcaactgccctatcttcccgctttggtgggccgtgcaacacctggagtgtcgtttctcgtctttcccctaatccagacgcattccaggctgggctgcagggatccaggtgacagtcaggacttgcatcatttccaggagggtggcagggaggcccaaggcagccctgagtcagcccgccgcggagcatcgcgtgcccggaggccagagcttgaaaggcaactttacgcgtctccaaacacactcctgcattttctcaaagcgctgctcgccaccccgctccgggttcccttttactctccagtcatccgatggaagtggtgagaacaaaaacaaagacaaaaaagctaaatccggggaagttatctccatctcctcccttttcttgttcggccccctccccaagaaccgccgggtcgggatagcccccggctactttctcacccggcccgtggagggaaggagaaagttgggcgccgcttggagcgcctcttcccctgctgtgtgtgtacgtgtgcacgctcacgtctcccccgcgccggggccggggacaggaactgctctcggtcccgtcaccccacggcgcagctcggggggctcgcagggctgggggagggcggggacacgagcgccgcgcccaagcgccccagggcacgcacccggcgttggcgcgcactcgcccctccccccgtccccaccctcctcctggagaacaggtgagccccggtaccagctctcgatcccccacccccgccccgcgccccgcccgcgccctctgcggtaatgcgcctgggaagtttcatcacccactgcccaggcgacgcggccctgggtctccgcggcggggcgcactgcccgcctggttggggccgccatgtgacacggctgggggagggggcgaggagacacgcgggcaggtcatcttttggccggcgcttgacttccaaagctttcctttcccgtgtcccggctgcacgcgggagtggggaaggcggaggcggggggccaggatggccacggctggccgcagctatccggcgtgtcgagctctcctgagtcggaaggaaggagaggagggggtggggagggcgtcttcagagtgggcttcccctgcgctggagcgccagggagcatccataaattgtcactttgaaggtccgaacctgcggcggtagggaccatgcccactattctaatagcaattactccgcgcagccttggatcttttgtgcaaggacgtgcgggtacaaatacattaaaacggccagttcacattgcccaccctgcttgtgtttgcatagttaacttagcttcctagtttatggaaaactacctcctgtagatccttaaaaacaaagcaaacaaacgacacagcggcattctggcctctcctaactaactctttaaggctctgaatttcctgagaacaagtagccatttggtcccactcctgcttatgggtacagctgggtagactttctttctatgtggcctcttttgtaggagagaacatgagcaatattgacattaagaaggcatctggtcacctgtttttttttgagaagcagaaataggagagagctccatggggcaggagcaagccctcttttgccagatgcagacacttagtgtgctgggcagaggcctcccaggatacctggagcgatggccagggggatggagctctccctgctcctgctttgcccagcctttggctaggcctaccttttgctaccatggggcccctggggctgccctcagaggacctacatagtttcaaagttcgtcctgaggctgtttgctcctgccttccaagggacattcctggttttcacctgagccaactgcccctttagaaccaaaagaacacatagtagctagaattggaggtggcgtaagcacaggcactagttcttaagggtttatctctgggccacttagccaagtccaaagcatccagataagaatgcccatctgagtccgacccgccaaggctgtgaaaattcccttgcagaatcactaggcagtttgctgaaatggccagtctaggccgcaggggtagaagtgggatgggggctcagactggtgactttgttgtgattgactccccctctctctggctgattcctttagctttataactgaggccaagtttggcagactgtggctgatgagggtggggcaggggacagtaataataatcattattactattatatagctaacatgacaccgcaccacacaccacactcatgcctttggtgtccctccagacctagggccctccctagatgggaactgaggcctgggaggtctcctggatggaccagctgctgtcctgaggttcagcagcacctgtctggatgggccctcctcctcaatttaacgcatacacagccaggaagaggcagacatgacctaccttgtgtcatccagggccttctgtggttgacgcctggagcccatgtt

SEQ ID NO: 318602 - DNA, 4001 bp, Homo sapiens
gtcaggcagggtggctcaccgctgtaatcccaacactttgggaggctgaaacgagctgatttcatgagctcaggagttcatgacaagcctgggctacgtggcgaaaccccaagtctacaaaaaatacaaaaattagccgggctgtggtgtgcacctgtagacctagctactccgaaggctgaggcaggagaattgcttgagcccaggaggcagaggttgcagtgagccgagatcgggccactgcactccagactgagcaacagagggaaaccctgtctcaaaaaaaagaaaagaaaaaagaaaaaacgccaccactccaagcctctagggcagtacttctcaaacctatttgcttaggaatcacctgggatcttattaaaacgtagactctaattcagcaggtcggggctgggcatgagattgttcacttctgacaagctcccaaatgatgctattataacaccggtcatctaggaactacttcggtaactaggcgatagaccacttccaagtcagaggagaaggcctggagaagccttctctgtggtccagcctcatagaacggcaatcctagggtcagagtgccctacaagctacaggagccccaaggaggaggatagtggcttagaagagaggtgctctcctggaggtatacaccaatttaacaagtgggcgtctcccagtaaaaattttcttaggggaaaggggggagtcaagctgtaggtgttggctccctaaaacaactcaccacctcagaattagctcccaggagcagaaaccaacgtcctgctgccacacttctctagactcaatcagctctgccccacccactccacaaaagctctctgccgcgtcttcctctaggggagaggtgactgcaggctgggagactccccagctgtgactcagaccgacggaatcaaatctgttcccccaggctcagcattcaccagatcctgacctccccctctgaccagccccaacccacctttccaagccccacctctcagtccatgggccacccctcgcccaccccacttccctgtctctggctcatcttcagatgtgtccctagctcccaacccgtccaagcgcagccgagtttctcggtccacatcgcctcgatattcccacagcatctgtggtctctcttaaaaaaaaaagtgtgcccgtatcgccgttttacggaacgtccctggaaggtccctcgagtggccctctcggatgctgaggtcctgtcaacgcccctttgtctccccgtgcggcgccgagcgcagtgcaggacacacaggaagtgctccgaaacagggctagggtgggggcggcaaccgtgcccggagggggcgcccagagcgcagggactcggccgggccgagtgatgttccccccaaaaaacaagagtcatcgggatgagggccagggaccccgaattcagcgccgggcagccctcggagccggagccaggctggccgggtccggctcaggcatcccttccttccggagcccctcgacgcgcgtccggccacccacctcagcgccctcaccttgtaaaccttgccgaaggcgccgtcgcccagctcgcccacgatctcccacacctcgttggggtccaggtcgcggcggacgtgctcatattcgcgggactttctcttctcgaaggtagacaggcgcaggatgcggcggaaattggcaaaagccatggccgggggcgcggtggcgccggctcgggctcgggctcgggctcgggctgtggcttcggcggccgcgaggagaaggaggaggagttggaggacgccgcgtctctcggggttctccccagacccgcctttccccgcagcccgacctcggtcaagtgtgccctgggcagcgccgcgccgggagcacccggaaccgcgcaggcggcggcgtgcccgcccccgcccccgccctgtcaggtccccagggccgcctcccttgtgccggcctcgcagctcctgcccggcccagccctgcctgcgagagcctcggacccgttccaggggaccgtccccgcgcccgcccaccggcccggctccacccgccgctccccggcagagccccgggaccccctaattggctgcgggcgctccccggctccgcccgtcgccgcagggcactctggaaactgtagtccccccacaccacgctccgcgagccgcgggctgggctttggggaagcttcggggaccgctcggtgggaccgctcatggactcaggagcccgcccgccgcgccgcgtggctcccaaaacttttatgggagcaagcgggacggcgacttggcatttcgcgagagcccacggatcgttgtcagcgcccagaaggtgaacctgcactcgttcatttaatcctcccgcagctattccgctaggctgccctcgcccccacttttccgatggggacgccggcaggcgagggcactcgccccaggcacacacgctggctgcccgtctgctgcgggttcctcggcgcggtgctgcctcctagtgtgcgacgggcaacgccggtgcagccgcggccagtccctgcagggcccggcttcccggcgcggtcctttccaggggctccccgtccacgatccacaaacctgccaggattagagggctgggagaaagagctcctttggcactgatttctcttatgtttcctgatgggtttgcggatgtatttgcatattaaataaaaactttattctaatttttaatttcctagtttcaaaaaagatgagcgcactacatacagatcaaactaaagtcttctttgagcaccttcattctcgatcctggctacttgagtcacttcactgctactgttgcctgtttgtcctatagacggttataacatgcttttacctgaatctaaggagagtgctgggggtggggggggggggcgggcagtctgcaagggttattatttggaccgtgtcataaacaagttgagtcttcgcaaatgtcacagttcaatagctccaaccccagagaacggctgtgttgaggtgttttcgccccttcctcggtgctttgttcgaaaacatcctttgaacagtgtgcaaacaccaagcatggttttccactgggaaagccagctcaagaagcctgcgatgctggtagtggtcggcgcagagggtgtcctggttgctaagccgttcggaatgtttccacagctgcaggagtgcctggaattgtagagggtctttaaaagaaggaaacgccgctcgtcgctgaccgttctcattgagtcaggcgctgtctgaacctcccaaaacatgctgaaaggcaggtctttcatttgtttcagaccatttggccaactgtacgaagcgggtggggagaccaagagggttgcttccatactaggagatgaaggctctgactccacgaaagctgtaggcctggagggctctgaccagctctgagagctccagaaaagcaagcaagcgagagaaagagagagagaaaggaaagagagaaagagagaaagaaagaaagagaaagggaaaggaaaggaagaaagagagaaaggaaagagagaaagagagaaagaaagaaagagaaagggaaaggaaaggaagaaagagagaaagaaaaaggaaaggaagagaaggagagagaaagagggagggagggagggaaggaaggaagggagggagggaggaaggaagggaaagaaaaacggagaggttcattcattcaataacactaagtcaaagaagccagacacaaaaggccctgtgttctataaatttccatttatatgaaatgtctggaaaaggcaaatccatacagacagaaagtagattaatggttgcctggagctgggtgtgaaatgggaattaactgtacatgaacaataaacagtctaattggggtgatgaaaatgtcctaaaactgcacaatggtgacaatttcataatttggtaaatttgccaaaaataattgaattttaaactttcatttttgtaaatggatgaattttatgtgtaaat

SEQ ID NO: 318603 - DNA, 4001 bp, Homo sapiens
tttaaggatttgcagttgttaactgcaggcagaggctacattgtcttttattttgtgcttaaaacctgagtacatgtagttttcacaatgcaccccagtcctgtcattcttatatctttcttcacacctcaggtttttctcaagtagcctgtcatcctgcaacataagatataccaagcactgaccttgcaagttgtcgaatcagaaagagaaagaggaaggaatattatcgcaattttccatgtttcagaatttcattctgatgtgcacacaattttgttcaccacggaccaagtgatttttagtgggaagataatatgcaaacagggaaccatttttgtgtgtgtctgtggaagggggaagcagatggaaccactgggtggtcgtttagtatcttcttcattgcacctaacatacacaatccagtttaaaattatttttcattttctctcccatgtggataaccaaattagattttttttttcatattcagaaagaaatctacctttctctcgcaggaaaatggagacatgtcctttccattctgctgaagagcccagtagagctgtaggactctcttttaccaaccccccagcccttcctgatctccaggcactaggtctgcagtgttacctaagcatcattttgagatgtgaagaggacagctaccatccatgaaaatgaaaatccaaagcatatgaaatgtaaaaggaggagaaatttgtcttgcagggacacagggagttttcagagtctaccctgacctggccgattatcagattattaactgggaaatagttccctaataccaacctttcatctttggcctgtaatttgggggttgtcaacaggtaagcttctctaaccaccaagcctccctagataaagaggtgtggtcttctaggattggaaaacataggaggtgatgcaagaaagttgcaacttttgattaaacattttaggtttcattgtcacagaatgtgcatagacacaacttattttgtttgcatttgaaaaacagaacttcttagtttaagaaatattttaaaaatagggggcaaaaacatgaaaaatgcccaagttaataacactctcagttaacaattgtttatatttggtcatctttatatcatcatttttatttttaaagcattttagggaaatattatttccaccttaatcctaaagtccaattgatttccctttcacactttccaaagacagccacaatcacggatgtgataaacattttacagtcccccttctatgattttacaaacatgacaagtgtcttaaaataagtcacctaaatggcatgagagagtggatatattttgcatcttgctgtgtctatctgccatcatacttctgaaatctaggtacaggcatgctgatccctacagctctgattttagctttttaagtgctgcatagcagtccgttgtgtgaatacaccacattttattttttaagtcctgggggaaaaagtccttgtggagatgaagcaatcatcaaaggcagctaggttttgcttgtttagatgctggagaacaagcagaaacacctccactcacttgtctcaacccagcaaatatttattgaagtctgtctgggtctgcacatgagtcagtgccaggcaggggaacctggatggagtgcaaaatagctggaattggccctagcctgcatttagttttgtgagttatcttgatcagcagcctttgtcttctcttctccttgcacttcctagcttcccaacagtacccttagtatgcaggtttattgttattattcgttaaatctagaccaccactcacctagtctcgattcttccttcattcctcccatgaggctcggagcgatgctttcatccagggaacagggactaagagaagaactccaagagcaaggagcaagaaaaggcacctatctgcccggaagcggcggaggctgcgagcgccgggctgggctgggctgggctgcgctggactgagctgggctgggctggggaggcacctgcggctgccaaggggtccgagcgccgcccagcgcacagctaccccggaggggcggctccttggccagggaaggaggcgggatctgcttgccagcgggcgtctccgcttagcgctctctccagaaaccgctgggcagtctcctgggtgagcgccagacgcctggggtccgtttgccgcctgctgagactagacaaggaccccgggagggcgacgttgggggagagggctacggatggaggtcccgccgcgcttgggccgggtccggagccaccaggacgcacagcgggtactattacgccccatatcacgggaactgcctcaccccccctgcgatgtggatcgtaatagccgggggggggggggggggagaaggggggtgctattactctccatatcgccgggggtgcctcacccccctgcgatgtggatcctaaaagccggggggttgagggggagagggcggtgctattactcctcatatcgcgggggaagcctcactcccctgcgatgtggatcgtaatagtcgggggggaaagggggacgctattaatccccatatggcaggagggtgcctcacaccccagcgatgtggctcgtagtagccagggagggagggggggtcctattactccccatatggcggggtgtgcctcaccctcttgctatatgggaattaatagcattctctcccctcttggacattagaaacaatttcacagtgtgtgtgtacacagcctgcgatattgaaactaacagcatcctatccacctccggttattaggaacaatatcacaaaatggtgtacactctttgcgagacttggagttctatcgtgctgtgtttccctgaatattcgtagaaatgtgacagcgtgggtgtacacccactactatattgggagtaacttcgtactccaccccctggaaattaggagaaatatcacggaaggggtgtaaagccactgcgatatttgaaataatatcatgccctcacccactagttattaggaacaatatcacaggacggtgtataccttctacagtattgggagtaatatcatcatctctttctttagatattaggaacaatatcaaagggggttgcacacccagtgtattattggaagtaatatcattctctcttcttctagattttaggaatcatatcacaggcagggtgtaccacccttattatattaaaagtaatgttatctcctttcgacctggatattaagaacaataagaaatgcgttctgtacatcctttgaatattggtagtaataccatcttttcccttcctggatttaagaaacaatatgacttgtggggtgtccaccccttgcaatattgggagtaatatcacctctccccatgaggttattagggacaaaatcacagggtgggtgtacacttcctacgttattaagagtaatatcatccactttccccctttatatcaggaaccatatcacagaagaggtgtacaccccctgtgatattgtcagtaatatcatctcttcccccctggatattaggagcaaaaccacaggggggatgtacacccactgcgatattgaaagtaatagcagcctctttcccgctggatattaggaagtatatcacaggtgtgtgtgcaccttctgcgatattggtagtaatataaacctctactatgctgcctattaggaagaatatacagtggggggcgggggggttacaacccctgcgacattgggcataatattattatttttccctgtacattaaaaactctatcaaaggggtctgtacaccttctgcgatattgggatcaattttattctctcccccactgaatgttagaaacaatattacagaagggtgtacacttcctgcgatatggccagtaatatcatcatctccttccctggatattaggaacaatatcaccatttgtgtacatcccttgcgctgttgggagtaacattattctctcttccccttg

SEQ ID NO: 318604 - DNA, 4001 bp, Homo sapiens
gcaaaaccttcccgcaaattcctaccatgctggtaacttcccaggtccccccagagacatagataacttagtgccttgcttacaagtgggtgtttactgagtgcctgagtgcaagtttgcagaaagcaaactatcagtaagcctaagccccaaatttcaaggaattccaagatacgtggatacctctattcaaggcacttataacaccaggtcataaaacgctgattatcaaaatatcttttgctctccccatctcagaagagattaggtcctattaacccatttatgccagaggttgcaattttttgaatttatgcaagcagaccttggcgatgatcttgagcagtagcacataaataactcccacatgcttagcgttccaataatggaacactaggcataaattagctaatttctgtatgcgttaaagggcctaataaacacatcacacactgtatttgtttaatacaagaaaaaaagacttaaaattcctccttaaaaaaaaatcataaataatctagctctctagatgaaacttgcattagcactgacattgcatatgttccaaaataggaggtcaaggaaaaagaagtgggccaccccaatcctagccattaaattcaaaaagctcaatctgattttaactggtaatgtcttcaagggtaaattcagaagggaaaagcaatgttcatgaccacgttttatccgtttttcctgtttctgctccattttgcaacctcatctctaaaatcaatttagttaagttttttatgctaattaatacgacaaaaagatattttttaaaaaggtaattaaattgaacataatttttcactttgaaactgtcgatcataactaccgtctgttatcaaaaactgcctgggggcctaagaatttttcaaagaaccacctggtactcaacccaaagaagtccactggagaagaaaggtaacggtaactaaaaccagcctctaaacttttaacaaatatatatttaccttaatgagcctgttccaatgtgggggtggggggagaagcagcttgtaattcaagtaactgatactgaaaccactattgtagaatttatacaaaacgcaactttaaaaagagaaacgaaatcttcagcctttgctgattgagggaaagatcagaaaaaaacgaggtgaaaatgaaccaggactgaagggcacacgacttcggtataacaggaaggtgacaagcacaagaccagggaaggggtcgcgcggccccagcaagccgctagaaccccgtggctagcagccgctcgggcgaggggagacaggttggtcggagggggcgtgggaggcggcgaagtgcggagaagacggcgtgggaaggggcgggatttgcaccaagcgccattttcttctctcgaagcgttccctccccctgcacatcagccgttcttcccccggccccctcccgcccgcatccgctctcccagtctccagagcgccccgctcagggcgaggggcgggggaagagtaggtaaccgcacgcgccccacctaggcaggccgccgccgcattgtcccggggacgccgcgactctctccccgcgactcctcactccccggccgccctcaatctaccgccccgggccgcagcgcccgccgcctcgactcggctccccggggacaggagtctaccgcggaagggcccacagcgcgtcaggcgtggagtcagaaacggagaagggggccggggacgccgaggggaagggggaggtaaggcagagccgccatttcccgcggccattgccggcgagaggagtggagggccgaaggcagctcacggcccggctgggagggtgggggccccgaggagtaggggtagggggtcccgcgcactcacgcttcgctcggctctagcagtcgaacaccctcttggtcgttcgctcgcgactgacagagaaccggaagtgacggcagccaggagacgccggccccgccgcgctggggctgcggtcacgtgatggggcgtggcctccccacagaaaccaacacttagaccctttccagggccttaaagggaccgcgtctcttcctaaatgggtgacgcgaaagtcagatgttggaagattacatctgacccttgagagaatgaaagagctaatatccttcctgtaggagatagcttaaaaaaaaattaaaaaaaaggaaaacgccaataaaacatgagtgacaagcgccaagctttgcgtttgttcaataaatgtttactctaatgaagcgaaggggtcataatgaaaaagatcaatactctggcccattttcccagaaatggtcttcctaccccacttcacccacctcaatacatgcctctgcctcctaaaatccaaaggaaggaagctaaagtcacagcgtttaattccagaaagtgcaagaaatctttggagtactccttattcctgtattgaagtcctggagatgtaagggagttcacagaaggcaagaggaatccatatacaagcaggaatatagctaaaagattatttgaatatgtatttgaatgaatacttcctacagctaagaatcaatataaaggcatatctattaacaaagatttatcaagcacccactacgtgtcagacgctgcaggaggcaatttacattactcatcctaacaagcatgttccaaagcagaaatgactgttctctccattttatagacgaggaaaccaaagttaacgccctatggagaggatatttcctgttacagctgaagcgtgaattgtccttatgttctctccctccagaccctattttcctgcctcaggtagaggaatggtatgggattttacaaagtagaggatggaatcctgtcgaagctcagaattgcacatcggagatgccacagaggctaaggaagggcagtgggttgcagaaagggaggagtgtttggatctacatatggagcagttagacctgtggttcccacccatcccacccttataggagaagagagttatatattccctgcaaacattaaagctgggagcggaatgtgtaatggggttgagacgcaaagaacacagcggatggaatcaaagtctgaacactaaacgtgaaagcatcccccacacgtccctttctagaattacctgacttttaaaggattaaatgctgacaaaaatacaaactaatcccttagtttgttgtgaaactctccatcataatgaaataaaagaagccatgaaaataaacactgacatcaggcgcggtggctcacccctgtaatccgagcactttgggaggccgaggcgggtggatcgcctgaggtcaggagttcgagaccagcctgacaaatatggtgaaaccccgtctctactaaaaacacaaaaattaggcgggcgtggtggcgtgtgcccagctactcaggagggtaagacaggagaatcatatgaacctgggaagtggaggttgcagtgagctgaaattgtactactgcactccagcctggatgacagagtgaaactccgtctcaaaaaaaaaaagaaaagaaacactgacattatgcattgtcatgggacactgcgcagctccacacctagctaaagaaatgcttaatattcaaggtaaaccacgtacacttaaactaatatggtatcccctccatctgcaacccttcctgctttaacaagttttcattcagtttctgtgtcactgagggaacctgggcagtgtgcctgctgtaggtttgggtttcggttctctaagcgtcggaggtggagagctgttaaggaggtatgcatttttagaagtagggagacctgaaactttgcatgcaaatttgttggctcaattttcctgggtgtggtactttgtaaaactaatcgaaaatccttgatcctaagcgttgcccatttttaaaaggtaaacataactcaagaaaataaacaaaaataattttttacatagatgaaagaggaaggaaacttttttattttaaacaaaataggggccaggcgtggtggcttat

SEQ ID NO: 318605 - DNA, 4001 bp, Homo sapiens
gatcgtggatttgatttattattttccaccagagaatgcgttatcagtagtgttttttaacgcgtatttttatgccatgaaagaggaatgcggcatattgttttgtaagacattcttaaacctcacttagaggccaggcctcctgccaaaaatcctgcagaatggtggcgcaacgggttggcactacagaacctcacgaacctcaacacctaggcgttcacatgaaaacttcccacgagcacgaggcctttcggaacttgccatggaaaatgagtgaacgcctgagagattaatgccacattcttcagaattaaggataagaattaaacggaagctaccgcgctagcagtcagctaagtatgaagggattaggttcagcgggagaggagaccatcacggcatcccggtctcatctccttaaggctctcatgagccttaaaagacgcctcatctcctcggtcccccggggagcgcccggtagctgcggctccttcccggcactgcggcgcactgcggagccgcctgcccgccagcccaggccgtgcggggctttcctcgccgccccgcgccgccgcagtcctcccgcccccctctgccccgccgggtcgccgctctccgcgccaggcgcgccgcggggcatccatcaacccagagcttttgacgcacacacgcgcgctcccagacggagactccgtcgcctgcccccgcccgccacccccgcccgcccctcgcgggtctgcatttgcatcactcgcacacgtagaaggtgacgcgagcgcccccagctcaggccgtccaggcggcacctctagcccccgtggctcagcccctccccccgcccccgcgcgccgcctaaggtccccgcacgcccacagatctgctcccgattgttcatctgccgtggggtgctggctgccccaagccaagttcatccccgtattccgcagtccccgtgggcccagcccggggcgctccccgcgacgctctggagaaaagtcttcccagttctagaacccaggcggaaggggaaaagcccactaagagaaagggtcagagggtcggctgatggcttttgctgccctcatcgccatctaagattacctcggtagcttatttactgcgattggtccctctcccctctgagcttcacagcctcgggtctgcttcgcctggcctggcgcacagcaggcgcccaaaaggtttttgctgaatgaaggcgttgtaacgtaggaagtgcaggcgctgacaaagagcctcagccccgcgggctcccctgctctccagccctctcttgctctctcttagacgccagacaggcgcttcgggaatgtatgtgggagagtttgaaaattcatggtgtttctttcaggctctctcagcacttactgcggctacctctgctctcccgccacctgcacgtctgcagagggatccccgccgaaaagttgagcctaaggcagctatgaaggtataggtccaggtacccagcccggggctctaggctgctagatttgaatctgcctatccctgccggtcaaaccacacaagcaaaaaagagcgtggcggtcgctgcagatgcggcccctgcatccccgctgctgcccacccacctcctctgggaatcccagataaagtgcgacccagtccccagacctaccctagcgaaccctggggtcactgcatctattttacccctactttcctggtccctctccaacaaaggcgcctacaaagcagcgggcacctgcagccgcttccccgggggcaggcggggcaaagttgcgcttccgaaaggctgcaaaaacttccccaggctgcagcgcccggccaccagtcgggaagagaaatccagcagcgggggaaagtctccccgcggatgcccgcttcacctcccccactcaccgctccagccgtcggacacccttgccctgagtggtgtcagcactgcagccgcctcagtgcgggcgccgctccggctcgcttccccgggctgcctccgtctgccactctcgcctgcagcgcgcggagtggtgactcctctgagcgtgtcagcggcgagaggaggggcgggaaagtggctcccggcttgcacgctgcggtcctcctcctctcctccgcctgcctcctccccctggtgctgcagtgccgggcggcggcgtggcgagagtaccagcggtgcgcagggagtcacggcgcgcgggggaggcgggacccgcgcgccactcgcggtgctccggcaagtcgcggtgctgaggcgctgctgcggtgtgggactggggcagggggcggggaaggagagccacctccaagtggtaggtacttctggagaagtcagggctctgagtttgtagcaggtgaaggagaggggcggcagtccttaattagtcaccaactgtgactgtgcgttgcgcacttggcggcgccccgggtcaggtccagcgtgagacgcgagggagttctgactgctggactctgttagcaccggacaaaaagagggtttgtattctatttccgggcctgggactgacttgttcacttcgacttggcttccagggagcaaccaggcagagctaggttgcctacttcccccagcccccaccccgacgctggaagacaagtccagaggaaacttgggcacagcaagagcaaacagaagaaaacttcgctgggttaagtctactgtctccccaatgctacatagggccagacagctgggctcacaggcagatattgaaagtggccccttagaggggaaacaaccaaatatgagggggggggggtggagagagagatagagagagagagaggaggaggaggaagaaagaaagaaagaaagaaaaagagaaagaaagaaaggaggaggagggagaaagagagaggagagaagagagagagagagggagagagagagagaattttgcttgtgttgttagaaacaaacatttctccccttggcgtgcaggagagagaattttgcttgtgttgtcagaaacaaacatttctccccttggcgtgcaggagaccccaactcgagcttcactgttccaaagcggtgggccaggcggctggagagaaactcgctcccgtgaggccacacccaggcctggcgcacccaccccgcggcagcagtggagggcgtcgccctcccgggccttccgacgcagaccctgccatccggatgctgcgggaagtagggcatcctcacgtccctgactcctccggctccgcgcgctcacggaacccaagtggagtgggaagcggtcacacaggcgtgtgccgtccccgaaatcgttgctcctgtggtggtgacccaaagcgagacaaagcgccgcgccaatacgggctgcagtgattggaactcaaacacacacatctctccgcgaatgtgttccatccgtgtaaatatgcctgggtgattgaatggatggctgaatgaacgctgtgtggatagaaatataaatgttacatgtataatacaggcgccggggaaggagagctgtcaggcacccccaggctggagcctcctgcccagaggagccggtggagacaggcggttcgcccagggcggtgttgttagcttgggctttccagttcgatttgtgccactatgcaggatactgtgaagagaagaaaatggagacaactcttggcctctcattttccctcctctctggttcagacactctggcactaaaagttatgattctcatgtgctgttgaacctacacttccttgctggtctgtcttgttccggtgagaggctttgcagtctgtgaccatggtgctatgagatggtcaggcaatatgaaaattagtgaacgtgctcattttcatttcgtggattcttcttagtaaaataattatttaaatagttaaataatttaaatagttaaataatttaaataattatttaggctaaaattaatgtgctgctactatgacaaggaagtgcctatgaatccagcattggaaatacaattgtgaaattaaaaaataaatcc

SEQ ID NO: 318606 - DNA, 4001 bp, Homo sapiens
gtccctcgtagcagggcaccagggggcaactccatctaaaattcctcagactagggagctgccctctctggcaatatcccaggcagcagctgctcaagatcatgctcttggtgtcaaaggtgggggtggggaggtagccaaaggctacaggggacaggtacctcattgaaccctcaatcggcctggctgtggcctgcacttgtgcaagtcatgatgtccccaccgcctccccacctaaacttctgcagggccaagttggggtgctagccctttaaagacccaccctggacactggatcaggagccctgaagataggccttcaagagaggaaggggtggagggcgggcacaatgaaaagctgcctggggtcaggagacctgggtccaacagggtaaatcctgaagtgggggagtaggcgagaagccccagcacagccatgagaaggggctttgcaacgactgctgtcactactgagcccctgctgcagcccaggctcagtgctgtgcactttatgctcaccaccttgttcagttcttacaacagctcccagacataagtcctgtgattcttctcattctgcagatgaaactggggctcagagagacctgcccagggtcacacaacttatgagtggcagagctggaatccaaactcagaaaagtctggctctgagtctaatctcttaactattctccttccagactaggactctggaaagaggagaaacaagagaggctccagtgctcttggatgatggtctgcaaagccctctgctccctcatcttgtgatcaatgcccctcagcaatgtcttctcccctgaaaacccagctgcctagaacaactccttctttcttccacttcttcctttcaggagaagagttgataaactcattcttactaaggtagaaaggactgataaggcatgaaagatgagtagagtgggaagatcactatgttgggagtcagaagaccccagttcttgtttggcgtagaaagggacaaaccctttcccccacccctaccacccactgtggacagctgcttgttctgcccaccactggggcccgtgtggatggaggatccacaggagggaggtggggccggggaagggaggccagagcagaaggtcaggacagggagaattcaaggaaatgcttcttcacacgatgccgtcaatgggagtgtccagccagggtcaggtggggcggggtgggacagagagccaggggtaggaatagagattggctcaaggcagcccattgtggtagtccaggggtcttggcgacaggaagggtaaacaggctgggtaaactgcccccctggtgaggtcaggaaggaaccaatgactggccactgcacaacctctggctcagctgggggcaggaaaatggagaggcctgagtaatggcctggctaccttgccagccccttccccattcctcccactgaaaggaggaaatgacacaggctccatgccctggagaattctccatccccagagtcatggcgagcgcaatctgactggggtcggcagactgccagacctcctcttgggaggagaacaatctagactttggtgggaaggactgccgggcatgggagaagacacagaaatggggtggggagccccaggcccagcccccgcctcaccactcacaggctggcagaaatcaccacatacctctcccttgatgcccagaggacagactaagatcagaggggggatgccacatgccctaagtcatataccccaagccacaaaggcacctccgggtgctcatcttactcactctgctaggtcctccctgaagccaagcttccccctggatgctcctgccggccttcaagccttggttctcaaagcctccggcaaaggcagccaattgcttggctgacgaagccaggaaaatcccacatcggcagcaacatgaaggagctggatgtgacttttctcctccacagatgactcagcccagctctttatcaggaaaaccgattttgcaacagccttttaaatggcctctccacccccagtctctcccccgccaatctacccgccccacgctgccagattcatcttcctccctccgggctccactcatgcctctctcctgctcaaaaccctctgctgcctccccaggacatggaggatcaagaggagagtcctcatcctggcattcaaacccctgctatcggggcctgcccaagagctcactcaccttctctctgtgccctcagcaacagtggagggagttcagtggcttgcagttcccacagctgcccaatgaattcctgcctgcaaagcagcgtttgcacagaccccctctaccgggaaccctcctctgtctcacatcctttctacatgccctaatccttcagatttccggcctacctagaatgccaccaccccctccaaaaagccttcaccaatgttctgtctgcatcacttaataaccaccaccttgtgtattatttattctagtaaaagtaatctttcagggtatactcaccacatgccaggtagcaggacagggccttacttcacttacttccacagcaacccatgaggccagcactatcctcatctccatattagagaagacgctggctcagaggggtgcagcaacttgctcaaggtcacacagccagccagaggaagagctgaaattcaagcccaggttggcctaatgcccagtgcagggccagtcacgtgggccatgctgccccctcccagtgttttgctttgtagcaatgagggtctgggccctattttcccccagagactgcaacggcctcgagggcaggggcctctactgcttcacttcggtattcctcccttgtccccaccacatcttccattggcacttgcagaataaacatgaaatctatgagaatgacaagagccaacattttgggagcaccagatgctgccaagccaagggtttaacatgccttttttcatttaatcctcacagcaactcatagaggaggttcccttatccccattttgtagataaggaagatgaggcacacagaagcagctaactcaccccaggtctcacagcttagcaaggggcccctgcggtctgactgatctcaagcctggacgccttccttctgaagagctccccacaaagcaaattcaccttccttactcacccatccaggcccagcccaacggccacttcttgtaggaagccctcatcaatccattcagactcctagatcagtgctcctcccctgttcaacctggcccagaggccccagagcaggaacagagctcagaggaaacggcaggttgagaaaactcagaaacccaggggaaggaggctgggcctggccaaacttctggtttctctctgctggcagtgggtcgggatcagggagggcagagatggatgggtaaggggaagctaagatgagggctccacagtcagcgcaagcctgacccatcttctatccttgcagaccacaagccctgctccctgttggctgaccagggccctgccaaaggccaggagccacagcctctctcttgcccattctactggggtaattattaatctataatcagtcaatttttagaaactttgagatggtaacccagagagaggcaagctgagccccaggtatacagcaaactgaaaagggagggctcacagagaggatcacaggatcacagcccaggcttccacctctccagtccaaccctggtgagctaagcctgtgctcacgaagccccctcctgctgtttcactctccccagccccagctccctggaagccttgggagtacagaaagaaccatcataccctgcctttccagagaaaacacataatctaaaagacaaaaaggtggcaagccagggcagggaaagaggtggtttcccctaaacagtgcctctgccagggtcagggcagggcctaggtcatctgcgggtcccctccactcttcccagggcctgacacactctgggcccgccacaaagatgtggtccttc

SEQ ID NO: 318607 - DNA, 4001 bp, Homo sapiens
tcccctgccccttcccacatagcactcacagcatacaccacacacacacacacacacacacacacacacacacacacacacaccctaaggtggcaactgggctttccactctgtaatcacagaattacagggcggttgctagtttgtgggggccaaaagatggcctacatagcagatcacaccttcaggccctagacagtcaaaaccaacgctcttaggaacatttaaaatgatgaaagcggctacacgtggtggctcatgtctgtaatcccagcgcgctgggaagccatgagggaaggatcgcttgtggccaggtgtttgagaccagcctgagcaacatagtgagaccctgtctctacaaaaaataaaagaaaaaacagctggaagagttatgatcatgctactagactccagcctgggtgacagagcgagactctgtctctaaaaaaataaaataaacaaataaaaataaataaacaaataaaatgctggaagcgtaatgacagcccattgccaaaagggacagaacacaaggatcttctcctgatccccggcttttattcatttgggtccattattcctttatttccaactacccgctggcttgatatgctatttagacacctttccctaatgtaggtaaaaacaacacacactccttgttacaatgaaaattggcagtctacatggcaccgtctcatgggctgccagaggtgcacacaccagactttggaaaacactatcctggcccaactctgccattgtggggatagggaaacaggcccggagacaggaggagacgtgtccaacatccgtagcaaggcagtggcagggccaccaccagaacccagagcctggcgcccagtaaggctcattccttaaggagagatgatccaggactcaggtcacctaggccctctgggagccccatttgccacagaacctgaaagtgtggactccagcctcgcaccaaggctgagcccacatcccagtgtcctctgtgcccccgatgagtctggatggcccaccactgtctccccgatggccataaggaagctgtccctcactcaggctaggttttctcacctgccagggctacagtggtgatgccgagctcctggaggtgactgctctgaaaaagatgaaaacagatgtgggagccgagattgttatcacctccttgctctacttatcagcttttcccccagggaaatgggcagaggttgtgcaggtgccagaagactgagctgggctgaaagaaaaggaatgaaggaggatggtggtcacaagggagtctctgcacagtgaggaccaccccctactcaggtgagtgtcctctcaccccagaggaccctcccagggggcagccagcaggctcccaagctctgggtgacaggtaggagtgtgcccaggacttaggccacaggaggccacttcagccctgcaagcaggaataccccaccgacctgcagacaggctctcgcgtgtgcacacacgctcattcatacaacaagcacacgcacagaactcattcactcacactctgacacactctcacttgtacggatgcaaatgaccccgagccctcctgcacagcccctcacccaccctggggcacatggtggggccagctgcatcttttctcccccagccccaagccccaggcttggcggcgtctctgccccgctgcctgggagacacatgtggtttcagttaacaggagagctggcatttccgtcccagacagccaggccctgccagggccctggccctacaggcacccgcaagaagggccacctccacccccactcctccactggccatcccagggaccccgaggccccctctcccctggaaggccctgttctctttccctgtggtcgccccctcacctgtagccggacaccacaccctctggcacagcaactggctgtgcccgggcctctgtccacggctgcccggctgcccgccgcctgcccgcctgctcctcactcgcgctctgtctggagcaggctgagcgggatgggaggagggcagggtgtcaggggggcgggcgggagggaggggagggggcgtgtggaaatgaaactttaataacagagccccttttgtttccgagcatatgggatatttcatacatactgaagacattagccgtctatatttttaagggcttgggctaaaggatgaataaatacagcccatattctgcttgacaaacacacacatcagagtactgacttctgtagcatttcaaaacctgaagaaaaagcccccagcgacacaggacacttaaaaataaatatgtttccaaaaccttaggctggctttgccccttcctggagccacttggaggactcggggctccctttatcccacagcacttcccaccacccgctataccttctgtgctattgtgggaagcaagcccctggaatccagccccctgccccatttccctttcccggatcccttaaccccccagccagatccctgagtgttaagagttccagaagagcttgggatctctgctatcctcattgcagagatggggagccaaggctcagaaaggggcagggacttgcctcaggtcacacagcaaatccggatttgggccaaggggctgtgccttcttctttcaacaggagggatccccacttccctgcctgggggatgggctggggagaccccagagccccagagggagggctgttgtgtgggctgggagagtgcccgcctgcctttcccactggagtgctgctctgggcatcccctccaactctgggcacccatccaggggtgacgtcagcagggctgggaatggggctggccccaggaaatccccttcaggccggcagatcccaacagacctggaagcctcaggtgcaggagcctccctcctttacagttcagctcccaagtcccctctcgccctccatctgttctctaggaacaaaagcagaggcccagagaggtctgaggtttggccaaagtcacgcagcaaaatgatggcaggacagaaaatcgaccccggctcttctgagcttgtgtttgctggcaaggttttgccggcaagctgttcccagctccctccaggcagggtccctcggttggggtctgtgcagtttccccactcatgtctattcattctccggaggtggcctcagttcccctctcctgttagaattcaatcccttctcatcaactgcctaaccatccatttagttaagcagttaacacagtgcttgacacttactaagtgcccatgataaatgcaaacactttattatgatgatattgattgagtccctgctacaatcaagcctgtgcccagcactggcactgcagtagttactgtaagacaagcccccaccgccgacccccaggctcacagtacagaaagagcctctgtcttcgcagatgtcttctcagggactcttctccgatacactttgcagtaggtaccacagtcatcctcactttagggcaactgaggctcagagaggtttagatgtctccctaggccacactggtggtaagggggctgggcctccaaccaggattccctgactccagagccagtgcgggtcaccctcctggggctcactcagtacttggccccagcattggtcccaagactactcagcaccgcataccactgggtgtctctacagccaataacagtcactttcctggcccctgccaggaagagcacccccaaaccatccatgaaaaagggggcactgatgcagaagcttgcttcccgggttcttggcctcaccatgccactagcaagtgtgtggggtcccttctctaaggacctggttctttacctgtgaagcagagatcgtcgtttcactcaactgtgagcatcacgtgatattaaaggatgtgagaggggcttcgcccggtacatggtgatttccctgtctggaattttgtgttgagaatggatcctggcattaaatcctgtctgggttgcaacaggccctgacaggcct

SEQ ID NO: 318608 - DNA, 4001 bp, Homo sapiens
tgagctgagcatggccctgctcacgtcctccccatctggacccacttcagcgtttccatgggctggctgtggaggtgattcagcgtgggcttccctgtcccgccctgctctgcagacagcagccgctgcaggaaaattatcatcattcctgcccttccttccttccgtgccgcgcacactgtgctctccccacacgctgtcatgggatctcactgcagcctaggtggtgttctatctgcccttgtcacctctaacaaatgaaaaaccaaggcctaggcgaggaacgtgggcctagctcagccactactaacacgctgagtgacctctagctgtctttttcctcactctgagtctcagtttccccacctgtaaaattggggggtcaaattctatcaaaggcttcagtctctacctcccaagctccatgaggtcagcaaccacatccgtttggtccagtgccgcgtccccagcacccccacgtagccagcactcaatccatttaatgagagggttctgccccatcggttgcttgggacaccgcagtgatttgttgccgctaatgattaaaaggcagacgagagtgggaaatgggcattttttttttttttagccaagcaagataatgtggctttctctcactgccttctcacgtgccctctttggcagagaaaggagtggggttagatgtggtgcagctggaactgcacgtagctcgctgtcgctcctatctctccacagctgttaatctgggcatgcccatgggactgtgatgaattactgtggatcatggaaaaatatggtcaggagcccttgtactaaggacctggggggtctccagtgactctggtagtccaagggaaaaggaacacaagcttacctggtttctgggccactctgggcccagggccagggctggggctggctgtcatcatctgcccggccttcactacatcccagtcctggctggccctgtcgtcgtgctgggacgccccttgttcctctctggagcagctgggtggttggatgcccagggctttgggcagctgcggtgtcccctgggtgactctgcaggcagagtcgtccccactcctgctgaccccctcatcctcttccaggtcggtaggccccacctctccctgcaggccctcctcaccgctgctctcctcggcttccagagccagacacctgtagcttccatcagggatctggaaggcgcagggggtaggcctcccttcgctgggtgcaaggggcggaggtgggaggtgaggacccagcatggtgctgttcttcctcagcgatgcagggaagcaggctcctgggcctgggccagggcctgggctggggccagctgtgtgagccctggtctctgctccttacacagcctcctctgactctctgcacttttgccttcctccgctgattcacagaattggggtgaggtctggctgagacgaaagataagtccttcctgggctagtggagtggtggacctccaatccctcttcttaacccgtctctggtgtgaggccgctttggggcaatctatcggcatagggaagaaagaaacagcacatgagaaagctcgcttggggttccaggctgaatttctgaagcctgttcctcttcaggtgaccctgagaactggtcggcatttggggtgcaggttccacacttccatagggaagtgtttcgaaagctccagtcatttaacatcctggattttcaccacatcctcatgctacctgaaactttatctaatatttttccattaatcaacttgaaatcacttacttctattactttagaattatcttaagcaatatttgcagagaaaccacaagtatattgtgctcagtccttttcccccaatgcacattaaataaatatctagttatttaacaacacgtatctagacaccacctagaaagaattcactcatatcccagcaaaggtacctacaccacaggaatcacaggagtggtgtgacctaagatgcaaactggggataggagcccttggaggagattgtgcaacaagaaacactgtgcagtccgggggtggtggctcatgcctgtaatcctagcactttggcaggccgaggcgggtggatcacctgaggtcaagagttcaagaccagcctggccaacatggtgaaacgctgtctctactaaaaatacaaaaattagctgggcgtagtggtaggcacctgtaatcccagctacttgggaggctgaggcaggagaatcgcttgaatccaggaggtggaggttgcagtgaaccgagatcgccccattgcactccagcctgggcaacagagcagaaactcagccaaaaaaaacaaaagaagatggtgcagtggtgtgctttcagtttctgtgcccaggcttgcagttagaatcctagctctgccatttgtgtgacgatcaacaagccagccacaggacctctctaaacctccacttccccgtctgtaaaatgggtattgtaatatttctaacttcgcattgcattgaggattacatgaaaaaatgcacgcagaggactcagcacagtttctaagccataccttaatacatgttggctgttctttcattccacaaaaatttcttaggatcctattatttttcagacatcataaaaagtactggggatatagcagagggataaagaagccttaaaatgtggtgaggagagctgtgaatgatagcaggaacaacaataatcattgtatgattatttatataaatgttaagaatgatgataatccaagcaagagggaatggaggctttctgtaaggggtggtgaggagggggtagatgggagagatacttgggtggaagaactggctgggcttggaggcagatggagagtgggtgtggagaagagggaggagcctaggatgcagcccaggttcctagctctggtgacagagattttgttaatagagatcaggaataaatgagaaggagcagctgtttagtggagcagggagatgagttaggttttggatttccaggggagatgagcagtgggcggttccacataggggtctagagaacaggggagaattccaggctggggacaaatatctagaaatcatttgtggaggcaaagggtggagatgggtgagatgcccaggatgggcaggtagtgcgtaagacagagcagatggccaattacacttgggaggaaaccctagaatcaagggatcttgcttaaagactggattccgctgctacttagctgtgtgaactcaggcaagtgtgaactctcttactctcacttatcctactgcaaaatggggagcagtgagaatcctgaaaattgtgagagtctgtggacatgagtgacctgaggacctggactgacctcagctgctgtggtcacgcctccgcccccaagcaggggtcaggcacctcccactgcagcaggctgggtcaaggtcttggtttctggctgggactgtgccaggagagtctggcaggcaggcagagagataagcgcattaccaagccccagggaaaatcagagccaaccaggggaaaggcaaacaaccatccggatcagaaagataaccaggcacctgttatagcagcctcagtggcagggaaatcaggagaaagaagcccaccttctgccccccggggaagaacagaagcacctcttctatcttgggtcattcacttaggttattgccgtaatttctcacatcaaccctatgagagaattaccttattattatcccatttcagaggtgaggaaattgaggctcagataggtgaagtgacttcttgcctaaggcacacagctaataagtggccaggctgggattccaacctagctctgacaccttgaccatgatggtggattcagagacatggaggagaggctccaggccctcattcatctccaggtgctttctcactcaccagctgctgccagatttctgccatttgagtttcaaagaatcttagaatctcacaaaggccagcagcactca

SEQ ID NO: 318609 - DNA, 4001 bp, Homo sapiens
gcctatacaatcctgcttcttataggatgaacacctagcaaaacaatataaatttgctgaaaaacaaaattacaaacaaatgaaagaacttaacagaacacacagcattaaaaggactaggaagagcaaggtcttaatacccagtacaataaagccaagaattttctaatgctgaccagtctgaagactgaaattaaatatcagttctttttacttctctaggagtgattctagctcctcttgcaaagagctgagttgctccttttctcggtcttccttttgtttgagctcatccagtacagcctgaaatctgttcttgagagccagattttccactttcatgatgagatcctcttgtcgttttgccctgtcctgggtctcttggagcttgcctttcatgttgtcaatctgcttctgaattcccataaccagctgattggttccttcattttcctggtgctgttcatctgattcatttagcttgtcctgtagctgtctctccagatcttcctccgtgtcaatgatgtttatatcttcttcatcttgatgctgggtctcatcttcatcctcactgctgctgctgaggtcattgaatatctcccgaagctcatcatgttctaatgagtcatggccctgcctgtgaccagacattcctggagaagagatatccaggccttgattttctgcctcctttgtttcatcttcggcaattatttcccaccgagtactaacagcttcagcatctgtactcagcaatcgtttcacttctttttcaacatctggagattcaatatatttcttctttgctgtcttccggaaccttctcttcctgacattctttagaggcagagtaattccgtggttccagataaactttttctctttgtccttatcctttttcttgcttgctttaggatcagtgctagcaactggctcctccacaggaggatagagatcaccatcaactgtggatacaagcatctgacagatatcagctgtcttgtaaaaagtttttttatcaatggttttcaagctttccataacacagggcaggtctactaattttgaggccaatggaacacggtccactctgacgattccatgacgcccatcaggatgtaactcaattgtcagtctgtccttgaggttgacatgaccagactgtactgcccttctcacagtagaggcatattctggaggcagacgtaagataaactggctctccagttcgtgaggagcatcatctttgcttttactcatctttatttccttgtgattcacttctccaataaatgctggttacactaaaaagttccagctactgcaatagtttaaaacaccagtttgctatgaattgaaatcttttaattacaagaagttctctgtagatcagcagctaagcgtctattttgccttagtttttatttaagctccaagtcttttctctaaatatgctgtgaccgaataccagtcgttaacacaaaggcttattcacagacttaagttcattaaatcagatgcaatgccaagtcccaacctctaggtgccgctgccggacaacgcggagagagctagctagctagctagggaacaggaaagcaaatggcggctcccccggaacggttttcggcccagaaagcccagcagagatactttcaactcacaaactctcccggaacaaagacactcaaaaaatcagggctcagcgagctctcttcgcctcgggtacttacaatccagtgacgattataagttcagtttcaccgggccggagcgaagggaagaggaggccgcaaggagccaagcgggagagagccgagcgtctccttgtcgtttccttaattcttcctgccgcttggcagagtgatccactaccgattactgatgaaagggcccgggatgggcagcgcgaaatcttgccgagaggcgcagctcgcatcaccagaccccgcacctcgccggccctccgtccgggtcgcctacccagcaaaaacggaagtgctacgtcgcgacgcggggcgggaggcggctgtgagtgacagcccctccgggcggaagggcggagccccagctagcgcaggcgcaatagcgcaattacgctgcccagcgtgaaactcatcttttcgcgagaacttgtttttccgggatggaaatgacagtgtttcggaagagctgttggtttcaaactatttagagcttggaagttccaagaaagacacagattcgtcccccgctaagccagcacttttacgggatcgctgtggggccggatggcttctagacttccgggtgattccgggagatgggggacgccttgcagtaagcgtctttgcttctggaaacatctcggatgttccctagagtctagcctatctggtgccaatacaagaatgtgtagctactatacaatggatttcaaagtacccaaatcaatggagtgaggaggacatgcagcttactatataagtctctctctatatatatgtttgtttgtttgttttggagatggagtctcaggctgtcacccaggctagagtgcagtggcacaatattggctgactgcaacctccacctctggggttcaagcgattctcctgcttcagcctcttaagtagttgggattacaggcacgttccactaccccacctaagttttgtatttttagtagagaaggggtttcaccatgttggccaggctggtctcgaactcctgacctgaggtgatctgcctgtcttggcctcccaaagtactaggattataggtgtgagccagcgcgcatggcccaaagtctgtatttttaaatataattccctgtaggggaattgtgcctctggttttacttgtgttctataatacttctggggaaacaagggtgattcctttttatgtgcttgatttagatgtaaatgtaaacagagaaggaagtgttcttttggacagaattgtctgatagactgagcatctggttaaagtagatataattgaagtattgtttcctgtctctcatgtacaagtaattttaaattactttgacattttttttaactccacctctactattttgctgttttctgcttgtcttttctatcaatagtcaggtattcatcaacacatatttttagtattttaacataactgggtaacagttggtacttatttctatttatttccatttatttttaaaatatctgggagagcatcaaggccattaatatttcatttctatcctctaaaatattaacaattgcccctaaatttaagagaattctcttaagatgtaattaacatttccaaaattcactttattcttgtatgattgaaagctccatgatagtgatcttcttctatcctggtcattgtgtcccagtgcctagtaccagaatgtgggagatacacaaaaaatatttgctaattgaatgaaaaaacttatctgtctagaaagatcatagtctcaaatcctgtagtgatttctgagagaaaatacattctttgtcattttaaaatgagatagagccactttacatacatttcctttctagtcaaggacaattctaattgttatgaggtggggaggtttactaatagtgtgtgtgaatgtggtttagctagaatgagatactgttgtgggaggaaattaaaatgacctgacgttagtttggtttttaatgttaattttaaaagagaaagtatgcccttccagataacggtaaattatttctctttgcttataatgtgttgaagaatgttagctgacttacttgtaatttccagaatgatctatttcctctttttcaaagatgaagttttttctgttacaggcttgagccacctcgcctggctgtgttttgtttaaccatatacaatgtgaggtcattatacatgaaaataatccaaatattactcagcatcttccctatgagttttatgatgctcaaatattcttatcatagaaggtaacttgagataaattgtatgcaatttttcattttccaaaattactg

SEQ ID NO: 318610 - DNA, 4001 bp, Homo sapiens; identical to SEQ ID NO: 317662

SEQ ID NO: 318611 - DNA, 4001 bp, Homo sapiens; identical to SEQ ID NO: 317663

SEQ ID NO: 318612 - DNA, 4001 bp, Homo sapiens
ccgtctctactaaaaatacaaaaaattagccaggcctggtggctgaggcaggagaatggcatgaacccgggaggtggagcttgcagtgagccgagatcgcaccacggcactccagcctgagtgacagagcgagactccgtctcaaaaaaaagaagactgaatgagttaattcatggaatgcattaatacagtgccaaactcgtatttagtactcaaaataaatattaactattgtataattattacaggaaggaaaaattacatatgtgttaaccatacatatcacgtccaattaagaatagcacaggagaatatttatggacatggaaagttgttgaccacattctattaagcaaaaaaaaaaaaaaaaaaaaaagttacaaaacagtaaaaatatcattttatgtgaaaaaaatctacgtatagtcaccatttatcatctagaattaaatttacatagttagaatgtgcccgtatgcagtttctccattcaatctcgagtggacaatcaagaaaaaaatttggcttttaagtgaactgtcctgtcacagacttgggatagaggatcccttagctgaagacgtcaccacttctcacttggactattacaacagccttctgcatgtggcctaaccttctatcccaatgccagcgtgacttttacaaatacaatcttcctgcttaagatccttcatgtatagaatacaagtttcaaacatccttgttgcctaagatccttctgattactgttcctttaacccttctggcatatctcttgcaaacaacccgaaagacaattcacctgcgtgccccttttcactgccttccctacctttacgtgggaagccccgtcctgcctgtttacctggtgaaatcattcttccaaactaaattctaaagtgccttcctaaacttcctcttctgtaataccacaaggttgatcacaaagcactagggctgttttcctgtctcttacacatcagcctgtgaggccctcaaagtcggggaactgggccctattcatcttcccacatgcaccgcccagatcagtgccgggcaaaatgtatacttaaccacccaaacttggacaagctgggtcagatctcgggcactcggttttcctttccttaaaatggagctctttacccccgcaggatcttaggagattgattaaataaggctctgcaatgtgtttcccgcttacagtaagccataaacgcaagtttggaagcctcaagcctaagattctgattctgtctccgcgtctaactactgtagatgtgaggctctgaacaagtcgctcactcaaggtctgtttcctcatctgtaaagagaatggacccacagatgaactgcaaggccccaccctaatttatgaatggatggttcccaaagggggttccgactttccaggagtcccaccatcccccacttctccgacccacgcggtcccggccgcttcctgcttcctgccccccgctcccgccgcgagcgtagcgtctgcacccactagagtcccaggctggtctctgggtcccaccaagtttgctcaccggcttctcctcgcctcccatcttccctgaaggactgctggccttctcctcaaacattggcgaacgacgaagcgatgagagaacccgaaagcgacggcctagaggagaggagccaagaggcgggtgggaggtgggctagcgcccgggacttggcctcggctggaccagctgatgcaatcgaaaggcgccctaaccccgcccccaacttgcggcggaacgagcagccaatggataacgggggaaggcgggccctccctcctctaagccagtggaaaatcttttcgggtgacagagcccttctaggaaatcaggtcgcggagggtgaggaggagcaactgcagaagctacatgcctactctccgctgaccttggtctggacgctttccagagtcaagtccccaatgcgcgtgcgcctttcctcccttctgactttatgtggaacaatcatggaccttcccggacaccgtagataataagtaggtcttggtctaaacttccgggaagttttcggcgacctggataccatcttcgacacggggacaaatcccgggatggagtccagggtttcccgcggcttcggcgcttcctgacctggcgtgactgccgacttgtcggcaccacccaggcctcaggctccctgtctgtagtggtgaatcgaccttcctcatggcagtccaggcttcccaagccccatgtcctgttgatccgggacaaactcttccttgaacgttcttcactacgagccgctgctgatctgtactgcctggaggagcatttccatagcgcccgcaaaaatacaataaagctcacccaaggaaataaccatggattctcacgcctgggtgccagtgtttggaatcgactgggcttttttatgttagtaggcaatttaaaacaattacttatttgaaatcagaagcgcaataggcataacttcaggtacgtgctccaccaccacgttttgtggatttttctttttaaacatcagttctgttctctacaactctccgccttcagggttatactttccaggaacaatagcttcccaattcggctttgtgcatccatttttcatacagcatcgttgtagtcttcaaatacaaatatgatcacggcaatctgctgaaaaatctttggtggctttcccttgctcttggacaatccctgattgtccaagttttcggcttcatctcgttcgcccaccatacactgaactataaactgtagtggctttttttcctcaggtcttcccacagactaagtaccaagatttttccaccctaccctcatccgtgctcattccgacacactttttgcctgtttgacacctcatttattgtcagatttcaagaatcgttttcttcggggaaccatttcttgactcccttactggatgaaacaagcctccctgttaaacagtgttggaggcgcagaaacatacccccaaataatggcgttttgacatctgaactgaagaagcctcaaggtcccactcccctaaatccccacgccatctctgccaaagcaaaggataaagtttagacacatcacaaggaacataattgtttttgttgcctccctgtaagaccaagaatgtagtaatcacacctgagcagaccctttcacaagatgttgtacaaattaatgtgttcctgatacattcattctcctttgtaatccctcaacagaattcctcttctccctatcataacctgtgtcgctgggattgtatccacaagcttctgaagccctctgaggggtgggtaatcacgctgtgattcttcctgtgtatacacgttaagtaaatttgtatgttttttctattaatgttcctcatgttagtgattttcagccaaacctcagagggccaaggagaaaggtccccttggcgcttacaatagtgtctgctggtagtttcatgtggttcttggtagaacttaccggttcaacttgttctttcactatgtgtgtatttagagctaagcaagtttactatatatgtgtatatatatatatatatacacacacacacacatatacacatacgtatatgtatatacatatattatatatatatatatgcacagtaatggttctgatcagttggcctaagagtacaccctatgtggggcttcacgtactgctacactcacaggcagaattgggggttgtttttctgtccagagtgattgatcctgattacaaggggacaagcgggtttcttctacataaaggagaattttgtcaagaacccaggagattcactgagaccttttttagtacttccttgtctaatgtttcgctgttggaaaactctgggaacccaacaaagacaaggaaggaaggaaggtttgggctatccttctaggtaaagaatctagtctagcgaggtcctgacaaaggctaagggtaacttgaaaaggtgctaggagaacagagttatgcaat

SEQ ID NO: 318613 - DNA, 4001 bp, Homo sapiens
atccaagaactttgggaggccgagacgggcggatcacgaggtcaggagatcgagaccatcctggctaacacggtgaaaccccgtctctactaaaaatacaaaaaattagccaggcctggtggctgaggcaggagaatggcatgaacccgggaggtggagcttgcagtgagccgagatcgcaccacggcactccagcctgagtgacagagcgagactccgtctcaaaaaaaagaagactgaatgagttaattcatggaatgcattaatacagtgccaaactcgtatttagtactcaaaataaatattaactattgtataattattacaggaaggaaaaattacatatgtgttaaccatacatatcacgtccaattaagaatagcacaggagaatatttatggacatggaaagttgttgaccacattctattaagcaaaaaaaaaaaaaaaaaaaaaagttacaaaacagtaaaaatatcattttatgtgaaaaaaatctacgtatagtcaccatttatcatctagaattaaatttacatagttagaatgtgcccgtatgcagtttctccattcaatctcgagtggacaatcaagaaaaaaatttggcttttaagtgaactgtcctgtcacagacttgggatagaggatcccttagctgaagacgtcaccacttctcacttggactattacaacagccttctgcatgtggcctaaccttctatcccaatgccagcgtgacttttacaaatacaatcttcctgcttaagatccttcatgtatagaatacaagtttcaaacatccttgttgcctaagatccttctgattactgttcctttaacccttctggcatatctcttgcaaacaacccgaaagacaattcacctgcgtgccccttttcactgccttccctacctttacgtgggaagccccgtcctgcctgtttacctggtgaaatcattcttccaaactaaattctaaagtgccttcctaaacttcctcttctgtaataccacaaggttgatcacaaagcactagggctgttttcctgtctcttacacatcagcctgtgaggccctcaaagtcggggaactgggccctattcatcttcccacatgcaccgcccagatcagtgccgggcaaaatgtatacttaaccacccaaacttggacaagctgggtcagatctcgggcactcggttttcctttccttaaaatggagctctttacccccgcaggatcttaggagattgattaaataaggctctgcaatgtgtttcccgcttacagtaagccataaacgcaagtttggaagcctcaagcctaagattctgattctgtctccgcgtctaactactgtagatgtgaggctctgaacaagtcgctcactcaaggtctgtttcctcatctgtaaagagaatggacccacagatgaactgcaaggccccaccctaatttatgaatggatggttcccaaagggggttccgactttccaggagtcccaccatcccccacttctccgacccacgcggtcccggccgcttcctgcttcctgccccccgctcccgccgcgagcgtagcgtctgcacccactagagtcccaggctggtctctgggtcccaccaagtttgctcaccggcttctcctcgcctcccatcttccctgaaggactgctggccttctcctcaaacattggcgaacgacgaagcgatgagagaacccgaaagcgacggcctagaggagaggagccaagaggcgggtgggaggtgggctagcgcccgggacttggcctcggctggaccagctgatgcaatcgaaaggcgccctaaccccgcccccaacttgcggcggaacgagcagccaatggataacgggggaaggcgggccctccctcctctaagccagtggaaaatcttttcgggtgacagagcccttctaggaaatcaggtcgcggagggtgaggaggagcaactgcagaagctacatgcctactctccgctgaccttggtctggacgctttccagagtcaagtccccaatgcgcgtgcgcctttcctcccttctgactttatgtggaacaatcatggaccttcccggacaccgtagataataagtaggtcttggtctaaacttccgggaagttttcggcgacctggataccatcttcgacacggggacaaatcccgggatggagtccagggtttcccgcggcttcggcgcttcctgacctggcgtgactgccgacttgtcggcaccacccaggcctcaggctccctgtctgtagtggtgaatcgaccttcctcatggcagtccaggcttcccaagccccatgtcctgttgatccgggacaaactcttccttgaacgttcttcactacgagccgctgctgatctgtactgcctggaggagcatttccatagcgcccgcaaaaatacaataaagctcacccaaggaaataaccatggattctcacgcctgggtgccagtgtttggaatcgactgggcttttttatgttagtaggcaatttaaaacaattacttatttgaaatcagaagcgcaataggcataacttcaggtacgtgctccaccaccacgttttgtggatttttctttttaaacatcagttctgttctctacaactctccgccttcagggttatactttccaggaacaatagcttcccaattcggctttgtgcatccatttttcatacagcatcgttgtagtcttcaaatacaaatatgatcacggcaatctgctgaaaaatctttggtggctttcccttgctcttggacaatccctgattgtccaagttttcggcttcatctcgttcgcccaccatacactgaactataaactgtagtggctttttttcctcaggtcttcccacagactaagtaccaagatttttccaccctaccctcatccgtgctcattccgacacactttttgcctgtttgacacctcatttattgtcagatttcaagaatcgttttcttcggggaaccatttcttgactcccttactggatgaaacaagcctccctgttaaacagtgttggaggcgcagaaacatacccccaaataatggcgttttgacatctgaactgaagaagcctcaaggtcccactcccctaaatccccacgccatctctgccaaagcaaaggataaagtttagacacatcacaaggaacataattgtttttgttgcctccctgtaagaccaagaatgtagtaatcacacctgagcagaccctttcacaagatgttgtacaaattaatgtgttcctgatacattcattctcctttgtaatccctcaacagaattcctcttctccctatcataacctgtgtcgctgggattgtatccacaagcttctgaagccctctgaggggtgggtaatcacgctgtgattcttcctgtgtatacacgttaagtaaatttgtatgttttttctattaatgttcctcatgttagtgattttcagccaaacctcagagggccaaggagaaaggtccccttggcgcttacaatagtgtctgctggtagtttcatgtggttcttggtagaacttaccggttcaacttgttctttcactatgtgtgtatttagagctaagcaagtttactatatatgtgtatatatatatatatatacacacacacacacatatacacatacgtatatgtatatacatatattatatatatatatatgcacagtaatggttctgatcagttggcctaagagtacaccctatgtggggcttcacgtactgctacactcacaggcagaattgggggttgtttttctgtccagagtgattgatcctgattacaaggggacaagcgggtttcttctacataaaggagaattttgtcaagaacccaggagattcactgagaccttttttagtacttccttgtctaatgtttcgctgttggaaaactctgggaacccaacaaagacaaggaaggaaggaaggtttgggctatccttctag

SEQ ID NO: 318614 - DNA, 4001 bp, Homo sapiens
acaaaataaaacatctttgcaagttattgtctgttcagagtgcacagctaggagaaatggaaaacaggcattcagtcctctactcctcctcctcctccatctgtcttcccctttatcagttgattggccatgtcaccatggcatctaggctctctgcaggatgaagtaggagaatatgcttataaggatggagaaggcctgcttgtccttgcttcctttgtgatctgaggagaaagaatggctccactgcctgcaactccaacagacagaacagaaataatatccaggtagacaagaaatgaacagtcagcccgttaaggtcaggaaaaaccatcaaagacaaggcgtcagatattcatggaccatacagcattcatgtgtccttctgacatcacgagttcaaacaagtgcttttctttttcatcaaacttttaattttgaaataattgtagatttgaatgcatttgtaagaaggaatacagaaagaccctgaaccatttactcagttttcccaatggtaacaacttgcacgatgatagtacaatatcactaccaggatattgaaattgatgtaatccatcaacatatgttgtgctttcaaaatcagtttaactgcttgaaaaagtagcatatccacagaaatacctcaggctggataaacaggcctgaaggggacatgttgtatatttatgaacaggctgctttgtctggctgagggaagtgtggcaggcatgggtaaatcattgaatcatgggttctttgaactgatccaacttctctctcactgacagcacttactgtggaggaggaacttttttgcattttgtttcaatttaggatttcctaaaattaagatgagagagtgtccagaagggtatataccaatcacaaggatgaagaacagaaagatgaaccttctgatgtgaaactttagagaagagagaaaaacttttatcatgcagtgggagaagtagaggatcaggaaggacaggatagacagcaacgcgctgatgggtgcacccctgccaggaaccctgctgccggccactgtgtttctcatttgccgggtgtgcctccccagagagaaaatcaagagcaaaacagcaaaaaggaagataagcaatggcactgagaactcagcaacaaaagagaaaatctgtatagccagtgtatcttctttttgaattgtggcattttgggagaaaaatttccttaggaagtatgggaccataaaccctgcatatttgctatggaaaacacaaatcatagatacatatagcagagaccccaggatcatccatgggaccagcttggatatcctcatcttcaaccagatgaagagtgggtgacggacgctggcaaccttggcacaatagaaaacgccgagccatgtggcaagccaaagttccaattcatttataaataagagaattgcacaattcgcagaacacatgatgaattctatgaagaagataacaatcacattaacgtagaagatgaacaactgcagaaaaattctagaaactgccagacaagaaagaaggagatccagcggagccatttttctgtgcttgatcaagtcaatgccattcaccaccacaatgatgccatttgtgaaaatcccaagaagaaattgtatcactgcaagaagaaaatagataatgaggtgagactctagcattttaggaataaaaaattatttacttaaaaaataatgaagttataaagttttggacaggttgggttgttcacgctcttcaattagatcaggactcctctggggaagaagactaacaataaaggcatggggcaggaaggtggtgtacatttgtttatgtcactgctttctctatttagttctgagacagtcaaataaggaggagatactctagcatcaatttgcttcttattgatggcttttgcattttacaggtttacctagctttcaaagtcatcacaggcaaataatggaatcagacaccttcagacagctgggagaacagctcctccatagtaattagccaaagatactcaattcttcatctctactatgaataattgattttgcctacaggtgtgattctacttaatgttatcgtgtactctttaaaaatatacatttttgaaattttcacttatgttatgatgatatggtacaaccagcaacataggactcctgagtagttctccaatatgcaatggttgagcaattcaaaactatctgtaaaatagttatagaataaaatatacataataaaagtatctctaagtataaaatcaaagtaattaggcttgcacatacatgtgtacaccaggtcaaaggcctaaagaaaagtaaggtgtaatgaaatgaagacaagcactcagcactgttcaccctggtcagcatctgcagagtaattcaggggttaaaatcttttctctcttatttttccaaaattatgagagttttatgacatgagctagttgttctagtagaaaagtaaagataaaataatacatgattaaatttgttgctttcagtctgtaatgcactatgaaaaattaagttggtatttcttaatatgtataccgtgctgcctgtaatgctgaagtgggttttctcagtctttacattattgacattttgggctacataactctttgttaggcacgggctgtcctgtgcaatctaggaaatgcagaatgtctaccacatgcctgtcctctacccaccagataccctccccaggctgtaacagccaaaatgtttcgagacattgccaaatgttcaagagtggcagaaccactatgacgggacaaaggtagataaagtatagtttgtaccttccagttatcccaagactaaaggcagaatgagccacatatataatgtgatataaaactaagtcctctctctctctttagagacagagtcttgctttgtcacctaagttgcagtgcagtggtataatcacagctcactgcagcttcaaattcctggactcaggtaatcctcctgcctcagccttctgagtagctaggactatagatatgcaccaccatgcctgactgctttttaaaaatttttcatagatatggagtcttgctacatagcccaggctagccttaacctcccgacctcaagcaattctcctgcctcagcctcttgaggtattaggattataggcatgagccaccactcccagccaagttagttctttagacaattcatcaccagagcacaaagtggggaccaattcaataaacactgggggaattaaagcttctccaacttagcacttaatcaaaaggtacctggcagacctgataatgaagcatatgtcttaatgaacgtgtgttactttgtctaaatgtgtcataaagaatacttaagattaatcttatttttagaaaactggaagggaagtcatattttaaaaaattagtcgtgagagtaaatctgtaggttcttttatggctcttctctgaataggaccatctatgccatcttggactcactctgttcttcctgacacaactacagtgagatgaaggaaagagacaggatcatcttcaaggaagcaccaagggaggtgttcatgagcagatgccatcagaatggatccaaatgcaagcatgccaggaggatgagccttgttttccctccagtagaaagaagaagaaactttgcaacttagaagaaacattctgcagcttagaaaaacagaaatgtaagggcatgcagctatgaaatacaagcatacttccataatactgtgcattaaattctagaccaccaaaatacaagaatattgcaataaggccagtcacactaatttgttggttttccagtacatataaaagttatgttgatactaaactgtggtctattaagtgtgcaatagcactatgtcttaaaaaaagatatacatactttaattgaaaatactttattaccaaaaaatgctaatgatcatctgagctttcaatgagtcataatctttttgttggtgtagggt

SEQ ID NO: 318615 - DNA, 4001 bp, Homo sapiens
tcaactttaacacttttgtttcatagtccattaatacttttttgagatagtctcgctctgtcgcccaaggtggagtgcaatggcgccatctcggctcactgcaaccttgacctcctgggttcaagcgattctcgtgcctcagcctcccgagtagctgggataacaggcgcgtgccaccatgcctggataaattttatatttttagtagagacggggttttgccatgttggccaagctagctattcagattctttaatgaaaagtctaggttggcatgtttttaatagatggcttggataaaaccacatccctgtctgctcctcttcagggaggacagtactcaggaggccacgatgcccatgatggcacagggaaggccctgtcagagggcacagcaggacacaccaaacctagcagtggggagagattgggagagggttcaaagaagggttcccttggggggaccctgggagctcggtcccaggggacacggagagtgaggtggaaaggagaagagcccgcaggaaggaggtgtacagagaccgggctgcacctgcacccgcccgttcaatgagacgacccacataagcctgccgagcacagcacaagtgtttcaagtacaccagcgaatatgacacactggcgcgctgatgacaccctggcgcgctggcggaagaaaaggtgccggtccctcgctttcttcatcgggcttgcagtagcttcgaggttagccacaggggctgccgactgaacagctggatctaggaggcgggtccagaacaggagcccgagatccttgaagcccactgggagggaacccgaagctgaagggaacactgagtgtttctgggaacagaacagtctcttccacatgaagaaacgtggcccaggagaagcctccgtctgcatctggctattagctgctcacactgaaaatcaggatgattcacagaaaatgctcttgataaactggacgacctggcaacactgggaccgcaatcctgtagggcaacagtcggtgccccgaagagcacaggcactgagcccgagccagccgggctcctgcagtgctgggcgcaggccctggagcatgaggggccccggacaccacctgcggagggagtggcctgtgggcctcccctggatcccacaggccgcacgactccaagggtgcctgtccagcttcatcctgtgtgatggtggcacccgggcccacaaagggccaccttggcgagcttgcaggaacaccctgtgccgctacccacagccttgggtgcgcagctctgagagcagccaggagcaggaaaggtgggggaggagaagctgggggaatgggggtgcggccagctccagggacctctgatcttgctaaaagggcgatactttggtgagatgggcacgaagaagagggcaaaagaaaacgtgcgctggcgtcacctggccccttagaggcacctggggaaactgaggtggaggatgaggacagggcggtctcgccaactttcggcggtgagatcccgggaagctgcacggcccccggggctcgcgggcgccgaatccgggcagaagccgccgccggtctccacttggccgccccaagccgacctgaggagagcccgccgagggcgcattcgcctcccgccagcccctcgcctccccgccccggcccctccgcgcccggctcccgggtcctggcctcgcgcccccgccccgccgcgcgctggcgtgcgtgtccgccgcgacgcgccgaggccgggccggaaccggacccgcccgccgcccgccgccagccccgccgccagcccagccgcggcgcccacaggcccggccgcccgcgcgcctctcacccgtaaggccgccgcccctgccgtggccccggcgtcgctgcagcacgaagaaggggttggcccgctccgtcacccacagcgcattggccaccagcacctcctccgggctcagccacatcgcggagccgctcgcaccgggccgaggcccgcgagacggaagcgcccgccgccgtcggcgtcccggagcggagcgtgcggagcggagcgtgcggagcgggccggggcggggcggggccgggcgggcggcgccccctggcgggcgtgtggcgctcccgcacgcggcccgagttccgcgccgccccctcagccccggcctcgggcgcgcgccagcctggcctcctggagcggtgcagcccacggcctccggcctgggtccagaacggaacggcccagtccgcagacaggggagccgctgtgcagagcagggcttctggcgttttgaaagctgtgcagtgtgagagaaggatgtcaagaagcagagtttggcggcttttggctggttgcgcgtgcaacccggggcgtgttagcactgcaaagggcgcctggaaagggtttgcagttcctcctaattctcagctttcttttcttttttttttttcgacagagtcttgctgtgtcgcccaggctggagtgcagtggcgcaatctcagctcactgcaacctctgcctcccgggttcaagtgattctcctgccccagcctctttagctgggattacaggctcccgccaacacgcccggctaatttttttgtatttttagtagagacggggtttcaccatgttggccaggctggtctcgaactcctgacctcgggtgatccgcctacattggcctcccaagtcctgggattacaggagtgaaccatcgcgcccggccagttctcagaattctgacactggggccgggagactagaagaatcttccagcgcagggcaggtgccaggaggccctgatacgggctgcatccttggaaatcagtgctgcccctcccctgacagacgggtcacagaggctggccggccctggggatggggtctggactggccctgggcccagtggcggcttctgcgcaagtgtgaggctggctgcaggcgaatgcgggtccctggtctcccagtgttggcctgcaggggcagcgccagtccacacacagccttctgcatgagggggctgtcaactccacctgggacaacgggcctggggcctgtccggggtcgactgggatgtggggtcaccctgctggctggaaccctcaccagggtctggctagagggcaaagggaagggggcagttaaaccatccttggagctggacctgacttccaggtgggtttctgtgattggcactcaagaatcttggtgcgatggatgtaggtacatgcagttgacacccagagtgatctgcagtcttcttcaatgttgctggatataggaatcagctttcaagatgcagaggcgggctttcttcaacaccttggaagtctgaactaatattgtcattgtgctctctagagggaaagaatttggaagaactgcactttttaacaccctgagaggaggtaaagagtcgtcttgttccttaatcccagtggttctcaaattgggtatacattaggatcacctggaaggctgattcaaacaggctgctgtagtcccagccacttgggaggctgaggtggtaggatcacttgaggccaggagttcaaaatcggccagggcaatatagcaagactccatctgaaaacaaaacaaaacaaaaaacagccacacaggttgctgccccctccctcccagggtgtttgcactgctaactcgttcctaggtgatgttgatgctgctgacctggagaccactcctcgagaatggttttttataagaagaaaaagaacaaacatttatcgatcacttagtatgtgcgtgctaagcttacttctttttgattttctgagatataagtcacattccgtaacgttcactcttttaaagtgcaaaacgtagtggtttttagtatattcactaggctgggcatccatcatcactaattccagaacatttttatcaagtcaaaagaaaccccttacccattagctgccattccccacttccccccggctttgccctggcaaccatcaatctattttgtctctatacatt

SEQ ID NO: 318616 - DNA, 4001 bp, Homo sapiens
aaattaactaggagtctgggacctttttaagtctgataagaaacatttacaatctattctctctgaagcctgctacctggaggcttcatctgcctaataagaaccttgatctccacaacccctttattttaacccagacacactcccttgtattgattccaggtcttaagataaactctttcaacgaactgccaattggaaaacctcctataacttggaactgtccccagcccgctttgggttgtcctgcctttccagatcaaaccaatgtacatcgtacatgtattgattgatgtcttctgtctccctaaaatgtataaaaccaagctgtagcctgaccacctcgggcacatgtcatcaggacttcctgaggctgtcacaggcatatccttaaccttggcaaaataaacttctaaactgattgagacctgtctcaggtactttcttggtttacaggaatttaagcaaattacaggactgcactacccatgagtttgtgaaaggaaaaataaatctcaggaccccaaaatcactaagccaaaaagaaaagtcaagctgggaattgcatcgagcaaacctgcctctcattttattcctgaataagatagctacaaagattaaaaaaaaaaaaaaaaaagctacatacctccctgacaatttgcccccaaggaaattccttgtgggcctcaagaccttcactctaaaacagttctgttgtatttcaccctggcaatgtaaattgatagcttatcttcacaggtatgggacaaagaacagaactcaaagtcacccctctacccacctgagacaaatgcgtaactgactgcttcctctgccctactgtgtatgtaaaatcgcagattcatttagccgactaaggcataagtgactattcttctatccctctctcacatgtaaattgtgtattaagtgaaaagctgatcaaagactcaaaagaatgcaaccatttgtctcttatctatgacctggatgccccccaaccttctagttgtcctgcctttctggagggaaccaaggtacaccttacccattgactaatatctgaggtctccctaaaacgtattacaccaagctgtgccccaaccgccttgggcacatgtcatcaggacctcctgaggctgtgtcatgggcacgtccttggcaaaataaacattccaaattaagacctgtctcagatacttctggttcacaagttatttaaacagcatctcacagcctctggggcgagcttcggggaatctgactggagaaagtgaggccacataagtttgctgagtgtgctagaagttcaggcccagttctcaaagcctgccagtcacgccagccatgttaggtcacacggctccactacggtcttttttgacgaggcccagatcctccgcatccccctaaacttcagagcctgctttcaagcccatttgagagcacagctgggatcccgcttccccgggccaagttcagcaaggagaggccggcgcgcgcacacaggaggcacgggatcagggcccggcccgccctcgcaggccgcggcccaccaccttcccaccgcgggcgccgagaaaccgggccaccgccgactcttccggcaaatcagagcggccagtgagcggagagggacgggaagcggcgtgcgaggctggcgggctcgggcgtcagcgcgccccgctgggtccctgccagtcccagccaactgcggagccccgggtgcggcctggagttcggagcccgcctcgggcctcctcgggcctgcgctccgctcagcctcgcgggccgccatgaggtgacgaagaggaggtgcagggcgccgctcccggctccttaccgcttcaccacgccggtcttgatcttgatctgtctcacgcgaggatcggccatggtccctcgagcgccgcgagaaggaggggcggagagccggggtaaccgtggagggcgacgcgcagaggctgcggctatttaggcgtggtcgccggcgcgcatgcgcaggctgcgcggcccgtcgtccccgccacgccccgcggggcgggtttactagagggcggtaccctgctcccgccagtccctttacccctcgtgcgcccctttacccgtagtgaaacgtgccctcctcctctctctcggactgcccctctttttacttcaggcgcaagttacactatcccggtctccacagcctgggcctttggggaaactaacgtctctctgggacgttgctttgcgggattatctgcttaatggacggagtgacctaaaaaatgtattaagggtattttcgatgtcgttatctggtgtcagatgaggcagagtgatgcatgtgtagtgaaacaaactgccatcatgcacgcagtcaagaaaatccttgccctttacctcaaatccctgcaagaaggtttgtagataacgtgcctttcaaaggaaatgactaacagaacttcttcagatgatcacttatagtgtatcctaaatatttaacttacaagaatgtgtgtcgcacacaaaaccttgggcttcctaatcagacaaaccggcttacaatcgaggttccaccctttaatagctagactattagctagacaacactgatacgtatgctgtttagccttgcagctgatcagtctgcaaaatggaaataataatgtccattttacagattaggtataagggttaaaacacctagctcattgtctgacgcatggtagatgctgaacaacatttgactattttatatgttcaaaaatatatttgttgcataaaatgaggcacatctacagtgagctctagcagtcccttcctaagagaatctcctgaggaatacagggcagaatcgccctttttaaaattgcttttctttttctttttcttttttttttttttgagacagattctcactctgtcgtgcagtggcttgatctcggctcactgcaacctccgcctcctgggttcaagtgattctcctgcctcagcccctagagtagctggaattataggcgcgttccactatgcctggctaatttttttttttttttttttttgtatttttagtagaaacggggtttcaccacgttggccaggctggctagaactcctgacctcaggtgaggcccacctcaccctccaaaagtgctgggattacagtcatgagccaccgagcccaccccctttttaaaatttcttggtaccatccttcaaagacacccatatgactgtctttttccttccctagcctgacttactcattctcactttcatgactggtcctggaatccccttctatcccgccagcccaaggccgttactttaaatccaggatcaaaactgagcaaagtctactatgactcaccccacctgttcaatcttccctggatgctttggagtcacccagtagtcatcattatttttagtatatttctttttcaaattattgtttggtccttcgtaagggttttgttcagcttcgtagttataaatcctggttcataaacatgtttagaggcaagattcttgtcttccataaatcttccttccccaacctcctccacctgtgttttgtgcacaatgggcacagaattcaataaatatttttattctgctggctggtatactgatgtgcaattccaagtcacacagcagcgctgtgaaatactggagggaggggtagataaaacacaacagcaaacttaccaaagcaaaatgacatgcacacacacacacaaacacacacacacacacacacaaacagcagctacaagccacaaaccaaaagatggtgcagctagggcttttgctaccgttaaggtctttcctttgattaggtagcaaaaaccatgtaactcgtcatattttccttttttgctttggtttcaagaagctcagagctcagttttgtgctaatttgcaggagtttctctcaaactaggcttcccaatacaaatacctgctatttccccccaatccccaattctgcctccctccttttgccccct

SEQ ID NO: 318617 - DNA, 4001 bp, Homo sapiens
caactgtcatgtagcacacaataaatgtcggcccaataagtgaagtatctttaaatctcctatcttcatttatttacaacataactacagaacatctcatttgccaggcggttatgacagacacaccatgaagtacattcaggttacaaatataatgcaaaaattaagccccaacttctgccatcaaagaggccacatacacacctaatttcatgagaaatgctaaaataaagatctgtacagtatgctctgcaagcaacttccaatccaagaggctacggtataaaatatttgcaacagggcaaattcatttgcaaattaaagctctattcaaatcagttgtgcaacagtgtctagactattaataaagccatttggatttttttaaagctttagaaagatactttctaaaatgcaaaagaatgttccctaataaatccatctgaaactagctaagtaacctccctttaagatcgaaatcaggaataaacttggcatcgctaatatttaaagatgctgacaattcaccttgatcactcattaatactgtatacatatggagtttaaaggatttcagattcatctctgaaataaaacaaaatttcatttctgccaaagtggagatttgtgtgtgcgaccatacagaatctgaaaggcattttcctcttctaaaaccttgaataacaatacccatttccttacacaatttcatcttaagttcaagacagtatcaacagagtcttcataatctaccctgctctttttcattttcaaacgttgacaacagcacaattcagaatgggagctgaacatctgaaatgccatttctcccatacagaaaaaaaccaaagtaccaaatacacataaagcataatacctcttttcctcaaaaaccactgaccaaaagatttctccaggtcactctcattttaccaaattttaattacaaactcatagacactgaggttccaggggaaaaaaaggtcactgcactgttcaaggaaatggcatgagtagtagacgaatagaacgccaattgggattgcaggctctgaaacctgactgcctgagttcaagccacttcctggagccacaaatccgcctatgcaatcttattctactgactcaacctccacgaggctgttatctcacctgtaagatgggcgagtaacaactgaagacccctctggtctgtggcctgcaaaatgttaatagcaactactccaaagggtggttgtgaggattaaatgagacaaacctaagtaaagggtttactggcacacggtaagtgcctaataaggggttgctactgttgttgttactcacaactacaggataataaggaataaagggatgaaaaaaggaagaaaagccacagaagttaagaaaggcaagcaatgagggggatgaaatgaaagggcaaacgtggggagcccaaagagccgcggagggcgtggagaaggcttagccagaagtggcgaggggtacagggaaagtaactgcggagtgcagagacgtcgatgaggaaaatcaggcccgcagcggagcgcggcctggggacagactcaggtcggccgagacggaggcgacacgcggctgaggcggggcccaaaggcgggagcaccgcgcccggccagagggctgcaggccgcgagaggcggcgaggccccaagaaagcactaggaagcagccagggaacgcgcaggaggccctggcccagcccgggcccggctctcattcaagccaccttccccttcccccttcttaaaccccatgcggtcccggcccgggccgcccggctccgctacccaccgtccgccccggatctccacatggcaggtctagcgtctagcctctggggctctcgtgagcagagatgtgaaggagggcagcgttccttacctgagctcccccgggttgaatcgttcactctcgcccccgtccccgccacgctccgccattacagagggccgcgttcatccacccgccgacccgacgtctcctattggctagaaaaatcgtcaatccccaacgagagaggcggagacagcagaagtctgagatgcggttggtcaaactttccatcaatcttcgaaatgggggcgatatgttctttgctattgggcaaggcgcccgccgactttgaaagcggtatgaagacagccagttgattggtgactcgggggctttatgggaaatgagattttagcagtgaggaaccgccggcgccctctcgcggtaagcagaactaagtcctcccaagttcggctcagcctgcggtagccacgtgtctgtcggcttccaggagagccaattgtggagccatattggccagtagtagctcaggcggagagcatttccactgggcaagccaatcaaaatcgacctgggccgcgcctaaaccgattgcacagttgctgtggaaagccgctatttcctagctttacagtagcaggagtcttaagtcaccactcagctctatatccatgttattaaataatatattattaattacaagaatacctcccaaattatactaaaccgttgcaagccaataggtgttataagttgctgcattaagaaaggtaaattggcgaaggcaagcctctttgcaatttacagcttaaccacgtctccctcgatctcaaaatgtgcttgtctgaaattagcacacccagaataccagacaattctgaatatttatttagtttttctaattaacaaaaaaaaaagttttggatttggggtttcaaaggcacaatgaagatgagcccttttattaaagtcgtaaaaatattaaaataatactaatagataaattttacttggacctaaccatgtagcaaacccggatctaagtatgtcaggtacgttaactcttttaagattcaaaaattgctaggaggtgggtaacatagtcactgtttgtagatgagcttgaggcacagagaagttaagtaacttgcccaaggtcacacatctactaaatagcagagcctggtcttaaccccagtcagcgtagtagcaaagcagcactcttaaatactgtaagcctaaataattggatccacataaaaacatgtgcacaaatgttcacagcagcaatattcataatagccaaaaagtattgtaacaacccaatgaccatcagctgatgcatggttaagaagcatggtataggccgggcgcggtggcccaaacctgtaatcccagcactttgggaggcctagacgggcggatcacgaggtcaggagatcaagaccatcctggctcacacggtgaaaccctgtctctactaaaaacaaatagcccggcgtggtggcgggcgcctgtagtcccagctactcgggaggctgtggcaggagaatggcgtgaaccccggaggcagagcttgcagtgagcagagatcgcgccactgcactccagcctgggcaacagagcgagactccgtctcaaaaaaaaaagaaacatggtataactgtacaatgaaatattgttcagacataaaaagccacatacaaaaaggccgcctgttgtatgattccatttacatgaaatatgatgaaattgcattgcatttcaggcaaatacatacagacagaaagtagaacagtggtttccaggaggtagaggggaatgaggaattggaagtgactgctgatggatatggaatgtctttttggatgataaaaatgttctggaattggcgctgatggttgcacaactttgtgaatatactaaaacccattgaattctatactatttatttatttatttacttattttgagagggagtgtcactctgtcacccaggctggagtgcagtggcatgatatcagctcactgcaacctccgcctcccaggctcaagcgatcctcacacttcagcctcccaagtagctcccacaggcctccgccaccacatccagctaattttttatatttttggtaaagacggggttttgccatgttggccaggctggtcttgaactcctgagctga

SEQ ID NO: 318618 - DNA, 4001 bp, Homo sapiens
gctccagatactctcccagcacttgcccacaccatgagatgacctccgaaaggaagccttttccctgtgctgctgtggagccccgggaggctggagtagagccttgggcctaggccttttgtctaatcatggttccacggtgaccccagcccctatgcaagtggcacacctgttggaagtttggcactggtgggttatgtcaacctagtcccaaatctaagggtttatttacatcttgtagggatccaaaacgcatctttgttaagcatgggctcacacagggtgagttctctggatgtagtcactacatcagcgggggaatgctggggggcacaccccccatctcacagacttggaaggaagtgaaccacctcatataccaagccaccccagagcagaaagtcggatacagagactactcgaaaaacatactcattttacagataagggcccaaagggcaaggagctcatttctagagctagccatagaataggctttccagcctaggcttctggaaagaagcctatatgtcttctcattcccactggcttggcatgcagcagctctcagaaccaccctcttcactcctggtctgaaatagcctagcacttaactctcctccctctggtgaccccactgtagccatgcgagcctccagcctgccagccccacctgcactgggcttacattcacacccaacactcacttaccacagtcctccaaaccttccacgtaccttcaccccaacttggaccaactgaggagagtgtgaaacacgaataggaatttctttaaaagcgcagctgtactgctccaaaacactcagaataggctcttcacactttaggtcatctgtaccaatgggcatggtttgtaaagatcatgaaatcttttcaaagcactgggacttaaaaatatttaattcacgaattaattaaactggtcccttctcaacatcactgatttgtagcacctttgccaacccttcctggtatgtctgagaccaagccagtttcctaagaacccactttccacacatggtgttcagggtccttctttggcaacggtacactcacgcccgtcaggacacagccgaccgaacacagcacgtttctcctgcacaaccaggggacctgaacagatcagctttcctgcccattcctccaagcgccaaggaggctcagggtttcctgggctagttagaaagttaattgcaaagctctgagctcagatcagagcagcgaggagcaagggtggtctcggctcaaaagttctctaagaagaccccaccctggcatcacccagcaccaggacagagcctgcacctgcttatgagcaagctgggaagacaaaagccaagaggcagagggcaggggggtgccccagggcggcccctccttccttcagcaaagttctccttttggttcagatcccaccgggtgtgtatgggagaaaagaccagcacaggagtctcgtctattttgttccaggcagaagtctcttgccggtgcctcacctacctggtcaaggaggctgcaagcacagggcggcactggctgcggggtccacttaccagcgggggctgcggctgggggtgctgccctgctcccgaggggggtgggtaatgcatgagcagattgaaggcggagtagacggtctctttgtacatgccgctggtgcactccggggccttcaggcctggaaaaaccacagctgggtcagacacaccagccctggcagcggctgggactgaaggctgtctgctcttgagagaaaaagaattgccaaggggtcccctgcaagttcctgacttgggaaggaacgggctgggagtatcggcagtgccaagttttaggggaaggacctggagggcaggcctccccgaggtggcccctacttgacctcccaccccccgccctccaaccaagaaaccttggccaattctgtctcctgaaggcggcggattagtcagtcacctgggcaggaggggaggcggggatggcgggggtctgtttactcctataaaggtcagggcaccggaagtgactcgacccggcggcgcccgggaagcccgccccccactctccacccctgggttctgccgcctcctgagctgcggtgggggaggcacccggctccccgcggtccttggcgtccccgtcccaccgaggccagggcctgagcgcgacgaagggaagccgggccgggcagaaactcaccgtcctccaggggctctggaagtttgtccgggaagagtctctgcgcagcgtgttcccgcccgagagcctggagggagaaccggaggggagtgaggggcggtgggaccgcgggggtcggggccgacgccggggcagggacgctctgcgcgctggagaccccgagggccgcgcgcaactggggcggcgcggcgcggcgaccgcgggggaggagccggcgccggcgggggctcacctcggcctcgccgcgggccccggcgccggcccccgggacccccgggatccctgcgccgccggccgcgccctcggactcgttcacgagcgacgacttgagctcggccaggtcgcgctcgggaccggcggcgctgtcgcggctcttgtcgtcctgctcctcgccttcatcctggaaggccagcagctcgtccggcgcgccgaggtcgtcgccgccgcccgcgccgcccccgccggagtccagctgcggcatggtgcgctccgcccgccggggcgcggggcgctgggcgccgggagtgcggggcgcggagccggcccggggggcggcgagcccggagtccgaacctccgagctcggatcgcggcgggcggagcgcgggctgactccgcctgggcgggctgcaggcgcgggctagggcgcggggcagagcggctccgcgagctggcgggtcggaacatcaaaggcgccgccggccgagtgccgggggcggggcgggcactgggggcgggccgggccgggggcgggacacaggtccgccccgcctctcctctcccgggagaggccgggacgcgcccactcggcatagccttaaagggctcgctcttccggagcgcaccctgagagagacgtcggacaagcctgggaatgatcacccttctcccgaaacgcagagactctaacgggaactcctgaccccgcttactcacctacaaccagatattccccctgctttctgcgcccaggtttctcctccggctgtggagggcgggggtcccctaggcccttgggacttgggcgtggcttaccatcgcagccgtggtgtgaactgtatcgtgcccaggctccaatgcgccctgtgctttgaactgggggcttcctagggcttgaggctgcttgaggctgtgctcgtaccccagggaaccggcagcgttggaactccgcggcgctgttgcggctcttgccccatcctccatccctgtgccaatcagggacttccttctaggccgcctgcatacagtgcgaacataagtataccccccttcgcacatttattgagctcctgttgcgtgcagagcttatacatcacacatctgtgacgggcccctcagtcaggcgacggctccgagccgcgaacacagccaagagcaccggacctcagccgatcctccaagtcccagcccctatgactctcccaactcggttccgtgactagaacctgcagcccggagactcggaactttgggcagccacgtgggcgcgggattccgacatgggtcgctcgtccacagcaactcaaccctagaagtcgcatttagggagcccatgactctgaagttgaccctggcctgactaaccctctaaccctcgctcgatccaggctgaaacatctagatttgcggagcgcgggaaagtgcctggattccagcgcatctgtatggcacccgggtctgcgtccacgcgggcctccacggcgcgcttggcctggctcagcccctgcatctacaaaagacgccggtcctttggatcgcgatgcagtcaacagcagctcccct

SEQ ID NO: 318619 - DNA, 4001 bp, Homo sapiens
aaagcactgggacttaaaaatatttaattcacgaattaattaaactggtcccttctcaacatcactgatttgtagcacctttgccaacccttcctggtatgtctgagaccaagccagtttcctaagaacccactttccacacatggtgttcagggtccttctttggcaacggtacactcacgcccgtcaggacacagccgaccgaacacagcacgtttctcctgcacaaccaggggacctgaacagatcagctttcctgcccattcctccaagcgccaaggaggctcagggtttcctgggctagttagaaagttaattgcaaagctctgagctcagatcagagcagcgaggagcaagggtggtctcggctcaaaagttctctaagaagaccccaccctggcatcacccagcaccaggacagagcctgcacctgcttatgagcaagctgggaagacaaaagccaagaggcagagggcaggggggtgccccagggcggcccctccttccttcagcaaagttctccttttggttcagatcccaccgggtgtgtatgggagaaaagaccagcacaggagtctcgtctattttgttccaggcagaagtctcttgccggtgcctcacctacctggtcaaggaggctgcaagcacagggcggcactggctgcggggtccacttaccagcgggggctgcggctgggggtgctgccctgctcccgaggggggtgggtaatgcatgagcagattgaaggcggagtagacggtctctttgtacatgccgctggtgcactccggggccttcaggcctggaaaaaccacagctgggtcagacacaccagccctggcagcggctgggactgaaggctgtctgctcttgagagaaaaagaattgccaaggggtcccctgcaagttcctgacttgggaaggaacgggctgggagtatcggcagtgccaagttttaggggaaggacctggagggcaggcctccccgaggtggcccctacttgacctcccaccccccgccctccaaccaagaaaccttggccaattctgtctcctgaaggcggcggattagtcagtcacctgggcaggaggggaggcggggatggcgggggtctgtttactcctataaaggtcagggcaccggaagtgactcgacccggcggcgcccgggaagcccgccccccactctccacccctgggttctgccgcctcctgagctgcggtgggggaggcacccggctccccgcggtccttggcgtccccgtcccaccgaggccagggcctgagcgcgacgaagggaagccgggccgggcagaaactcaccgtcctccaggggctctggaagtttgtccgggaagagtctctgcgcagcgtgttcccgcccgagagcctggagggagaaccggaggggagtgaggggcggtgggaccgcgggggtcggggccgacgccggggcagggacgctctgcgcgctggagaccccgagggccgcgcgcaactggggcggcgcggcgcggcgaccgcgggggaggagccggcgccggcgggggctcacctcggcctcgccgcgggccccggcgccggcccccgggacccccgggatccctgcgccgccggccgcgccctcggactcgttcacgagcgacgacttgagctcggccaggtcgcgctcgggaccggcggcgctgtcgcggctcttgtcgtcctgctcctcgccttcatcctggaaggccagcagctcgtccggcgcgccgaggtcgtcgccgccgcccgcgccgcccccgccggagtccagctgcggcatggtgcgctccgcccgccggggcgcggggcgctgggcgccgggagtgcggggcgcggagccggcccggggggcggcgagcccggagtccgaacctccgagctcggatcgcggcgggcggagcgcgggctgactccgcctgggcgggctgcaggcgcgggctagggcgcggggcagagcggctccgcgagctggcgggtcggaacatcaaaggcgccgccggccgagtgccgggggcggggcgggcactgggggcgggccgggccgggggcgggacacaggtccgccccgcctctcctctcccgggagaggccgggacgcgcccactcggcatagccttaaagggctcgctcttccggagcgcaccctgagagagacgtcggacaagcctgggaatgatcacccttctcccgaaacgcagagactctaacgggaactcctgaccccgcttactcacctacaaccagatattccccctgctttctgcgcccaggtttctcctccggctgtggagggcgggggtcccctaggcccttgggacttgggcgtggcttaccatcgcagccgtggtgtgaactgtatcgtgcccaggctccaatgcgccctgtgctttgaactgggggcttcctagggcttgaggctgcttgaggctgtgctcgtaccccagggaaccggcagcgttggaactccgcggcgctgttgcggctcttgccccatcctccatccctgtgccaatcagggacttccttctaggccgcctgcatacagtgcgaacataagtataccccccttcgcacatttattgagctcctgttgcgtgcagagcttatacatcacacatctgtgacgggcccctcagtcaggcgacggctccgagccgcgaacacagccaagagcaccggacctcagccgatcctccaagtcccagcccctatgactctcccaactcggttccgtgactagaacctgcagcccggagactcggaactttgggcagccacgtgggcgcgggattccgacatgggtcgctcgtccacagcaactcaaccctagaagtcgcatttagggagcccatgactctgaagttgaccctggcctgactaaccctctaaccctcgctcgatccaggctgaaacatctagatttgcggagcgcgggaaagtgcctggattccagcgcatctgtatggcacccgggtctgcgtccacgcgggcctccacggcgcgcttggcctggctcagcccctgcatctacaaaagacgccggtcctttggatcgcgatgcagtcaacagcagctcccctagcaggtttctgtgctgggttcactgtagacgctcacgcctcttctgagagcagttgggatagagggtatttgggggagggccgggtattggacgcctctccctctgagggccccacaggacccctggcagcggtgcaaagccgggccggaagacagccgtgcctccctccgggtccaggcccagcgtggctggctgtggatcaaagagctaggccatgcttccctgtgttcagatcctatctgtgcccgcccagccgggtgtctcggacaccagcccccacacccccctcccccgccacctccgggctagggtgcccacttttcctcctttccccaggctggggctggggggtggcatgggcacgagtgctcagcttggtgatggagatgagggggaccctgcccattaggtctccccagcctcttcccagggtgggcttgccgcttagtctcgcctcatctgctccggattggcggggaagggggggctcggccctgcccggaggggagaggtacagggacgggagttcagagcctccgccacctcaactcctgaggttataggtagggtctggcatagggtgagcctcctctgggacagctgaaagggaatccggatctgcccaacccaatggctttaggggtcctcatgtgtttgtagggaaccctggttcagcaggaacgtcctccagaatagctgtccccagacccatgagttccaccgacacagatcagtggaggctgaagtgttctccagtccttggagaaaggagaaaagtcacaacaacagtgaggttctttttgttttgttttgttttctcaataaggttaaaactttccagcttcgtattagcctttaatcaaggattatgcccttactgctttattggtgtga

SEQ ID NO: 318620 - DNA, 4001 bp, Homo sapiens
agagaaactgggaaaagcatacataacgtcttagggcccatcaccctttagtccctccaggaggttctgagagcaagcattaggagcagagcctacaccacagggcaaagggatctgactacttaggatactgtctcaccagttcaaaactctccattggtttaccactgctcttccaaggaagatcaaactgcccaccagaccactccagccagcccctgcctccatctccccaggggcatctggcccttgtacttcacacttcagccactatggacgttttttttttttttgagatggagtctcgccttgtcacccaggatggagtgcagtggctcagtctcagctcagtgcaacctctgcctcctgggttcaagtgattctcctgactcagcctcccgagtaactgggactacaggtgcatgccaccatgcatggctaatttttgcatttttagtagagacagggtttcaccatgtcggtcaggctggttttgaactcctggcctcaagtgatccgcctgcctcggcctcccaaagtgctgggattacaggcgtgagctaccgtacctggcctgctatggacttaaaaaaaatttttttttgagacagtgtcttgctctgttgcccaggctggagtgcagtggcatgatcatggctcatactgtatcctcaaattcctgggctcaagagagtggactttctccaggccagtgtgtacacaagttccctcccaccacaaggcatttacacctcagctattcctgaccagggcaatctgccatccatctctcttttttttttgaggcagagtctcgctttatcgcccaggctggagtgcagtggcacgatcttgactcattgcaacctctgcctcccgggttcaagcaattcttgtgcctcagccacatgagtagccaggattacaggcgtgcgccaacatgcccagctaatttttgtatttttagtagaaacggtgtttcaccatgttggccaggctggtctcgaacttctgacctcaggtgatccgctagtctcggcctccctaagtgctgggattacaggcgtgagctaccgtgcccggcccatccctctcattcttaacacttattgcggtgctaagcatatagtcacttttgtgattctttgatttgtctaccttactagagtgtaagctccaggagggctgagagatggtgctcaccattcgaacaccaggaagcaccctgagtaccggattaacagttgaattaatcaagtaagaaatgactgtaccacgagttcgagtaccaaagctgaccgtctcagtacagacaatcgctaaaggcctgagttccagctcaactaagaggctgtagggtcccttttccaggcgctcccccgaggggctggtcgcaatccacccccgagactcgcagcaacctccttgccccagggggggccgcgcagagcctagccacgtggcgggagacttaggaaacttaaaatacccgctaccaggaagggcgtggaggtaagggaagcgggaattacaaagttcggcccctgcgagcacactttctggcccaacccactgcccggatgaggaaagtgaggcccaggggaactgaagtcgcagtgggaaggcagagattgcggctcctccggtacccctggccgcgccgtcgagcactgcgggacccggctccgggcgcctgccgggtcgcctggggacggggcgcgggccgcgggccgctgatctccacatcttgcacgcggccctcgcacacggcccacgaacgcttacctggccgctctgctccttcacttcccgcgccgcacgcacatagccagcccgcagcagatggtggtagatcaggggaagtagctcccgccgcttcctggcctcggccatacccgcgacccccggccggccggctacctgcacgccccgccttagtccccgcccgccacttccctcgcgcccttagacctcgcgcgccacacttccggctcctctttcgctccggccgcgcggcgcgccgggaaacgtagtcccctctccgggagtggccggccccgcccctcaaggcgaagggggcggagactcgtgatcaacaataccgcccattggcgcggagcatgcggggctagacagggacccgcccccggggccggccgggacttggacgactctcttttaatccttccggctggcttcttgaagagatttatcttccttgttaattctctgatggctgggtctgcgttttactcatctctgaactccctaatctggatctttctctagatccgaactttgtactgccattacctgctcatttatccatttcgcacggtttttggtgcccatgaaccagacacgaattgccagtttattcattgattcattcgctaactgaacaaatctgtaataagcacctaacttgggctagcacccggctaggctagggggattcaaaagatgcataatacatggcagttgccctcaaagctcacagagacgactgtccgtaaccaagcaactatagttcaatatcttgtgtgccttgtcagggacagatgcagcctatgggcgccccaaggaggagcaccgaaccccagagagatatctaagctgaggcataaagacacccgaaattgctgggtgcaaaggagaggactggcagagggcactgcatgagtctaggcatgagaaaacaccctgctattgcctgggaaccctaaacccagaacccctagtctgcgctgctgggctgtccaggtggggtggggtgaggtggggaagagggaacaaatgagggcacatgaggatgaagaagtagacaaggcctacaactcccccacccccaacagagtttggactttgctctgagggcattagatagtctctgactggcttttccgaggaggttgaccctgttttgtgtttttaaaagattgctaaaaccaaagcacataccattaatactaaatgtgaggctgttgtagttgttgagggaaggatggcagggaaaaggtgaggtaggctggagaatgttagagtgagctgttcttaacttcaccgacccattgagaatctgagggcagcatgtttcttacgggcgcaggagtccctaaccctaggaggtccaggtatgtggttatctttgtcttgaacttgaatggaaaatgttatgtgtctgtacacattcaacatttcccattttcttgagcaaatatttattgagtacctaccattggggatggaatagtctctactcctatagagcttacagtctagtgatggaattgtctctactccaatagagcttacagtctaacggaggagacacatactaaactaatagtcatacaatacagtgttacaaacagcgggtaagtgcaggaaggaaaaggatagtgttttcttatgtaataatatagtgtttaaaagctgcactggagtcacactgcctgggttcaaattctggctttgcctcattaactaggtgactttgggcaagtcactgtgactcagtttctttatctgtacaatggagataattataatttctacctcactgggttgtcataaggagtaaatgaattctcagcagaaatgcttagaggagctctgaacaatagcgctctctgtgtgcgtgtgtgctattattgtgaaagcatataacaggaaggagggatctatttttttcttgggagttagggaaggattccctgagaaattaatggttatgaggaaaccagaactgtgtgtaagggagagtcagagagaagaaacctgagcagagggaagaacctgtgcaaagggcctagggcagaaggtacagctgagagaatagacacaaaaaggcctttgtagcatagtccggagggagagcagggggactggggagtgtagaaggtgggcagagggcagactccatgtgaaggattggccacatcagggttttttttcctccatcctaagagccattggaagccactgacggtgtaagccca

SEQ ID NO: 318621 - DNA, 4001 bp, Homo sapiens
tattttatgtaaatattaataaaggaaaaggtgacaggcctatctacaattcaacaatcatctggaatctacatgtcagtgcacaatgatccagaagccaggatgcacttttaataaaacttaggaagaaaagtgaacatttcagcacagaattatgagacacaaaaacgtatgcaggaacaacgtaaatgagacaaaaactacagcagaaaatgaaaggctttgaaccacgttgaacgtgcatcacctttcaaaatatctgagtctcgtgttagtgcagctctgggaaacaacagagaggtgtcccaattttattatattggaaatgtaagctctctctcagttaattaagccatgattcttcatattttttttccaattgccactacctgaaatttggggaatggtgaggacttaacaaagcaaaaacacttgttgaagttacagatcaaaggcatttgatccagagcaattttcaagcagcctctgcccccattttctcatggaggaggatcagcatgtgtttcatttacatgaagataactcagaaaataagaaggaagattaaataaaaattgtatcctgcaagagttataatggcaatggaaacacaattctaacagtttctctgttgatttattttttcaatcctatgttaaatataaaagctgaagctagggtaaaccaggagtgtataaaaagatgttatctacaacaacctctggattgtagatttataaaccgtgggcatagtgctaattaataacatatatacacacatgcacattttgtaataaaaagtagtaaaaagtagtttaaggaagctgagaaaccaggactagaattccaagctaagttatttcattagaaattaaacccattgcaacatttactcccaaggacatggaacaagaaataaagaatcagtgttataaaacaaatgaggcaataacctagcagagcagggcttagccctttggcactggcagagtgacccttcccgaggcattcggtacagttttgtgcgtttgcctgtaattttgctgagccatcaatgtaaagtgcacacacagcgaggctgggactagtaagacatggagctagagagtgagctttgtcacaccacctctcagcactgctttgctttattctacgtgttgatgcatttacagcaaccctggagaagtgataacagaactctttataaatattggacatgaagagagtgccaactgttagtgcttgggagaaaaatattctcctcccaaaagaaatcaaaacagtataaggaaaggaaaattaagacttggggaaagtaggagggataattacatcagtggaattggaaaataacatacatgtggccacccatgctctgaaacacaaaaagagaaacgtataactcagaattaacatcatattttagtagagggaaaagggcgtattattatacactatttcaaagatgttttaaccaagatacaccatttgttcaaggagaatctaagtgagaaacccaatgggaaaaggaatagaaatttgaggcttgtaagtggactatgaggagaatagttttgagaaaccacagataatcttaggtttctcaggatagagattcaccatgttgttaggaatgtcctttatggaaccaagggtctgctgtagggtacatctgtcaaaaaccaccatgctggatctccaaaagcagccatcaaccatgtaaatcaagtaagttagacagttgagagcaaatcagcaggggaaaccctacaaaccttgtctaggaaactcatctgactcccggtggatgaggtctgtgactcggtttccatagtgcatcctgctgtcatggtcataggccttcagagtctcactggagctgtaggatttctgtgtgggcacgcggcagtcctcactgtccagagaggagcttgtgtagcgacactctttgccacagcgtcctctggtcaaagagcggtgtcgccggtcctttacatccattattccagatatggcagaatgctgatgttttcagaaaagtcaggcctgagttttggcacttgtcactttgccacctgaaaacatagaagaaaaaacccaagactgtgattacaagaaatgctgccttcagttctgattcatgctctgactcagacgaaaacatgaacatgcagccttggtcagccctgcacaatctcttttgcaaaagtttaatgttaactaaacaatcagcctaaatagaagaactcgatacagtaaattaattttcttgctgtttaatttaatagatttggaaaaaaatagtaacaacaaatactcatctttagattttttgtatgcacagatgacatgatcagtctgtcactctaatgcaagatcttactgtgaagcaattcaaagccaaattgatcttatccttctttaattacattctctctatgctatagaaggcttgggtagaaaacaaataccaccccccctccaaaagaaaaaataaacaaaaggcaaagaaaggtgcagcagcagatttgagcataaggcataaatatgtgctattaatactttgtagtgataccaagtcacattcaactaacataacatttcctagctttgtctggagaataagaataaaagttgttctcgacatgcaaacaatctttctccaatttcttcaacgagcttttggcaaactcccagttttttctcccttgcagatctgtgtcttggacacacctggttacttcttctgcctagtcacccaccaacatgataactgctgacaggcagtcttactggtacagccacctgataatcaccccaagccattctgtcaccttcattgctgggatacccactatagaaccgaaaaaaaaaatgaggaaagctgaagggaaggaacctctctaacatatgaactggcaaccagggagccccacagtctggcatttgacaccctcagactggaagtgtatgccaaacatcactcagaaaacactcgccttctgcttagcaaatatgaccaaaatgcttaggcgcctccaagttccaaatcataggctcttattgatttcatttgccatgcaaaatagcatagaccacagggccaggacctggacagaatggacaaatacgaattttaattaaaatggaaaatgcaacccagagccagggcaatgatttttctccaggctactgttgctcactgcctcctcaatatgtcaggaaatacttggggagcagatctatagttttgaacccctctgctcttccttggctattttaccacactataataagatagctatgcacagcaatgtggatgacatttgcctgcagacaccagaagccaagtagcccctcccttgttttttcacaccaggagttcttctagatctcagggaccccctcccccaatctatactacgtgtacactgtatcaaatattgcctgtaattgtggacaattttgtttgacacttggcaatgaaaaagagggtacgattggctgggcgcggtggctcatgtctgtaactttgggaggccgaggcgggtggattgaggttaggagttcaagaccaggttggccaacatagtgaaaccccgtctctactgaaaatacaaaaaaaaaattcgctgggcctggtggcgggcacctataatcacagctacttgggaggctgaggcaggagaattgctggaacccaggaggcagaggttgcagtgagctgagatctgccattgcactccagcctggacaacaagtgtgaaactccatctcaaaaaaaaaagaaaaagagggtacaaatattatgatcttcaagcacagtcttggtgctgcctcagttgctcataagaaagcacaagcagtagctagcttgctggactctggagtctctcactcagcaagttcagaagtgcctttgagagtcatgaccccaggacctgcttagaggacattaagtagtgtttttgcatgtcagtttttgctgtggcatagtcagt

SEQ ID NO: 318622 - DNA, 4001 bp, Homo sapiens
tcctctgttcactgctctggcctcggcgcctggaaaccgcgtgtccatcaaaacgtgaaggtgaacctcgtaagtttatgcaaactggacaggagggagagcagaggcagagatcaccgtgtccactcgacgtcctgagcgaaaagccacgtgtgcccacgtgacgatggagacaggaggaccagggctctgcctgcccccttttctgagcccctactgcattcagctctggggcctgggccctcgacggccaccacctcctcacctgggctcctgcgcagccaagcgcagtcccgcacgctcatcttccacgtcagctcctgcagcgagagcttggcatgcttccccagggagatgaacttcttggtgttcctgaggaagcggcgttcgttgtgcctggagccccagaggcctgggggcaccagccggcgcaggcaggcccgcacgaagccgtacacctgccaggggctgctgtgctggcggagcagctgcaccaggcgacgggggtctgtgtcctcctcctcgggggccgccacagagccctggggcttctcccgggcacagacaccggctgctggggtgaccgcagctcgcagcgggcagtgcgtcttgaggagcaccccgtaggggcactgcgcgtggttcccaagcagctccagaaacaggggccgcatttgccagtagcgctggggcaggcggggcaacctgcggggagtccctggcatccagggcctggaacccagaaagatggtctccacgagcctccgagcgccagtcaggctgggcctcagagagctgagtaggaaggagggccgcagctgctccttgtcgcctgaggagtagaggaagtgcttggtctcggcgtacaccgggggacaaggcgtgtcccagggacgtggtggccgcgatgtggatggggggcccgcgtggtgctggcggcccacggatgggtgggagtggcgcgtgccagagagcgcaccctccaaagaggtggcttcttcggcgggtctggcaggtgacaccacacagaaaccacggtcactcggtccacgcgtcctgcccgggtgggcccaggacccctgcccaacgggcgtccgctccggctcaggggcagcgccacgcctgggcctcttgggcaacggcagacttcggctggcactgcccccgcgcctcctcgcacccggggctggcaggcccagggggaccccggcctccctgacgctatggttccaggcccgttcgcatcccagacgccttcggggtccactagcgtgtggcgggggccgggcctgagtggcagcgccgagctggtacagcggcggcccgcacacctggtaggcgcagctgggagccaccagcacaaagagcgcgcagcgtgccagcaggtgaaccagcacgtcgtcgcccacgcggcgcagcagcagcccccacgccccgctcccccgcagtgcgtcggtcaccgtgttgggcaggtagctgcgcacgctggtggtgaaggcctcgggggggcccccgcgggccccgtccagcagcgcgaagccgaaggccagcacgttcttcgcgccgcgctcgcacagcctctgcagcactcgggccaccagctccttcaggcaggacacctgcgggggaagcgccctgagtcgcctgcgctgctctccgcatgtcgctggttccccccggccgccctcaaccccagccggacgccgaccccggggaggcccacctggcggaaggagggggcggcggggggcggccgtgcgtcccagggcacgcacaccaggcactgggccaccagcgcgcggaaagccgccgggtccccgcgctgcaccagccgccagccctggggccccaggcgccgcacgaacgtggccagcggcagcacctcgcggtagtggctgcgcagcagggagcgcacggctcggcagcggggagcgcgcggcatcgcgggggtggccggggccagggcttcccacgtgcgcagcaggacgcagcgctgcctgaaactcgcgccgcgaggagagggcggggccgcggaaaggaaggggaggggctgggagggcccggagggggctgggccggggacccgggaggggtcgggacggggcggggtccgcgcggaggaggcggagctggaaggtgaaggggcaggacgggtgcccgggtccccagtccctccgccacgtgggaagcgcggtcctgggcgtctgtgcccgcgaatccactgggagcccggcctggccccgacagcgcagctgctccgggcggacccgggggtctgggccgcgcttccccgcccgcgcgccgctcgcgctcccagggtgcagggacgccagcgagggccccagcggagagaggtcgaatcggcctaggctgtggggtaacccgagggaggggccatgatgtggaggccctgggaacaggtgcgtgcggcgaccctttggccgctggcctgatccggagacccagggctgcctccaggtccggacgcggggcgtcgggctccgggcaccacgaatgccggacgtgaaggggaggacggaggcgcgtagacgcggctggggacgaacccgaggacgcattgctccctggacgggcacgcgggacctcccggagtgcctccctgcaacacttccccgcgacttgggctccttgacacaggcccgtcatttctctttgcaggttctcaggcggcgaggggtccccaccatgagcaaaccaccccaaatctgttaatcacccaccggggcggtcccgtcgagaaagggtgggaaatggagccaggcgctcctgctggccgcgcaccgggcgcctcacaccagccacaacggccttgaccctgggccccggcactctgtctggcagatgaggccaacatctggtcacatcccgcccgcacagggtggagggcaacctcggggtccaggcacctggctccaagcctcggactgcagagctaggaggcccgacttccagcccagcagtagaagccacacggccactggtcccctccagacctggggccccggcacaaccgcaggacagctgaggacttcccaggaatccagactccgggttgctcaagtttggatctaaggggcgagaaacttctgggtctcccgaggccttgcagggatgctgtagctgaggtcggcaaacactgaaatgctaacaaacgcaaccttaaatgtaacctttcctactttcagaaactgccggaggaaattgctttatttatggagctagcatttgaacaggcctcgcaccctccctgggctgtcacgctcgctggaggttagcctcgtcttgtaaatacttaggattacaggtcgctcttctagaaatccccttagtgatccctaagcctttttaaagggctgtgtttgtgaattgtctctgccactagggcaaaggggcggtttggaaaatttgttccaacaaaagttaagttgtagcttacactggttctctgcagagaagccaacatagaaaacacaattttaaaagagggaagagaagaaatggaagcagaagattatgctggagtaattaacaccatgtgcatggcgaggaaacgcctcccggcattcaatgaagatcgctgatacccagaagacaccccagtattatgggtgcagttagtgtgtctttgaaaagctgatgatgtcttagtcatcacagtgtaaaacatcaagagtgttctaacaacaataaaaaaattctatcattggcttaaaacaccacaacacttgagtggggtgagcttcctacctcagacccagatgtttctaaacagagtaaattctgagctgggcatggtggctcacacctgtaatcccagcactttaggaggcagaggcaggtggatcatctgaggtcagaagttcgagaccagcctggccaacatggtgaaccccacccccacccccgtctctactaaaaatacaaaaaattagctgggcatggtggcgggtgcctgtaatcccagccaaatgggaggcgga

SEQ ID NO: 318623 - DNA, 4001 bp, Homo sapiens
catcattgcactcctgtctgggtgacagagtgagatcctgtctctaaataaataaataaagtaggcccggtgtggtggctaactcctgtaatcctagaattttggaaggccgaggcagtaggattgcttgagctcaggagttcaagaccaaactggaagacatagtgagaccccatctctactaaaaatcaaaaagctagcaaggtgtggtgatgtgcacctgtaatcccagctacttgggagactgaggcaggaggatcaattgagctcagcagatgaggctgcagtgagctgtgatcacgccactgcactccagcctggatgacagagcgagaccctgtctccaaaaagaaaaaaaggaataaataaataaaactgctgactgaacaggagcattgaatgggtaaatcatgtgtaaactagccaaaatattcccatgcctctctatctgaatatgcagtataatctaaaaaatatatgctttgtagtgtacctttaatattaatggcatcttctgatgatgagtttaacaactgcaagatagcatgatgtagagtttctgaaattcttcggtatataattaggttatttaaacagatattactatttaacatttgtttgcaagtttgtgacagtacatcaaaatagtttttgtatagttacacacgtctatcacagacatactaaattatatatatatatatatatatatatgtaaaatttatttatttatttagagacagagtctagctctgttgcccaggctagattgcagtggcgcaatcttggcttactgcaacctctgcctctcgggttcaagagattctcatgcctcagcctcccgagtagctgggattacaactgcccgccaccatgcccagctaattttcatatttttagtagagatggggttccgccagttggctaggctggtctcgaactcctgacctcaagtgatccacccgcctcggtctcccaaagtgctaggattattggcacaagtcaccgcatccggcttaatgtttttgtttttgttttttttccttatgtgtgcttatggggaaataccttcagattcacattcctgaatatcatgttttctttccaaggcatgacataacgtcttgggatcatcccttgctttaatgaaaatcgtggcaaatgaatctcttcatacctgatgattaggaaagcaagaagacatcttgtgagccaaatacaatcattttagcatcattccaggcactggaggcagttgtgcattcatgtttggtcccctgctgttgcaggacagacggctgtgccattgaaactcagctaaaagataaccatttaagtacccatgtatcagcaagatcaagtcagggccaggtatctgtaattctaactgcatgctgtcctttacaatttgcccacaatgtccattttaatctgacttttttttttttttttttttttttttttaatgagatggagtgcattatcatgcccagctggggttttgccatgttggtcaggctggtctcgaattcctgacctcaagtgaaccacccaccttggcctctcaaactgttgacattacagccgtgagccactgcaccctgcccattttaacttgactttaagggaaaaggcaaggcacctagatttgcctcaggcctaccgactgcctaaaggaaatgtctggccagccacaaaaaacagaaactatattggcttctgaatttatgtatgctctacactcaggtcagatttgctttccctgcacacatatttccctctggaacataaagctttctgtatagatgccaaaggggaacacaaagttattgaccgtatctttgtggctcccaggttgcaaaacaagcaaacaaaaaaccccagaatcccataaatccttacttattagcagatttatagagactctcatcagagcagttgttagtgagtttaggcaaagtaggacaagtatctttccctgaagccattcctgacagcaatggatggaatactcatctaaaacttcactaactcactagtctaattatgatgacaacgctgctctgatgtaacaatgttttgctaacttcatagtaactctcggcagttacagtagcagttaagagtgtccagctcacaggtgtggtggtgggtgcctgtaatcccagctactcaggaggccaaggcaggagaatcacttgaacccaggaggcaaaggttgcagtgagccgagactgcgccactgcactccaacctgggtgacagagtgagactctaaatcaaaaaaaaaaagtgtccagctcagagctattttcagggctttaaaaaaaatcccccttctggcctggcacagtggctcatgcctgtaatcctagcactttgggaggatgtggcaggaggatcacttgagcccaggaatttgagaccagcctgggcaacatagtaaattccggtctctacaaaaaataaaaaaatttggccaagtgtagtggctcatgcctgtaatcccagcgctttgggagtccgaggcaggtggatcacttgaggtcaggagttcaagaccagcctggccaacatggtaaaacaccttctctactaaaaacacaaaaattagccaggcatggtggtgtgcgcctgtaatcccagctacttgggaggctgaggcaggagaattgcttgaatccgggggcagaggttgcggcaaacagagatgatgccactccactccagcctgggtgacagagcaagattccatctcaataaataaataaataaataaataaataaataaataaataagcaagctgggcgtggtcacatgtacttgtggtcccagctatttgaaaggctgaggcaggaggatcacttgaacccaggagatcgaagctgcagtgagctgtgattgcaccacggctctccagtcagggcaacaaagcaataccttgtctccaaaaaacaagacaaaacaaaacaaaataaaacaaattcctttttgagtagaacatcattcttataatgagcaattaaaaatgaagatgtttgtgacacaaatttgacacatactagaaaatacgttgaactgaacaattattcagtaattaaaaaataatcacttcaaattaacattctgtattggtccgtggctgattttcctctttatatattgcgtatgccacctacagtcaaccgattttcaacaaaggtgccaagaacacacacgagggaaaagacagtctcttcaataaacagtgctggggaaattgaacatccccatgaagaagaatgagactagacccctacctctcaccatacacaaaaatcaactcagaatggattaggattaaatgtaacttgaaactacaaaactactagaaaacatacagaaatactctacaacattgggctgggcaaggttttttttttttttgagacggaggttctcactctgtcactcaaggttgagtgcagtggcacaatcacggctcactgcagcctcaacctcaatcaatcgtgggcccaggtgatcttcccaccccagcctcccaatagctgggaccacaggtgtgcactaccatgcctgcctaattttaaaaattttctttttttttgagacagagtctcactctgtcaccaggctggagtgcagcggtgcgatctcagctcactgcatcttccgactccctggttcaagcgattctcctgcctcagcctcccgagtagctgggattacaggcatgtgccacaacgcccagctaatttttgtatttttagtagagacagcatttcaccatgtgggccaggatggttttgatctcctgacctcatgatctgaccgccttggcctcccaaagtgctggaattacaggcgtgagccaccgcgcccagcctaatttttaaattttttatagagatggggttttgccatgttgcccaggctagtcttgaactcctatgcttatgtgattcacccactcaagcctcccaaagtgctgggattacag

SEQ ID NO: 318624 - DNA, 4001 bp, Homo sapiens
aatacctttgaggatccttcactgtggctgtgcagagagatgcccttacaggtgacactgttgcagggcatgctataaggatcttctcctgacttagtggcgaagatacagaagaaatagaaccctcctaggcaaattgaggcacccaaacataacacaattcattggcaggaaaggcagagagaccaacggagaggtgggcagagataataaaaatgccaggtgcttgcattttgatgttgaggcctcatatccctctcatctttctgacatcccccctcactctattctgcacactgcccaagtcaaagctgattctcccacttccagaaagaccccaggatatccccagtattctcctctttccaggagggtgttgaggttgcagccaggcctggtttgatttcactctgcagggtggccagatgtgctcccagcaggccctctccgccagagccccaaactcctgaaaggcctagaccataaagccacaagtagaggaaacaagagcaactatgccctacaaggggcagcctgtacccgtacccagagcactcctagtgcaaggagccaagactttcagggcctgtgaagtcaactctatcacccccaacaatgagttttgatttgagcacagatctgcccagtctcttggaggtttgggcattgcttgtgggtgtgaacgccagaccccgatggtatttaggcttcctctgaggagtcactacaagattctactcatatatagttttacctagttatgaaaaagaagttggtgcaaccaggtaggctggaagctgcagcaaagcctgggtatttgtgacgcaggtatggcctggtttttgaggtagaaatgttgcctgcctctgcctgggtcagtattagggccactatcagaccagaccttctgcttgagtttgtctcctaaagccaacacatcttcagggtctcaaaggaattcctgcaatgatagtgtcctacatttacaaacccagctattactttaagacagactccaatcctggctccagtgcacacttcaggactgtgggaaagtggaaccactcaggactcagtttccccatttgaacagtgtgtgtgagggcccagtgcattctcctgctcttcatcgggcaggacaagaagtgccacattgcccttgctgtacccagagagcagtgtcgggtgccagcagtgtctgagtgcagggcctggccaggagcacaggagcctggggcaccttagatgctgccaccgtgtgtggcccaggttcttgtctggagtcgctggccgggggcctggctgggttggaataggtgtactgctgggtgggctttgcccttggcaccctcccacggtgattatggccaaagagttgccatttccccctttctgcagtggctgggaggagaagctgaaagcgctgtccgtctcaggctcttggcctgcgtcgaaagtctctggtccacttccccactcccttctacaaagcggcggcctcccgctttccctccatggtcctccacctccctccctctctccttccaccgcgtgcagggctggtgtccgagcgctccatgctgcaaggtttttagttcgggctttgtcccctgcgcccccagcccagttcaatgcccccagcggcttgcgctccgagccccgactacctgaccttccgcagcccctggccaggcggctcggcttacccgtgctggcggccccggagcctgctgtgctgcagcaccagctggtagggcgacttggcgggacccgccagggtcgcggcggggcccagggccagagccagggcgagagccagcagccgcacgaagagcgccatggagcgggacgacgcgcaccgagcgagctagcgaccgacgggcaagcgggcggctccagggaagtgagagcgcctccgccgcccgggccaggttaagtaagctgcgagcgggagggagcggacgccaggggcggggaagctgggccggcccgtgcaaggagggcgggccgcctggcgcctcccaacccgtgcgcccctggctgccctgggcacccacccgctcccgcactgtgcccgtgctcagttttcccagcccttgccctcactgccagccctccctccctctctccctcgccacagtcttcctcaaaccaagggtataggtcccttaggcctcctgtggctgcttccaaatggggaccttgggactgagggacagctgtctcgggggcttcggtcctgcatgctgggggcccgaagattccctcactgatcttgaggctacaaaacactgcagggaggggtgaggggaggcagtgctgattcccagaacaccatggcccatcagacttgtttctgcaccccaggagctgaccaccctccccagctcctcaatctctaatccctccacccccaccccacctgtcatgctcattgaaagacagatgagtaaatcgtgtgatccacagaaacgccaaaaatgtggggcaggttttgttgggctctaagctgcttttggagcccgtggggaagggtggggtcctcaccttggtactaattcattcccttcttcagtaaacatctctgcaacagtacctgccagatagattctgcaaaggcaagagtcctgccctggaggagctcaaggcaggtaaacaaattgtcacatggtaaagaggtgatacttacccaagcatctattaatcacctgtcagttacttggcactgctagccctggggagacacagatggattaatagaatgagtgagacctaagccctttgtgaaaaagctccaatttgggaagatccgtagcccaagccaatgatgttccatgaagagtagctggggctttgggagctaagaagaggcacctggccctgacagggtgatacctgctctgaggcctgaaagatgaaaatgagttaatcaggtaaactgaggcatgcattcacgaaactcaagttatctggttggctgaagcacagggaggtggagtcaagggtagggaagaaggggaggaaggtagcagggcccagactccagctaagagcctagcgggtgatgggtggaggcaagtgacatggccagtgtcatgagaggcttaaggaggcaagaagaacaggtaaccaggaagggaccatgggagagcttgaactatggtggtagaggcagagatggggaaggctgggcaaatgtgaggggtgtaggaggtaatagtctcaatagaatttggagtctgtatacagggagaaggggagaaaggagagtcaaggatattgtagggtgtttgtggtctggacattgcagcaggtgatggtgccatgttcagaatgaggcacatgcagagtgcaggcttgccaggtagatgagtggtttgggacaccctgagtctgaggtgcttatgactcatcctggtgaagcatcccatgaggataaagctggatatgaggatcgggggcttgagtgagggacgcgggatgaagattcacacctgggagtcatcctccagtgacagaagagcccaggaagtagagaatgtggggttgtagtcaaggaggggtatcctagtaggagggcgctgctcaaagtgaggaatgctgccaacaagacagatctgaatggctttcactgtgtcagaagcagagaggccactggggacttggctgtggagagcagatggccaaagcccgaatatggtggtttgatggagagatgagtagcatgtagaagcttgtctgagaagggaaggggcgagttaggatggcagccagggaaagaaaaagacaagcggggcttggagaggttagaactctggtagaaagaaggtgggaaggagaagggagagagtgtgggcactggaggagggcctactgagagcataaagcaactgagggcctgcatggggagtgatcaagctagtggagaggagggaacaggtgtatgggagattttagtggtagcattgattagacttggaaaccccttgggcatgcagggt

SEQ ID NO: 318625 - DNA, 4001 bp, Homo sapiens
agcctgataattgcagactagataatgcaataaaagaatctatcagaaacttaacttaatcagatcatctacagcaactaaattacccagataatttaggttgtataggccgagttcaaatctccataaaatggtcaggtatgtctgagacatacctaaggcacaccataaagctgtatgttcaaaagtcaagaacgtatataacacaaaaaaattatacctataaatttgaacttgccaaatatcatcacaataagacttttgaagtgtttaaaagcttccttttttaccttcctagaagtatggggcacggactacagcatttcaaatacttcaacacaaactaaaagttagcagtactctaacccctgaaaccacagttctggttgtctggtctggaatgaaaatgagttatttggcgaaatgcagtttaaatgggtgattccagcagcgagaggcagggaagttgagaacgccctcataggcagtctttgctctggctacaagaggaaaaacaacttttacttcaagttgtgcgtctcttccagttttacttccacagtcagtaataaatcaacccaggcaccaagttcaaacagatgaagctcacgcctgaccagttagggccagttatagccctaagatctttctttgcttaaatcatgtcttccttttggtctttacaaaaaattctgtttaactgctttctacccaatggctatttcaccccatttcaccaaggggtttgaggattgtccaagtatcttttcacattatttgttgaatttttaccgtttcatagaaaaagatcaatttctttcttttttctttttaaattatagattcagagggtacatgtgcaagtttgttacatgggtgcattgcataaggtgggatttgagcttctagtgaacacatcacccagtgaacgtagtacccaattggtagttttcccaaccttcccccctacttttggagtccccagtgtctactgtttccatctttatgtccatatctatccactgcttagctcccgcttgtgagaacatggtatttgcttttctgttcctgccttaatccacttaggaaaatggcctccagctgcatccatcttgctgcaaagaactgatttcattgaaaaagaccagtttctcagcccttcctatttacctcagaaattaagacatcaagccaatccttgaaataaactttctttttgtcgttcaagcaaagtcagagcagaaaatgcaggtggcagggcaagtagagtaattctgcgtctttctcagggatgtcaagagcagactctgggcatacatcgctccgcctgaggaaggatttagggagcaaggctgcctggagggaaccggcacagggtgcaggacccggaattcaccctacaccagagcctaacatgttaagaggtctaggaccgtgtagcaagttttgaaggcaaccccaccccacatctttgcatagtctgaaacaattttgcatcccccaactatttaggcaattgttctcatcattggataatcgaatttcggaaaattctagactaatcactacctccaatcacaatatgctttgattgggcccgggagggacagagaggggctgagcaaggccacaggagcacagggccgagcaagtccctccactcactcagcagatggggcacccggtgcccggcgctcccaggcccgacccgaacccacttaccctggggggtggcctgggcgcctgccgctagccaccgctgcaggaccaggtgcagcaggaggacggcggctccgcgcggggccagcatgttggctcttcctgctccccgcgaggccgggggcgacggcggcgttggccccgcctgggggtccccgggccgtgcgttgaacctcggtcggcgcccgggccggcgccgcaggtgacccgtgctcggcgtccgggctgccgtcgggggcgcgctcgcgtccccgccgtgcggtgctggggagctggctgctgggctccgcggcagcggccgggcgctttatggtgcggccgggcgggggagggccggggcgggggcggcccccttggcgggatcccctgtcctgggaagagctgggcagctggagcagcgagccggggccgcagggagaaaggcgcgggtgtgaggatgggaaggagcctggacggaccaggtcctggggtgggtgtagacacggccccgacgcgcgagggtaggggcgaagatgggcagtcggggctggagagaaaggggtgctgagcagagaccacaggggagaaaggagcgggaggaaaggggcgaaagggaggaagaaagtgacactgacccactagctttgggcaccttcagtcccctactccttgcgctccttttgttttctaaaaagaagaatatcctttggatcggctttgaatgcccaccttgggttcccttgcgaatgaatcctgaagttctccaggaacgctctgcctcctaaagtggcccagagagcagcgagtttcttttatttcttcaagcttttcttgaatacttgaaaggctgaatttttttctctatcattttgagacacagtgaaagtttgaaagttgttgtgtttttaatggagataaaacacatctcaaggaatccatccagacagagccatttctaggctggtgaatctgtgctttatggataattcgttttcagtatggtttccaaacgccctgcttgcccacctctattcctctgtcaccaaagattccgtgtgacagtttaaaggtacgggagtagaacttgaaagagatcggaggaacgcaagtaattcgtccttttcctgggcaaagctcccggaatgatatggattaactagaggaaaaaatatttgataaacagtggcaaaaatttctcctctgtaacaatctcgactaatggagaacatccagcaaagtattgctatctcttttatgtctcaaataattccatttcaaagtttaataagccacaaactgggagattaatgcaccattttatccccaaactgtgctaaaataacctgacaccaattatcactcaatttacagctagcgacttggagatttgtgagctatctgcagagctctctaatatgtaaggtccaatacaggtctatccagggttcctttaatgccacattacactacagtcactctttggaatggggcatatgtctacacatgagagaacactgagagacacagaggatgtgcataaatatcgactaatgagataaactagatttgggaacattcaaatctccagaccatgttcccaggagtggcctgggtttgagaggaatctaggctcccaagctacgcttcaagcagaacagccttgcctttctatgtttttacagtagacttcagagattaagattttctgtgaagacaatatttggatgctcaaaattttgaaagccactattcagtggttctcagctgattgggtataccagaatctcctggggaatttaaaaaacagtgattaggtgcctacagggaacaaatgaaaccaaacatcaaaagcagcaatatgctatatcacaccatagactactctgatacataaaatagggttactccttaaatgagtcaccaagcaagcctagtggatgcctgtgagagttcttgtgtagtgtgccaccagacactgcctgtttcctctcagatctggtgctcaccttccactgcatgcttgtcagcagtctagataaaatgggagactagagagcaataagaaggtagaaggtagacactagagtatttacttctctgtgacctgaatggatgcatcttctttgtgactcttgcaggtggggtccaccatgattctagcttctgccttctcaccatttgcaccctccagccatgacattggaggtcacttactgcagttgctaaaatgtggattgcctcactcttctgtttgacatctcagttcttctactatatatgtaatcatttccctgtattaaatt

SEQ ID NO: 318626 - DNA, 4001 bp, Homo sapiens
agtctctgtttctaatcttaatgttcaatgccaggtcagtctagaaaccaatcttatggggcatgtggggaaagaatcagataaaagaggcacacagaatgctcggctatcagatggaagtacaacaatctaaacaggaaatatacatgtactctgcagttacaaatactgcagacatcatctgtagcctgtaagtctgcgattaagataaacagaaaaccagatgctgggaggaaatattctgaagaaaggagttaggtcatggaattacctggctcttcttttaaaccaattggttttccgcttgaacacaaagctgtactcatcactctgtccatacgcgatcacaatatcctctagttcttccatcacagtctgcgcacatttggtcatcagctggagagcacggctgtcattgggttttgcaaagttgtgcttctcagcaaaccttcacaggggaaaaagggaagaaagcatggatggaagcctgtcattaacaacacgctctgttgctagataacagaggctgtttggaggaagataatgtaatagcactgtgaactcaaatgctcaactagccacaacctgatccattttcttaagaacttagtttttttcctgccctgaaattgagaaagccagacagaaatgctaagcctcaactctcctttctgtgaaatgggaataaaagaatatttacctcattgggttgtcctgaagattagggagaagataaaagtaatcatacctagctcctagtaagtgctcaataaatgttagttataataatcattaacaatgcagccctcttcaaagattaaattcccatctttctgttatatttctttctccccctccctctttttctgagacagggtcttgctctgtcacccaagctggagtgcagtgtccaatcaccgctcactgcagccttgacctcccaggctcaagcgatccttccacctcagccttcccagtagctggaactacatgtgtgcaccactgcgccgggcaaattaaattttttctttttctttctttctctcttccttctttctctctctctctctctttttttttttttttttttttttttttttgtagtggcggagtttcacaaacaacaaccacagaaaaaacaaaacaaaaacaaaaacttggtctccaactcctggccttaagtgatcctcctgcctcccgcgcccagccttctctttttttctgactctctgttgaatctagtccatgtggcctgttactgataatgaagcacagacgttaagtattgcccacaagcaaggcttacacagacttctgaacagtcagcattcaaagatatctaacagaatagctaggcaattggcttaagagcttaaatattgtgcatgagagtgacttttaacaacaggtccttgctaacaagtctctgttcacttaacacgggcactccaagccagatcctcatcacgggagcacatcgcccattcaattacgctaacagccagcgttcaggcactgtcctagccaacacgcagggcggggcaatgctccatgctgcgcactcattggctaccgcgttaccctggtaaccgtgactggagcgggcgggaggacttgcaagggaagaagctggattccccggaagcgctggcgcatcgcgacgccccgagtcgagctcgctcaccgatggaaattccggccgtccagccgcactaccacccagcagtgtgccaggcaggtgtcgtcagcctcgaagtccctcacgtactcgaacttgctttttgccatggtcgcccccaatctcaggtaccgtctcagagtgatggaaatggtggccaaggaatcgtgaaccttaactttacaggcgccccacattctacacgcggaaaggaaagggccagatagccccgccccggaagtgttctcttcgcggctactctagccgtagggcagtcatagtctctctcgcctctccctgtagttcttaacctcccaggcaaagaggatggaggtttaggttcctccgttagcaccttccacgcttgcttcttcctcctcccgtcctgcggcaaatcagtctcacgaggtttttaaaaattattttttatctgctggtcttgacttactggcaaaagcaatcagtgtccccgttagtgcccagatcaaaatcataccccaacctaaaaaaaaaaaaaaaaaaaaaaattctttttctggtgtttgaaggtgtagctgtgatgtttccccttttcttagtggcatttattaacttgtagaaaatctggaatacaccaaaactatagttaagaaaattaacactttgtttctccgtctttcccatcaaagcattgtggatggttcctttcagtcttttttctttttgtgtatgtaggtttacacagggaatgcacaagattggaattattcgcctatacaatgtttatatatttttccactcagcttgagcatttgccagtatcatcaattattccaaagtgtgatttttaaaagaaaaatggactcaatattccaacatatgggtatactaaattgatttattcaactttttcaccattaaataatcacagaaccagtgtttgatatcttgttgctggtggataatagtaaaaataaaatcctaatatttgtgtcatactttgtgatttacaaagctctttcaaattcattacctacttacttactttttttttttttccatcctcaagaaagatattcaggccaggcacggtggctgacgcctgtaatcccagcactttgggaggcagaggcaggaggattgcttgagttcaggagattcataccagccttggcaacgtagcaagacccctgttcctacaaaaaagaaaaaaaattatccaggcttagtagcccatgcccgtagtcctagctatgggaggatgaggtgggaagatacttgaggccaggagttcgagactgcagtgacccatcattagccactgcactccagccttggtgacagagcaagaatctgtctctaaagaaaaagaaaaatattcaaacaatataaatccttttatatgtagcaaaaagtctctcactgactcctaacaacatactttaggcagttactgttaccagttttttgtgtatccatacagggatctatatcagtatgtgtgtatatcctcataatagtaccacaaatggtagtcatcactcctttgatgctcagagtaacatcagagggatgcaaaagaggaactgggatttcacctttacaaaggggaaatctgagactcaaagagaaaaaaataatttacataaggtcacatatgtggcaggaccaagacataaattatgacatcctgcatcttttctttgtttctgttgctgtgaagtcagttttctgtaggttatcattcctcaccttttacttccacaaactcctctctccaagctgaccaggagacaaccaaatcttgcctcctctaggagccctactttcattaggtgaatttttcaaaattacttatcaatatgaattcatgatttttattttttttatgtgtatgttttcgagacagagtctcactgtcacctaggctggagtacaatggcatgatctcagctcactgcagcctagacctcttgggttcaggtgaacctcccacctcccttcctagtagctgggactacaggtgcgtgccaccatgcccacctaatatttgtatttttttttgtagaaacagggtttccccatccacatcccacactgggagatgagactcctatcagggatgggctgaatataaaataagccaattggctttgggttgctttgcagtgaaatgcatagtagaagtactacactgtcttctcccatagcatctatatggtctttacataaattaagcattaaaataacagcatagcaaggaggtcttaagatgctaatctgccctttagtaaaagggttataaaaggtttgtaaagttttcacctcatggtcaaattggtta

SEQ ID NO: 318627 - DNA, 4001 bp, Homo sapiens
cctgaatcactcatggatcagcagctgtatacttggggaaaaaccacaccattccgcctccagagataagtcttgtcaacaaagtccagtggcccacactgaacacatcaattaaaaatctcaccaactttttccattctaaaacgcatattttctcacattttagtatctacactgtatcttaaaatgtatcagaaagcatttcaaaattttgggtgtatcacagttatttaccaactttctttcctaatggaacatcttacgatcaatgaaaactcagagtcccatacaatatcggcctcaatacttacaacagagcctataaatgtactgcacaactttctcccagatcaccaagaccatccaagtttcaaccattctaactcatcagaattttccaaattctccatgcctttgcacatgccgttccctcctggaaatgtcccattccccacccacagcaccctgaccactcaactcctatggctaccctaaaagtttgctcaaatttggtgaggccttccctggctcccctaggcagacttttgttttcatttctattctgggtatccaccttgcagacctctccattataaaatgaaccatatcttgctatgttatttgtatatatatgtcttctccccgcaggggaggtccttggagctggaaactcttattcagctcaggatgtctcatacacagctgagtgccaagcacagaaaagatattcggaaaatggttgttgaatgaatccaaacagcttatcttcctattgccctctctctgaatagtcacctttagtgttcacagtggcaatgcattttgtagtcctcacatcccagatgcgaatggttttatctccggacgccgtaacaaataggtcaggattacttggatgccaacaaagctggtccacactatccccatgtccccgataattgttttctttgacctgaaagaacagaatccagatgtgacttcacatagatgtaactgcctccgcatgtaactttataagcttattcaaaccaaagtatgctgggaccagtaaagatctgggtaattcagaatccagttcctccaagccctttctcccttctcttctccgcaggccttctgaactgtttttctcagcttccacacctatgcccttacttttgtgccctccctggccttctcctccttcctggttttccacccttactctaccaccaacgtaccaccaacgtaccaccaccaacgtaccaccaccaccaccaccaccaccaccacagcccctagccacttcttatcagcacaggattcgactccaaaccagtaaggctcccatcgcagccctgtcccatccaccctctcctcaccttcacccgccatcgccaacctccttacttccacactcttcacacgcccccagtcttcctctcctcacccctcacgaccccgtcacccccacactccaccttctccctactccctcctcatctccacactccccctttccccttccctcaaacccactctcctttcacccccgcggctccgttcgcccccattcgctctcccactaccgcacctcacttcaccacggcccctctccctagcctgagccgagccccggcagctcaccaaccggtccttctccagcaagaagacgctggccgtcttgtcgaaggaccccgaggctaggcgacgcccgtcgcaactccaggccaccgagtgcaccttggcgctgtgcgccaggaactcgcgcgtcttgctgtggccccggaacagctcctgcatcccaagcacgtagcgcgacgggccgctgctcactgagcaccacggggccatcgagccggggccgctctggcccaacgccgagggccccatggctgcagcggggaccgccatgccgagctccccagcttccaactcacaacactgcagcagcctccacggcgcagtcagtcctggcgccgctgccgcacgcatgcgcccggaagagcgacggcccctctgcgcaggcgcgctgtaccccgccccggaagggactacaaatcccggtatgcagcgcgtgcccgcgtctgcttacttagtaatatttggttcttttaactccaaatatgcttcacacttaacgattccgagtttttttagtgttcttatttctcccttacctattctttggtagatatatgtgtattcctgtttaatcgaataaaagaaccaacactaaccttctaaacagttaactcatcacctttcttctggggttgttccgtaatccctagtcccctcccttaagagcagaaagctctggtctttttgctggagaaggaccagctggtgagcttgtcccatgaaaagggctagcgggtgtggagtgagggaagaggtgttaagaaggggtctggaggttttgttttttttttttaaataaaaatggattttttgtttttaaaaggtaatggcagaggcgtgtgaaccagagcaactctatcttaaataggaactgggtaaaatgaggcttaaacctactgggctgcattcccagactgttaaggcattctaatcacaggatgaaataggaggtcagcacaaaatacaggtcataaagaccttgatgataaaacaggttgcagtaaaggaaccggccaaaacccaccaaaaccaaaatggcgatgagagtgacctctggtcatcctcacctctacactcccaccagtgccaggacagtttgtaaatgccatggcaatgtcaggaagttaccctatacggtctaaaaaagggaggcatgaataatccaccacttgtttagcatatcatcaggaaaaaccataaaaatgcgcaaccagcggccctcggggctgctctgtctatggagtggccattcttttattccctttactttcttaataaacttgctttcactttgcactgcggacttgccctgaattctttcctgagtgagatccaagaacccactcctggggtctggattgggacccttttcctgtaacagtattacatgcacatgattgtaaatataaaaataaaagatatagagtgaaaagtaaatgtccacctgcgtatccaccccacctctcatatctcccttaaaccagtggcttcttgctggagaaaaaaggggtggtgagctgccagcgccagtcaaggccctggagaagagctgaggggggaaggttttggtggtgagtagtagtggtaaatgtgtttaaaaacccaatttttaaaaggcaacacgtgcacttggtaacaaatgtaaaatgtataaaagggaatagattgaaaagcttccctccatcctgtgtccccaaacttctcttctgaaaaagttaaatttcttgtgtggccttccagagacagtgtaagtaagcacctgggcaaggtagataggtgtgtgcataacctctcccaacacactgccaaaaaggtagcattccttacacaacttgcttcctatggtaaatatgtataggaaatcatttcttgtcagaaaatgcagacgtctcattcttctcaatggtggcagtctttatatgaatatataatattcaactgatcccttcatgaatttgcttttagaacaatattagaacaatattgcagtgaatatccctatacaaccttcattgtgcacatctgcacttttttatttggatatatattgccaaaacacctatgaagaggtttaataatttatacttccaccagcaacataagaaagtgtcagaaggtcctaggtactaaatgagtacacatataaagcatatggctctcagaaggaccgtaggaaataaggtccctatctttccccaatcttttccctaccccattgcaaccagaaattcttggaaactacaaagcttttcagactccaagaataccactgaagtctctaaaatcttggagtaggaaactatttggtgtctagttttcttccttacccctctttttcaggaatcttcatatatatatatatatttagatatttttcc

SEQ ID NO: 318628 - DNA, 4001 bp, Homo sapiens
gcatactaagatttagtggtggggaagcctggagacacaatgaagcagaatgaaatgcagaatatggtgacctggaagccaagtgaagaagaaagaatattagtgaagaacattagtgaagaaaaaagaatattgaggagggagtgatcaaatgttactgaggggtcaggaaagatgagaactgtgcacagacactggatttcacaagacagtcattggcaacatcaggaccatgcagggggtaatggggacaaaaagcctcagatgagagggggtaggaagaaacagggaaaatgaaaatggagacttagattaaatctttcaaagaggatttttgtttgttataaaaagaagcaaagtaggggagcgggacctagaatgggatgtgtggtctaggggggattaaagacagaagatttaacagcagatatttgttaaatgaatacattttaagaatagcataaggaacaaatgactcaacacagatgcccatgattcaacagtgtaaacatggtttatacttcaagttccatacggtaaggcgtacatgtcacatttactttgcttcaaatgtaggtgtcaatattctatacctgcttatctattttctgatttgaatgagatataaagtggagttgcttaactccatttataaccatcctactacttcaaaatattaaaatgtaaggattgatgggctgataggtgcagcaaaccaccatggcacacgtttatctatgtaacaaacctgcaagtcctgcacatgtatcccagaacataaaattaaattaaacaataaaaaaatagaaatacagattctggaaatcaagcttaccaaattaaaccttcagaggtggggggatgcattttaaacaaaagtcccaaatgcgtcttaccatcaggcttgtttgaaaaacactaatctaaggaatactaaacacttggagaaggacaagttcttctcctgtgtagacgtgcaatgtgggttcaggggatgacacttcaactctatataatggtgtatttttacctccagatcatatagcctttcccacccttgcttttcaaaattaaaaggataaattaaaaaataataataaatatgagaatattttaaaatactttctttaagaagtttactaccgtggaaagctggagaggtcctaatacactgaaaactagctcacagctgccagtcaaattatttttatccaaattagctttgcacaaaaagccaagtaggaaaacccatgccaaaacctccagcactggctctgtgtgcctggcaggggctcatgcagagcctttagagcatttaagactctgggctatttgcttatggttctgaggtgtcttttcgaaaatgggttttctagtcaaaatgaaacaaaaaggcagacagctgtgtggattttcccttcagagtaagccaagtgacggaaaggcctgcccgccccgctggggacaacagcgccagcacccgcgccgtcgggtcgggtaggctggggaggtagcgcaggcggcctggcccccagaccaccccgcgcccctggcggcctggccccagcccaccccgcgcccccggcggcggcccccgccctagcgcccggtacttgcctgcaggcgagcgccaccacagtcagcccgcggcttttctgtcttcctttctggcccagcgagagcgcccagggggtgggcgtcttgccccgggcgtcgagagtttggggccgtcccgtacgcggcgcgccgcaacccagtccccgcgaccacagcagcctgctccccaccgcgcttgcagagcccggacgcgcgtgagtcgggggcccgcagaggcctcacccttggaggtcgccgcttgtcaggcctgactgctgttggcgcccaccccgccgcccccgaggggccgctcgaggccggactgctgctttgccgtggcaggccccacccgggacgtggcgctgcgggccggggcggtccagctgtgagtcaggggttaatgtggcgggataactctctgcagagggaaggagctcgcaaagaagggtggaggaggggaaaccgcaatggggaactgtcaccgaggctagtggactctccctgcgcttttttttttttttttttttttggcatgtaccccaaaagccagaggtcgaggcccagaaaaatctggaaaggaattccaccgtgtttgctccttacagaccagacaaaccgtagatctttcagaggtacagcgactctcctggttccctaagatagtctcgacttttcctttccctttgcggccctctcacttgactactgcagccaaccatacccctgattagggggtgcagcacatcagcctctgcccccaaaaactaccctgcgaaagatcctttttctcaggttcgttctccacaaccgaacagattggaactccactgaataagagagaacaaaaaagcaattagttaaatgaagcgtaaagaagccttataaagccccattgctgcctcaggcacccaatctagtcataacctaagaggtccagttcagaaatctcccctccccttttaattctcaggcaatccctactccctgccaaaggagaacccagttactgaacatcggatgagaccatggatagtaaattgggagtgaaggtccatacctgggtctcagaagcacagtacaggtaaagctaagagttatttcctccttctctttccccatccaacaacaggatgccttactgaaggtaggcacttcaggtagtaattacttagtgaaatgccgccaatgtagtcagaaataccgtattatgtaccgtgtcaacacaattcattattcacggagttgattctccaaccactgcacctcccaacaattctacctgaactctttgggtaagcagtggcctcctaaatccaactgatacttttgttgccctcatttttcctgggagtctctttggcgattgacaaagtcgaccattgtttcccaacactctgtttccttgatgttgacaaccccactttgcctttatgctcatcctgcttgttaaaattctttcaggcctgttgggaggccgaggcgggtgaatcacgaggtcaggagatcgagaccatcctggctaacacggtgaaaccccgtctctactaaaaaatacaaaaaattagccgggagtggtggcagctgcctgtagtcccagctacttgggagggtgaggcaggagaatggcttgaacccgggaggcggagcttgcagtgagccgagatcgcgccactgcactccagcctgggccacagagtgagactccgtctcaaaaaaaaaaaaaaaaaaaaaaaattcttctttcagtttcctctgcctgttcctctttctctggcaacccttcaaaatcagagcttttcacattttcccactgaaataccaccaatgacagattccataaacacgtacttccctattcatcacttaggttgcatacataaaagagcctgaagtcactagtgtcatgggcaaatttacttgaactgttccatcttcttgtaaattgctccaaattttgcattgttcttcataatacagtcacatgtactaaaaaaaatcttaaattggttacaagtttaattgcttaacattttctctccaaatgttcaagaaaatgcatcaatcacttacgccacatatgtttagaatatattctatgtgctagacattagggatattgtgcgaacaggagacacagtcctagttctcatggagattttatagtctaatctgggagacagacagatatgtaaagaagtgagacaatttcagatccgtgcattgctaatggggacagcgaatcttcctagtgggcaatttctagctacatacctggttattcacattcaagaaaggaggggacgacatgacaaactgataaatatactgacttacaggcagtgtctaatggattgtccagcttttaggttcttggaaagaacaaaatggaaaatttgtaaaagatc

SEQ ID NO: 318629 - DNA, 4001 bp, Homo sapiens
agaagcagattcaacaacgaaccgagccctgactcttgggagcacccactggtggaggagagaggtgtttctagcatcaggatgtgtggaaggacacagaaggaggatgcttagcctagtcctggccaccagaaaggctgcctagaaaccctggtgaagagtaaacagctagcacattccgagtggttactatgggcacttgctggaaggccactcacaatggccagctttgttcctgcatgggtttgaggaacacaaactctgctatgtccaccagcaccctgtggcccaggacctgccatcatcttcaacaggaaccaagggttgagtggatttgaataactaattatacattctctgggtaccaggcttttgctcacattatttctctcctaagaatgcatcttccatcccaaactctgtgtccaaatactgcccacggttcaaggccctgttcaagtgttacctctcctgtgaagctcccttccctggggaaggtgacctttcgctgccttctgactcccacaacagggggaatcccccaggacacctggccaaccttactctccattcattccatctttgcatttcatgcccaagttctgtgggcccttgtcctgtcttccctgagttcctctcttcctgcccctgaggcctcccaagggctgggtatggtctgggctgtggttcttgctgccccatgttccactgccccatacaaatagggcctggccaccataaatgtccaggggcacatttgccgagtggctaaatgagaagcccacacacacacatggtgaaatcacccagagagaccacaaatgggatcatgtctcaaaggctgtgggacagcgagcctgttgcaggtggcttgaactcaatgtccctccaggtcttgaacctgctgcccctcctgccttttagatgcagtaggttaatggctgagaccttttagtctgatagtgagggcaccctttcactatcagaggcctgagggcaccccctttcccctaaggcacagacacacatatgcctctacccacaccccatctggccatagtctgccgaaagcctttcttttttttcttttttttttttttctgagatggagtctcacactgtcacccaggctggagtatagcggcatgatcttggctcatggtagcctccgtcttccaggttcaagggattctcctgcctcagcctccccagtagctgggattacaggtgcccgccaccatgcccagctaatttttgtattttcagtagagacggggtttcgccatgttggccaggctggtctcgaactcctgactttaggtgatccgcccgccccgaccttccaaagtgctgggattacaggcgtaagccaccacgcccagccagaaagccttttctcgaggtatgcgttacaggctgagcccaggacaggtgggctgggcaacccatgctgtcaggcctggctggaaactcaagagttcactcccagaaactaatatcacggcacagagaccctgaaagaatccctcaggaagaaagattcacagttgctgtgtggccttactctctgctccaaccagagctaacagaaatctcccactaaagaggagcccatccacgacaggctgtcccgtgtcttttggatcccaggtgttctggggaaacagaaacccagccctacaaatccagcctttgggacggggcaggaggaagacactccagaatgtgtgtctcaggggagccctcctcccagccccaccaggccctcccttctccccatgggttcaagcccctctggcttcaacttaccttattgccggggcacatctggctctagtcctgcagctgtgagctcttgagagggagtaggctggtttgggtagggctgggagggctcctatggctgcagttcaggaacgtggcagaacatacttcagttttgttgcattcttcctttttccctttaggaaagaaaatagaagtgtaatttttcattgcagaagtgcaattccactgctgagagtttgagaaaccccagcgtggggccccttctgagacagatggcctgccttcctgggtttcagttctgccagcctctcctaccccacccccagggaccttaggacctgcacccagggtatctgcaaagttcctctccacctgccagtaggatggggtcaaagcagcccaggcatgttagaaaagaagagctttttgggacagatggctacgggacaggagagtcccctgagtgtgggagaatgaggagagcgttctggctggatagaggttggccaaggaaactgtaggcaacatggcacttccctgagggtctcaggagagggcagggcctggggacggggaggatggagagggcagtaaatggccactcatagaacatgatctctcctgcagaacagtgagaaggtggtctctcatgcccactccccatcgcccgagctctgcctatttgcatgcagtttggaaggggtgaagatggtcgcttgtccagcactgcgggctctggctgccctggaatgtgaaggtgctaacccttcacgtagcccagcatttcatagtccaccagtgtgttcaagtcacctgcgttatctcctaggagttttatagttctatacgtacattttaatttttctgacatgtgtaaggtttgtgtctagattttttttttttttggcttataggtgttcagttgtctcagcaccattttccgaaatgaccatgttttttttccttcagtgttttctctttactcctttgtcaaagattggttgactgtattcatgtgggtttatttctgggctctctactttgtatcattgatctatttgtctattttttcaccaataccttactgtcttgattgctgcagctctgtagtaagtcttgaagttgggtactgccagtccttcaattctgttcttctctttcaattttgtcttggctcttttgagttgtctgtctatataaatgttagaatcagtttgttaatagccacaaaataactcgctgggattttgacgagacttcatcaaatctatcaataaaggagggaagaactgacatcctgacagtattgaatcttcctattcatggacatgggatatctctctatttgttcagttctttgatttccttcatcatagtttcatgggtttcctcatatagatcttgtatatgttttgttagatttatacagaaatatttcttttttgaatattaatggaaatggcattgtgttttttatttcaaattccacttgttcattgctggcatataggaaagtaattgattttatgtattaatcttgtatcctgcaatcgtccgttaatcacttactagttccaggagcttttttgtcaattcctttggattttctacatggacaattacgtcatctgcaaataaagacagtttttttcttccttcccaatatgtatacctttttttcctttttaatcttacttcattggttaaaactttttggttaaacgatgttgaaaaagaatagtgagaggaaatgtccttgtcttgctcctgatcttagtgggaaaatttctggtttcttatcagtaagtatgatgttaactgcaggatttttgcaaatgttctttttcaaattgaggatgttttcatttattcctggtttgttgaagatattttgctctaaagtaaccgccaacctagaattccatgcccagataaagaatccttcaaaaataaagatgacataaagtcattttcacacaaaaactgaagaatttgccaacagtacacctactctaaagtaaattctagtgttcttcaggcagaagaaaagtaatcccaaatgaaagcatagaaatgtagaagaaaatgaagagcaatggaaatggatatattcatataaatcaaagtgaatattaaccatatgaaaaacaataataatgacattttatttttgaaacttattttagtttcaggggtacatgtgaaggtttgtt

SEQ ID NO: 318630 - DNA, 4001 bp, Homo sapiens
cagcagtagcagttttgggtaattgccttcgtaggcattttatcatgagaatccttaaaggacaagagaacctgctgtgactttatgctatgactgtcccttctcaagggtagatttttactatcacctccatacatgtatccatccattcatgacatgtactatgtattaagcagtatgcttgatgccagccatacagagatgaatggagcatagtgcccacctttgaggagcctaccagggaagacaaacactagagcatgtgaaaactaaatcagaggttacggagtactactggaacataaatgtgcagataatcaactggaatggagcatggatgggcagtgcacttcaaagagggaataatatggtgggccttaaagaataaacaaataggaactcatgagatgaaaggaaatatttaacatgaaaggcaatgaaatactatataggaaatagaatgtcctggtcaggaacaaaaaattctttggagaagaaagcaaggaccaaatcacaggaagtcctagtcaggtttctagcttgctttgggggcattaagaggcttttgacggttttttggttttgtttttctggaatgacatgatcagatttacaatatagtcttttggttgcagggtagagaacctaatgggtaaagttgattttcctaagagatggccttaaatctgaagataaaagcaggctaaaccagtaggccatatacagtttggatgttaatttgagtgcaataggaagctattgaaggattttaaggaaggagagatgactgctgtgtaaagaatggaagggtatcagagaaaaaagcaggagtccacatgagataatggtggcttggattagagtagtaatagagagatggtgagtagtagtcagtctggggctatgtttttgcaagccctgtgctggaccggatgtgaggtgaaggaggagtcaaggataacgcccaggtttctggtttgagcactgaggaatccagcagatgatggtgccatttactgaggtgggaggatctactgcgtaaacctcatttgttaagcactttacttgcttaatattgcttacttgtggcagggctgggattcaaacccaggaggctcacaacaaagctagcactccaaacactacagagtgctatatagctggttctgggaactactaatattgagaggagacatagaaagagaatgaagcaagagccaaatcagacaagtcttggtcaagctaagacgtctgaattttattttaagtgaatgagacactggagggttttaagcagggagtgacttgatcagacttacagtgcaaaatgatcaatctgactgcttcgtggagaatggattgtagaggggatgtggggagaactacatcagtccaggcaggagatgatggtggctagaaggttggtgatggcggtagatgcagagaagtaggcagactggaatacagtgagggttgtgcgggaacttgtacaaatgtggacaacttgtgacactggagagaaaggacaatccaatccaatccctatttgatttacggaagctctccatacggtcattcagctcagcttgagtcactccaggaactcactaccatcactattcgtgggccagtgggagagacggattgagggcagatcactggagtgatgaaggcgctacttgatgcggcactacgtatgaacccgatcctgaatgagagggaaagactgagacaggctgaggtcaggccttgaacgtcgtgctgaggagagggtggtattgtaggcttcccagcgcccgacgtggctctgaaaggtgaggcggggcctagatccctcacgctcagcacagccccgcccctgttacctgaacgccccacagcagtgcccgggggctgagcggccggggcgtcccaccgccggcagccacagcttcctcctccgcccgggacctctggccggaagcagtccgttcgccttactagacccgctccaagcctttgagcagttcgtgtgggtccgctcccaagctagggctgggctgttgcgcttgcgccaggggtcgcatgcagtcacgcgctgccgaccgcttccggtgcgccgcgagggccgccgggacgggtctccctggcgatccgtggtgtgccgctactgccggtgcagccgccaaaccggtgcctcggtgacgaccgtgtccctgccgtcttcctcgagctccccggggcttgacccccggggccctcggcaggcatcggtgaggagcctgcggagcgaacctgtgctcctattcttgcccttcaggaccccatatcgcgactccgaggaggggaagcgagaggggctgtcgcgactccgcgccgtgtgtcgccgggcggggccgcggggccggggctccttcagcccccgggatgcgcgcgcgagccctcgcctccacttccttgttgctgctgtcacgactggagccgcctctcgccgacagcggggagcgcgagtgcgccagccatccccctcgtccagccgccgggccaagcgcctccgggaatgtgagcggcgcagcttgcacgctcctccgggtaagtcccgccttcgagggccgcgccgagccgctgggcgacctcgagttggatgctgcggctctctgagcctctactgagtcttccacaaagtagggccactgagccttagtgtcctccttccgcaatccgtatgggacattcggatgtcccagacgtcttagcttgaccaagactttgtctggtttggctcttgcttcattcatgacccagaatgagggaaaggagctagcccagagtcaaactgtggcccatggctgagccctcaaaggcaatctcgtgagattccaaggaggatctgatgggacagagaaagtgtctcgcatatttcaggtattgaccttaactctgttttacagatgaaataacggagacttagggtaagtagattgcttaaggtcagaggtccccgtgctggtgcgactggtgtagtctgtactagaacccggattttctgtcctctagagcccttcgtttttaaccttaaattgtcctgcctttttttgcattgctatactgctgcctcgagtctgataacaaacttgtactcaggcttagaacagggtaataaaacaaacaaaaccgtagggtgttgtcttcctgccctcagcccaaggtggctgtaatgagtgtttcctaacccgttttgcgcagggtgcttagtaccctatatgccattcattacagatgctctcctgcagttactgcccttctccacaaggctttcagccgcccagaagtcaattcagggcaaaaaagcgcagtccccacgtagccttgatttgaactactgcttcccttatcctttactggcctattgcttacccagccaagttgtagactgtgttctcttcctgggttgcactatggcagttagaatgtaggtttttgttttgtttttctttgttagtttagtttttgtttttaataggaagaggaatcatttagagatgacagagaactaggaagaacctaaggaataatgtgtgctttacctggggtatatcctgaaaattataggtgaaatacagtgtgtctgcaatttctaggagaggttttttgttgttgtagttgtttgtttttttaagctttcgcaacattgtcaaaagaattcttgcctccaaaagactaggagccactgggttcatccttttctcacagtagaaacagttgaaatttaggatgtggaatagacttctctgagatcataaggttagagtttaggtctcttgactccacatgcagtgctcattataccttatttgtggagtgaggtctaaatgagaggtgtgtgggctttgtactgcacgtatcagtcccatatttaccaccacaactgcctcttcccagaattctaaatttcctcctgacagattttcaggggcaactatgttatttcctcttgtaaaattcaagtggtttctgtgagc

SEQ ID NO: 318631 - DNA, 4001 bp, Homo sapiens
aggcttttgacggttttttggttttgtttttctggaatgacatgatcagatttacaatatagtcttttggttgcagggtagagaacctaatgggtaaagttgattttcctaagagatggccttaaatctgaagataaaagcaggctaaaccagtaggccatatacagtttggatgttaatttgagtgcaataggaagctattgaaggattttaaggaaggagagatgactgctgtgtaaagaatggaagggtatcagagaaaaaagcaggagtccacatgagataatggtggcttggattagagtagtaatagagagatggtgagtagtagtcagtctggggctatgtttttgcaagccctgtgctggaccggatgtgaggtgaaggaggagtcaaggataacgcccaggtttctggtttgagcactgaggaatccagcagatgatggtgccatttactgaggtgggaggatctactgcgtaaacctcatttgttaagcactttacttgcttaatattgcttacttgtggcagggctgggattcaaacccaggaggctcacaacaaagctagcactccaaacactacagagtgctatatagctggttctgggaactactaatattgagaggagacatagaaagagaatgaagcaagagccaaatcagacaagtcttggtcaagctaagacgtctgaattttattttaagtgaatgagacactggagggttttaagcagggagtgacttgatcagacttacagtgcaaaatgatcaatctgactgcttcgtggagaatggattgtagaggggatgtggggagaactacatcagtccaggcaggagatgatggtggctagaaggttggtgatggcggtagatgcagagaagtaggcagactggaatacagtgagggttgtgcgggaacttgtacaaatgtggacaacttgtgacactggagagaaaggacaatccaatccaatccctatttgatttacggaagctctccatacggtcattcagctcagcttgagtcactccaggaactcactaccatcactattcgtgggccagtgggagagacggattgagggcagatcactggagtgatgaaggcgctacttgatgcggcactacgtatgaacccgatcctgaatgagagggaaagactgagacaggctgaggtcaggccttgaacgtcgtgctgaggagagggtggtattgtaggcttcccagcgcccgacgtggctctgaaaggtgaggcggggcctagatccctcacgctcagcacagccccgcccctgttacctgaacgccccacagcagtgcccgggggctgagcggccggggcgtcccaccgccggcagccacagcttcctcctccgcccgggacctctggccggaagcagtccgttcgccttactagacccgctccaagcctttgagcagttcgtgtgggtccgctcccaagctagggctgggctgttgcgcttgcgccaggggtcgcatgcagtcacgcgctgccgaccgcttccggtgcgccgcgagggccgccgggacgggtctccctggcgatccgtggtgtgccgctactgccggtgcagccgccaaaccggtgcctcggtgacgaccgtgtccctgccgtcttcctcgagctccccggggcttgacccccggggccctcggcaggcatcggtgaggagcctgcggagcgaacctgtgctcctattcttgcccttcaggaccccatatcgcgactccgaggaggggaagcgagaggggctgtcgcgactccgcgccgtgtgtcgccgggcggggccgcggggccggggctccttcagcccccgggatgcgcgcgcgagccctcgcctccacttccttgttgctgctgtcacgactggagccgcctctcgccgacagcggggagcgcgagtgcgccagccatccccctcgtccagccgccgggccaagcgcctccgggaatgtgagcggcgcagcttgcacgctcctccgggtaagtcccgccttcgagggccgcgccgagccgctgggcgacctcgagttggatgctgcggctctctgagcctctactgagtcttccacaaagtagggccactgagccttagtgtcctccttccgcaatccgtatgggacattcggatgtcccagacgtcttagcttgaccaagactttgtctggtttggctcttgcttcattcatgacccagaatgagggaaaggagctagcccagagtcaaactgtggcccatggctgagccctcaaaggcaatctcgtgagattccaaggaggatctgatgggacagagaaagtgtctcgcatatttcaggtattgaccttaactctgttttacagatgaaataacggagacttagggtaagtagattgcttaaggtcagaggtccccgtgctggtgcgactggtgtagtctgtactagaacccggattttctgtcctctagagcccttcgtttttaaccttaaattgtcctgcctttttttgcattgctatactgctgcctcgagtctgataacaaacttgtactcaggcttagaacagggtaataaaacaaacaaaaccgtagggtgttgtcttcctgccctcagcccaaggtggctgtaatgagtgtttcctaacccgttttgcgcagggtgcttagtaccctatatgccattcattacagatgctctcctgcagttactgcccttctccacaaggctttcagccgcccagaagtcaattcagggcaaaaaagcgcagtccccacgtagccttgatttgaactactgcttcccttatcctttactggcctattgcttacccagccaagttgtagactgtgttctcttcctgggttgcactatggcagttagaatgtaggtttttgttttgtttttctttgttagtttagtttttgtttttaataggaagaggaatcatttagagatgacagagaactaggaagaacctaaggaataatgtgtgctttacctggggtatatcctgaaaattataggtgaaatacagtgtgtctgcaatttctaggagaggttttttgttgttgtagttgtttgtttttttaagctttcgcaacattgtcaaaagaattcttgcctccaaaagactaggagccactgggttcatccttttctcacagtagaaacagttgaaatttaggatgtggaatagacttctctgagatcataaggttagagtttaggtctcttgactccacatgcagtgctcattataccttatttgtggagtgaggtctaaatgagaggtgtgtgggctttgtactgcacgtatcagtcccatatttaccaccacaactgcctcttcccagaattctaaatttcctcctgacagattttcaggggcaactatgttatttcctcttgtaaaattcaagtggtttctgtgagcctttctccctccaaggattgagacttgtggtaaaagtccaatttagaacttggctacaaaaaaaactaactcttcttgaactggttattaagttttttatgcctcttttcctagacataaaagctgttagtagattctctgttttttagcccagcaccagagagctgatgttggttggtcagatgactgtttagatctgtgctgtctctagctcctagcatatgttgctatttcagttaattacaattggccaggtgtggtggtggctcatgcctgtaatcccagcactttgggaggccaaggcaggaggattgcttgagcctaggagtttgagaccagcttggataatataatgagatctcatctctacaaacaatttaaaaatttgccagacttggtggtgcacatgtgtagtcccagctacttgggaggccaaggtgggaagatcacttgagcctgggaggtggagactgcagtgagacaggatctcatcactgcactgcagcccaggggacagagtgagaccttgtcttaaaaataaataaatttaaaaataaaa

SEQ ID NO: 318632 - DNA, 4001 bp, Homo sapiens
agaggaactctcgtacgctgttggtgggaatgtaaattactacagccattatgggaaacagtatggtgattccttaaaaaactaaaaatagaattaccatatgatccaacaatcccactactggggatatatcccaaagaaaggaaatcaattaaagagatatttactctcccatgtttattacagcactatgcacgatagccaagatatagaagcaacctacgtgtccatcaatggatgaatggataaagaaaatgtggtatatggccaggtgcggtgactcacgcctataagcccagcactttgggaggccgaggtgagtggatcgcctgaggtcaggagttcaagaccagcctgaccaatatggtgaaaccccgtctctactaaaaatacaaaaattagccaggcatggtggcaggcgcccatagtcccagctacttgggaggctgaggcaggagaatggcgtggacccaggaggcagagcttgcagtgagccgagatagagatagtgccactgcagtccggcctaggcaaaagagcgagactccgtctcaaaaaaaaaaaaaaaaaaaaaaaaaaaagaaagaaaaaaaaaaagaaaatgtggtatataaacacagtagaatattcagccataaaaaaagaatgaaactcagtcatttgcaacaacatggatggaaacagagtttattaatattgtgttaagttaagctaggcacagaaagacaaatattgcatgttcccactcatacatgagagctaaaaaagttgatctcatgaaagtggagaatagaatgatagtcactggagtctacaaaggataggggaaaaggggtatgaagaaaggcaggttaatgggtacaaaaatacagttagttagaacatgaggaaaaagggaaaaaatacaattaaatagaaggaataagtcctagtgtttgatagcatagtggggtgcctattgttattaataatttcttgtgtatttcaaaataactagaagagaacatttgaaatgttctcagcacaaagaaatttaaatgtttcaagaaatgaatatcccaactaccctgattcgatcattgtacattgtatgtatatatcaaaataacacatatgtagcccataaatatgtatagttattttgtatccatttaaaaaaaaaatggacttttgtaaaactgcaagggccattcaatattatcttgtcctagaagcacagattgtgacaactggtcatttaaaaagccaggtctctcatttcaaatatgggagagccagagcaatttagacatattcccagtgtcaacagttagtgcccgagacgcagctgcagctcaggccagaacacttggctctataccaccaggatgcaaagaacttcactggccaaaactgagtgtgtacacttgcatcatccaaaacccaaaaacaacgtgcagaaaagaaaccttacataaagcctcaccccagcaaaacaaaacaaaaagcaaacacttctaaaaacagagggaatgataagaattatcacaattctcaccagaacaaattctcctggcttattgattatatgaataacacccatagaggaaatctcttttccccaatttatctgaccacttatttctgtgtctcttcttcagttgctgtttccaatataagcccaaattaccccagcctaaaacccccagaccagtctctggataaacctctgtgtaacaaggcaggacagagaccctccacagaaggaagcctggtagggagaggggagggatgcagaaatgaagtgagcttctgcttcactgaggcccaaaccagtgcatggaaatccatcacacaatagcaagtcctctggaaacttctacatagaaggtttcagaacacttactcaggtaaagccaccaaaactcaatcatcagccagagaatgagaggttctttggacattttgacggttgaccggacccaggagtctgtctatctatccaaagcccaacctcttatatcccagttaatgctgacagggtgggactctttagtttcatttctctttttgcctcataatcttccctttctcctgtcctacatggcttcccccaatgggcgatgcatgatgaaatgtgctgagcccttttctcctggtgactagtgtgtgtgtggagggatggcgtggacatacttgtgcttctttgtccatgtgtatagtgggtttcctatatgtgcacaagcatccatgcatgtgctggtgcaaatatgcctgtataacctgtgcatgtgccacagttgtcccaactgctgtacagcctgtcacaaagtgcaattgactctccatactggcaagtgtttacatgtagattcctcatggggccaaagcatagttagactgaaagttgcctccattcccattctaggttctccctcaccctgtcccctggcctccttgccctaataatggagaaagaaaagtgaggacaggcacagtggctcacacctgtaatcctagcacttagggaggccgagatgggaggatcgcttgaggccaggagtttgagaccagcctgatcaacatggcgaaaccccatctcaattttttatttaaaaaaaagtttaataaaaaaattaaatttttttttaagttttaggaagacactgaagcccagaacttcctgattccaaagcttatggttaatcactacattgtcctttgacctgtgaccgtttgggtaatgtatccatatgatgaggcctacctgtggctagctcctacttagtaccaggaagaaaatataagaattcacaaatgttctagatttttaaaaatccttaattgattgtaaacagccagcaaacctcaaacattcaacattgcttctactgaaggtatcagtgaaaaatctaaatatcaggtgaggttctagacccagagaagccagactaacatgagcagggatgaaaataacgggattcagagtgaatcttcccactgaatgcccacagaaccaagggatcctttccccattctatcccaggaaactggaggatttaatctctggataaactaagtggtcccaataaaacattttcagatatttatagttttgagtgttccccaacaaaaccactcaaccctccttcaataagttcatcagtgcatgagcctcagccatgcatgcagaactgttaatgagtctttagtgtccctttcagatatgaacagataaccagggatcatcagacatttgaggaaagcatttaacataaaaaagagacaaaaataacagggagagctaaagagaacttcaaaaactttttaaaaagctaatattttctcagaaagaaagattttacattcatgaaaaagaacatagacattataaaaatgtcccgaattttatggaagttttgaaaaataaagttaagaaaatttgttagaaattataaccatctacaaagtcaaaggactaggattgtttcagaacattaaaaaagaaaatagaggagaggaaattactaaagaaataataaaggaaagactctcgtaactaaaggagatgactctcagtattgagcgggtcaatcaaatgctaaactcaatgaataaaaatatccccaaaaagcaagacattatcatgtaatatgagaacatcagacataaagaaaagatacgaaaagactccagagagaaagaacaacatattgcactgaatggatttggaaatagaatggcattgttgttccaaacaacaaagctagaaaataatgcacgaatgccttcaaaattcagagggaaggccgagtgtggtggctcacatctgtaatcccagcattttaagaggccaaagtgggtggatcacttgagtccaggagttccagaatagcctgggcaacatggtaaaaacctgtatcagccgggcgtggcggctcacgcctgtaatcccagcactttgggaggccaagacgggcagatcatttgaggtcaggagttcaagacaagtcccagcaaca

SEQ ID NO: 318633 - DNA, 4001 bp, Homo sapiens
gaggcgcagaacccgtctgcctcccagcccgcgctttacgcccgaggctcttatatccagggagccggttaggatcatttgtttttgttgtgtgccagagggtctccaggaggggactctgcccgccgcccacctgcacgcccgggtattgtggcttcaccaacaataaagattgttcctttcgccagatagcaagggcagggcctatgtgtaactgacttggccctgcgggaaccggggtcgctggggtccgcgggtgagcaggctggctctgcaccacccgcacgacgcccgggggctgggtcagtctcatccagttcgcccagggcctgtcttgaacccctttccagacgcgatcgcttcgccgtttacgggttgaatcaaaacagagatcggataaaaacgcggctggaatggagacgcggagatggggggagaggaaaccggcgtccacgaggattgttgaaaatccgagagggcgggctggaagaaggaggagaaggagagtgcgagaggcccgtgtgtgtgcgcgtgtgtgtgtgtgtgtgtgtgcctgtgtgtttggggcgggggtgggtgagaggaaatcaagtgaacgcaggagaccgtacaaaacacggggagagagttggaggggctcacgaaagatggggatggggatggaggagaaaccaaggcgtgggagaccacgatggagagagaagcacaggccagcgagaagggtgaaaggaagaggtacaatctgcgaaggcggggtgggggtgtgtttgggggaggcagaggggggcgggggtagtggatagccttaaaatagggctagtgcgaggctgcggctcggggcgggacaggtgaagggcaggtgtaaggtgggccgggtcaggcctctctcaccgccacttggtcctccggttttggaaccaggtcttgacctgcgcgtccgtcattttgagggacttggcgagcgccgccctctcggcagaggccaggtacttctggcgatggaagcgcttttccagctcgcagatctgcacccgggaaaaggacgtgcgcggcttcttacgcttgggcggcgtccggttctggtaggggtggccgatgcgccgggtcacggtgaagggcgtgagtgcggccgccgctgcggagacacaggagggcccctgaagcccagcccggctccgccaccgttcaggccccatgcggaccccgtggcgccccgtgggacacggagagctccgctatttcgctggtcgcgcgcgtttccagagacaccaagccggtcgggagaccccctcgccccctgtcccttcccccgggcacgggcttattttcctgcaactctccgattaccctccccaccacggctgcccggggccctggggccgaggcctccgccgcgcttgggcctctgaaatggtttccgggagtggagcgcacagggcgcggcgcctctggccccgagagggcggaggcctggagcctggtcgccagctctgctcacctgtgaagcggtctttcacgaagcggcggctgctctccatccaggggaaattgagaccgccaaggctggagaccgtgggcacggagggcatggcgggtagcgcgcttggcagaggcggtggcacggccccgggcagcggcctgtgcgccggcacccggatcacgcctgcgggcgctaggctcaggttcacactgtaagatcccgcgtcctcgaagggcgcgccgaggcccgcaaaggaggcgggcagagacgggtatgtggcgcccggacggcccccggggggccctcccaggtagctggcgccgtcggggccccgcggggcgggtgcgctgtcctggtccgggctgttaaggatctggtcgatgccgaagctgatgggctcgtgcgggtgcggggtctgcgcgctggcgggcgcctccatcctgggcgggcggaagggctgggctgggctgggcggggaggcggctgggtccccgttacggcgcggccatggagcgcccggcgcctctcgtcgcactgaaactttgccaagagtgcgcgggcccgacaggctctgtgtcatctttcttgaaccgaacctggagtttccgctgctaattcctctcctgccgcagccattggctgcgatcaacaagcctctctcctctcattggctcccggctttcaataaaggcctaattcatggaaataggagcttagggactgttccaaggtgacatcattttaacaaacgaacaataggtcaaatttattagcagggataatgggcggcggatattagagcccgaaccacagcctcccaaacccgaaatctaacgaagctgcaattagcagacgctccccgctcctccgggccgggccgcttcccagacaccgcgctgggtgggtagagcgctccgcttgtgaaattgtcttttgctgagtgggttttcgttttcttccaattttttttttttttcatctgagcaaaagccaaaccaaatgcatcctttcaggtacaatggagttgcaaccccgggacgacccggcggaatccgcagaagccccttggacgctaccgccgccggaggaacgaaaggggcgcactacccggggcaggcttcgcgctgcctgcgcgcggggcgaggggagcaccgtagcgttctccgcgccccggatgacgccgacccgcgtggggagaattcgcccccgcccgggtttcggccgcggcctcgcggccactttggagacactccctggctccggccaggcggaccgaggcgtgactcgcaggtgcccacgcgtgccagctgcggctgggctagggacgcggggtcgcccggtggggagcggggacctgactctcgtaattcgttgcaggatggaagggggctgtggtcgcgcgtgggaacccgctcgcggctcggcgggtctagggacttcgggttcctgaatgtcaaaggcgcgggcagctcctagagcaaattgcgggatttctttgggaaacgcgactggtgagcccttcccggctccagtccactttgggcgctggaaccactccccgttctgctcgcgcctcagtgactgtctacccggcccagggcaccgtggacaggaccgcacacgaagtagtcaccttccgctgcagctttggggagacaagcggaatcattttcttccagcgaattctaaaatcgttaggtgcaaactctttgagtgtcgcacccctggcctgggttcttcctcccgctccttgtggtgtggacagtggtgagagctcggatgtgctgttgttggccagaagtgtgttcaaatttggactggccatttcctcgctgagtgaccttgagaaattgactctatatatttagatttcggttttctcgtttgcaaaaaaggaaaataatgcatgcatgcgggttgttcgtgagccgcgagtgagatattgagggagcgcagagcactgggcctggcacgtagtaggcactgggcagcgtggctcacctcccactctatccccccagagtaatggctgatgtattattgttgtgactcttgtttattttgttggcagtttaattttatttgcaggggctcagtacgttggagagaaaggtgtatttgtctaccagtagggtcagtttcagaggacggggaaagacaggaggtgcaggttggggattctttctctcttctcccaacaatccaaaggcgtcaggatttgcagggcctccaggcctgggtctggagttaggtcacttgcccgctgtgtgaccttgggcaaattcctggcccttgctaagccttcctggtgggtgtggagagggaggcccaacagtgaggagtgagagctgcaggatgtctggggtctgggcaagtgctccctcactcccttccagcgacaacgaccctcagatggggtagatgccattgccctggctccagggggcctcctgcttctaattcaggctctgccactggcagtgtgggtccctaaccgcccctcccagaaccgcattttcct

SEQ ID NO: 318634 - DNA, 4001 bp, Homo sapiens
gaaaatgagaataacaatatctatcctgccttcatacagggttctttcaaggatatttaaacctctcagcctggcaaaacctactcctctagccattctccccatgcaacctacactctaacaacaaccagcctaacatgagctttttctttttcttttttttacatttccgagcttttgcacatgctatttcttctgcctggataccctctccagcttcccactctcttcaggtttctgctcctcatttcctctgggaagttagctctttttgagagacttaggagtttctcttgttcctcatgtttccttcccttgtgacatctgtcttcttcaccgggctgtgagcacctcaaagaaaaggactctatcctttcatctttgtgtacctcagtgaccagcacagtgtcctggcataaagtaagcatacaatggaatagtatgacctaggaataagttgataatatatatgtcaacatggtatgtacggtaaactatgtacgtaaacataatacaaatacaggggatactcaatgcttactgaataaatcctttcattcactcattcaataaacactgagtacttaactatatgccagataatgtgcaggcaaccgggttttcaatgacaacacaggatctaggttttcctgcaattaaagtctagttggagaaataacaatagacaaaccattagataatgattaatattctacaagaaacaagtaggtggccgggcacagtggctcacgcctgtaatcccagcactttgggaggccaaggcgggtggatcatgaggccaggtgttccagaccagcctgacaaacatgatgaaaccccgcctctacttaaaatacaaaaattagtggtggcgcgcgcctgtaatccctgctactcgggaggctgaggcaggagaatcgcttgaacccgggaggcggatgttgcagtgagccgagatcatgccactgcactccagcctggcgacagagcgagagtctcaaaaaaaaaaaaagaaaagaaaagaaaaaaaataggctctcaagacagaataccaaaagaaacgaacgttagacgtagcgaatgccaagggcttgagacacaaatccgatatatcgttgcaggaactaaaaagaggacggtgggtaggatgagaaaactgataaaatttgagttaggaagaggctagaccatgctatgctttgcaaggcacaggaaagattttggtctccacgtgtttttaaaggacgtagtgacggtgacaagcatagatgcagggtgaccttttaggagactgcagtagtatccagagaggaggtggtggtggcagcttcgatggtgaggcatgtaaagactccaaagctcttcaggaggtaaacaactaggacttgatgatggatcgatatggggttgtgggtcaaagagttgtgcaggatgattcccctgtttctggcttgacccactggatgcgtggaagtgtagagtggattgcgttcaggtttggggcagacctcgagtactcccgggagtctggcgccagcgggcgtggactccagcgcaccctaccttgccccctcacctcggtttccccgaggatcgcagccacacatccctctccagcttcctctggggcgtcgtttctcagcagcctcttgctgaccagctgctgctccctccgcgccttccgcagtgctgggggcagaggagccggctgagcgtgggaaggacgaccacaacccagaacccgcggctccgagcctggggtctcaacttatccccgaccgccatatacccccgcgctccctcggccgcccacacctgcctcccgctcccgccggcggcgccgtagctcctccaccccgcagaccgtgggcctgaggcggccctgccgtcggctccacatggtggagcaggaggaggaaagccgaaggaaacagcagccacaacgctcccaggggcgtagaagatggcaccgactgcgcagcctcagcacagggcgggaacaggcggggagggcgcgaggagcggggtgggtgctgggtgagggcggggctcggcgagtggacgcctcgcggggacggtgggcggggcgagggctagagacgctgcaccactagaccagagccagaggcgtcgctctgcctctgattgatttcctgtcttaccaattctaggaaaaaaagtctctcatccctgacctcgagtgacccaagccagcagtgtcacaatctactcagcaaacacaacttccccacccacaatacgctctagatgaaagttcaaaacaatcccgaactgcgggaagcgccatgatgccgtttcactattaatgcggatcccactgatgagagctgccaaaaacgcttgaagcgtcattgaattgtcaacgaaaagagtccaactctgtaaaatatttgaagagacttattctgagccaaatatgagtgaccatggcccttgacacagccctcaggaggtcctgagaacatgtgcccaaggtggtccggtacagcttggttttacatattttagggagatatgagacttcagttcattcaagaaatacactggttgggccgggcctggtggctcatgcctgtaatcccagcactttgggaggcctgggcgggtggatcagctgaggtcaggaatttgagaccagcctggccaacatggtgaaaccccatctttactaaaaatacaaaaattagccgggagtagtggtgggtgcctgtaatcccagctactcgggagcctgaggcaggagaatcgtttgaacccgggaggcggagattgcagtgggccgagatcgcgccccattgcctggggtacaagagcgaaactccgtctcaaaaaaaaaaaaaagaaagaaagaaagaaagaaatctgggatatgatgaggtttctcttcaaataattagatcaatcttttattctttaattcatagtactcccccccacacacacttttgttttcctttttctcctttttgccttcgttagatgccgaggcacgccacagtacaagacgttatcagtaccagacgttatcagtaccagctcacattcctttcattatttggaaagaggactaactttctagttcattacaggcaccccttcccctttcctctccactttcttttacgtgcccacattacctaaaaaaatcaaatgtttagccaaccgggattagttcagattgtatgacccgaccccggccaatggggaaagggtacaggggcaggacttgcgtcaggaataaaggctctcgtgcccctttgttcaggtgtgctctcatggcgactggccaagcagacacccctctgagcagaagtaaaattgctttgctaataatcctttgttcgagtgttcaatttcccttaggattttgagcgttattcctaagagaaagaaaagaaagaaaggaaggaagaaagaaagaaagaaagaaagggagaaaagaaagaaagaaaagaaaagaggaaaggaggaagggaagagaggggagggggaaagagagaaagacattggtttgtgggacaacagaaaggcgggacaactcgaagtggggcggtggggggcttccagcttataggtagattttaaatttttctggttgacaattggttgagtttctctaaagacctgaaatcaatagaaaggaatgtctgggttaagataaaggattgtggagacccaagttcttatttgcagaggaaaccttcaaatcctaggcttcagagagaatgggttgtaaaatgtttcttatcaaacttaaagtctgtgttgatgttaacggtagagaggtataatgaggcacgttcaacccctacttcccatcatggcctgaaacggtcactcgggtttaattttgaaagagccctggctgaggaggaagtccattcagatggttgtggggggcggccttagaattttatttttgctttacagaatgttcaccacaatgaccattattctcattttatatgtgatgaaaatga

SEQ ID NO: 318635 - DNA, 4001 bp, Homo sapiens
agaaaatgtcggcttatactttttatcacaattcctgctatcttcttttctgtcccctggtgctaatccatgaaggtaagtaagcctaagggtcatccttggcctcccctccctgacccactatagccaaatcattaccaagtcctgttgattctacctactaccttctctccaatcctttcacttttcatttaccccactgctatcactctactctaagccactatcatttcttgtctagaccaccataataacctcctaatcagccttccacatccgctctgcaacatcttaccatcacttctctacctgcacaagttattattaatgcagctaccaagaatattctcgtcatatcactgaactgcttataaccctctgatggcttcctacactttcaggaaaaacaaatccttaacatggtcagcaagacactatctggcctgcccctgctgacccccttgctctggctccttattcccaaccatattggacctctctctatggccctgaaattctcagtgttcactactaccacaggctattccccctcctcccttaccaaggtgtttatagctcatcctttaaagttcagcttaaaataattttccaaaggaagtcttccttcatggatcctacttactgctcttaaggcacagttctgatgaatgagcagataccagttaagaaaagcagggtgagaggggaatcatgaatgatggcagtgaccctatctgtttcgaccacttctgtaccactggcacctagtattcaatagctactcaaatgttaaatgcgcctaccaaccaaaattgaagctcagtaaagactgttctaaccaaccgaataaaccacattctgttaaagtttcttttttatataatcccaaatatcagaaggggcctctcatttatcacagcaattctttctacaactcccttggcaaatggccgttcaacctgtaatggagctcttccaatgacaaggaccgtattaaccaacagtcctaatattggtaaaactgaaaagcaatgaagttagacattggcagcactccaaatccaattaaattggaggtgtggattagagagtagagggttgacactgggtactacagagtataaatgattttctttaagggaatcttttaaggaagaaagttcaataggccttaaaaatgagatggaaagaaatgctaaagggagcatttctggaattcatatattttaacacccggtcttaacatctctcacccaaggtttattagaggaaagtcaaatgctgggcatcagctacctagaagcgatttttgaattagcctaagaacggggaaacacggacaggaaagtgccatccctcaagttacacccccaatcctggagccgcgagttggggcccagggactgctaggcccctgatacctggaactccagggtgcacttggtgccctgagcgatgtcctcgtagaagcactgcttggcgttgtcaggaagctcgaaggtgatctcagaggcgccgccgggtccaggcaccagtagcagcagtgcgagcagcctgcacccccaacggcccgcgacggccgcccagcgctgcgcggaccccggccgcggcatcccgagaaggcggcggcggcctcaaccgagctgcgagacgcagggtcaggtctgcgcggactcaccgcgcgcggcaggcctcagcgcaggccaccccgcaaagatacacagcagagcaggttcacgcctgtgggagattcgggatcagagcgaccctccggcttcctgtgaggggcgcagacgggcggacctggggaggtaaaagagaagcggaaaaggcctgagagggtcggaagtggggattagcctttcggggggtgaaggggcggagcctgagacaccggctcccgtgacccggatgcgttcttctccgggaacacgcgttggagtgcgtacgtggaagcccgcgaggcgttggctctgcctccgttgcagcctgggacgaggggcggggccagagtcgtgggcggagaggggcgagaccaggaaacggggcgtggcggccgccgtggttacaggcggttggcgagggtaattacgctccaatcactggctttttttgttgtttttttttttttttttttgagacaagagtctcgccctgtcacccaggctggagtgcagtggcgcgatctgcgctcactgcaacctccgctgggaacttagcgctggggagcatctagggagtggtaaagggctcattttgccctagggtgctaatcgttggtggtagagcgctttgcaatttgcggagttttctcataagtaataataaatatttgggggaagcagctgggcaaggagcgcgaattctaagagcagactgcaggagtgcttaatccctgctttgccacgtactggctgtgtgacgtccggccacttgcttaaattctctgcctcagtgtgtatctgtagaatggagataatagcacctaccatagagaattattacaaagtaccaatatttggaaaaagtacctagaagtggttggtacatagcaagcactagatgaacttttgttaaattaaacgtcacagtgcaatcaatacattacataccacaagataggcaaaaattttaagtgtaacaataacagatattggtcgacttatagagccacaaaacctcttatacactgctagtgaaaaagtaaattggttaatcaagttggaaaacaatgtgccattatctaataaagtagaatatatgtatacacacacagaacacacacacctatatacagtgtgtgtgtgtgtgtgtgtatatatgtatatatatatatatatatatagcctggaatatgtagccacagcctggaaattccattttacatatatttatggagtatatgctttagagcagtggttctcaagtgttgctctgaagtccccagaagcctcctgaaaccctttcagagggtatgtaatgatctgtatgaagctggattttcattatatatttcaaccaaaacagcataacagattgaatatcaaaggaaatgagcacccagcttcttccttaaatctagatatgaaagatttacaaaaataaggtcactcttcttgctaaatttttatttcgaaaatatttttattaaaagatgtgttatttatgtaaatgtgtgcagtgagttgaattgtgtccccctaaaaaatacatgtccaagtttcaacccctccacccctgtgaatatgattttatttggaaatagggcttttgcagatgtaattaagttaaggccctcaagatgaggtcatcctgggacttagggtgggccctaaatctaaagactgttatccttatggtatggtttggctgtgtctccacccaaatatcatcttgaattgtagttcccataatccccacatgtcacggaagggacccggtgggaggtaattgaatcatggaggcagatttttcccatgctgttctggtgatagtgaataagtctcatgagatctgatggttttattgtagttcccataatccccatgtgtcatgggagggacctggtgggaggtaactgaatcatgggggcgggttcttcccattcatttatgtttcccataaagcagtattgtgtttataatgcattatttgtgtttataaacatataatgcacgtataatgcattattcatgtttataaacattgttcatgttttataacaggtagttagctacatgagatctcatggttttataaagggcagttcccctgaacacgctctcttgcctgctgccatgtaagacgtgcttttgctgtgccttcaccctccaccatgattgtgaggcctccccagccatgtggaactatcaattcatttaacttattctttgtaaattaccctgtcttgggtatttcttcatagcagtatgaacatggactaacacaccttataagaggagggaagatttgagatgcacagacacaaagatacaggggca

SEQ ID NO: 318636 - DNA, 4001 bp, Homo sapiens; identical to SEQ ID NO: 318635

SEQ ID NO: 318637 - DNA, 4001 bp, Homo sapiens
ctcaacttgtctttagcagcaatttctgcatagtcattggcatgttcacctacctggatgtccaggtgaactctctgaggacagacaaaggagataagggaaatctggtagccctgctccatcttcctgccagagactgacagctcatccccgactttccttcatctgttcatttagccaacagactgggccctcttcagtgtcttagccccatgaggctctgggcacacaagcaagtattaagcctgggctggtgctctgagtgaggcatgtacaaagagctcagtcactgtgtcctggacatccagtggaaacccagtgttcttaggagacacaaaatctgacataatcctctcacacccacagcaccaccagtcccccagtcctcaccaaaggatgaaggctgaaacctgcaagtctcacatgggcccacttaccagcatgcctccagcaaagagggagaacttggtggaattggagtgaagacagatctggtgctcaccaggggtatgggaagtgaaagtgaacctgccctcggagccatactgccgggccaggatgacctggaggaaggtaacaagcttcagtcagtattatggtagggatgggaatggaggaaaacagtgcttaaggctctaagtactgcaaaagttgacaggcacagcctttcgcacctcacaacactgaaagattcaaagctgctcagcagctgttgccatatgcttgtgtgagaactctctggggcaggtgtttagactctgagagtctgacattagggtggcaagtgactgactgctcttgggaagggctttcctttatagcttatgccctttcaacttttttggtgtgagttgttttttggggggttcttttttgtttttgtttttgagacagagtctcactctgtcgtcctggctggagtgcagtgatgctatctcagctcactgcagcctcagcttcccaggttcaagcaattatcgtgccttagcctcccaagtatctggtattagaggtgtgcgccaccacacccggctcatttttttttttttttttttttgtatttttactagagacggggtttgccagacggaggttgcccaggccggtcctgaactcccggcctcaagtgatccacccgcctcggcatcccaaagtgctgggattacaggcaagagccaccacaccccgccatgagttttttaacgaaaagtgacagaaggtgagagctgaagggttttgccgttcgttttaatatccttacttgggaagattaaaagctgctcattttgtggggaaagtatcatgttctgtgaaatcttaaagtctagatgactttaagagttgacaaaactctttgatttttatcaccacaattaatccgcccatttcacagaccgggcggggtctgcaagtcagcaggatattcccacaacatcaactgtctctcccactttagcagatgcaggaactagaagaggaagtaccggagcccgcctagctgagaggctggcggagaggaggggggcggttggctcaccttgtcctctgggtccttcacctccacaaacatgccaagccccggggtggccggctggtactcctcccgctgcttgtcatacagctgcgtccggtagtttccttgagggaagcagggcgagcccaggtcagaggagcgcgaggtggcatgggttccgcgaccgcctgggcacggcgaggccgtctcctcccggctctagagagctgactgtctcgcatcccccgccccaagaccacggtcacgttccaaactcgccccttcctccccgcccccgcacctatgaccatggtctcgtccgggatctcctcaataaagcacttcttctccgtctctccgatgtgaaagtagagcgcgcttccgcgcgtcgccagccacagcaccagcaggagggtccgcatcactctacccagcccggttccgggccggggccggacgagcagcacgcccagctccacagccatcttgctccacctgcctgcgcagccgcagccggccgcgccacgtcgccctgccgccgccgcggtgcctgccgggaccgcgagttccgccgggtggaccacaaatcccgagatgtcccgcggccctggcgcggcagtacctgattggggcgcggcttttacctgagagagagcgggtgccctagaataaaaacttatttccgttgactctcttcatggcctggcaactgacgatggttaccagcttttcatagatgaaactgaggtcgtttgtttgaggttgcggagcgaattgcgaacagagacaggattcgaacctaggatccctgactttccttggcacagcatctaccagtcttgatttgcttctacctttaaaaatgaatttaaagagaacgaccaaataatgcacaaatgtattatcaaaaaagattaaaagaaataaaaggcaaggtctcccattaccacttctttgtcctcataccctgtccactcctaaatcgggtgttaccctctcaagcatttctccgatcacacacacacacaaacacacacacagcctctgctgccagatcccaactgcaatggctcgttactagcaattctacagaaatagaaaggatcataagagagtactatgagcaaatataagccaacaaattggataacgtagatgaaatggacaaattcatagaaatgcaaaactgactcagaatagataatataatctgaataaacctataactagtgaggagattgaatcagtaatttaaaaaaaatcatccttacttaatatagttaagatgtcaatactatccaaagcaatctacagatttaatgcaattcctgtcaaaatcccaatgacattttttgtagaaacagagaaactcattctacaattcatatactctcaagggatttcgattagccaaaacaatcctgaaaaataagaataaagctgaagaactcacacttcctgatttcaaaacttacttccaagcttcagtcatcaagacagtgtggtactggcatatagacagacatatagaccaatggaatacaatagagagccccaagatatgccctcccatatatggtcaaataatttttaacaaggagaccaagcccattcaatgcggggaggagggacagtctttctaacaaatggtgctgggaaaactggatatccacatgcaaaaaagtgaaggtggttccttctctaacaccatagataaaaattcacccaaaaagacccacaacttttaaaatcccaaagcataaaactcatagaaaacatatggcaaagggtttaccacatcggatttggcaacagacttcctggatatgacactaaaggcacaggcaacaaaagaaaaaatagacaaattggactttatgaaaattaaaacattttgtgcatcaaaagactctgtagcagagtaaagaggcaacccacagaatggaagaaaatatttgcaaatcatatatctgacaaaggattaatatccagaatatgcagagactcctaaaactcagcaacaaaataagaacaatctcattcaaaaaccacaacaaagggcttgaatagacatttctccagtgatcaacaagtggccagtgagcacatgaaaagatactcaacatcactaatcattagagaaacacaaatcacaatgagataaagaacaatgagatactacgtcatatacccattaagatggccactagaaaaaaaaaaaggaaaagaaagaaactacaagcattggcaaggatgtggggaaattgaacccttgtgcactgttggtgggaatgtaaaatggtacagacactgtggaaaaccgtataatgattcctcaaaaaagtgaaaataggctgggcatggtggcttacgcctataattccagcgctttgggaggcagaagcaggaggattgcttgagcccaggagttcgagaccagtcggggcaacatgacgaaaccccatctctacaaaaaatacaaaaatta

SEQ ID NO: 318638 - DNA, 4001 bp, Homo sapiens
aagagccaactagttagttccaaaatgacattcagaaaaacagcataagattacattagttccaaacattaaccatctcttttgaaccgacaggataagcaggattctacttctagtattccaaaacactgagaacaagttcatgttcagcttttctgtgactatgatgaacttaagtattttaattatactttaccttcaacttttcagaccaaaaagtcaaaaattaatcttaaatttaaaaaatgaaaatatgagttttagtccagactgccaaactactgttactttagaaaaatcactgtcaatttctagaccccagattctttcttctgtaaaaatggggatggaagagtgattactaggctttggtttctcccagttctgttttccctatccttgtctaatttcactgatacaaaagaaaaacaactttcttaatacaaaccatattattcactgaggcttaaaaaaaaaaactttaaagagataggttatctggtaaagtgcaccaggaactacattattttgaaggtctttgttctacattcagctaagtttctaaaagtcattcaaaagccaatcaccacacacattaactgaatgttggcaatatttggccctgaaaatataagacaaactgaagctaaattccaggacagaagcctctgcaagtgagggtttgaaatcttgtatacggtgaagaaactgacaataatgaacttcaccagagccccgtgatcttgaaaaacagcaaaggttaagaaaccccttgcccccgtttgtgttctgagaaattggcttactgcaaagaatcatctttcctgtagaacttagataagactaagggttgatccatacccccctaccccttgtttacctataacaaggccataactagacccttctaattcccatcctttgcttcgtaaatgacttgctgaagtacctgtcccacagatcaatcggaacaaaatacttattaaccaaactttaagattctcttctctcgggtacctgaattttgtccttccctcagtctgaaacaacatatacaaacctctcctaacagctcctcctcagaatacatgggctcagggtaaaacattatctggttactgccggatcatacccatattttcatcccaattcctgacatcttatttacccctaccaacaaaagacaaaccctttctgcctaacctttaaggtgcatgcaaatcttacggtcattctccctactgcaacagttccttcaaccttcctccacacccctgcaatattcctttcgaataaagtctgtccttactaaactcgggttttttatttgacacccttttcaattatgaaatggctaagtgtaaagaataaggggactaccgtttctttaaatgacaggtgttgatcttatacaaggagacccgttgtgtccacctggagaggctaaaagcatttctaagatctgaagttcttggccactgttccgcggatggagaagggggcgcagaagaggtgactgacccggcaaggtcaactctgggatcacctggcgccacaggccatacacagtaaatgggccatgaacaggcaggctacccagtccatactccctgacagatacgcccctgcctccggcccgctagtctcccagacaggtaggcgtaatgctgcttcctcaggggctcagacaccctgagataggtggtgggtcctacccagcagctcatcccaacgtctcaactccattctgagcagagcacctgatggctcttttcacagtactgacctccccgcccttttcgccccaccgttgtcactcctgccctcacagaagaactcaccatggcgcctaggataggtcgtggaccagacaccctggagttgccggggcagtcccaaacctcttacctcccggtccttgagccgagagactctcaaacagcgaaagagagggtcttccggctctgccggaagttgtgcgcgcgcgggacaggaagttcctcccttctccagagcgccgtcgaccccacgccacgcagaggtgaagatacgcaggacgtcctctaaagcaacttccgtgggtgccaggttgtgggctgggggcggtgctgaccttgagagagcggaggaggcgcaggcgcagcacaggtacgtgggcgggcggatcgtggtggctgcgcttgcgaggaccctgaggtagattgggtggtttcaacaggaacgcatccactgtctgagaggtgacggaggcacacgttggtgtggggagcgggaggggagagggaggggggcgggtggggggcgggagggggccaggggtgggagtgagggtgcgcgatgggagtcgactccagacccaggtgatttagagagagtaaagaccacctttggccgtcattttgtctcagcttaactgacgccctcttgttaccctctagttttcctgactcggtcccttattagcatatcctcatttccacagacctgtccgtctgttgcttctgttccctgccttagtgggtaccgtagctctaccctccttccgggcaatggaatctcatagtgagaagtttcttcactattcacaggtggcaattgaagccggaagaacatctaccaagagcagagaacccaggaagaaaattctgcctctttaatacgttccaatatggacgttttccatatagatacctatctatatagatagatgctctgggatctgacggtcctggacacctgtatggctgtgtgctgtggtctttgcctagcctgcggttcacttttgctctggccaccacctcccctcatgtacaaaccgcgtctctgctctgccagtcttggcccccgtcaggcagcggttcactccctcaccagggaagtctagatagatagatatagatagatatcgatcgatagatatagatatatatatagatagatagataggtagatatatggatagatatagatatttggatagatatgtagacgtctatctataaatatatcgatatatcggggttctcagccatcccaaagaagcttgcacagggccagttgctttatgtcaggaaaagggacacagactgagtgtatgagggttttttttttctatagatgtatagatatttatatcagatgcaaataagtgaaactctcatacaacttttaattttgtgttttttccaaactctattccattcaactttttctgcctttttatttgattataatgagacatcgtactggaggcaggcttgaaatggatatacagagcactttcaacccagaaatttgtctcacgacttggggtccttacttaagttgtagctgttagtaatttcatccatgaattcactttgtgccatagtgtgatgttttgttatgaagttggaattgggaagggaaactaggaagttttgggagaagttaagaaggttgagtaggcaggcgttgttatagatattaaatttcaccctgcttatcaaagtacctggagcgtatggtatccaagctgtaaatggcccaaaggaatcggggttctcagccatccaaaagaagcatgcacagggccagttattttatgtcaggaaaggggacacagactgagtgtatgagggtttttttttttgttttttttttttagtttaaacttgattttgtgaggggacgaacagcgtgacaattaaaagaagatctgggaatcgtaagtactgacagaatacctggagggaaggtgggactggagaatagtttgtgaaacagatcctgctgaggatgaatccagaacttcctgaagggttccgcttctgctgtgtagggacaaggttgtaaatagacaagccacaggcacctgcaaatggtaagtgtggtagagaggggctggaattgcctgttggtgtatctgtgggaagcagctgctatccttgaggaagaaaagatggagaaggtaagtggctatcaacctgtcagagacaacacattctgtgaagttgtactct

SEQ ID NO: 318639 - DNA, 4001 bp, Homo sapiens
aaaagattcttggctggggacggtggctcacgcctgtaatcccagcactttgggaggctgaggtgggaggatcacgaggtcaagagatcgagaccatcttggccaacatggtgaaacctcgtctctactaaaaatacaaaaattagccaggcgtggttgtgcacgcctgtagtcccagctactcgggaggctgaggcaggagaattgcttgaacccaggaagcagaggttgcagtgagctgagattatgccactgcactccagcctgggcaacagagggagactccatctcaaaaaaaaaaaaaatcattaaaatacagtaattcaggtttattaagtcattaccattgggttacctcacaaataaactaagtttagatgcgaactcaaagatactgagacactaatccatttcttaagctgctaagttagccttcttgaaacctcacttcgtagctctgcaaacaatgtacttttgacatcccaagctcacaggaataaaaaaccacctgccagttgtttccgttttccacctatgtctaatttatgtacttatatttataagaaacaaatcactaagtcttatttcatccttagttatgttgtgtttctatcgataacagcatgaagatttcggggacctggacattaaaataagtttgagtactggctttacaatctactaggtgtgatccgaggcaagtcagtctcttcatgtttcacttctttcacttgtaaacatctattcagaagttgctgtgaacttgatatttccatgcttataaactgattttttgaaaagagcctggtacataggacgtgataataaatgaaagcatttgctacttttggaaaaacaagcatgacaagatagtttatatactgttgatcttaagcacagtatatgcatcttatttttagctagtctgacagtgagataataaaaagagttatctttgacttgcactacgagtagaagaattcaacttcagtttctagaaagatgtataagaattaagagtggcagtcttcctagtctcaactgccatcttcccaccaggtggtaaattcgtccagagaagaaaatgaattattgctatatgggattctgcagcaacttctgtgaacataggctcataatttttcaccatggagactcaagctttttggagtcatagttgtttttgggtctatttgcaggcatgcatcctttgtccagaaatatacataacatttggcacatggacctggaggtaaaagaggaggaaggcctgaggctagacaccactccaataagtacattaagctcctagaagggcaatccacctttgcagagaactcttaactattaaaacctatagcttgtaaagcagcattttcaaagttaagagaagaaggtggaagggtcttgagaggctactgactaaacagatgaaaatgaaggtatggagtttggtgccaaaagaaactccccccaaaaatcaaacaataacaccagagtaaagcccctagggcgagataaggagttgcaacaaaacaagcggaaactcgagaagcgctaatgcttcaaagggtcaatgaccacacataatctacgtagccaacgtgttaaaacacaccaacgcatttttttttcctaaacaaagtaggaaagcggactttgcatgaggggcgggctgccgacccagcagtcttcctcggacagtccgtcctgattctctctggttggccgtggagggaccacatggctccaaggcctctcagctccgggcccacacaccccgggctgccgcacaaactccagccctagtctagatccacaaccccttctcgaagatcaaccgcgacctgggagccccacttcttaccatagcgaggccggcgatgccgcagccacatcacccttccggggctcaggcggaagaggctgcatgtcccgtctgcccttctcgccctctccagccgtccggttgggcttgtcacggcaccgcctaccaagacgggcggttaagacactaggataggctcctctccaccggaaaaggcgggatttagatcacgtcccgcaggccggcggaagtagctgatactctcattggttgcaaaaccttgatctgtgaaagcgggcgttttggaagataccggaagtagagtcacggagaggtaggatccggaagtggggctgcctctttaaataacaaaaatctgaggttctgttctttttatctttttgctttctttttaaaaaagttccctgctacttacccctagaactccacaatgcgagaatccccctcaatttgtgagctcccgcgacttcctcttgtgggcttttggggatgctagggttctcggcattatcctcagggtgcgacctgttcacccccttttcagtttctccgtttgcatctgagggattcttgggaatgcgaagcacttttgaaatgctctgtgttggttgtgggattgggaggacggttgaatccagagggtagtgttgagtaggctgtttgagcatttccccagcactggcctgtcctttcaatccccagatattggtaaactgtgggttccaaccaggcatcgaggctgaaacgtactaggcaatttgaggtcaggaaagaactttctgtggtaaccaatgggaaggaactgccgtttgcggactgcagcgattgattaggtactttaaagagatcaactggcaagacaaatgacaaggcaacttttaatcagtagtagtatttagctttttctgattttaattatcccattaggtgaggttctactacacacacacgtttttctttctgcattttatcgatggagaaacaggcgctttgacatgtttgaatttgcgtagttcttggaattctaataaagtattagaaatgagagtttttcactctttgcccccttatggcaagcttttggttctaaatgtgtggtgtattttttctcaggcaggagagagttcttttcagaatgttttcaattttttatggacttagaaggtggatagagagaaagagagaaggtaactcacgtgagattttggtttatgaactgtattcggcctatgagacccttttgtatttagggcaacacaatgattagaagatttgggattctgctatttgtgtttacattgttcactagggcacacaaaggttttgttttaaactataactaacttgatatttgagtctgttatattgaattgtcaagagttggtcaaatacacaaattagcaagtatttactgggtgcctgctttattcatggatcttcagattgcagcataggaacaaagatggtctgttcctttaaggaatttaataaggttgggggagaggggaataagaaaggtatttaaaagatacagtactctccacctaaggataaaaaaagtcttttaatgttctgtcttgtaattcctttatattataccttttaggtcttgccattcaaattaaacaaacctggtttagttatggaaattatgttgtgcaatttatcgagcttggcttttagggcagtaaatgtgtctgtagacataactgcccttggtttcatgtgaagattgtcttgatctttgttacatataaaggtaatacttctgtatgaagctctgcttcaggctacctgtgaaaagcatcagaaagcttaacttgttagagatcacaattgatttgctatatctatatattttaattaattttaggctatgacttcttatgtacctgagcttcaaaacagtaaagaacggcattgccagtttttaagttatctatagagaaacacatatgccaataaatgaggctgaacaaatatgtataatgtttattgcatttatgtaaaacatcaaagttaatctgacgtggtgagttttttttgggaggtggtagtttagctccattgtcttacataaaccccctactttttggttttcagattatatcacaatttctaaaatctttctggcagctttgcagtgaatcct

SEQ ID NO: 318640 - DNA, 4001 bp, Homo sapiens
ccaggcatggtgcctgtggtcccagctacttggtaggctgaggtgggaggattgcttgagcccaggagctggaggttgcagtgagccaagatcacgccactactctccagcctgggcaacagagtgagaccctgccaaaaacaaaacaaaacaaaacaaaatggttcttgggttctcaacaagcacagactggtgacccagttgcttggatctgggatgaccctggaaagtgttgcacagcaggtcaacaggagctcaattttcagagtggacaggtacccaaaggctggtgtggcctctcactcaccctcctccatggtgtcacctacttccacaaagaggttgagactcagttaaaaaacaagcagccaataaaactgctagttataaagcacaaaatgggtggaaggggggaacttggctttgaaagaatagtataagtggaatcaagtgagaaagcaccttccagaaaatcacccaagccctgtacttcaggggtataatatattaaatatgccaagtggttgttaaagagttgtctagcttacacagagctgacctaattatctcgttatcttattttactccaatgaatgggatattttaccaggaccccgtaagtcaggtcctgcaattgcaaagacaatccaaaatcgtgaagactattttcacctgcccaaggaaagaaaacttttaaaatattttgtgccgctcacatccatggtcccatgaaggaactcaagactgaggccctaagcccaagatgatcttgacaaaccaaaatcacactgagggaaggtcagtttaggtaaagaaagcaaacaggcaatcttacactgggaaaaacttttccaggaaaaagtatgatagaatcagaaggaagttggagaaaaaaaggaaatataggagggaaaaaagctttcatttcaaacttggaaaaacttgatatacagatgcagttaagctgagacaaagcattgcactaattttttaatcttcccattttttattaagtcagtaacatcctgcagtgaataagaatttcatattgagtatacagtagtcctcatttatcctacagggagtacattccaaaactctcagtggaatgaaacgatggagagtcctgaaacctatatatattggttttttgttattgttgttgttttaatttttttcctgaatcatgcaatctcttttgcggtttcggagacaagaaagagaagggtgattctcggctgcaaagtcctatcaggaattcatttattcccagtatagtcaactttgcagtgagtcacaaggcttcaactgtcttaaggcaaattcccaaacaccagtaaatagaagcccaaaactgaatctgtagtttcttgtccgtggactagtggacggagcacctggctgagtgttcacctctgatccataatagtgtggaaatactctctctctctccttctcccacagatgcactcacaaacggatacaaagacacccacattcactcgcaatgaaaccttttccaaacaccaccctacacttaaactccccaaagccaaactcccctctccaacactcctattggttttccaaaagacatttccaaaattcacagcacctctccacgtccaaagctatggtgcgtttggggaacgaaacgagaggcaaatgccttctgtgcgaaatcggtttgcggcttttagggagcccgagcgcaagcaacagccggaggggctcgcagggacgcaggttgggctcggatacccagcgcctccgcgctgccgcggctccccgcgcccagcctggccgcacagctcagcgcccgacccgccgccgccggcgcaggcgcgcgggccggggcagcttacctgaagctgggtccggcgcctggctgaccgcgctgctgtgggcactggctgggcgcggcgtccgcctccgcacgcggcctcggctgcgccggccgccctgcaccctacccaccgcgcgtcctggtgcggagggcggacccggcagtatttagagaaggaggcggtgctgcgcgggcgcggcggcccggggagggcagggcagggcagtgcaggagcgaccggtgggagctggccgccactgggggcccggggcgcgcccgcgagggaatggagagccaggggcggcttcggaacccagggctggcgggtttggcagcctccgcgctcgtggccgtgcgcgcgaggaatctgggagaaatgggcaccttccacggctgcctggcccgcacacctggcggggccggcgagttgagatgcccccgccggctggcggaactgtgcgccccgcccgccgaggcccgctccccctcgaggcctgaggcccagttctataggggcgcgagagagcggcggcgtggggggcgcggaggaagcgccggcccccgcctccaccgcctccttcgtggttgcggcccaggccgaacagggtaccgtgccccggccgccttggccttggccaccgcgaggtccggggcgactacacccagcagccctgtggccctcctactgctctggagacctggagtggggttacagagggaagcgactcgctgcgagctccccatcgaatatggagccaccaggtcacgggacgacgtgcgctctacagaatgtgagacaagggccctccacacccagccattcaggcctgaggtcctggctccgagactgaggccgagacgcggcaagccccgcgccggaccagctctgcccctcccgcacccacgtgtctgcgcacagccctcctttgcgatagaacccccttcctggttctccaccactaatgatctgccggaattaaactggtaactttccctgcccttgaaccgggagtttcgggatgagtttgccaatccctgtgctatttgtaaccagccccgtgacacgtgatacggatccaactgtgctagtttccacaccaggggtcagggcacggtggaaggtgagtcaagggttctctgcccaagcgcagaggtgccctgagccacggggacttcccagccctgccttctcttctcagcttcctgtctgccttgcctgaaaccctatctagagttaaggccaatggatgaaacttttcaatgtgcaagcaagcactttacctacctgatacaacaagagattcctggtcatgctcactgaaggtaaagtatgaagcaggcttagctaatcatcagaggtgagaagagacttaaagaaccagtcagagaggtaaagaggggagggggttacctgggctttagggttcaccagggaggcagaacggacaagttcttgccattggaatttggtggggcacttgcctgggtggccaaaggtggactttttcatagccagggtgcccgacctctgtaaatccccgccataactaacagccctgattactgtcgaaatgaacaatgccaacactcacgaccccttgctttgtggttctttgctacatctctccagcagttcagaaaaggttggaggcagcaggggacaggagactgagaaaaacagtcatttgtcagttgaggaaactgaggtccaggctgacagaggtaaagtaacctctgcagctggttgacatgcagagaaggcctgagccagatgcagatgcgctgaccattcagtgtttctcccgcagcacacctgtcactcagagaacacaccatgctgtgaacccagaaaacgccctcatggccttgtgatgccaagcacgtttagattattataacaatacaggcactgtgtcccaaggacattgcagtaatctatgtttggggtggagatatccttcctggtccaagtgtcaaggtataccaccttctggaagggcaccaaagcatgtccagcgaatgggcagatacccaagagtggattgtacaacagcaggcactggctttctaagaactcaggccctcattataggatttgtcccctctgacacaggcctgtgaacaactcttcattgtgcaaaagggtttccttgtc

SEQ ID NO: 318641 - DNA, 4001 bp, Homo sapiens
ttgggaggctaaggcaggcggatcacttgaggtcaggagtttgtaccggcctggccaatacggtgaaaccctgtctctactaaaaatacaaaaattagccgggcgttgtggtgggtgcctataatcccagctactcgggaacctgagccaggataatcacttgaacttggaaggaggaggttgcagtagccgagatggtaccactgcactctagcctgggcgacagagggagattccttctcaaaaagaaaaaaaaagaattcacaagtgaccttgggcaagtcacttaatggctctaagccccatattcctttctgcaaactaggcatcatagcaacatccttcatgccttgggattaaaggatttggtagacatgaaaatgctttgaaaaatatagtgagttctgtgtgtttagaaacacaagaggctgtgtgtcttagtgtctgttttgtagatcgagaaatgggggcagagaggatggcccacctggcaggatcagccgcagatatccgatgtaatatgaccatgccagcccatgggccacgttgaaattccctttttcacacactgcagagatctcagctggggccaggccctgtggacagcaggatgtggctggggggcctccatcaaggacacccagagaactcctcctcctcctccaaggcttcccaacctgctcctgacttgatccctcttttgccattgccaaacccactgttccaggacattataggttctactccatggactccagcctttaaaccagtcccactcccagtactcagctcagggcaggtcacaccagccacagccaccacttggccagagcttctacctccccctgtgtcataccttgaggcccaggaggatgttcagtgcctgcgagaggcccaggagggcaagcatccaagtgaagggcgggccgaccgcatttgggagggagtagtagaaatagatggacagcagcaacagggccccacggcggagggggcagcccaggcaggcccgcacagtcctccagtagctgccccggtacctgtgagtgacagccagaccccagaccccagcccccagcccagctcagccagagaggttcaaggaggggcagggctaggcatcaagggagtgacacacgttggataccccgtccctgggtactgcagtgagtcacctggagtggatgtggcgcagctcctcagccaggctgcagaccccgtttaacagcagtcccagctgcagggaggctaggtggagcaccaggtaccggagagtgtgctctggtggctctcctagcccccaaagggtcaccaggcaggcactcagcagaaccaaggctgccttctgggccccgtgacccctgggacacgggatggatggatgcaggctggagtggggcatctgtgggcaccaagaaatccatgaccattctccccttgccctcctgcccttctgggactgaggctctggctgggcacttcctcccagttcccctttccctggtgcccagccactcccagaggctgctcttagagacacctctaggaggcaggctgggaataagtcaccccaaagctcctgtctcagcgaggtttgctgaaaacagagcagggcctgcacatacacgccccaccaagacccagggagaccacaggtgtggtgaagaaagaaggcagcaactatcccagacccagacttgaagctgtcctgtgcagccgtacccaaccaagaacccttggggacctgggttcccctgtccccggaacccaccccagggaggaccttagtcaacaaagtggaaaacagagctcagggagtggggacagggcagccagcaggcaccccctcgcctctgggtgccaggggccctaggtttggcgttctgccaggctgatcttgagcctaccttctgcctcccggacactggctgctctggatgatgacgaggagagaaggcccggcgctacgagcagccaagggcagcttctctgagtgcagcctgaaaatgagatgttaacaacgattggtttctccacaacactctagccctggcgtttctccaaaccgcagctttactggtgctgggaaggagggtatttcctgttcctcaggaagggaggtaggaaccttccctcaaagccctgatgagctgggcctgagtcctggggtcaggggtgaggtttgagaaagcctccattccattgccctttgctacccccaaaccaagggtgtttagaaacactcaccgcagtcacagctctgaacagcgggttcccctcaagccaccacgatcaaacacactgtacctaacacctgagcaggactccacacactcagccaaaggcagcacacacatcacacgatgattccccgtctcatatttttcttctggtttccaggatgcagattctttttctgaaaagtgtgacctaggagggaggagtgaaaaatgaacagttatttccggtaacaagagctatttttataaagcacttggtgggagaggaggggcacagaggaatgggggtttggctctttgcaggaaatggccacgcctgtgacttctccaagagagcctgccggtttctgcccagaaggcggttgtggggatgatattaggtaggagcaaaagtaattgcaggcctggcacagtggctcatgcctgtaatcccagcgctttgggaggccgagatgggtggatcacttgaggtcaggagttcaagaccagcctgagcaacatggtgaaaccccatctctactaaaaacaaaaattagccaggcgtggtggtgggcgcttgtaatcttagctacttgggaggctgaggcaggagaatcgctggaacctgagaggtggaagttgcagtgagcagagattaggccactgcactccagcctgggcaacaagagcgagactgtctcaaaagaaaagaaaagaaaagaaaagaaaaatgatctgacctacattgtttgagtgtaggttataaaatccccatgcatcaacctaaattataataataataataataataaagtgtttaccttgttccagacattatgccaagtgttgcatatatcacttcacttgtatatcatttcaccagccaccctgtcaggtaggtataattctagccccattttatagatggataatccgaggctcagggaggtgaaataactggtttaagtaattgagagtggggacttgaagcctggtgggttgctccaaagcccagcttgctctgtgccttgatttcattccagtaatcccagcactttgggaggccaaggcaggaggatcacttgagcccagaagtttgagaccagcctaagcaacacagggagatcccatctctacaaaaaaaaaaaaaaaaaattagccaagcatgacggaacacgcctatagtcccagctacttgggaggctgaggtgggagcatcacttgacccctggaggtagaggttgcagtgagttgtgatggcaccactgcactccagcctaagtgacagagtgataccctatctcaaaaaaaaaaaaaaaaaaataggccaggcgcaatggctcatccttgtaatcctcgcactttgggaggccaaggcaaatggatcacttgaggtcaggagttcgagaccagcctggccaacatagtgaaaccccatctctactaaaagtacaaaaaattcgctgggcgtggtggcgggtgcctataatcccagctactcaggaggctgaggcaggagaatcgcttgaacccaggaggcggagcttgcggtgagccgagatcatgccactgcactccagcctcggcaacaagagtcaaactccatctcaaaaaaaaaaaaaaaaaaggccgggtgcagtggctcactcctataatcccagcaatttgggaggccaaggcaggcagatcacctgaggtcaggagttcaagaccatcctgaccaacatggagaaaccccatctctactaaaaatacaaaaaattagctgggcgtgatggcgca

SEQ ID NO: 318642 - DNA, 4001 bp, Homo sapiens
tggcaggatcagccgcagatatccgatgtaatatgaccatgccagcccatgggccacgttgaaattccctttttcacacactgcagagatctcagctggggccaggccctgtggacagcaggatgtggctggggggcctccatcaaggacacccagagaactcctcctcctcctccaaggcttcccaacctgctcctgacttgatccctcttttgccattgccaaacccactgttccaggacattataggttctactccatggactccagcctttaaaccagtcccactcccagtactcagctcagggcaggtcacaccagccacagccaccacttggccagagcttctacctccccctgtgtcataccttgaggcccaggaggatgttcagtgcctgcgagaggcccaggagggcaagcatccaagtgaagggcgggccgaccgcatttgggagggagtagtagaaatagatggacagcagcaacagggccccacggcggagggggcagcccaggcaggcccgcacagtcctccagtagctgccccggtacctgtgagtgacagccagaccccagaccccagcccccagcccagctcagccagagaggttcaaggaggggcagggctaggcatcaagggagtgacacacgttggataccccgtccctgggtactgcagtgagtcacctggagtggatgtggcgcagctcctcagccaggctgcagaccccgtttaacagcagtcccagctgcagggaggctaggtggagcaccaggtaccggagagtgtgctctggtggctctcctagcccccaaagggtcaccaggcaggcactcagcagaaccaaggctgccttctgggccccgtgacccctgggacacgggatggatggatgcaggctggagtggggcatctgtgggcaccaagaaatccatgaccattctccccttgccctcctgcccttctgggactgaggctctggctgggcacttcctcccagttcccctttccctggtgcccagccactcccagaggctgctcttagagacacctctaggaggcaggctgggaataagtcaccccaaagctcctgtctcagcgaggtttgctgaaaacagagcagggcctgcacatacacgccccaccaagacccagggagaccacaggtgtggtgaagaaagaaggcagcaactatcccagacccagacttgaagctgtcctgtgcagccgtacccaaccaagaacccttggggacctgggttcccctgtccccggaacccaccccagggaggaccttagtcaacaaagtggaaaacagagctcagggagtggggacagggcagccagcaggcaccccctcgcctctgggtgccaggggccctaggtttggcgttctgccaggctgatcttgagcctaccttctgcctcccggacactggctgctctggatgatgacgaggagagaaggcccggcgctacgagcagccaagggcagcttctctgagtgcagcctgaaaatgagatgttaacaacgattggtttctccacaacactctagccctggcgtttctccaaaccgcagctttactggtgctgggaaggagggtatttcctgttcctcaggaagggaggtaggaaccttccctcaaagccctgatgagctgggcctgagtcctggggtcaggggtgaggtttgagaaagcctccattccattgccctttgctacccccaaaccaagggtgtttagaaacactcaccgcagtcacagctctgaacagcgggttcccctcaagccaccacgatcaaacacactgtacctaacacctgagcaggactccacacactcagccaaaggcagcacacacatcacacgatgattccccgtctcatatttttcttctggtttccaggatgcagattctttttctgaaaagtgtgacctaggagggaggagtgaaaaatgaacagttatttccggtaacaagagctatttttataaagcacttggtgggagaggaggggcacagaggaatgggggtttggctctttgcaggaaatggccacgcctgtgacttctccaagagagcctgccggtttctgcccagaaggcggttgtggggatgatattaggtaggagcaaaagtaattgcaggcctggcacagtggctcatgcctgtaatcccagcgctttgggaggccgagatgggtggatcacttgaggtcaggagttcaagaccagcctgagcaacatggtgaaaccccatctctactaaaaacaaaaattagccaggcgtggtggtgggcgcttgtaatcttagctacttgggaggctgaggcaggagaatcgctggaacctgagaggtggaagttgcagtgagcagagattaggccactgcactccagcctgggcaacaagagcgagactgtctcaaaagaaaagaaaagaaaagaaaagaaaaatgatctgacctacattgtttgagtgtaggttataaaatccccatgcatcaacctaaattataataataataataataataaagtgtttaccttgttccagacattatgccaagtgttgcatatatcacttcacttgtatatcatttcaccagccaccctgtcaggtaggtataattctagccccattttatagatggataatccgaggctcagggaggtgaaataactggtttaagtaattgagagtggggacttgaagcctggtgggttgctccaaagcccagcttgctctgtgccttgatttcattccagtaatcccagcactttgggaggccaaggcaggaggatcacttgagcccagaagtttgagaccagcctaagcaacacagggagatcccatctctacaaaaaaaaaaaaaaaaaattagccaagcatgacggaacacgcctatagtcccagctacttgggaggctgaggtgggagcatcacttgacccctggaggtagaggttgcagtgagttgtgatggcaccactgcactccagcctaagtgacagagtgataccctatctcaaaaaaaaaaaaaaaaaaataggccaggcgcaatggctcatccttgtaatcctcgcactttgggaggccaaggcaaatggatcacttgaggtcaggagttcgagaccagcctggccaacatagtgaaaccccatctctactaaaagtacaaaaaattcgctgggcgtggtggcgggtgcctataatcccagctactcaggaggctgaggcaggagaatcgcttgaacccaggaggcggagcttgcggtgagccgagatcatgccactgcactccagcctcggcaacaagagtcaaactccatctcaaaaaaaaaaaaaaaaaaggccgggtgcagtggctcactcctataatcccagcaatttgggaggccaaggcaggcagatcacctgaggtcaggagttcaagaccatcctgaccaacatggagaaaccccatctctactaaaaatacaaaaaattagctgggcgtgatggcgcatgcctgtaatcccagcttcttgggaggctgaggcaggagaactgcttgaacctgggaggcggaggttgcactgagccgagatcgtgccattgcactccagcctgggcgacaagagcaaaactccgtctcaaaaaaaaaaaaaagagaagaaagaaagaaaaagagagagagagaaaggaaggaagggaagggaagggaagggaagggaaggtctgacctacattgtttgagtgtagattataaaatcccccttccagagagggccctgccccacactcagaaagaaggaacacacgctcagagaggccaagaagaatctagacagacgggcgaggctgggtttccccactcattctattagcattagagcataccctttctgtccaattatatttcaacaagggtgtccatactttaatgaacctaaacgtaaaaatagacaatttgccctctgtctttgggtcttcattctgaaggcctctgtgaca

SEQ ID NO: 318643 - DNA, 4001 bp, Homo sapiens
taaagtctgtgagtcagttccagttgtttattacacagccaaattcagagagattaaggacaccaaagtttttttaatgaagaagatgagtttcttttagtcataaagattgtttctatcatatcattccccatgtgttgacatggcaactctgctctgtcttgctccacagacctacgggtacttagggaagtcctgtgttctgtcagccactggtcccagctagttcatgcttggcgcaggccccagcctggggtggaccaagagcccacccatgttcatcacacgtcaagcttcaaccttgcagaagagaacagcagcagccaagggtcactgtgactcagtgatcgggaaggatgtattcacagcgctatcctattatggtctattttgtgtaatttagtcaggtatccaatactattctagcaggagacatgatttattttatttcattggtttgatgtttttgttttgttttgttttatagtctttaaggtacccagagtcctcagagaggccagatggcagctgagttgtttgggattagtgagtctgctttggggccaaggacagccaccaggaaatctccagctgggcctgctttctcttccctgcttccttcccacccgactctcacctctgtggaaactcccaaagtctcagaagtcgtgatttttccattggctgctggggttaaaattgagccaccaatgccttcctacagagaagggggagggtggtggatgaaaaagtgaaattcctgctcctgaaccttatacaggagatttcttacccgagggaatttgaaactgttccggaggagaatttccccagcccagcctaatttttaccaatctgagaaattgcacctcccacttcccctttccccccttgaatgatctctgtcaggctgcctgggcgctgctgtaacttctgaaggttacaacatagaacaccacggttgtcaggtaacaatgacggaaacacttgctccctgagctgagcattgtgttattatatcagaatagcctctagcgagggagagagtatatttcttcataagggggaggagagaagcaggcacaggcctcctcttccagctgtgtctcttctagctggtcaacatcaggattgggcctgaaatgtgagcagaaaacacaggtacattatggtccaaagcaccattcacagaaccaaggctgccatcgtgggcaacaggctaagaagagattcacagtctcccaacaccttattcatggaccaaacagccacagatcatgacggagatggctagaaggagtgcattcccccagtagacacgccatacctgtgatttccaccgtccgtgaaagaaaggcagccctcatcaaccacaaatgcagagttatcttgagggtagatggtgtagtattgaggaggacttgacatggcggctgctgcccctccagaggttatgaggccgcaggggctcaccacagactgcaggtagctggtatttatccccataggctctggagaaccataaggaggagggatgtactgcaccacagtggccccatggaaggtgatgggttggttgatgccagtgaaaacaaatgatggtcctcctggtgtctgttccgagtccgggaccctttcctcactttctttgcacaactggcaggagagcattttgaacttgcacacagcaatcaggatgaatgtcaccccaactgacagcaggacgggcccaaggagctgggtccattcaaagtgggagacaccttggtatttgatccagcccatgacagtgaatgtgatccccaccagtcccagaaagatgcctgagaagagcaaggtggcccccgccttgtcatcatcggacacctggatgtcagcggtgctgggtgtgtaaggagtgacggagaacacattgacagggaagtcctccaagcggccgctgccctgctccattgctccttgtgggctcaccctgcttcttagagtggagaggattgtgagaaccaaggaatcacaggtccaaattagttatagaagaacttagggcttgtgcttaacagggtgtaacacacagagggctggaccttgtttagaagaataaaggtctgagaaatgaagcctgaagttttctcatgtattgtcaacaagtggaggtctctgttttgcaagtcaatgacaagctgtctctctaattcacattcattcattcacacattcaaaaattaacttattgagcccatctttctctttctttttcttttcttttcttttttttgttttgttttgtttttttagggtgtgggtctcactctgtcacccagctggaatgcagtggcacaatgatagctcactgcagcctcaacctcctgggtcaagcgatcctcccacctcatcctctccagtagccaggactacaggcacacatcacaatgctcagccaatttttaaaattttttgtagagatagggtctcattatgttgaccaggctggtctcaaaactcctggactcaagtgctcctcctgccttggccccaggaggtactcttctatagcaatttaagacgctgccataagaccctgtttttgtcctacccaactttgtagaaatggcagagctccctcaagggtctccagcagtgaatggggcccttgatatatccacacatgcacaggagtctaacctgatttacctagtggttcagttcattaggaatagacagacacctatttcttgactgcgtgtgtattcctatctacttcaagaacccctagctgtgatgatacttaaactttaataacagttctcacaaagccctgagatcctgttcttttctggccagccccacatgccttttgctttctgcgtttggggagtaattccagctttgggagaggaacaacgtcataggaaacctttttatgcactgcatcactgccagtggttgaataagcatcagatatgacctggctcactaggacacatgcttcggaccctccctccatggtggccacacagttcctggtcttcaaggtgaaacaaccagctgtgttttggaacctactatgttttacaaccaaacccaagttgatgtagagaagacagtttaattttcaataacattatctgtcattcatgactgcaaaacttccaaacagccccatgagtttcttcctccactgattaataactgtagccttctttccttcctagacagattttattcaagccgatgctctctgcagtaattaaatattatattagctccttttgcagaattgagagggctgccgtcttgccctaaggcagggcttcctaaacttcccttgacaaagaaatcacatgggccacttttttaaaggacaaaatgtgagctcccatttcagaccaacagaaccaaatatccaagggaaggacctcaggtgattcatcatcaagaaatcttaggaaacccaaccccaggttaaccttaaatgcttctaggagaccaaaggacatttttccccatgaaaatgcctctccctgctacaggacaaggcttgtaatctcctacttcactgccaaacagatggaaaagcaagcaggtgacccctgaggtatcttcctggatgtgccttggagcagcaaggctggagtggagttgctataggaacaggctgccctttttcccactgagctagatcagagatccaggaaagccagattttctctttaactataaatttctggtaagttagcctgccattattttcaggttcttaactcctaagttaacagtcaaaacaatccctgacatttagaaaaaagctaggatctcaaaactgtcttctaaatcactcaatttatgttttccatttgcctttagctatatccactaagaataactgggaagcctgagagagtagaggaaacagatcaccctcctttagacagctcatgaatgcaaactggaactgctttcagagcagaaagatcagaaagttctccaattacattttcaag

SEQ ID NO: 318644 - DNA, 4001 bp, Homo sapiens
tgcagaaaggaactctaaaaaagaaatcaattatcttttatttattcattcaccagataggtatagagcacctgctacataataaatattataatgttaaaaatatggtttcaacaaaaaaacttgccatgttatagtaagaagctagtaatcctaaagtcgatatagatttagcaagtgatttattatattactgttgaaaacgcaatgaaagtaataggaataaaataatttactaaggtggtatattttttaaagagatttgttttctttggtattgtaatgaatcagcaggaaacattttaaagaaatgaattcatttggttttatggaaatataagcaaaaataaaaagtgtgatatatagtttagaacattaatttctaaaatacattctgtaaaatactgcttcttgggatgaaactacctcgaaaagctttctgttgtgaaatgtttgagaaaccactggattagacaaaaataagtaggtttgcatatactaagatttctcagtgttaatattctcatatatactctacatctctctgagtagcagtgtgacatgtagtactttaaaatttattgactaaagaaatctttagaacatcatctcctagaactacatacaggacacattttggaaaatgttaagcatttgtgagcagacactttaccaggagctctggatggacaatgaacttcaagacaggaacatttatcaaatttatcataacaatgaatgattctgataatgaatcagacgttcagcaagaatatagcactactcattaagatcataagggtccatgcagaataggtcttagtgaaataaaaatctgctaccttcaatcaagtatgtatgtggattacccaaaccaagaatgtttatactttaaagagaaatgtttcagctcatgaaatggctccagcagtctgcctgggtgcttggcagttcatctgcaacctggcacagacccagatttctttttttagttttactattaattcttcatgtatttttttaaagttccaataaaaatgaggttgaaactgtatactttaaaagacaatttctgaaaaacagataatattaaaattatatcaagactttggaaaggtaacatgcattagagaatataagatttagactctaacctgaggaagcaaattatttgaccaaccaaatgatagaatttgttcagacatactgttaagatggtaaggtaaataagagactcttactacagtcttatcccctcctagaaatttttctaatagacaacttggatatttttctcaagattaacggcttttaaaaattgttttattacacatctccaatatacccccctctctctttcacacacacacacacacacacacacacacacagagcgccaaatttttgaaccttctcttttgaagtccaagagtcttcatactaaataaataataaataaataaaaatcaaaaaggtgcaatttcaccaaccacagaggatgtgtgaagactggtcttctgaattcaaggttgccccaggataagcgagtccaggggagattaaatgaatttccctattcatagcaataagaaagttcccacctcctttattctccccaacaaaaaagcttcccctatcaaacgacctggtggcttttccaggatggactgcttagactcttaggaggggcccagatagcaggcccagcctggggttgcgagtagtgtttcttctaacaaagctatggcaccctgagaaaggaggctcagtattcccctgtgaggatctttgtgggtctttcagttgccctaggatggtgaatatgacaataacctgagctcccaaatcatctgaagcaggacctcttaatcactcaccgctgcgctctgagccgctgggaaccaaggctggttgctaaggacgctgtgggagtcgctctgagacagacgttgctcttttacggtctcgtgaccagggcttagccaatcaggacttataagtgaatttccacctgccctgtcccgtctccaccacatttgtgttcaatttctaaagaataaatgcaatgttgtgtgaaagacctttattcgtttttaaagaacatagtaatgatttgtttcgaatattgtacatacttgcatatcctgcaagaagccacggcaagaagcggcttcacagtgctttaatgtctcctcagtgtcttaatgctgcttccccaaaacaaaccagcacgcctatcataccaaaagtagctatgtctttaaattaaattgccgttcgtaagttccttttacatagaaaatttggagcagtcagtgtcctcagcacccgtcagtgagtaaacaaagcacctagaatgttctgctatgtactaaacaccagagggcgaatttaaacacaaaagaacgcctctttttaaaggtagtatgcaatagaattatctaatataagtcctttaaaaatccttgtagaattcctatgtctactaacgagcaactgtatatattttacaaaggttcaccagtgtaaaatactatatggaagaatggggaagggcatttatgattaaattcatacgtaggccgggcgcagtggctcatgcctgttatcccagcactttgggaggccaaggtgggcggatcacgaggtcaggagttcgagaccatcctggctaacatggtgaaacccgtctctactaaaaatacaaaagttagccaggcgtggtggcacccacctataatcccagctactcaggaggctgaggcaggagaattgcttgaacccaggagatggaggttgcagtgagccgagatcatgccactgcaccccagcctgggaaacagagcgagattccatctaaagaaaaaaaaaatactaaaacgtaatatacagggattgtcctgtgaaatgacctgcctttaaaaattagaactttgaaagaaaatttaacttgaactacttcgattcggaattaagtttttttgttttttgagtgcatttttatgtttaaaacagaaattacaatatgtgatctcaggcttctctgacgtatcactcctagaagatcagtaagttaaaggtaataatgaaaagtgaaattgacaaagactataaactacatatgtgagagaacaaatcctagaatatcaacagtgcttaccataatccagataaaataaaaatgaaaagactgtggtatttaataatagcctgggggcttgcttgttttaatttcaagagatctagaaaagtgttaaaagcataaaaaaatacaaactgttaaccaggttattcataatcaaatgaagattgaattaaaaaggaataaaaggaaggccgaataaaaaattcttctccataatataagaatcagttgaaactatagcatgtttagagaaaaaaagtcaccccatcgattctacagtgaagacaacagaacaagtttatataaggaagaattcacaaatacatatatatatatattacacatatctacttattctaaatatatctactgattttatatatgtatctactgattttatttatatatatatcagtagaatgaaagattacagaaaaagcataaaatttatatatgataaatttgccattttaactcagtggggaaaaactgtacagaggctgagcacaatttgaaagaaaataaatctgaactactatctcataccatagcaacaataaatctcagaggaatgaagcttaaaacaggaaataattttaaataattttaagataatattggtataaccttagagtcacaataatattaagctaataggagacccacaatgattttaaaaaatgacaagaatatttagaaaatttatgtaagaaaaataaatctaataaagtcatacctcccctttctccctttaattagtcatctacattgaagttttgacaagacaaatctaattttttcaaattattatatatatacctatatatatataatcctaaaatggccattaattagc

SEQ ID NO: 318645 - DNA, 4001 bp, Homo sapiens
actttatttactcagattacaagtaaaaactgaaaagatgggcagtgaatgccagaggcaattaatgtgtatggaggacaaaaggcatccaaaaaatctgcaaaaaagcaaattgtgttactagctagaatattaacaattacttgtgggcccctgtagtcccagttactcaggaggctgaggcaggaggatcacttgagcccaggagttcaagaccaccttggacaacatagcaagaccctgtctctaaaaacaacaacaaccatagcttgctgacttaactgctcatgacagatctaattagacggtggcaataaacgtgtctaagtgtttcatcaaacgtgataattatttctttccttaaagagagatggagtcatatgtttacactgcaaagtataatgtttccttagttaaaacagtgtggaaacacttctgtgtaatacaggattcaaaccaggataaaaatatcggctgcgataagcagcacttacagtgatttatcaactcttacctttcatgtgccaatgcacaatggcttcttaaagcctaccctttttggttatttcctttggccacacagctttgttatccttaccctcgaagaataatttctactcagaatgtgattttgaacatttcataaatggattattatcaaggaagtaggagaatattttactttcatagcaagaaagtagcaagaataaactgaaatgtagaactcagagagactattaaaattagataggaccccagcaaccaggcaatcattttatagatgaagaaactatttgtacaatactgctgttatgataccatagcttccaattaactttttaaatgtagaaatatgtcctgcattgagggagtactgacccccacctccccccataaaaataattatgtagggatggaattatcagtcttaagcaatccaaggattttcttgtttcaacactgggcactgaactactgtttgattccttccatgattcctctagggatactgctttttctacttagagcttctgtgttttcgaaaatctgttggtttagaaatacagtgtcactgaagcaataaacatattcaaggtgcctaagcctgttgggtcagcctggtcttgaacgtgcctatcagtcgcgaggagtccgtggagcctgggcgctcatcaggtgtctttgcagcaggtgctgagggctccagtgcgacatgtgcagtcatgtacacacacacacatacacacacacacacacattttcttcctcaaaggaagtctccaccgaatgatctcaaagcagggctctggtctctgcccgttttacaatgcaaggttggattacaatctcaggccagcatctcagtctgcaatctggggcaccctgataacccgggcagtgctttcgccagtatgtgcggttacaggaggacgtgacaaatagcgggaacccagttacaaagggagggaaggaatgaggctcacggcaggaggtggttaagaggtcgccctgaataggtaagggttcctaaaaggggtcttggatcctcagtgcggcactggaaccgagtaaaatttcgcggagtttccgaggctgtgcgctcctgcacacactcgtacgcacacccacctaaacaagttgttcaaacgcacccactcacactcactcacactcgcttcagaaactctctgagccggaggcgctccccgagagcagcccgcagcccagcggcgggagaggcgcgctggagtgtgcgcgggacgggcgcgcccaggagccacttactcggaggagtggcgcgacggcgccgggacgctgaagcgcgagctgggctgtttggcggcgccgagttctctgctctctcggtggctcacgggttcccgcggaccttagccaagcgcgggttagagccggcgggagaaaaggaggcagaggccaggggcggaacttgcaggagggaccaagggtgtggcgggcaggccggggaggagccgggaggtcgggggcggagcgtgcagggaaggaggagccgagcggctggggcggggcatggcggggcggagtgggtgaggaggagctggggaccggacagcaggagtcggaagtggcccaggcgcaggagagcgcggagaagggctgggcggcggcccgggagccggactcggaccgcgaggcccagatcgctgggcgctggagaacaggaccctcttgggagatgtgcataggatacggtattcctgagcctctcagtttcttccgttgtaaaaatgagacgccaacctcgtagtgtgttgagatggttaaatggggccatacacatttgcactgtgccttgcacttaacaagaacgcgtgaatgttagtgtctgctgccatcattattgactattatgatgatgatccgtgaaagcccctgaattccgcctgctcttttgcttttaattttctgcgggccttaagtctaccctacgatagctgacgcgctcccgattcctggtttccatttgcggagaatgcagggcttcctcttggagttaaagactcattggctcctggaaagccctcgctctctgccgccccccgcggacttagctgtgactgtccttgcctgtggagcagaaggcttgccctcctcaggggccacccgagaccgccaggatggagtaggatctggaccttcagtctgttgaggagccctggcccggggtagccattttcaagggcgagggaccttggtgggagtacgatgaatccatccatacaataaacatccattaagcacctagtacatggcagcggggggcagagggctggaaatattaataatactagtaaaacttaatatgtgtaggtcaccgttctactccttacaacaatctatgatatagatcctgtcgctatccctgttttacaaagggaaagggagacatcgtgaagtaaatagccttcccaaagaaagttacacgtttgggaaatggctgagtttggcttggagagaggaaagtaaactcttgataggtgaaatagacaaaatcacaacacatttgggtttaatgcaaaagatagaaacatacacaaggtacggaggtttttaaaagaggaccttgtcctgtggttataactttggggaagggcgtcagggagatcttcctggtgtaggtgatgtctgagctgggtttggaagaagaaatgggagcttcaaaggcagcttataagtgaagaagaatcacagtaaactttttcaagcctgaataaggatggaggagaagtggaatggtggccggaataaagctaaaacagtaaaacaggaccaaactcaagggctgttttcctatagaaactaaacaacattaatttgacctttgattggtaggaagccagaagggttttaagcacaggagatatgtcaggtgtggttctagaaagtttaatctggaaacatagaagatcccagaaccaagaaacttgcttaggaaatattgaaatatgtcggtgagatacttcagtaggcagaatgagtagagttacagaaagaggtccacttcttaatccctggaacctgtaaatatgttatcttacatggcaaaagaatttttgcaggtgttaccttctcattcggtcatgggaaaaaaaagaataaagaaattttgcaggtgtgattaagattgatgccattgagatgggggattatcctggattatttcagtgagcccaatctaatcacatgaatcccctaaaatggaagaagagtgggtcaaagagattcaaagtgtgagagggactcaacctgaaccacgaaccaaggactgtggataacctccaggagctgggaaaggaccttagctgacagccaacaaaaaattcactttctttatctggtctagacttgtttttcttccacagtcctacaacagcagaaactgaattctgccaataacctaaatgagcaaggaaatggatcctcccttagagtcttcagaaagtgattgagctctactgaca

SEQ ID NO: 318646 - DNA, 4001 bp, Homo sapiens
acctgttctctgttaggagtaaatgaaaccctttgcttttgcgaagttagaaacagacaaactcttctcagtttcaagctgcacaaggaccccctcatatctttcagccccctcaaacccccaacgaaatgaactcactgctgaaaacccagcaatgaaaaaaaattaatctatttctcaaatacagattttcgcttcccctcactcagcttccccttttagccggaaacatatagcgtttctaatttctcaaaccccttttcaagggaccctccactcagggctcttccagggatcccgctttcagtctttctgatgcaggcaggcagcccttttccaagcacattttgcattcttggagtccaagtggggctctttcgtttccagagaaagctaaaaagcagacttagtgggctggctgaactaggtccgacttttcctcccctcccctctgaacggctgcggggggagaagggagcccaagatgagacccgggctccgcttatccagctccgacttggcttcgaaggcgcagggcaagcggacaaagtgcccaccgctcactttaaaactcccatcctcttctaccactgccttcctccaaattcctccgcagaacttggccggcccccaggagaaaccagaatcctaccttccttggattcttctgcttcggagtgcataatgtcaggataaccagctgcaggggcgattaccgctcacatgtactcggacgagccgcaagttcgctctgcagcgaaatccgcacacgacggaaaataaaaggaagaaagccactaaaatcaaaacctccccggggcgggagagcgggttctggtgcagggattttcagggggaaagttctgcaagagtgacgaatcgcgtgtcagctgggcggcgggagtccgcccccggagccgcgcgctcgggccggcagccgggcggaggcgacctggcggggctggctcggcccgggcgcacgcaggtggggcacaggcccagacggcagccgactctcccgagacacagggccgagaagaaccgtcggcaaacgcaccagacgggcggaaaaaaaggtataaaaagaaaaaaaaagtctcatctcagagcacactgtagttttacataaatagcaaatgcatatagggtagaaccaatgcctctgtatttttggattacattttttgatgcccatttgactttgtcttggagtcttgcaacccaaaaattacggattttaaagcggctttggtatgttatttttgtaggaaagtcgcatggatatcgtccatggggttgcaaggaccagcttaagagagcacaatttcacaagtcccagagcggggccttttgaagaaagtggagcggcctccacccttacctttgcacagcaaaagcagacggggctgcttactcattcagtatagccccgggcgagcactggtactccaagcacagcccgggcactcattgctgcagttactccaaagggccttcctcagggggagagcacggttccctcccggctaccagcaaaaactggggatgaattccttcaaaatgccaaaggggaggttttcaggatttgaaatgctgatagaataaagaagccggacagccttcacaacagatctcaattctgcccccgggtctggcccacaggcccctacaaattggctgagaggaagtccccttagctctgtggagccttggttttcccttctgcaaagcggggacaagagctgccactgataggcctgtcttacggaggtattttgtagaacacttgttttatcgccagtctgaggcaaaaagtcctcaaataacatatctgaaagatccgcttggaaattatgagaaaaaaatatactcttttgacaaatttattttccagttcgtttctttttcttcgtttccgattttatataggcaaaaaccaatagaaacactatggcaaatttagtgaaaagaacgtacaaaagacatggatttaaggagtctgaacttaaatccagttctgccatctatcatttgtatgaccttatgcaaattaacctctctgagcctccagttcctcatttgtaaaatgaagataaaaatagtattatttacttcacagatttatgtctgtattaaataaggtaatataagcacaaagggatttgaaaaccataaggactacatagattattaccattgcaccattaaaagtaaatttttataaaacatactcttgggttttatttcagtattgactttgaacagaaaagagtgcttatgctattcacaagcagtgaaggctattataaatattaatgtaagaggtctagatattaaatcacatcctactgctgagagattctaacctgcctaagattctaacatgttatctcaatttcactgaaagagcaggatgaagggaggaagatatagccagccagagaagggagaagaggagaaacatctggaaaatatcagtgttgcagagcctcccggaaactgacctcgccaccgaaagggtaacagactgcacccttccgaaagtcacagttaacttcatggtcccctctgccacacatcctgagtcaggagctgctgatatgtataccttgcactcagtaatctcagacttatggggagatacactgagatgaggatgattctgaacccaaagaaatgctccctcaccagtcacaagtggcttttcctgtcctgcccaagtcaacattctgcccctctctccctataccatctatccttgcccttcctcactgcaacccagatgtccacagatagtccacaagagatcttaagggatctcaccagggccgtgtgctacacaagagagcttccactgatctataattggggtaaagcaacaccttttcaaggtgatgattatgcaaatccagacaacccaaatttcaggcccaatctgcctacagcagaattactttcactctcttcttttagaaagtacccttacaagaaatatttattaaatgtcattttgcaagtccaactggggacaaaccacataagatatgttaaaatacatgtcctttaatgtgctacttgttttacaactgctgaatgaatagttcaagcgctccgtcagccttataattcattttagattcatgttagcttcgttgatctttgaacattcaccatcggcctcaggaagcctggagagaaacttcttttgtatttaaatgcaagcaagcagtcaccttggggaagaatgctctgttttagctcaagagcaatgaatgctcagcttattttaaaaggctttatgtgaataagtacattcctcagtctcccgtataacctcaaagccatctgctctgggcaggctgcattgccccatacccctaccctgcaacatggtgacaaagggcagctgattctctagggctccccttggccttctgctgctctcagatatgtactaggtcattttgattttgctgtgcttttattcaaaaggggataatttacttcttagccccagtgaataatggtccagtacatcataatgatttgttatctcctgtaggtgggacttgttgattcttgtatgtttaagaaacaccccaaacatccttcacatggcaacatgtatggaagtcataccaacaaactattaccgcccgcctgatacaaaattgcaactaagttagcaacacttctcatttaataacaaactgtacttaaatttaaatactatgttgaactcctgcaagtgtctaataatggaactcccaccttttgtgtcaagatggaagaatgaaaatggtagctaagattctgaaggtttattcattcattgaggtataatcaaatatttgtgtgtgtcatatgtaaattgaccctactcacctggggcttattgacataattttgttaatttgaccacagacctaaagaactcaactttccaagtcaccttggttctaaggaaggtttattaacaccaactctcgactgaactttat

SEQ ID NO: 318647 - DNA, 4001 bp, Homo sapiens
gttccactagatggcaacatggtcaggatgtgctgatatccaagagtgaaatttaccaggaacagagtagacaagctcctacgcgccactctgccactacggttctcagcttggcacgcacaaccttgcctccccttcacttctagcctggctattttcaaccacgaatttacagttcgttctcaaatggttcatgcttacccttgaatgcttatgacttaatcactccagccttggaagctttatgtacacgtctttctgccaaagtacgctacctaccctccctttggaactctacccaaaactcacttcttccacaaaatcctcccaagcaaagctggctctgatctcaactctatatatgcaatgacatacagtcacagacacataaccattttttttgagacggagtctcactctgtcaccaggctggagtgcagtggtgcgattctcggctcactgaaatctccacctcccaggttcaagcaattctcctgcctcagactcccaggtatacacacacacacacacacacacacacacacacacacgaaaggatcacatgcacagctctaggcatctagtagacgaatgtacatttactataaatgatatgcaggtgaccacattccatacaagagaagtcaggactctatgaaataatatttattggctgccaagggttcaataatggaccaaaagattagctataccaacacccacctatgtcttccaaattctagtttttccctagtattaaatttaagctccaaaaaatctgttgagcagaacaattttaagtaaacctaagcaaatattatatatcaacttgaacaaaagtgtataaataccaatataactttaagggctatttaaaacactctattctaatccttgataactttttcaatttactttaaaaataaaattaagtctacttgtgggagcattaagtatggctaaaaacaaacctaaggtgttattttaaaagtacaaaatgctttatatgtaaggtaaaccgtttttttttttttttggttgttagagaaaatggcaacagcaatattcaaacaattatccaataagagaatagaaataaacagccttgtgtttacgggttgccccacggtgttaccactgctaccagaccactgggaaccagaggtgtcctacagttaataaacgcatggaaaatgtaaaagagaaactctgagtgaaaaagccatccaatcttttcagagtcccatctctgaaacatttcaaatctttatctgtttacaaatgaaactgtctacatgcaaactttaaatgtcatttttccacccacaatactcatacctctccctgcttaacactggttccccacacccagagccatagcaaaacaaaacaaaacagtgatttgttgaacacagtagctctaaagccacgaccaaacattatttccttgaagacagcaatactatgttagtcatctgaacattttaccagatttcaacaaagacattatatctaaacatattctgaaggccgttttaactcacctagtttcagcattttctccccgtgtgcaatcagaaggacaacttcacagtatcttggtagagtcatacagacttgaggaatgcatgcaaccaccctgttgacgtgtacactatggaacctgcatcaccctcggggagactcagtccttctcaagaataattcaaaataatttatactattcttttgaaaaatctaccataagcttaccacataaatgcacagaaggcactggtcaactacagtcactttgaaagttgtcttgcttgttattctgggagctaggtttcgtcacttgtagtggaatgcattaggtagcctttaattgtgagtccagagaggtctccacattcacaacagggatggactggttgctgcctgcacttgctccctgtaaactacaactacatagaaatgcaagattacctgtgacaagcaaacaggagtatattcaaaatcaagcagaaacaggaagtctaacgtttcaacatgctagaaaatagaaacagatacttagaaaaaaaaaaaaactaaaaaaaagggagaggccccattcacagatgcctgaaaaaaagaaaataaaaaaaacacctcattcctacctgtataaacatgaacgtctattaataatacgtattgctcagaggtgtttctgttctcaggagaactaagaatagagtttggacaatgttgctacttaaaatcatcagccttttgctttggaagagtatataaggttttcataatgaatgtaagtgtgagtgtatccaggcatacacaatacacacatgtacacatacacatacatgcatttatacaatctaatagtttctttaggagcctgtttatttacgtgggcatttggcagtcattgccacccacaaatctttccttatccactcccccaagtaagattcaagtgtaccacttctaagaaggcttttctttggtgatccctattaggtatgtatgatctcaatctcttcctttagcccctactgcaccttggttgacctttcttggtaacactttttggtatctatcacagctgtccttatattatcttcagttgtttatctatcttactctccctacatggtaagcttcttgattttatttctatactctgtagcaataacactctaccttgaaactaccaagcacctagcaaaaaaagtggaaggtgatggacaaactctccaaggtctggttcagagtctatttatgccaccttctggttgtgtatacgtgcaagttatttaacacccctgaataattttgcacttccgtaagatgagaataacatcatcaatgtcacagaattgctattaagatttaacgagaaccacgtgaagcaaataacatattgcctgatgcacatagagttctcaagcagtaatgagcattattattgacctaaattaaaatcaaatgcccaatactaatttgggaaggaggccaaaagagataccaaatcaacatcaatttacaaacatatctctgtatttcttattttctttggcctacattatcatgtgactaactcatagcgatatgacacttataccttagaaaccatatttttgtgttcttttgtgttatctccccaaattctgactggcccttcatgccatgaaaacatcagggactaagggtcaaagaagatgtcaagagaaagctcttcctggaagtgcaggaccctaaatcacaaggacttcgcaggctgtgactcactggcaattccaagggtaagctacaaagagcagaaatactgcatctaaacagtggaacaggcctctcacatttccctaaaatgtgacctcagtggtggctgcatggctaggtggtcactaggaaccactctttccagttctgctaggggaggatggggcagtgcagtgaggctgcaggaagacaaggctggaggaagaatcctgcagtcctatgtgaaaacaactgccttcatggcatcagggcccttacacatgctccaggcccagtcggggaggcaccagcaaggtcccaacaccaggcaagggcagaggacatggtagcctcatgtatccagtgggcacctctacacccagcaggaaactcctggttttggagagagctctccaaaaacaggagaacaaaaagcaaagcatctgcacagacatttccctaagacactccttttctctcacttgagactagaatgcccaagatatccccggatctattcaaagtgtgctgtttaaaccagtcccagcagttagcatcctgcttatcctacttgatttgggaacaaagaagagtcatcacagacataggctagagagcagggagattctcaagtaagtatttgtgaagcagtcaaaccttacagaatagccttatgtttaaaaaaaaaaaaaaaagctaatatctctttgtagatatgactatgcacagcacttccatgcttccctaggacttgt

SEQ ID NO: 318648 - DNA, 4001 bp, Homo sapiens
tactacctcagattattttaaaagaaacattctgggctttctttaaaaagcagagcgccatatcatttgtggccgatctgcagaatgtaaatgatgacaagtggagggaaggtgaggaacaagcagaaggggccccattaacctcttcataggccagtttgcaggctgcttccaaacttaaaaccagagagctgggccctcgaggagggaagactgtggatgttgctatgggaatgtataatacacactttgggatactgtttttccactttctctcccactctctctttctcaaaagacagggaaaacacacctgagagaaaacgccagcttaagtgctacttgtaattcacacagaagttcacccttgagttctctcagcctggttcctatttgccttcaactacctttgactttgaataaactgctggtataaagacatagaaaagaaaagcatctatcagcacacagctccatcagaacacaggacacggcaagaaagcattactccccccatactccacatcaaactcaaaaacaatgctcctggctgtcatttttcattcatgccagccccgtatttctattaaacaaacctcctttttattgactatttccctcacacagcataataaggtaaacgtgagcccacaaagactacatggtgaaacacaaagctttcctctgggaggggaatcagtaaaaggcagaagaggacaagtttcaagggctcttcctaactggtgtctaccaaatggagaaatgatggggctgctcctctgccagaactgctgtgattgacttgaaattaaccagctttccaagagactacatgaaaagaaagagtatttcacaatcttgaatagtctcctctcttactctctaattttccccaaccacccttactcccaccccccacttacaagagaacttttgtatacataaagtttcaaggaacaaagcatacaaacactcacacacaaataaactccccaaactaacaccagcgtataattgtgttttggttggagcttttccagccctgtcacctgttctctgttaggagtaaatgaaaccctttgcttttgcgaagttagaaacagacaaactcttctcagtttcaagctgcacaaggaccccctcatatctttcagccccctcaaacccccaacgaaatgaactcactgctgaaaacccagcaatgaaaaaaaattaatctatttctcaaatacagattttcgcttcccctcactcagcttccccttttagccggaaacatatagcgtttctaatttctcaaaccccttttcaagggaccctccactcagggctcttccagggatcccgctttcagtctttctgatgcaggcaggcagcccttttccaagcacattttgcattcttggagtccaagtggggctctttcgtttccagagaaagctaaaaagcagacttagtgggctggctgaactaggtccgacttttcctcccctcccctctgaacggctgcggggggagaagggagcccaagatgagacccgggctccgcttatccagctccgacttggcttcgaaggcgcagggcaagcggacaaagtgcccaccgctcactttaaaactcccatcctcttctaccactgccttcctccaaattcctccgcagaacttggccggcccccaggagaaaccagaatcctaccttccttggattcttctgcttcggagtgcataatgtcaggataaccagctgcaggggcgattaccgctcacatgtactcggacgagccgcaagttcgctctgcagcgaaatccgcacacgacggaaaataaaaggaagaaagccactaaaatcaaaacctccccggggcgggagagcgggttctggtgcagggattttcagggggaaagttctgcaagagtgacgaatcgcgtgtcagctgggcggcgggagtccgcccccggagccgcgcgctcgggccggcagccgggcggaggcgacctggcggggctggctcggcccgggcgcacgcaggtggggcacaggcccagacggcagccgactctcccgagacacagggccgagaagaaccgtcggcaaacgcaccagacgggcggaaaaaaaggtataaaaagaaaaaaaaagtctcatctcagagcacactgtagttttacataaatagcaaatgcatatagggtagaaccaatgcctctgtatttttggattacattttttgatgcccatttgactttgtcttggagtcttgcaacccaaaaattacggattttaaagcggctttggtatgttatttttgtaggaaagtcgcatggatatcgtccatggggttgcaaggaccagcttaagagagcacaatttcacaagtcccagagcggggccttttgaagaaagtggagcggcctccacccttacctttgcacagcaaaagcagacggggctgcttactcattcagtatagccccgggcgagcactggtactccaagcacagcccgggcactcattgctgcagttactccaaagggccttcctcagggggagagcacggttccctcccggctaccagcaaaaactggggatgaattccttcaaaatgccaaaggggaggttttcaggatttgaaatgctgatagaataaagaagccggacagccttcacaacagatctcaattctgcccccgggtctggcccacaggcccctacaaattggctgagaggaagtccccttagctctgtggagccttggttttcccttctgcaaagcggggacaagagctgccactgataggcctgtcttacggaggtattttgtagaacacttgttttatcgccagtctgaggcaaaaagtcctcaaataacatatctgaaagatccgcttggaaattatgagaaaaaaatatactcttttgacaaatttattttccagttcgtttctttttcttcgtttccgattttatataggcaaaaaccaatagaaacactatggcaaatttagtgaaaagaacgtacaaaagacatggatttaaggagtctgaacttaaatccagttctgccatctatcatttgtatgaccttatgcaaattaacctctctgagcctccagttcctcatttgtaaaatgaagataaaaatagtattatttacttcacagatttatgtctgtattaaataaggtaatataagcacaaagggatttgaaaaccataaggactacatagattattaccattgcaccattaaaagtaaatttttataaaacatactcttgggttttatttcagtattgactttgaacagaaaagagtgcttatgctattcacaagcagtgaaggctattataaatattaatgtaagaggtctagatattaaatcacatcctactgctgagagattctaacctgcctaagattctaacatgttatctcaatttcactgaaagagcaggatgaagggaggaagatatagccagccagagaagggagaagaggagaaacatctggaaaatatcagtgttgcagagcctcccggaaactgacctcgccaccgaaagggtaacagactgcacccttccgaaagtcacagttaacttcatggtcccctctgccacacatcctgagtcaggagctgctgatatgtataccttgcactcagtaatctcagacttatggggagatacactgagatgaggatgattctgaacccaaagaaatgctccctcaccagtcacaagtggcttttcctgtcctgcccaagtcaacattctgcccctctctccctataccatctatccttgcccttcctcactgcaacccagatgtccacagatagtccacaagagatcttaagggatctcaccagggccgtgtgctacacaagagagcttccactgatctataattggggtaaagcaacaccttttcaaggtgatgattatgcaaatccagacaacccaaatttcaggcccaatctgcctacagcagaattac

SEQ ID NO: 318649 - DNA, 4001 bp, Homo sapiens
aaacgtggttacataagcgtgtagaacactgcacactcccagcggcagcttccagaggggcatgatcacgtgcttccatgaagtgccagtccctgatcacattattttcccgggacacagccaggacagcagccttggtcaggggaaagggaacagggtccaggattcaagcgttgctagtcttgggaaagccttaaccttctctgggcctcagtttcctcatctgaaaattaagagttgttagaaagattaagtgaggccgggcggggcggctcacacctgtgatcccagcactttaggaggctgagacgggcggatcacttgaggtcaggagtttgagaccagcctggccaacatggtgaaactgtctctactcaaaatacaaaaaaattagccggggatggtggcgagtgcctgtaatcccagctactcgggaggctgaggtaggagaatcgcttgaacctgggaggcaagttgccgtgagccgagatcgtgccactgcactccagcctgggtaacagagtgagactctgtctcaaaaaaaaaaaaaagattaaatgagatacggaatgtaagcactgtgcctggcacatagtaagctattagcattatcagttttttcactgcctcagtttcttctgttgcaaaacagagaccaccacggggatgctgagtttgtactaatattctaccctcctaatacaattctaccctcctttgtcaaggatttttttaaaacattctgagtccccttttctgacctctcatcagatgccgaattcccctctatcacaccccattgtttggaaaatgagtaagtgctgattaaatcccattttgaccgtactgtgagaaaaaaatgatgcattaggaatctacacatttccctgcactgtcattctgcaagggggtggggaaggacgttgctgattcttctgcatcatccacaaaagtccctccctccccctaccaaaacacaatctctcacccagtcgcacaaaattcccatctgctcctgtacgcacaatgaatgtacaatgcacacgtgcacacaaatgtcctacagtggaaagctcagccttcatactccatccccagaagcactcctggaaactcatccatcctgcacatgcacacaaatgcctccaacaatgtgcatacaaaatatgttcaacagaaatagtatagtaggaactctggagccaaatgcctgagttcatatctgactttgcaactcacagctgtgtgacctcaagctccaagtacctcggtttcctaaagtataaaatggagataataacaatattaatgtttaggatggaagtgacaattaaatgagtctaatacacgtacagcgttaagatcagcacttggaaagcgcccaataaaaattattattttcctcctcgtgacatatgtacactgcttccacaacttgatacgaaaactcctgacgccgcgtaggcaactcgtctccacaggatagacacccaaagggccgcagcgccgcccgcacccggagggtctgcgctctctacaaccgccccacgccgttcccaggcgtgctaccccgcgcagtgcgcacgcgcgccccccaccaggcccagcgccaagcagggagtagcggctcagcccggcttggccgctggcggagacgccccgggaccccgcgcgccgggcctgggtgcacaagccaccttccccagctcgctccccgccgccaccgaggctctggacgatctgggcctggcctcccttcctcccctccatccccgctccgggccggccggcttacccgaggacggggagcttggggacacagcgccccgcttgctgcgtccagccccgaatccagggacggggcagcggcccgggcaaggctccggccccccgtagcactcctagggctcctggacgggggcagggcacccgggccgaggacgaggaagtgccgggggcctggccgggccgccccacccctgggaaagtccccggagactggcaggccactcgcccaatcgcgccgcgcgctccgggcgggcccgcggccgcctggggtgggaccgagcgaggtaaacaccggctgcctgcggttccgggggcccgcggtgtctctcgtcccttcggcggccttcccctctaggagcgacttccctggggccaccgtcccgggcctgcgcggcgccttgccgcactcccagcgccggaagcccctgtcgaaggcctggggccaccttgaaagccggaatttcagagcggaggcgagccacagagaccacccagccccttccttgtgccgaggggaacacaggccagaacagggaggggacctgccaaaaggcacgtaagcatttggccctaagccagagctggagctcaggcccccagagttccgtccagggcactccaggactcttcttaacaaagctatagaaattccgagctgaaaagacccataaagactctaccgcgaacattttttgctccagacattgtaaaggattcccagacatcgtaaacgctttgctccagacattgtagatgctttgcgtgcattattttcttcgcacaatcacgctagggaggtgggttttactaccttttcttaaataatatttgagtcacaaaaaggttagatgacctcagtaaggggctgaatcaagattcaaacccgggtgggcaaatccagaggccgccttccaccctacctacttatatgtgggctagataatcccaacagactgggatttcctagaccggtaaggaacataaacttgctttaagggtaggaaagctttttaaaagcttatccttttatttttaaaaagaaagaaagctaaattttaattccaaaaagtggaaggtctaaccttggaataaagaacagctctttaaactaaatatagctttatgaaaaacctattgcaaaagacccatttcactggtactgttgaaaacttagtcattgacaggccctcatcctcaaaaagaattaggggaaaggatttggggaactgtttaatacacaccctcattttacagaagagagacccatcaatcaactgtgacttcgcaataatacacacacagatacttgcccaaattatatacctaatctggggattctcctataaggctttgtaacctcctagggttccttcagttaattcaacggtgttatcagatcttcaaaacgatattcattctagtttaattatgaaaagaattacacttatgccttgattcagaagggagggagggaggaagcgatgcaaactccaaagcaccactgagtctcaccactgggggatcctacagagaaactgggaatcctggccctggtttacatagcagctcccaggcatcgtctccacccatcaggtccgcacctgccagttttcttcctgctctttgtgcctgtacttcccaattctcttcctgcagggctctcttcctattcccaacccacatcttctccacccccaccctctacccactgaaaactaaaatctacctaaaaatggctggtctctaattacttgcattttgtttccacactatttcagctgtttttatagcatgtctggccttagccgggcagacagtttcatttctcaaagtgtccgctgggaattctcaagcttgacataaaaaaatggcactcagtcatctttttgtctgatttcctagttctggatcctttttcttaacagttccaatttgtgagaaaactcatttatttataaagtcgtgactgcccccacctcttccattctttgaagtcttggtttgtcttcaggacattccaccctgttagagaccatggagcccatagataacaaacccctatttgacagataggtaaactgagtcctctgtctagaaaaggacttactctaggccacacacattgagtgacacaaccagggccttggaatccagggccttggctcccagtcctgtgtgcttggtccactgtaccaagttgtctttacaatgac

SEQ ID NO: 318650 - DNA, 4001 bp, Homo sapiens
aggagccctgggtctccccactccagcgtctctccccctggcctctccgtctccaggtcagggtgtcaagctggatctgggcttgcatccagggttgccccttgtcatcctcctggaagtgggaacaggtcagccaggcccagcccggcccagcctctcaggaagttagacccacaaaaccggagcatttcctaatcccgggaagccctaacagggccctgagagcaatcctctttcagtcccacccaccttcctccctgtcctctcccacaccctcttcttctatggcccctccccgctctccctccattcctctgtagcctagaagccaccgtcagacttggcctctgttccttgcctcttctagccagggacttccctaggctgtgaaaagatgcctggggaggggatgaagagggccgtttggatgaactggcctttcttcatcattcctggttccagagtttcctcattcttatggtaacatttatggaccactgaggatacaggagtggaccaatcagacccgcttcctgctctctcagagctcacagactctcaggagccatatggggctatttaaataagtagaattaaactaaaattaaatagaattttagtccagattttctaagtgatcaaagaggaagctgcgtcagctgtgtctgcctgcccttggcccactccctgtgccctgggctctctgttacaggttccaccacaaaagagtccagcggccctagaagcagagcaggcaggagagaagcaagagatccttttgctccagtgttaaggagggtctcagcctccactatgttcccctggaggcagcgccgattcttggcctcttcctatctagctgtagacttctaaagtgcccaacacacacttgtaccctctccatcaaaaattcactgtacacacagatacacacacaaatacacacagtcaccaacttacacccacacagaaagacacatacacgcttcagggatctgacacaacacaggcacacattctcacacacacaaacacccacatccatattcacacttgcatacctcccttttcttgagggaataagacaaaaataggctttgcttttccctttggaaaagctagtaacaactagagagaaaaagactggccaagaaggcaaggccagaagaagaggggcaggaagaaggaacgagatgggggagagaagacagtggagaaggaggctgggtgaggagcaggggctgggagcccaagacctgggtgggaagagcaagctaggctgagagcagcagaccctggctggcaggacatgggaggccaggtggctcttggcacagagctgagggtgtctgcttgccccagcacccttgtgcggtgggtcctttcccctgtcctggcccaccggcccccatctagtcactcacctggggaagggcaggagaatacgagggtgtgtgcaccaggggcggctgtccctatgaaggctcctcggctcactgtgcttctgcaggaaggagggctgggctgagctgactattaggcaggaggggaattccccgagatggaggagccgccaccaggcagccccgcaaggcccagctgaggccccatcctgcccgctggcagagcagagggcccttatttgtcagcctccacctgtcacttcccagactggctgtcccgtgctgtgaattccagggagttggggttgggggggatctggggagaagagttggaagcctgatgcttcctcagctgggctgggaaaaggcacccgagaatgggctggggcaacctggcctggcctccctagattgtcctgaagacctccatttcctccttcgcctaaggtgggggattccagtgctcagggccctgaggaaactgccagatgcccagcccacatcctcccaccccgttcctatcctacctgttgccacttactctctgaggcttctccatccatagtgaagaaggggcccactccttccttggtgcatgccgagtcacatttggatgtcaagtaaggccttagaaaccgcagcccaaggaattctgcactgaccagctggagatcctgaacaagtcacctcatcatcctgagccctagtgatctcctgcttaatgagtcctgctttgcctgactcctgccatttaatggtaattaaaataaaatgatgggccggcaccgtggctcacgcctattaatcttggcactatgtgaggcctgaggcaggcttaagcctaggagtttgagaccagcctgtgcaacatggtaaaaacactgtctccacaaaaaatacaaaaactagctgggtgtggtggcacttgcctgtagtcccagctactcgggaggctgaggtgggagaattgcttgagcccaggaggttgaggctgcagtgaaccattatggcgccactgcactccagcctgggcaacagagtgagaccctgtctcaaaaatgataataaatttagaaataaaaataatagtttgtagacatcctttgtaaactactgactgctttacaaacataaagtctttgttccttatcccctgaaaatatgcctggggaggggatgaagagggccgtttggatgaggtgtggcctttcttcatcattcctggttccagagtttcctcattcttatggtaacatttatggaccactgaggatacaagagtggactaatcagacccgcttcctgccttctcagagttcacagactctgaggagccatatggggctatttaaatataaattaagtagattaaaattaaatagaattaacagttcaattcctcagtagcacaagctgcatttcgagtgctcaacagccacatgcacctactacattagactacatgcatgtatgacatttccattattatagaaagttctattggatagcactgctctgggggctacaggtaaatgaggaggagattacaataaagtacaggaaagatgtgttttggcaggagaaatgcagggggctttgggagcctggacaaaagagtatctggtcaggatatggggatctgggaagtcttcctggaggaagtgacacctaaactgagacctgaaagtagccaagaaagaagataaggaagagtgttctccacaaagggaatagaatattcaaagagaatagagaatatattctgagaacagaaagagaagagagaatatattccatgaactgttcagtctgagtagaccaagggatttgaggcagactgggggaagtgacagaggtagacctggagaaataaacaggtccaggtcacaaggggccacatgcagcctctgcaggaggagaggagcaataagaggtgggggcggagaagggtccattgaatcccatccaactgcatctgtgcccttcagatcaggattacacggggatgctaaatctcctagcccaatggcctcactttacagacaaggaagtggaggccagacaggggaaataaatttccaagtgagtaaatagagggacttcctgactcctagtccagtgctctttcccacaccacactcagcccctcagtggcactgccacttttcaagagctcgattgccacacgtggcaagcagctaccatgccagactgcacagatatttccatcatcacagaaagtgcagttgtatgaatgatactgacccttgagctagaccaggggcaaaaagatgatgttctcctgtacatagacccttttctctgcagggggtgaaaatatgtgtagctcagccctaatgttcctggattacaattttccccctatatacaatatttgcactttaaagtccactataattacatattctctgtaaattcacagagcctggcttagaccagttcctgcccatggaatcttagatggcaaagggaccttgaagggctaaggacgttcaaggagctggagcgacatgagctgggatttccagttagaatacctggctggcacatcctatgaagagaatggctctgagctct

SEQ ID NO: 318651 - DNA, 4001 bp, Homo sapiens
gcttaaatcacagccctgccacttacaactctgtgccttggtttctttatcaatgacatgaaggctgtaactgtgcccaattcagagggtggtgacaatcaaatgccacaaggcttggcctcagtgaaaggtagcgatgatcattatgatcatcaattctatgaggcagcagggattgcttctctcctttttccaggaggaccccaaggcctggagctggggagcagcttgccctagacatcagactgtcttctgaggagctgggcctggaaggcattgctgctgacttttctccaggctctttccccttttcttccttctctatcccaactattttccctgtgtccctgggctggcctgttacacttcagtttctagggcaccactggaggagaggaaagggcaaagtgacactgggggaaattcccagcctcgtcacatacgtggcctagccaggcccctcccacagttcctaggagccctgggtctccccactccagcgtctctccccctggcctctccgtctccaggtcagggtgtcaagctggatctgggcttgcatccagggttgccccttgtcatcctcctggaagtgggaacaggtcagccaggcccagcccggcccagcctctcaggaagttagacccacaaaaccggagcatttcctaatcccgggaagccctaacagggccctgagagcaatcctctttcagtcccacccaccttcctccctgtcctctcccacaccctcttcttctatggcccctccccgctctccctccattcctctgtagcctagaagccaccgtcagacttggcctctgttccttgcctcttctagccagggacttccctaggctgtgaaaagatgcctggggaggggatgaagagggccgtttggatgaactggcctttcttcatcattcctggttccagagtttcctcattcttatggtaacatttatggaccactgaggatacaggagtggaccaatcagacccgcttcctgctctctcagagctcacagactctcaggagccatatggggctatttaaataagtagaattaaactaaaattaaatagaattttagtccagattttctaagtgatcaaagaggaagctgcgtcagctgtgtctgcctgcccttggcccactccctgtgccctgggctctctgttacaggttccaccacaaaagagtccagcggccctagaagcagagcaggcaggagagaagcaagagatccttttgctccagtgttaaggagggtctcagcctccactatgttcccctggaggcagcgccgattcttggcctcttcctatctagctgtagacttctaaagtgcccaacacacacttgtaccctctccatcaaaaattcactgtacacacagatacacacacaaatacacacagtcaccaacttacacccacacagaaagacacatacacgcttcagggatctgacacaacacaggcacacattctcacacacacaaacacccacatccatattcacacttgcatacctcccttttcttgagggaataagacaaaaataggctttgcttttccctttggaaaagctagtaacaactagagagaaaaagactggccaagaaggcaaggccagaagaagaggggcaggaagaaggaacgagatgggggagagaagacagtggagaaggaggctgggtgaggagcaggggctgggagcccaagacctgggtgggaagagcaagctaggctgagagcagcagaccctggctggcaggacatgggaggccaggtggctcttggcacagagctgagggtgtctgcttgccccagcacccttgtgcggtgggtcctttcccctgtcctggcccaccggcccccatctagtcactcacctggggaagggcaggagaatacgagggtgtgtgcaccaggggcggctgtccctatgaaggctcctcggctcactgtgcttctgcaggaaggagggctgggctgagctgactattaggcaggaggggaattccccgagatggaggagccgccaccaggcagccccgcaaggcccagctgaggccccatcctgcccgctggcagagcagagggcccttatttgtcagcctccacctgtcacttcccagactggctgtcccgtgctgtgaattccagggagttggggttgggggggatctggggagaagagttggaagcctgatgcttcctcagctgggctgggaaaaggcacccgagaatgggctggggcaacctggcctggcctccctagattgtcctgaagacctccatttcctccttcgcctaaggtgggggattccagtgctcagggccctgaggaaactgccagatgcccagcccacatcctcccaccccgttcctatcctacctgttgccacttactctctgaggcttctccatccatagtgaagaaggggcccactccttccttggtgcatgccgagtcacatttggatgtcaagtaaggccttagaaaccgcagcccaaggaattctgcactgaccagctggagatcctgaacaagtcacctcatcatcctgagccctagtgatctcctgcttaatgagtcctgctttgcctgactcctgccatttaatggtaattaaaataaaatgatgggccggcaccgtggctcacgcctattaatcttggcactatgtgaggcctgaggcaggcttaagcctaggagtttgagaccagcctgtgcaacatggtaaaaacactgtctccacaaaaaatacaaaaactagctgggtgtggtggcacttgcctgtagtcccagctactcgggaggctgaggtgggagaattgcttgagcccaggaggttgaggctgcagtgaaccattatggcgccactgcactccagcctgggcaacagagtgagaccctgtctcaaaaatgataataaatttagaaataaaaataatagtttgtagacatcctttgtaaactactgactgctttacaaacataaagtctttgttccttatcccctgaaaatatgcctggggaggggatgaagagggccgtttggatgaggtgtggcctttcttcatcattcctggttccagagtttcctcattcttatggtaacatttatggaccactgaggatacaagagtggactaatcagacccgcttcctgccttctcagagttcacagactctgaggagccatatggggctatttaaatataaattaagtagattaaaattaaatagaattaacagttcaattcctcagtagcacaagctgcatttcgagtgctcaacagccacatgcacctactacattagactacatgcatgtatgacatttccattattatagaaagttctattggatagcactgctctgggggctacaggtaaatgaggaggagattacaataaagtacaggaaagatgtgttttggcaggagaaatgcagggggctttgggagcctggacaaaagagtatctggtcaggatatggggatctgggaagtcttcctggaggaagtgacacctaaactgagacctgaaagtagccaagaaagaagataaggaagagtgttctccacaaagggaatagaatattcaaagagaatagagaatatattctgagaacagaaagagaagagagaatatattccatgaactgttcagtctgagtagaccaagggatttgaggcagactgggggaagtgacagaggtagacctggagaaataaacaggtccaggtcacaaggggccacatgcagcctctgcaggaggagaggagcaataagaggtgggggcggagaagggtccattgaatcccatccaactgcatctgtgcccttcagatcaggattacacggggatgctaaatctcctagcccaatggcctcactttacagacaaggaagtggaggccagacaggggaaataaatttccaagtgagtaaatagagggacttcctgactcctagtccagtgctc

SEQ ID NO: 318652 - DNA, 4001 bp, Homo sapiens
gtggttacataagcgtgtagaacactgcacactcccagcggcagcttccagaggggcatgatcacgtgcttccatgaagtgccagtccctgatcacattattttcccgggacacagccaggacagcagccttggtcaggggaaagggaacagggtccaggattcaagcgttgctagtcttgggaaagccttaaccttctctgggcctcagtttcctcatctgaaaattaagagttgttagaaagattaagtgaggccgggcggggcggctcacacctgtgatcccagcactttaggaggctgagacgggcggatcacttgaggtcaggagtttgagaccagcctggccaacatggtgaaactgtctctactcaaaatacaaaaaaattagccggggatggtggcgagtgcctgtaatcccagctactcgggaggctgaggtaggagaatcgcttgaacctgggaggcaagttgccgtgagccgagatcgtgccactgcactccagcctgggtaacagagtgagactctgtctcaaaaaaaaaaaaaagattaaatgagatacggaatgtaagcactgtgcctggcacatagtaagctattagcattatcagttttttcactgcctcagtttcttctgttgcaaaacagagaccaccacggggatgctgagtttgtactaatattctaccctcctaatacaattctaccctcctttgtcaaggatttttttaaaacattctgagtccccttttctgacctctcatcagatgccgaattcccctctatcacaccccattgtttggaaaatgagtaagtgctgattaaatcccattttgaccgtactgtgagaaaaaaatgatgcattaggaatctacacatttccctgcactgtcattctgcaagggggtggggaaggacgttgctgattcttctgcatcatccacaaaagtccctccctccccctaccaaaacacaatctctcacccagtcgcacaaaattcccatctgctcctgtacgcacaatgaatgtacaatgcacacgtgcacacaaatgtcctacagtggaaagctcagccttcatactccatccccagaagcactcctggaaactcatccatcctgcacatgcacacaaatgcctccaacaatgtgcatacaaaatatgttcaacagaaatagtatagtaggaactctggagccaaatgcctgagttcatatctgactttgcaactcacagctgtgtgacctcaagctccaagtacctcggtttcctaaagtataaaatggagataataacaatattaatgtttaggatggaagtgacaattaaatgagtctaatacacgtacagcgttaagatcagcacttggaaagcgcccaataaaaattattattttcctcctcgtgacatatgtacactgcttccacaacttgatacgaaaactcctgacgccgcgtaggcaactcgtctccacaggatagacacccaaagggccgcagcgccgcccgcacccggagggtctgcgctctctacaaccgccccacgccgttcccaggcgtgctaccccgcgcagtgcgcacgcgcgccccccaccaggcccagcgccaagcagggagtagcggctcagcccggcttggccgctggcggagacgccccgggaccccgcgcgccgggcctgggtgcacaagccaccttccccagctcgctccccgccgccaccgaggctctggacgatctgggcctggcctcccttcctcccctccatccccgctccgggccggccggcttacccgaggacggggagcttggggacacagcgccccgcttgctgcgtccagccccgaatccagggacggggcagcggcccgggcaaggctccggccccccgtagcactcctagggctcctggacgggggcagggcacccgggccgaggacgaggaagtgccgggggcctggccgggccgccccacccctgggaaagtccccggagactggcaggccactcgcccaatcgcgccgcgcgctccgggcgggcccgcggccgcctggggtgggaccgagcgaggtaaacaccggctgcctgcggttccgggggcccgcggtgtctctcgtcccttcggcggccttcccctctaggagcgacttccctggggccaccgtcccgggcctgcgcggcgccttgccgcactcccagcgccggaagcccctgtcgaaggcctggggccaccttgaaagccggaatttcagagcggaggcgagccacagagaccacccagccccttccttgtgccgaggggaacacaggccagaacagggaggggacctgccaaaaggcacgtaagcatttggccctaagccagagctggagctcaggcccccagagttccgtccagggcactccaggactcttcttaacaaagctatagaaattccgagctgaaaagacccataaagactctaccgcgaacattttttgctccagacattgtaaaggattcccagacatcgtaaacgctttgctccagacattgtagatgctttgcgtgcattattttcttcgcacaatcacgctagggaggtgggttttactaccttttcttaaataatatttgagtcacaaaaaggttagatgacctcagtaaggggctgaatcaagattcaaacccgggtgggcaaatccagaggccgccttccaccctacctacttatatgtgggctagataatcccaacagactgggatttcctagaccggtaaggaacataaacttgctttaagggtaggaaagctttttaaaagcttatccttttatttttaaaaagaaagaaagctaaattttaattccaaaaagtggaaggtctaaccttggaataaagaacagctctttaaactaaatatagctttatgaaaaacctattgcaaaagacccatttcactggtactgttgaaaacttagtcattgacaggccctcatcctcaaaaagaattaggggaaaggatttggggaactgtttaatacacaccctcattttacagaagagagacccatcaatcaactgtgacttcgcaataatacacacacagatacttgcccaaattatatacctaatctggggattctcctataaggctttgtaacctcctagggttccttcagttaattcaacggtgttatcagatcttcaaaacgatattcattctagtttaattatgaaaagaattacacttatgccttgattcagaagggagggagggaggaagcgatgcaaactccaaagcaccactgagtctcaccactgggggatcctacagagaaactgggaatcctggccctggtttacatagcagctcccaggcatcgtctccacccatcaggtccgcacctgccagttttcttcctgctctttgtgcctgtacttcccaattctcttcctgcagggctctcttcctattcccaacccacatcttctccacccccaccctctacccactgaaaactaaaatctacctaaaaatggctggtctctaattacttgcattttgtttccacactatttcagctgtttttatagcatgtctggccttagccgggcagacagtttcatttctcaaagtgtccgctgggaattctcaagcttgacataaaaaaatggcactcagtcatctttttgtctgatttcctagttctggatcctttttcttaacagttccaatttgtgagaaaactcatttatttataaagtcgtgactgcccccacctcttccattctttgaagtcttggtttgtcttcaggacattccaccctgttagagaccatggagcccatagataacaaacccctatttgacagataggtaaactgagtcctctgtctagaaaaggacttactctaggccacacacattgagtgacacaaccagggccttggaatccagggccttggctcccagtcctgtgtgcttggtccactgtaccaagttgtctttacaatgacatga

SEQ ID NO: 318653 - DNA, 4001 bp, Homo sapiens
gcagcaggctaacaggcaagcccagcttcttccctgggcctcagcttccctaattgtaaaatggacgcgcagggcacgaccagggagcttccaactcatatgccagctccaagtgacagggagtagctgcttggagtgcgatgcctggcacacagtagctgctcattaaatattaaatatgctgataaagaccccaaggccacaggactgcaatgtagtcaactgttgtatctattactcatgtctgctggggcctcaggagtgctgagtcactggctatttttaacaagattgttttgaagtcccttccaaatctgaccttctgggggatgtggcagccaaaacatgaatggaagggtagcctgtgacctaaggataaacgagagaatgtgggttttggcataagaagggagttcactgtgaaggatttgggcagtttggggtacagggagagtcagaggtacccagactcctcttatacctgtgagctcagccagggggtcgaaggagcccaaggagggagaaggtggtgggagcagctcgttgtccttcactagctcctctgccttctgccggagcctggtcgcttccatctgggactcttccaaaagctcccctagagttattggggaagaggaagcaaaagcatttactcggctcagtgtgctgcttctccccgtcccaggcccctaaccgtgctgccgcctggcttctgaggctccaggccctggacttcactcccaccgttgctctgtgggccaagtgggacaaactccatgctggtccaccataagaaacaggctagagcaaggacgagggcccagcaatcgggggacacaggagcggaaggaatctatgagaaactcctcggctcccccaacccccagcattctctttctgccccactcccttcacacccagccagggcactccacagaaagccaggggctcccccaccctacgggctacccacagcctgagccaccagggcaaagggctgcctgcagggcggagaccttggataattccaaccagccctctaggcctccattttccttctcctacaagtggagatggggaaaccactcctccctccccagtcggccatcccaagcaaggatctgccaagcaaggagaaagcattttaaaaatcagggggctatgctcccctctaaaacatgagactagagaagggcacggcaaggcaaaggaagagtttcaggagtgtggaagaaagagagccccctctggatggggaaatcaatgaaagccttgtctggaggagaagggggcacagcaactgggtgctgatgcacagggcccgtcggtcgtgtggagggaggtggggttgttctaaagtggggatggcttgagcaagagccaggagaagagaactgagggacctaccacctccttgcttcaagccaagctctgctccctgctccaacacctaggaacgcgtgccccagttgcctggtcatgctggctctccccatctctcgtgccccagaaagaggagaccactctagttccatggccattaactgggccttccagccccctttcccttagcccacgcctccctcttggacctgagtcctgtcatcctggtttccgggtgctgaggaatcagggttgggaatactgtcaccatgctacatggtgcatagagacagctgtgaggcaggagccagcgctgggccaggagggacaggggatgacttgggcagaggcatatgccagcttcattctccactgctagtagagggactggcatcacagtctgcagggaggggcgctcgcagggaggggacagggtctgctttacctaacatctttatcccttgcattttttccttcagccgggaattctccttcactaggcgctcaaaagctgcggatgcctctcctgagggcacgctgcccccagggtcgtagatccggtacggtcctctcccttccatgagggtagctcagcccctgccgtggtgcccgcctggctgtaaggacaacagcagcatatcagcaggctggccaggccatgggggcatcctttgcagagaagctctagtctgtcaatgccccagaaggcagtcccccactttaagctggtctgaccatattatagtaaagcaggacagtcacctccttttatctggacgctctgcctctattaatacaaccttagaatggcattagtttctcttagcagcctcaatgcactgttggcttgtttggaacaggagtccaaataaacagtagggtgcaatgtgggatacaagaaagaacctggacttggaaaaaaaaaaatctgagttcatgtcctgtctgtgaggtccagaagaacaggaatcccatatgttttacccatcattgcatcctcagagcctaccacagtattagctatgaattttgcccaataaacacttactcaattaatggtctaggcattaatttactatgggattatgggcagtcccttcccctctctgagggagggaaatgaaagtcttaagttaatttagtaatctttaaagtgaaatgcttgtaccctaagggataagcaagtcaacccagtccaaagttccatttatatgtgtatcatcttctttaaaaaaagaaaagaaaaaaacaccctgactaatatttaatacactgtcaccctcctccgtgagtctcatatcatatatggtctgtcccttgcagttctaaggaacagaagaatttttcatcaaaccactgtctatttgagcaccaaggtttttttttagtaatctgttcagtttcatctgctttatgtcactgaaaccagttggaaaggtgattttagaatcctaactctgtggcttagtagagaagctctctgtccattcactcatccattcaacaattacttattgagcatcgactccgtgctaggcaccagtctgggtgctgaggaattatcagcaaataaaacagacaaaaatccttcatggagcttatagtctaggggtgaaagcagaggaggatggtggggaacacaatatttcaggtaatcaaaaagtctatgcacaaaaggccccaagcataaggagctattttagccaagacctgaaagaggtgagggaactagccatgaagacatctgaaggaagaacattctttgcagagagaacagtaagggcagaggccctaaggctgaaacaccgagccagcctccagccctccaaatagctctccagcatgaaagggccaaggccttcactggggacctcagaagggtttgggggctcggcaccttcctcccaaggtcaccacccccaagacaaaaactgtttcatcaggaatcctcaaagaccctcccaagtccacacaccatgctccgtgggtccttggcgctgccaggtgactacgaccataccaccctgctcccagaatgtaaatgaaagatcagagtgagaaaggattaacagcaacaccaccatgcttgaatcgcctccttgtcaggcactgcattaaatgtttcagatatacaatcttggaggagctgcacagtaactctaacatgcatactaatctcatctgcattttacaagggagaaactgaggctcagggcggttaagtaactcagccacgatgacccggccgcaataagagccaagatgcaaagtcagccctgcctgctgtgactctgacccccaccatactcacacagccaggacacagagccagaggggcagacagggagttcaaatctctttgtagggcagcaccatgctatcaggtcacctctgggcagtttcccttgccctgcagcataagaaccaataaggacttgtccaagagcgtccataggatggaatgggccagaaagaaaaacaaagttctgatgagaaggaccccttctcccaaagactgacagatacaagatgaatacaccgtgtgggaggcacccacgccctgctgagcctgcgaggcaaaggacagctacccacactcccatcacaagtcatcaccc

SEQ ID NO: 318654 - DNA, 4001 bp, Homo sapiens
ttacctatgtcacttggtttgacgtcactttataaccaggtttcttttcttaaaaaaacatttgcagaatccaacatggttaaaattcaagaaattcttctaaatacagatgtttacatttcaatgtagtagctcatttacaacatttagaaaaactgagttcatggaatggctttaaaattataaataagcaaaactacagtcataaaaacaatgaatacaataagaaatgttgatattggaaaagcttacaactagaatcatgtatttttacaaaaatcttattctgctcacattatataatggtaataaagccactgagagttgaggtagaagtgcaaacaagatttttatagatatttcagtgggaggaatttaataattcctgactaggagaaagatgcagccacatcaagggtggcggccccttttaggaaaaagaaaacagaacactagtacttcattaggctcacgttaaattgcatgaagtaaaaatcgtactgccaagctagtataaatttatgcactgcatagctagagactaaaaaagatatctgcacctacaaactattgtttcccttttgtggttgctaattttcatcctggcacagccttctctaggaacaactacggtgccaggtaaggtgaaagtggaaaacagatcctttcccaaaaaacggaactttccccttttccactaaacatagcttcttcaccactctaacatgaaagctttgatataacagggaaacttaaaaagctgcaggaacttttgttattctaaaagtgagtagtacgtcaggacagccattttacaaccttcatttccaaacacctattacaccatacatcttgcaattttaaaagtatcttttctttagggtaaaaaaagtaccacttacacattcatcatttaagtcattactgtttcaaaggacagttattaagcttcttaatacagctgtcaaaatcaatttgtagatagcctccaatttcaaatttctacatttacatctactgatagaccatcctgattagcgattaagataacagacttaaactctaagcaatccttgcaaaatccagttgatttttaaaatcagtaagcaacacgcgatcatttttaaagaaagtcattccgaaaatagcttgattgtggtggccaatctgctcctcagcagctgttccctgttgcttgtacgcatgggagtggaggtagaagggcaaaacccacaagcccacgcaaaactcgtacagtcacaaacattatgtaaacatgtcgtgaggccaagaggccccaaggagaaagaaccgccgggaggaagagaacggcaagctgcatgtaaggacgatgggcgctgtgtgcggacgcaggagacccgggcagaggggcccagggcgggacaaagactggcccatctcgggcagcgccggccagcgcccagaaccagtgaaaggcagccgtcccggggcagccgactgcagcactcaagggccctcaaacgccacagcttaacaggcgaggcaaacgctcccctgaatgtaagacccttcccttcccgccccttgtaacgggctcctgccgcccctaacgggatcctcggacgcttgaggagccgccgtcgcctgctccctacccgggtcccgcagggcgcctgggcgggcagctgttggggttagaaccgcgccgccgctgcctctcggcttcaaacggccgggcaggcgccgagagagcgggcgagcccggcgtctctcccgtaggcgcgtcaggcagctcggcgctcccagcctccgttcccgcccctgcagttcggggccgcgcaccctcacgccacctacccggtcccacaccatcccagacgcctcgggcgctcgggccttcggccgaagcggcactgcctcctgtccggggcctgaaatggctgcggaacaaagagaatctgggcttcaccgagcgccggtccgattggccggggggcggagcccgcggcgggaacattcggcggcggtcgccttggcaacggcggcggggctaggaaaattgctgcctgggtcggctgggcctgtgggcctgcgtccgacagcgcgcggccgtgctttctaagcgggctcggcagcaccagacttcaccggcccggcgcggggctcacaagtgctcgcactccctgcggccggcgcgctgaccggagcctctgggtctcgcacgcagcagctgcagacgctgcccggcgcggtggggctgtgagcaaaacggcccgccggtgtggttgcccagactgtgctgggccctcctaggtggatggccctgccccagcctaacttctgtaccccagcataacctccaaagtaacagccgtgccctgggagcctgttcaacactgaacatatcccacaataacactgttccagcgtcgctggtaaaaagcagaaatggcttcggtaggtagacgccggtggatggctgcccgcttagaacaagataggcttttgacgtatgttgtatctggcgtataaactactatgtaattagaattcagtgatttataaaatgtttacgcctccaggtgttcaatcctataaaactgtagtttcttgctcttagaaataacaagcctttctctccctaacctgccatcatgagaaattaaaatgtcctgtattttctgtacggcaaatgattcaaaatgggagtggtggacgtttttatacccaactgcaacaagggtaatgagataaatatcagtttccttccctcagattattcttatatgtaaaatttactgtataaaaatacttaaaatttgcatagctagctgatttttattttctaaggtgatgatgcccgtgataatattcctcacatgatcagtgtgagtagaaataccagcagttccgactatcttactggaagtgctgtatatattttgaaaatgtgtgacagttgttgccttcctgtcatagtttaggtaaaattacagtacataatactagaaaatgtctaaatttttactaaggtaatttatttgttcttctaaacgtgttaacaattttcatttgaattacagtcattttgcaggaacaactagtttatttaacttaaaatttgagactaaaagtaccattttttaatcattgggaaattgaacttagcaagggaaaatatagataactaaaatattcatgatttcaacatgttataatattaatttgatagtaattggatacagtagtgtatatcaaaaagagcccccccccccaaataggagtagattaccaagaaaaaaatgtaatataaacttttctgaatggtagtttatctgcaggaaaatatacccagaaaaagtatatttatccaaataacaaatggcttatttctgcatttgaaaagttacatcgtggactaggatctatacaaatcagaagatgtgtagtatttgcattctactttgctaaaggaaaaaacacaaatatttctaaaatccaaaagattagcaaataatgacagatgtaaatactactgactaagcaattagtaggagttcacttgattaatagtttggaaatagctgaaatgaattgaagaaaaagtaacatattatttagcataagaggatttattggccaaaacattttgaaagaaaaaaatgttgattatcagatgttgtaaaattgagattaagcaaattaaatatgtattcttttgtaaaaattaaagtgaatgaaaatactaatataaaatagttctgttgaatagagattcttacacatgtagcctttttgtctcttctaggtcaaattaaaaaaacatgttttaaacagtaaatcttattaacaaggatttattaacatggcttattttatttttctttgacagtttgcacatataatagcagctatccagtagtattttctctttatacctaaatatgctcatgtggtaaaactttgaagaattattaataatttttaaatgacaaaaatgaagttaaaatttataaact

SEQ ID NO: 318655 - DNA, 4001 bp, Homo sapiens
tatgtattcttagctaaagtagttttcctctcacagcaacagaaagttgttctttctcagaggacatactaagttccaggcacacagaataaactgtaaattgactacttgcccaagcacggtactaagcatttatgaggtacctaataaatgtagactaaaacaagaaattatgatatatggtgccacagaataactacaatgcaggattgggcttagctaatttaagaaactagtaactgtatcatataatacctgcaattaatcaactatcaacttctatcatccctagaactatgacaacacaaattaagactgagccatagcactgtttacaagatacaaacggcaatacattccaaaagtgttctttcctcagtactagaagtatccaaacaaaatggctttaaaaaatccaagcagatctaaatcattatcccttccacttttaaatgggaagtactacattaaccaagaaggtaagtactaattttgtcatctattgaaggttttaaattacggcaatgcagtatttctgcgaaaccctcggggtaaataacttcatctttacagatgttttaaatgtaaataaactcaaacacgaagagcttacttaccaaactccatattaagtaattttgctgctttttgacaataaaaatcaagaggcttttctgcaaaaaatagtagacttaactaacttctttaggcttaaaacgggggttaaaaggttattcatgatatagagtgaatgtttcctttactgcatccagtaagagctctccatttgagcacggtttagggcactacagaaagcatacgtggtagagttttggttctcttaacctttcctgtctctaaaaccgtagcaacaggatcactacaccagcacactcggtaaagacctacataattgtgcagtcagccttgagccaaagctttaaaaagaaaatctcacttgggtgacaaggagttcgcaacaggtgttaacaccagtaaccccagggtgaggcacagagacccctttcccccacctgtaggtccccagcctttttagggcaaggacgtggaaaaacccccaagacccacacagctgcagttcaaaccccgcgccagctccacccatttctggccagtcaggcggcgagctccgccgcgcacagagcgccctccacccggcctcccgctcggcctgccacccccacccacggggcgcattgtgtgggcccgggccgctcccgcccgcccgctccctacccccgcggcaggtcagcggcgggcggggacgtggcggcccggcccgcgcacatgtcgcgatcccgggcggcggccgggggcccccgcctcctgcgcgccggaagccggtggccttggcggcgtgagccccacgcggcggcgcccccggcccaggcaccagggccgcgtgcgcgagtcgcccggcaggggcagcggcggcttcccccgcgcccggacccagggaggaggccggtctcggaggatgggggaggggcagaggcggaggcgacgggagcccccggccgccgggggctgggccgcagcgcggggcgagctgcgcgggtggcggccaggcctcggaaaggatacttgttgcacggttctctggatggtggtgtctggggactgggactccttcaacagctgcaggatttgctgaagcccttgctcgtcaggtttccactcatactccatcttggtttgctgcaaataaagccagacacaggaagagacggagcaactgttactcccggtgcacaggcccagaggcttcccgcgcgcagctgacccgttctccccgccaccacaaccccagcgctccccaaacgccgcggacctgcctgaggtgccccgaaggaagtcacggacagtgaaacccggcggaactgctcctggcagcccggccgccagcgtctgctgctgctgccgccgcggccgccgagcgcaaggagccgaccagactgagtcaccgcgaatttgcaatctggccccaagatccgctcacgggagccccctgggtcctagtgccacgcagttttctccaacccaacccatctctaattccgtccagattactactgacttaagggctaataaaaagtcaagtccttatcaaaacccctgcgaaacacctgaagagatctgttttgggtatattattttacatacacatggtgaattaacgaaaaatgattgaaatagggtaaaaaggttgttaatttccctgacagttcagcaataattagaagcaataaaaatgtttacatttcaatttgatatataaggcactaaaaagtctaaaatattgatgcagtcgcaacccagacctcgaaaaccattatatgcaacatttgcagaacttgacttaaaaaaaattgcatttctgcataaacttcaacttttgaactcctattaagggaaataaattccattatgaaataactacattccaaaagtaaggactttgggtcgaaggaaacacaataaaaatgatgtaattttacaactgggtagtgtttaattccattaaagtattttcacatactacattttctcatttgattttcattacaacctagtgaggtattatttgcctccatgtggcaactaaagctaaaaaagatctgagcaaacaaccacacttaatcagtgaagactgagacacgaatataggtttttaaagctactatgagttgcatctgctacagtcaactgaagctattaatgacatttttcactaaaactaaatgcttaaacaaaaacaacaaaatgtaagtatcaagcatgacttatttgtaaaaaccaaacagtttgataaaggagaggatttttaacatgaaaagtcccttgctagtaggggcttaaaaaaactactacctttccacctctctagttagctttttctttctttttaaaaatgccttttcctctctctttcactcttatttttctgcttaatagcctgtaatctgactttgctcaccaagttctaatgacttcgtaaatggcccaatctaataaactgttcttaaacaaaaaaaaactcaaaacaaaatcaccaccatctggacataaaatgtattaatactgtagtgcttttattctagtcttcattctatgtgtttttatgcacattatattttataataatgggattgtcctgtttcttgcctgacttcgtatatcattaaatatttattgaaaatatttcaataaaaagtgaatagtattccattgtaccactgtcatttttatacacttttatttgatacaatatagacacaacattgtacaaatgataagcatatgatccatagatggatttttacaaagtgaacccatctgtgtaaccaacacccagctcaagatagagatcgctgagtatgaagaggtttcttttgtgtccaatcccagccatcaacccttcctaaagtaatccccagtataatttctatcactatagatttctccccttccctctcttaacttcagaaacttttaaaaaactacaaatattataataaatcaaacaacatggttgtataagacaagttaattcaatcctatctccaggctccctagagaacccgttttaacagttttatgtgaatctttctacattctaatctcacatatatttttcctctttttttaagatcatcctccatactacactaatactaactctacaacgttttttacacattaatatgacatggccataattccgggccaatacataccaatttaactcaccttttaatagatgcacattggtcttgagaatggatagagcataatttgttcaaccatctcctgattggcttccagattgcttctacttttttgccactaccaacaacacagcaaaaaaattcttgtaccaatgtccctacataatagtggcaacctggtggggttattaggccaaaaagtatgtgaatttaaaaactttaaacagttattaccaaattactttccaaaaa

SEQ ID NO: 318656 - DNA, 4001 bp, Homo sapiens
agacctctccccctgagaagtcaggcggggaggggtggccggggtgggcggaggggcccagtcctctatcggtcccccaggggccctgcaagcagaagagccaataaacatgccaggtggatcagcggtgacactgagagggaacgcaacaccccatcaaaacagcagccccccaacccccatcaaaacaatagcccccaacccccatcaaaacagcagcccccaaaccccatcaaaacagcagcccccaacccccatcaaaacagcagcccccaaatacccatcaaaacagcagccccccaaaccccatcaaaacaatagcccccaacccccatcaaaacagcagcccccaacccccatcaaaacagcagcccccaaatacccatcaaaacagcccccaaccctcatcaaaacagcagccctcaacccccatcaaaacagcagccctcaacccccatcaaaacagcagccccctaaacccccatcaaaacagcagccccccaaacccccatcaagacaacagcccccccaacccgtatcaaaacagcagcccccaacccctcatcaaaacagcagcccccagaccccatcaaaacagcagccccccaacccctatcaaaacagcagcctcccaacccctatcaaaacagcagcccccaaccccctatcaaaacagcagcccccctaagcccccatcaagacagcagcctcccaaccccacatcaaaacagcagccccccagaccccatcaaaacagcagcccccaaccacctatcaaaacagcagcccccaacccctatcaaaacagcagccccccaaccccctatcaaaacagtagcctcccaaccacctatcaaaacagcagcctcccaaccccctatcaaaacagcagcccccaaacccctatcaaaactgcagctcccaaccccctatcaaaacagcagtcccccaaccctatcaaaacagcagccctccaaccccctatcaaaacagcagccccccaaacccctatcaaaacagcagcccccaaccccgtatcaaaatagcagcctcccaacccctatcaaaacagcagccccccaaacccccatcaagacaacagcccccccaaaacccttatcaaaacagcagccccgccactgcccgggagggacaggcttctcacctccctcggctccgtttacgtaaccgaaaccgcagaataaagggctcctcagatcttcgggcgctgctcccaggggtgcgggaaggtgtcccggcagcgcctctccatcgccacaggcccgcggacagtagccaagacccggggcagctggaggctctgcggggggcggtctgacagccccacctgccaggacgcggtggtgtcaggaccctgagatgggccgtttctgtggccagggatctctcaaaacctgctgcgggcagtgacttcattccagccctccacgccctaatttcccacgcctcacaccggcggccccctaggcctgggaatagggaaacggttcgagtcccgagctggggagggtctggagggaagggctgcaggggcgtccgtggccgcgaagaaaggccaaagcgccaggcacagggcccggagacggtgacagacctgtccctggcgcggccgacggtgacccccgctcgcggcctttgcaaagcctccccgtcgcgtcctcgcaccgagcccgcagcgccgaactccgggcatcccaatccgggggctcagggacgcgcggggcggtccgggaagggggctcgggggagcgcggggggcaggggctgcggcgcaggtggctgctggggctgacgggcccagtctccgcccccgggtgccccccgcgccgcgcccgcgggaccgagccccgcgcccgcttaccttggagacgcagcgactgcagcggaggcgcctccgcgactcggccgcgcgcgacccggtgctcagcggagctctccagccgccgccccgcgcccgcccgtcccgcccagcaccgcccagccccgcccagcccggtcccgggcccgcccccggcccccagcgtccggcgcccgcccagcgtcccgccccgcgcgctcattggcagccccgcccccgccgccccacccggcccggggacgcgcgggcgcaccgagacctctgccttacaaggccgactctgctcaggccccgcggaccgccgggtatccgctcagcgcagggcgcggccgacccgcgggtcgtgggaaccgctgggcagggggcggcggggcccctcacctggctctggggccccccggggacgaccggaccccgatctctccgccccgcaggacgcgcgttgacggtgcggcgggggatggatgagcgcggccgcggcctcctggggtggggtgggttggcggcggggcctcgaggacggtgcggggcgagccccgaccgcgcccagttctttaaggagccgcagacggtgcagggaagcggcagggccgggctgtgagggtgctcggaccccaaggcggggcgcacccaggggactgggcttccaggtgggggcagcgcggccggggatcgacctgagcagggagacgggtccgtgccgggcgcccagcgcagctgctcgggagtgggccgcccttcacgcaggagtggaggagcggagcgcgcacccctgaccccggcctcagcttccgttctccctgcaggtcgcccgtatgcagcgccaccatcccggccgctcttccaatctcgcctttctccgggcacctgccgcccctcccccgctccccagacaggctttgcggagggggctcattccgcccggggctgcccggccctccgcaggagttggctccccacaaggttccggggccgagatgacagggcggttctgtggtgctgggtgctgggacttgaggggcataggggcacctgccctggaggaggccgaggcgcagccccccaggaggaaggggtgcctctggtgactttcagctggactcttccagctggactctagtgcagctgagctcctcccccagccccggctctgtccctgcaccaggtgtccagcaggccctggaatccgcaaaggcagaaggggaagttggggtgctgggtgctgggcagggggtgctgaggcctcacagcccggcggcttggcccccacccaccccacggtggtcccgcgccccacacttcctctcctctcctgtggtttctccttccactcagtgctgcccagagatgggcttctgtctagttctcctgagaaattccacactcgcagctgggaagtcgggggacccccgaagctgtgcggcggccacgctgcggctcctgcttccctcctgctcgggtgcgggctcggctgccttctcgtcccgcggagcccggagtgcctccccctcgggtagatcctactaacagcatcaaagaaataatgaaataatctctccttggtgtgttcttaccgtcctaataggcacaaggggactcttcagtgcattttccaaaacctgtacaaactctcttgacataaatgcagtgagtttacaataaaatcgcagtgggaggtaacgtcaggcttcagaggcagacatggtcctggagcctttgggaggagaggagaggagaggcagcgggcgcggggcggcgtccagggggctgagcgaggtctgggcaggaggacagagctgagccttgggctgccctggcccctgcgcaggacacacagtgaccggggctggggtgggcaccccggttctaccgtcgggagtcggcgtgttcatggagtctgtttccttgtctgtgggtgaaactttggcttggggtcacgggtgtgttatttcccagcgacagtcggttcagtcagcacttacaaaatcaccagaaacaggggcacaggatcttgctcagcagggagaggtggatcctgattcgggactccaggctcttcacctggccatggctgcccgtccggtggcccttcctggcccccagctcttgctccactgccaga

SEQ ID NO: 318657 - DNA, 4001 bp, Homo sapiens
tggagtctcgctctgttgcctaggatggcgtgcagtggcgtgatctcggatcactgcaagctccgcctcccgggttcacgccattctcctgcctcagcctcctgagtaactgggactacaggcgcccgccaccacgcctggctaactttttgtatttttatagagacggggtttcactatgttagccaggatggtcttgatctcttgaccttgtgatcacccgccttggcctcccaaactgctgggattacaggggtgagccaccacgcgcggctgcaatttaactgtttttaatagcttctaatttgtataaatcacacgtagcagttaatagaactgttccaaattcccatcggagtagctggtagaggaattatctctgagaatgctgcttcattctttaggaggcaacacggactcttggaaagagaggcaggccttgcgttgaaacactgcctcaatcactagctatgtgatcttggaaaagttacttaaactctgagaattaatatttactccacatacttgaagtgagattgtgagataaagaacacgacaattagttgcttttcttcttttccctcttctccacgagtaacaatccattttaatctccattttagtctagatcatttgctcaggttaagcttacaggtcccatcactgtatcactaaacattacaaagttccacagtaagagacaatctcgctaacacaggcatcattatatgagactgatgagcttctagaaagtctgatgactacatcataatgggaaggataaggcgttcctcaaaatggatgccataagtaaagtaagcgcaattcaattgaacccgaatgtttattgagcatttcctcagctcattcaagaagtcattgttaaccatatattaaggcatccaagaaacaaaaagcgcatttgttgtagtaaaaaacaaataaaataaagctgaaaagatttcaaataaaaggtttccagaaaataggcattaaaaaaattgtcctaaaaaaaaaagtgctgctgttttttcctaaataatgatctaattaaatcaccaaacttactcaaaatggctgtgtacaaaaaatgagagttgacattagatctcggacatatttcccacatacacagtgatttgaagtaaactgcagtttgttttgaataaatctaagttatatgttgtattactatgtattgctaaattctctgcactactgtcatgcaatactaattttacaggggaagctgaagcctgattaacttcgtcagtgccacaggaagaaacaagagacagaaggaaaaagcactttggatgcccgctgtaattcacagagatctccacggtaggagcgggacgtcagcttctgcggctaaaatctcgtgactgaagcagcacagatcagaaagaacgatttaccaggtatctatttcgttctagaaaggggcccataaacctaaaaagcatccaggagaaatcgcttcctcccgcttggcggcaaaggacagagcaggagggcgagcactgagtgtttaagaaggatgaggcctacatggcaaaggcttcgataagtagggaatgcaaggaaacagaaaagggggaatcaggttcgcaaaagtttaccttttagcgccagcaggtgctcctgtttagggggattcacttccattttgaccggcacttttgacccacagcctacgggggctggacaggttcaacttgccccggaaggaaacggaaaacctcgcgtttggcaaaaccaaaagtcaaacgcactctcaacctctctctggtggtggtaccttaaattctcctactgtgtcctttacaaactggcttcttttcaacaagtccatttcttctatcttagaaacgtaggcataaaatactttgttttccatctgcaatcacacatcgcgactgcaggaaaagaaaccacccctaggtaacaatacgcggcctcccaaaggccaacgttgccggagttttttttttaaaaaaaaaaaaaaaaaaaaaaaagagagagagagagagtggcatgctgggatttgtagtttatacaaaaaccgcgttgcatgcagggagatgcccgtaccccctcaccgccctcagttcacgccctggctggtttggattcgagaggaaaaatcattaaaggatctggagttttcaccccaaaactttaatcgttttgtcccttctttttttttcttgtctttcctccagcagctgcagactacataatgaaaaataacaaaagtgcccatgcgcgaggctgtgcaactaaccacccgacgattgcggggaggaggagtaagagtcggctaagcggcgcccagtgtcctactgcgcctgtgcgccggtggcgtgcgcagaggcctctgggtaggtggctcaaccccgcctctcagttgaggactctgaaggctgtttctgtggcgcttcccctgcgaggatggctaccctggttgtaaacaagctcggagcgggagtagacagtggccggcagggcagccgggggacagctgtagtgaaggtgagggaccttgcgtgctctattctccaccatcggcctcccttcggttcatcctggagacctggcggcatcgccgcggcccaggcttcgataggtgggatgcgcggcctctgggccccttttggcattacaagtctcgtcctgtcctctgcatcctttctctcctatggcctgaaattgcctggtcttctgctcatgacatgtcatcatcgggacatttgtgaaaaggagcttgcgggccagtggcagtgacctagaccggtcttttctccaggtcctctgcttttagttaaactcaacagacattaattagcttagtattataaattgagtcatcatcatcgtaactacgtactaagttaggtgttttagctcgttaatatctacttatgaagtagatgtgaattcccattttacagggaggaaacccaggtttaggtaaacagtgtgtggcagagccccgggttgaccggctttaaagtctgtacttttcgctcttgtactgcgtctgtaatcagacatctgttattgggtgagctgccccctcccctgttagtagtacagtctattaactctttgcacaagtctgcagcatcgtcatagctgggcattaacgatagagtttatgaattttcttatgcttgaagtttgagattctaccatgtatacatgctccagaatcaatttgctaaaaaatcatttgaaatatgtggcactcatttttcccttccactgttgtgcacggaaagatatggaggggagaactgatcccattggtttatagagtaaccttcaggagcatctctaatctaagagattgataattctcattcctggctacatattaggatcactgaggagttttagtacactactgatgcactcctcctccagttctgatgaggttgacatcagtatattttaggaattaccagaagttattttaatgtgcaaccagggttatgaattactgatcaaggtaatatatgaagtttttttcacatcttgaaaagtagacacctatgattattcaggtaatgttggttttatatgacagcaaatgagacatttcttcccacaatttagtatcagtgaatattggtggttgttgattcagatgacctttaggtactaatgaagttattctacaggtacacggcatatctgatatgcaaaggagccctcattattaggcatgttgtgtgactgagattttatttattgaattgtgcttttgctaagtagagaatacttgaagagcagtttgtgaattaacttgaagtttaagttttatttcataattggaatgggtatcattgcagtatctatttttttgttaccctgtttgccttacagtctcaaaagtgtaccaaagcctgatgtaactccagtttcttacagcacagaatttgatacattggaggctcaccttgttcattttcatcttaacatgtaaaatattc

SEQ ID NO: 318658 - DNA, 4001 bp, Homo sapiens
ttcgccatgttggccaggctagtctcaaactcctgacctcaagtgatccgcccactttggcctcccaaagtgcttcccaggcactttgtgctttacaggcgtgtgccaccgcgcctagccacaatatcagatttttatgttactgttttctctaatgataaaagccatgtcattatcaacttgttcacaagcaaaaggccattttacacagtattagcattatatacttcaacttttaccttccaataaatacttcttgctttcatctatagaaatgacagtgagatttttttagtttatgctactatacctactacaaattatggcatgaagattttgtcagaaaggactatttcattgcacagttcaggaatattttacatgttaagatgaaaatgaacaaggtgagcctccaatgtatcaaattctgtgctgtaagaaactggagttacatcaggctttggtacacttttgagactgtaaggcaaacagggtaacaaaaaaatagatactgcaatgatacccattccaattatgaaataaaacttaaacttcaagttaattcacaaactgctcttcaagtattctctacttagcaaaagcacaattcaataaataaaatctcagtcacacaacatgcctaataatgagggctcctttgcatatcagatatgccgtgtacctgtagaataacttcattagtacctaaaggtcatctgaatcaacaaccaccaatattcactgatactaaattgtgggaagaaatgtctcatttgctgtcatataaaaccaacattacctgaataatcataggtgtctacttttcaagatgtgaaaaaaacttcatatattaccttgatcagtaattcataaccctggttgcacattaaaataacttctggtaattcctaaaatatactgatgtcaacctcatcagaactggaggaggagtgcatcagtagtgtactaaaactcctcagtgatcctaatatgtagccaggaatgagaattatcaatctcttagattagagatgctcctgaaggttactctataaaccaatgggatcagttctcccctccatatctttccgtgcacaacagtggaagggaaaaatgagtgccacatatttcaaatgattttttagcaaattgattctggagcatgtatacatggtagaatctcaaacttcaagcataagaaaattcataaactctatcgttaatgcccagctatgacgatgctgcagacttgtgcaaagagttaatagactgtactactaacaggggagggggcagctcacccaataacagatgtctgattacagacgcagtacaagagcgaaaagtacagactttaaagccggtcaacccggggctctgccacacactgtttacctaaacctgggtttcctccctgtaaaatgggaattcacatctacttcataagtagatattaacgagctaaaacacctaacttagtacgtagttacgatgatgatgactcaatttataatactaagctaattaatgtctgttgagtttaactaaaagcagaggacctggagaaaagaccggtctaggtcactgccactggcccgcaagctccttttcacaaatgtcccgatgatgacatgtcatgagcagaagaccaggcaatttcaggccataggagagaaaggatgcagaggacaggacgagacttgtaatgccaaaaggggcccagaggccgcgcatcccacctatcgaagcctgggccgcggcgatgccgccaggtctccaggatgaaccgaagggaggccgatggtggagaatagagcacgcaaggtccctcaccttcactacagctgtcccccggctgccctgccggccactgtctactcccgctccgagcttgtttacaaccagggtagccatcctcgcaggggaagcgccacagaaacagccttcagagtcctcaactgagaggcggggttgagccacctacccagaggcctctgcgcacgccaccggcgcacaggcgcagtaggacactgggcgccgcttagccgactcttactcctcctccccgcaatcgtcgggtggttagttgcacagcctcgcgcatgggcacttttgttatttttcattatgtagtctgcagctgctggaggaaagacaagaaaaaaaaagaagggacaaaacgattaaagttttggggtgaaaactccagatcctttaatgatttttcctctcgaatccaaaccagccagggcgtgaactgagggcggtgagggggtacgggcatctccctgcatgcaacgcggtttttgtataaactacaaatcccagcatgccactctctctctctctcttttttttttttttttttttttttaaaaaaaaaactccggcaacgttggcctttgggaggccgcgtattgttacctaggggtggtttcttttcctgcagtcgcgatgtgtgattgcagatggaaaacaaagtattttatgcctacgtttctaagatagaagaaatggacttgttgaaaagaagccagtttgtaaaggacacagtaggagaatttaaggtaccaccaccagagagaggttgagagtgcgtttgacttttggttttgccaaacgcgaggttttccgtttccttccggggcaagttgaacctgtccagcccccgtaggctgtgggtcaaaagtgccggtcaaaatggaagtgaatccccctaaacaggagcacctgctggcgctaaaaggtaaacttttgcgaacctgattcccccttttctgtttccttgcattccctacttatcgaagcctttgccatgtaggcctcatccttcttaaacactcagtgctcgccctcctgctctgtcctttgccgccaagcgggaggaagcgatttctcctggatgctttttaggtttatgggcccctttctagaacgaaatagatacctggtaaatcgttctttctgatctgtgctgcttcagtcacgagattttagccgcagaagctgacgtcccgctcctaccgtggagatctctgtgaattacagcgggcatccaaagtgctttttccttctgtctcttgtttcttcctgtggcactgacgaagttaatcaggcttcagcttcccctgtaaaattagtattgcatgacagtagtgcagagaatttagcaatacatagtaatacaacatataacttagatttattcaaaacaaactgcagtttacttcaaatcactgtgtatgtgggaaatatgtccgagatctaatgtcaactctcattttttgtacacagccattttgagtaagtttggtgatttaattagatcattatttaggaaaaaacagcagcacttttttttttaggacaatttttttaatgcctattttctggaaaccttttatttgaaatcttttcagctttattttatttgttttttactacaacaaatgcgctttttgtttcttggatgccttaatatatggttaacaatgacttcttgaatgagctgaggaaatgctcaataaacattcgggttcaattgaattgcgcttactttacttatggcatccattttgaggaacgccttatccttcccattatgatgtagtcatcagactttctagaagctcatcagtctcatataatgatgcctgtgttagcgagattgtctcttactgtggaactttgtaatgtttagtgatacagtgatgggacctgtaagcttaacctgagcaaatgatctagactaaaatggagattaaaatggattgttactcgtggagaagagggaaaagaagaaaagcaactaattgtcgtgttctttatctcacaatctcacttcaagtatgtggagtaaatattaattctcagagtttaagtaacttttccaagatcacatagctagtgattgaggcagtgtttcaacgcaaggcctgcctctctttccaagagtccgtgttgcctcctaaagaatgaagcagcattctcagagataattc

SEQ ID NO: 318659 - DNA, 4001 bp, Homo sapiens
tatgcaccctaggcccgaagggtggtcaaggggctgctgctggggcgacaaagagctcggatatactggacagtgtgtgctgaaggccccttgaggtgcaggatggagtctgggcttggaagaaaagtggaaggagagttctccaattgtacttctggcccggggttgtaaatggtaggggaggcccaagacacagcttcactttcgaaatgttaatgaatattctgtttctgatgaatgtattcagtgcctgtagaacaagagaattcagagaggcgtagggttcatttgggactttttaggctaagagtgcattaaaccagctccccagccctggggccataggactgtcgggcatgaatctaaaactactccatatgctatatctgcggcgttggagttagtggggtgtgggactgcagggtttcaggtgctcacatcagggctacagaatcatcctcctttctgttaaccgcgcacagggagtcgagtgctcctttgtgccatcacctcttctcgaagctccaggcgcagagggcaaacgctgacgccctttcccgccttctctccgtctgcgagttccggagggcagtgcactgtgcagcctccgtacttcccgacacgttccgcctgcaaaccacttaggagcttctgccggcaatttctcggatgcagcgcggagcccagcctcccgcactgactcaggcccggcaccaccccgcctgctgagggcgtcgtcgcgggcgccaccgacggcgccagcctgcgttcctaaaggctccaggacaggtgtggggctgaaatcccgctcctccagcatcttcccctccctaccaaaagaaggctgctttaaatattcccggcctggagcagcagcagctaaggacctggaaagaggcccgaaaaggccagggcagggcgaacgaacgtgctgtccctatttaccggccacacgctctgactgcgggctgaccctgatcgcacacttcgagcctgttcactcgctgggcggaccctccctccacgctccgcgcccaggcaggcgaggtcacccactcgaagtcaccacgtttgagtagccctggttggtggggcagcgcccccttggccaacgccccgccctcctctccatcttccgacgctgggctctcgcccttcggcgtccgagagcccctattgctgcccagctggccccaaaagcgtccgaaagtcccctcttggcttatttcagagatgccacgcaataaagaaaaggcggctactttgcattccgcagctgctgggacgcccgggctgcgagcgcggctcctggattccagcctcccgcccttcccaggcgctggaatggacacggacgcccacagtggcgggccaggtagtgccggagtcgggggcccaggccgcggcgccccgcgcctcatcacttaccttgcctttagctatcaattccatgatgtagccaaattcactcatctccccagactccgacatgtttacaccccttcacaaactctggaggaccgacgcgggtgtatcgaatttgtcctttcttttctctttttctgtttttagtctgagttttgccgagctccccgcccataagctgttaaccaggaaaagaggggaagcgccggggaaagcaagaagcgggcttgggtgaaatgaaggccatcgagggctcccgggcagcctcgcccggcttgctaggatccgggtgcagcggtcggggctgcgcgatctaacggaacaaacgagggcggcggcggcggcagcagaggccgtgaaaccctcaccaggcggagccgggcgcgcggaggccccgcctcctcgggggtcgcggcagcggttcggaccgcagcggagacaaacaaacgcgcacacaaagcgggtccgcactcggctcagcgcggccccagctagacattccccggcctttatcgcatgccggcaggttggccgtccccggctctcggcgcgaagatctggaaaaaagccccatctcactgtctggaggtgcgagggcagacagaaacgaatacagaggaggcgcaacaaaggggctggctgccagcgccggaaaataaataaataaatacataagtgaaggccaggaaatggcaacggcgcatctcaagtcagccttcctgaaatccaataggtaataaagaccaagccccgcgcttcggagatgagaacaaatacagggattgtattttaaacactctgtgtaaggtctgttgtatctccatatccttttgatactcaactttcctttaacaacgacaacaaaaaaaaaaaaaaaagaaagaaagaaagaaaaaaaaagaagaggaaagaaaagaaaaaaaatattgccagccaggttcctggacactctgaccgttagttaccacaagtccacttttctaattatttgtttcgttggttgagttaaagcattcagtgcaggcttctcacatttctatacttctttttataacagcagcttccctaggaggctacagctgaaatggcctcagaccatacctgacaatctttgcttctcttcaaaagaaaacttggctgaacaaaatcagtcccagtctatcactctgctctaaggagtctttgcgattaaaggcttgatgttttttctttaaaaagaaaagaaaaaagctgccagcaataattagattagacacgaataagatttactacaaagttcgtgaaactactttccttaagcaagttggcagagtttgcgttgcgctcagcaccagtgggcagggtggtgtgtcgaaatgacctattttacaggtgtaaaagagttttgcaggcttaatgagacgtgggggtttttcttttttgcctcttccttttgtcattttctaatttctccactttggtccagaaatccagaagcatacacatttctttcttttttcagcacacctctccgtaaagctccaacagtgttgctctgtaactgttgttctaccagaactttgcttcttcggtgtgttactttactttatgagctggtgctgaaaacctcttagaacaagcagcaaaagttaacatgctgatgttcacaattagggctctgtaggaggcaagacacaatcataatgcttcttggatatacagctagaagcttcttgtccctcttaagttctgtagaacttcatgtatactctttgcgtccataggaaaactagtagaattcaactaaggtctgtagcatccataaatgggttcttgcctactattagcaacacttgatggattaccagaaagagatattgctctaaaagtgaacattttttcacacccagaatggattctggcacctgattaaaaaccacagtgttagagctgaacagctaatcttatgtctgcattacaagcaggaaggaggaaggtagagacaagagcacacaagacatttgtttccccttaaaaagcttcccccagccccatccagtgacctccacttacacctttgtgagaaatgggtaatatgcatcccctagctccaaggaaggctggggaggtgattattttgttctgggaacattgccactctaaacaaaatcaaggatttgttagtaaggaagaagaggagacagatatcgggtagaaagttgttagtttctattaaccttgagtaagtccattcaactttcagagcttcagttttctcttctataaaatgactggtgttgactaaatggtctctaaccccttcctgttcttaaccctaaaatctctgatctgaggatccctttgccatctggccgcattagctgccattctcctccctgaaaagatcgctcttaaaaaagggctgtccacctgatcacttgctactagaaaatactccagacaaaatatccttatcagttgcctagattcctacccaagaccaagaaagtggtggaggcaagagttttagagaacataagttgggtcctgagcatttatttacaccaatgcctggtggtatttaccactctttattg

SEQ ID NO: 318660 - DNA, 4001 bp, Homo sapiens
gcacgttttacatggcagcaggcgagagggagtaagaacagagaatactgccttataaaaccatcagatattgggagaattcactatcacgaaaacagcatgggggaaaccactcccacgatccaatcacctcccaccaggtctctccctcaacacctggggattacaattcaagatgagatttgggtgtggacacaaagcctaaccataacagaatattaaaagaatgtaggggaccctttaaaaaggtgtataagcaccactacaactgctctcaatactacagcctttcattattttaagtgagaagcattttagactcatcacaactaaaaaagtttgatgacctcataccagtttccccatcatttctctacgtagttttttccatgtatcccagacttcatatctatgaatcctatagtcagcatccctgcaattttaaagacagcccaacttcaaagtacttataaccttgtacaatcatttcagctactagaaatacacagaaaattaaaattgacttaactaaatgtaatgaaattttaaaatgtatgctaacctattctccctaaagtgacaccaagtgcttcaataatctctgacaatttaactgcattagagccaactggttttatcattgtcagtgggtgtttcgatgcagtctcttgctgcatcactcaaatatgtgatgaagagccatatcacctcccaactgttcacagatttggaaataagataactaaacctcacaattcacatcaaagaatacagaatattcacatcctatctcatttcacaaagggtttggcacctaattcaaaagaaaatcttgtccgggatatccaaaataggttcttacattccattttatgtataaatatggtcagttcaggtttacttgtcactgggggaggatctaaaatcatttccattttcttgtacataaagcagtgtcttgaatctgactttttaatcacaatggacataaagtatttcttacccaagagaaaatttagttcatctgtcattgagggagaaacaaactgattaagtgtgatgtggcggctccctcaattaagcagttcctcgagaaacttcggaagaattgcacattcgacacctttaaacaaaaacacttgtaggctgacagctgccggggccccggcccgccccccgcgggcaggcgaagccggggaggagcctctggcccaggcggcggcagccggccgggcccgcgggggtcaagacgcctagacaaagggcggccccgcaagcgcgagggacgcgccccagctttctgcccgcacccgactcccaaacgctaattaattctacagcctgagctccattagagagaccctccatgattcccccgaggtgctcaggtgggcaaccatcggatttgcgctcttctccggcccaggggaccccacgtccggctctcggggatagaaaggggacgccccggattgcggaacctagccccgggcgggagaaggcgaagaggaagcgggatccccacacgcctgcctttgctctcccgggaggaggctccctccgggctcccggcggaggaaagagaaagagccgcggtcggcacaccgccctcgaggtgggggcggcggtcccctccgcactcaccggcgaatctgagccatcgccctccatggctgccttctgccaggtgtcatcagcggcacgttccactcacaccggctaccgagcgcagggtctggtgggcgggtccctgcggcggccgtggagcctcggtccgaagctggaagatgagctggtcagctgtacgtggccagcggaccgacgcggggagaagtaagccggggcaggcaaaagcacaggcgcgggagaagcgagctttgctcccagcgactaccccgggaatcccgcccagctgccggctgcagcagcggctcctgcggactgcggctgggaacggcgccgcgcagagacctgggcggggcaccgcggggcgtggacagggcgtggcctggtcgttgcccaggcaacagcgccagtcgcacaaaagaggcggggccgcctggggctggtaggccgggtgtctgagtggtaggctgagcgggactcggctgggcgtgggtgtggcacgcggttgggactcggcgccctccgccgccaccttccccctacgcatcagcccctccctcccacccgggtagtcgcccgtcgccctatgccaggctggggggctctgaggaacggaagtgagggcagcggggagcggtgggcgggtgccgagggcggcgccggggcggggaggctccgctgcagcagagcagccggctgcagccctggcccctggcccctggccctgcgctgccattccgcccttcagtttgctctcactgcgctttcttcactcgcggttcgaagccccgcttccaggctcggcacaggacggtgcgggcgagggcgagcctaagccaccttccctgaatggccgcggcgagcacggcagagctgcgcgaggcgaccagagtgagaccccgcccgccctctccgcggtccctagccaggcgcggcctggggttccctggccccgcccggcttgtcccagttctcttctggcttcacttgctgggtgaacttaatagtccctgactgggcaccgagcagtcatatcccgctttctgcttctatacccccaagtcgcgatgtcaccgcacgttcttgcccagtagcgcggggaccgcctgcagggtggagattcctctcccggatgctggccagggactgaagttaaaaggccgcggcaagggagagaccccccgccacccgggcctacgctttccttcctgagggccaggacagagggtcctgagcggctccggcacccccgcacccccgcggggagtgctgctgaacgttaaggcgcgcgccagctcaaggactggcggcgcacatttcacctgccacggcccaagtgtgtttctggtgttgttttcaggacacacggagaacaaattaatttaggattattagatcacgcactgcctttctggctagctaaacaattcattcctatgtattaggctttaagaacagatgccctaaattgctgggtaagtagggactacagagctgtagcgagacatctcgtttaggttttaaaatgcttcccacttttatttcctgtttgggagaagtctgtcgctgtggcaagttccgtcgtcttcccacagccctgtctgcagcggtagcctcgtctccaatccggcatctaaataaggagtgtagaattaaaaacactgagggactatagcaattttctctaatggaataccctccatttacagatgaggtgaacagaggacgaaagctttgccaggtaataatgcctgggctgttctgatccggattaatgcccgttgcgtggccgcaggtgctagacttgggaaggcttccttcccacaggttctgaaaagtgctaatcaggaggagactaacaaatgcctgcgtgaattaggtgcctatatatatatacatatatttaaaggctcaaccattagaaagcattataagtctttctcatactggcctttgagctaaataattccccttgggctgtaatttcacatccgcacacctgctttgatccaaaacttattagttgacacagtaaaagtgattagaaggctccattaacaggaattaaagataaaatctgtatagacaatattttggtgaaaatacattgctatggccttccattttgcaaatcagacttcactgagctatcattttctacctgatccacaaaattcaaacatgatgttaatatacttggcaagtgttaatacacttggcaaaactgtgtctccaaaaaaataaaaatacttatgcagtgggcacaaccttaccattatcaccccagcacaggttttagttgtgtgagcaactatctattcatccttctgaaacagatcatttggtggtatttttgttttggtcccatgagatgt

SEQ ID NO: 318661 - DNA, 4001 bp, Homo sapiens
acccactgggaggcaagtgcagagcatttgggtctgacactgacactagcagttatctctgtgttcctgcttctgagccttttcttgtcctttgaagcccccagttctttccatctctaggtgtctccgtcaaggacagacttaagactcacccgaaagaaaacgagacttctggtaaagccctagagacctgatctggcatcaccggctttgctctatttgctttgaggaagccatccttccctggtcgtcttcactgcatctgctctgtgtacagaatccttctcattctaatccaccttggtggcagtaagtgcttagataagcaaacttggctcaccaataccatgaggttctttggtgggtgaagagatgtttccttttcccaggtccccttacttcctctccatccccccactaaactcccatcttctctctgtacttctctcaccttgtactcctgcaccacctcctccaatggcaccacgctgtgctgtttgtggctcctggattctcggcacaccacacagatggcctcttcgtctacctcgcagaagagcttcagggcttcttggtgtttgggacagatgccctgatcggtcacgcggctccctcgaccaggggttgggtgcatctgccgaatcacctggaccatattggccagctgcaggttggggcggaagctccgccgaggaaagctctttcggcactgagggcatgtgaagcacctccgaggggctggaggcgggggcagtggggtgacggggtctagatcctcttcctcaacctcctccagcacttcctcctcgtcctcctcatcctcccccctcaggtcctcctcctccatgtcccccaagtagtagtccaggtcttcctcctcgtcctcctcctcccacacatagtccatgttgtcccagctggacctgctcatgccactggtccagaacacaccctcttcttcctcctcgacctcctcctccatgtcaccctcgtagtcttcatcccgcatgggggtgtcccaccccgcgccagcccccacagcctccacttcctcctcctctccgtcctcctcctcctcctcccgatctaactcatctctgtcctcctcatcctccccaccccacaactgggttacacaaactcggcagaagttgtgcccgcagccgatggacacggggtccgtgaagtaatcgaggcagatggcgcacaccgcctcctcctgaagggtctgcacagggttgggtgtcatggcaacggcagccatcttagtgtccagccagccagtgtagaggttcggtgggggggcgaggggcgggggtcttccctaccgacgccctggcgacccggctccacccccagccctgcccctccacacctcgccccaagagcagccagagagatgtcctgccgacaacccaccccaacacagtgttccctactcccaaacgacaaccgtgtctctacgaggggaggggacagtgctgggcgccaccgccaagtccctcaggtggctctgagtacaagtctgccccaatgctcccttggactcctcataaacccccgcccctcctcacttcctggccccgcccctagcttccggcctccttcccaacacttccggcgtctacacaccacctaagctcgcgacttccctccgctgtcctgctactccccctttttccccgcggggccccagggcgacaggaaatggcgaggagacgctctagtccgcactagagaacagggcgggagggctaggacggtggaggcccgcgtctctgtggtaagaggccgcggggaacgcagaaagaacagaggaaccgcctacccccatcccccgccgctggggagaaacttcggggggtagggggagcgcctggcggccgtctgctttcggtgctatcaccgcatcggccagacgccatcctaccctcccggcacagccgactgcagccggtactccccacagccgatgccggaagcgagggggtgggtccgcggcgcgccctgaagtacttccggcccttctaggcagacgacttcgttgtggaggactcagagggtcgtccgggtcggaccgggggcggggcctgagaaagcgcttcgcgggttagggcagcagacgccccacccttccccaactgtagtcggcgtttcgcatccgaggtagaaactgccaaccggacactgtctcatggtttagatgaacttccctaactgcccagcagtgaagaagtggtgacgaatcattacatctacattctcacagcatctctgcaaaaatagatgctttgtgcggtagaaataatacttgatgcttaaatagctctttaaattttatttttatagagatttgatgtcgatacataaataaataaatgttgtttgatgcgagaaaaatgacggggccatgatttatgtacagaatctccagtgagtgccagacacagcgtgacgccagggctgggcctgcagaacttaccctgctctcaaggcggctcgcgggaaaactccagatggacgtcgcgcttcctaggggggtggtcaggcctctgagtatgtcagatcaaacgcgccaaaaaccacgaaccctcgtgggtgaactatgctaggccattacaggacctgcggactcggctgcggtggacaagtccggctccagaacctggacaccgctcagccggccgcggcaggggtccccgggcctgtcctacaagggcgcttgcctagagctatcccggccgtctcagccgtgtgtgtcttcaggacgatgccggcaggaaagtagccaaggtggtttccgtagtgtagtggttatcacgttcgcctcacacgcgaaaggtccccggttcgaaaccgggcggaaacacgttttggtctgttcgggagattctctcccgaggccggccttacgtggcaggaaggacatgtgtgtccctgcgcttcggaggaacacggactggggcaaaactgaaggagagcactactcaagtaaattcaggtctcgcccctcacctaatctcttgctcttcccttctgaagcctatgcagccatcacatgtacaggaatccgtagatttcagatcctcggctctagtgcctagaacagagccaggcgcaggcgcttcttagtatttgcacagtggaaacgtgcttacacctctgagggtaacctccatcttcagagacaaagttagaatacagacatggccgcccggctagctcagtcggtagagcatgagactcttaatctcagggtcgtgggttcgagccccacgttgggcgtaatttcgctttttggaaaggttaaggcaagttgtgttacctaagtgcacaaatggtattctctgtaccaagacctagtgggtagcagattcaccaacagtgggtgttagaacttggactaacctggtgttctccgatccgtgtgtggaaggccccgagcagaattctcacaacgtttgcaccctcgctaactctcaaagaaagaatgagaggcgggtacctgtggaccaattcctgcaggccagcaccgcgggctatcgtgcatgcatgaccctttgctgtaggccactcgcccacgggcagcacatattaggcattttatgtttaccagacggcctgcccccgtcttgctgtgagacttgctgtgctggagggaacaatgtggtttatcgaaactggggtgagaccgcaggacgaccccaggcgttcgtgagcgtcaaaacctatctgattcactcccactttactgggagatttagtggttaggcttccgcctttgtctcgctacgacctgctttcgactccctgtcaagaaagatgctttgtgtcatatgagacacttgtcttccgtatattcttttttatgctcttgactttaagagtctatttttgtgagatgttgccccacaaataccagcctccacgtttcccccatacataaatagagataaaaacgggccatgcgccgcggtggcttatgcctgtaatcccaatac

SEQ ID NO: 318662 - DNA, 4001 bp, Homo sapiens
gactagaaagcaaggcattaaccatatcagcacccaaacaagggaagacaagttacaagaaagccaaataaaacagcaaacatttgtttagtgctttatggttaacatatatgatctcttttaatccttacaatcctagggaaaaagtgaagctcaaggaggttgacacctgcccaagactagacagtaagtggcagagccaggtcatctgatcctaaatcccgcactccttccactatgataaaataccaggaaagaaaagtgatcaggatatgaggcacattctgatccatcaaagatgcttatatgctttgcctttctctagaaggaaaacggaccccactgaaggtagagatgcaatcccagactttcagagggggggtgtggccaattgctatcagtagtttaggactcacatctggcatttctgtctaccaatacatctattttgacactgcttgtgctgaggtcccaaatgtctattatctccaagtactgtggctttctattcctatctgtacctgtcccagggaattggtcaaggactcacattagggagaaatgaagtactgggtatctgttactcacgtcccttacacttaggtagactgccagtattagcagtagtggtccgcttccagtgaccgtcatattatctgttcagcttcctctggggaagccaatctgccccaatcttcatggttttgtgtctccttttttacccatatgaccatctctctccaccgtgtctccctcatcaaataaagagaagtttagcaactaagtacctgaggaggtgggaaaggaatgctactcattcctcagctctcctagttacctttccactcccttcatccccccacattccctcatttctctcacctggtactcctgcaccacctcctccaaaggcagcacgctgtgctgtttgtggctcctggattctcggcacaccacacagatggcctctttgtccacctcacagaagagtttcagggcttcctggtgtttaaagcacatgccctgatcattactccggtttccccgataaggagtggggcacatctggcgaattatctggaccatgttggccagctgcaagttgggacgaaagctgcgacgtgtaaagctctttcggcactgggggcaggtgaactgccctggaaggggcaaggaaggaggcgggtggatgtcaggatacagctcttcatcttcgtcctcatcgtatgcttccagtatttcttcttctcggtagacatcaattctcaggtcaggtctcaagcctcctaggtaatagtcctgatcttcctcttcttcttcttcctcctcgtcccacatatagtctacgttgtcccaattagttataccactgtcaccgagccagagttcatcgtcatcttggtcttggaacaactcttcgtcagcattcccccgatacaacacctctcgaatggagccgtcccatccatccatggcccccaccgcttcctcgtcctcctcctcctcccattcatcttcctcctcgttctggtcctcctcgtcctccttactccacagctgggtcacacaccctcggcagaagttgtgcccacagctgatggacacggggtccttgaagtaatccaagcagatggcacacaccgcttcctcctgaagggtctgcatggggctgggagtagtggcataaccagccatcttaatgcccgccggcaggtgtagatacgtcagcttggagctgaggagcggggacgcgcctgcaggcctgcctccaaactactctggtgacccgaggctgtcctcaaccttgctcttcttcctcggggccgcaggggagctttgaccccctctctcagggtgcgaacgcccagatccagactcacagcctctctctgggatcggtggggacagagcaggctgcagcccccagctgctcggtcctgtcacgtctctcgctaccctcagggtgtgccctacactgcggcgtccgcctcagatgcagccgctggctaccctgcccgaggcgacgcaaaatgacgtctcgctcctgcacacgctctggagagacgctctaggccggcggaggaccacgtctctatggtgtgccgggggccgcgcgggccgggagttgggtgggctgggggacaggcgcgcccgcgccgcccgctccagctgggctagtgctgcacattccggccagcccctcctcaagaccccattcccaagccccttctcagctccctcgggccggcagagcggctctgatcaggtcagcggcggacgccgggaagaggcccggcttgggagaggtggtttggtgggttggctggttctagatggtgggggggtcaacacttgagggggactgggtctccgagccgttgtccagcctgagccggagccccaggaaggttagagggaagggggataaatctctccggaagccccgcccgggccggggccgagttggtccgcggcggtggggaagcctgggacaccaccctggtgctgtcgcccgtcccgccgtccgcgcttggggtgcctttgtggggatccgggcgccgcacagctgggagggcctgccgcccgggaggctcggatccggggcgcccagtgccccccgctgccttccgtgagccgtcgggccccagctccacgtaggcctcagacccagccctgtttctgcttgcggggccgcggctgcgcagtattgcggcgtctgccagcaaagctgcgccccggtcgtgggtcccctgagggggccggggctcaagttcccttcggtgctgccgcctgcgtcgggccagggttccgagttccagccctgagctctgtgagctcggccgggagggggctggatttgggaccacacttcctcaccgccgtggtttagacttagtttgagagcggctggcccctccttcctgtcccggtgtcctccgctgtctgttatgcccttcactcctccctggggagggagggctgggggcgctgtctgggtctgttttccaccccagcggggccctagggcagtgtcatttagactccactctgtcacctttcctggagaggggacctgatccagggctgagaggtttttttttttttttttttttttgagatggagtctggctgttgcccaggatgcagtgcagtggcgcgatctcggctcactgcaagctccgcctcccaggttcacgccactctcctgcctcagcctcccgagtagctgggactacaggcgcccgccaccacgcccggctaatttttttttttttgtatttttagtagaaacggggtttcaccctgttagccaggatggtctcgatttcctgacctcgtgatccgcccacctcggcctcccaaagtgcgggctgagagatcttacagtgggagggggaatcaggccctggggaaaggcttctcaggggttgtctccttctgtcttctgtctctgcaggtagggatagaaccaggtcaggcctggatttgtagtcccagagaacagaggatggagatgggggctggacgcagctcagaggggctggtgctcatgggctctgtgtatgccttctcctgtggcctggttctgtgtacagatgttctaccccagtgctgagggccaagacaccctcttggccttggtgctgggggcatcctggggcaaggagtgtaggcagaactcctcaacattggagatttggggaaattgtgtcccctcccttttagactcctgtagccccctgcagtggcacgatctgggcccacagcaatctccacctcctgggctcaagcagtcctcccacttcagcttctggaatagctgggaacacaggcatgcaccaccactccaggctaatttctttatttttttatagagacagggtttcgtcatgttgcccaggctaaagtgccgtggctatttatagtcacgattattgcaccctaccacctcaaactcctggactcaagtgatcctcccgcctcagcctgtggagtagctg

SEQ ID NO: 318663 - DNA, 4001 bp, Homo sapiens
attcgctgggacagctccagtttaagccagttgttttgcaataattattttagcactgcttttcactttaaaaagctctggtttgtacaacaattatgtggacaccctatataatatggactctattatctttctgaaatcgattctgcggttccatagcacacactccaacaccacacacaccgagccctggtgctgagttctcaggcctctgtaatgtcccacggggggcctgcgggtgcctggctcaccagcagctccttgctctccttcttttccgtggaccggaacacctcacagtcctccagttccttcttcaagaccctcagcctggactccaagagctcctgtagatgaagggaaacaatgtaaggtgggggtgaggggcttctggaaacccccacctctgccttcctggagccagccaggagaaagggaaggccctgctcactgagggggaggccgggtagaagtcatctctacaggctacaggttacactgcgaggtgactctgaaggtctcgggatcttgcttccccaaaagcatctgctggaccagccagactgaaacacaagctccggcagccctacccctagtcgtctcctctactctccgcccccccaccaggaagccccgtggctgggagagttggagcaggatgggccagcaaggagagactggggactgccgcccgagcctccccgccccgccctcacccctgcacacaccctcgctgaggctcagcgagaaaatagcaaagaaagggcccccagaatcgacagcgttggcacagtcagacggctctaggtgcgcggcttaacccgggagccccctccctggacatcttggcgaggtcctctcactcagttccacgaggtggggactttgagcagagcccgcttcggggaaagagataagagtgggggcagcggctgcgtggctgtgccggagacttcccgcgggcagagagctgcggagacgcagaccaggctagaggctccgaacagacaggaagaacatcgccaagtccgtgggggacgtcgcgcaggcggcccagtatctggcccagagggaaacgcagtgggggtggggtgggggtattggtgatgttgggggtgacagagaaccgcgctcagcccgggaaccagcgctgggcttcctggaatggagaaagaagggaggggctcacccgggcctcctgatcgacaggctgttctctgcaccccgtgcgcgggagcgcgggaccaagtcagggggtcccggggacccacggggtgggtgggggctgcgctcaccttggcctcctgcaccgcctcgtccagcggcagcacggcgtgctcgcggtgctcgcgggcgcggtcgcacaccacgcagatggcgcgtccgtcgtcctggcagtagagcttgaagggttcgccatgctgcccgcagcgggcagccgctgcccgggccgcggccgcctgagacccgtgctctcccggggcagccgcgggcaggctgaagcgccgcaggagcgtggccactgccgccagctgccggttgggccgcagctgactggggcgcgcgggctcgcggcactgcggacagggcagtgggaaggggggcgcgcgggtggcggccccaacagaccccgcgcccgggcgctcccagcagcgccctatgcaggcgcggcagaagctgtggccgcactcgacggacaccggctcacgaaagagctctaggcagatggagcacgtcgcctcgccctgcagctctgccgccagcgctagagcctcggcgccggttccggggccggtccgcggtcccacagccgccatgcgcgctctccgcgcacccagatctggtcgcgcctgggcggccactggacctcacaggacgcggagctgggcgccgagggcccactgggagaggaagggcggggctgccactgggcaggcagagactcgagcccggggcgcgcccggctgggagccgggaggggaggcgcacgttgactacgggccattcaagtgcgggacagcgccctgcgccccggatctgcgctccaccagcccccgccctggccagcggcctctccccctcgcccccgtccctcagactctccaggccgccccagcctgacccagtcagccgcgggaaacgggccgcgacaggtgggcgcacaaatgctgccagcgccactcccggtttccgaccgaggccgacccagcatcgccggggcaagggcctggcgctcgggccacggtgtcaggttccgccagcgcaggttcgccccggccctgtgctgagttaaatttagagactggaacctggtcctgtcccctcacgcgcaagcgtggccttgtatccattccattaccttttctgcgactgtcctccggcttctttactctttacttagtatttgaacagataacacatttataatttcccattgtattcagtattattccccccccaccgcacacacacacacacacacacacacacacacaaacctcagcgctctcttgtcccccagctgtctccacagccccgcagcagagctgcctgtgttatccgcttccacaccctctctcctcgctcactctggaggccacttggatcaagctttcgcccgcaccctcctcagaaaccgcccttgccaatgtcaccgggaacttcagcaattctcacccaaaggcgaagacctcgcctcacctcatctgcccccggatgctccctccttcccgacttcccttctcagggccttccaggacccagtgtccccgatcttcttgctgttcctgaaccccgtggcctctgcgctggctgttccccttgcgtggacctcttttctcccaccacctgcatgctccctcccacctcattcaggtcttgtttcaaacgtctctgcccacgaagcccgccccgaacgcgcacactgtgtaaagtcgtctcttagcgcgctcccttctcagggccggctctgtgcccgcactctatctcctctggaatgtcagctttcagatggactgtactaggtttgttcacggctgaatcctgtttttagagcagttcttggcaagctcagtaaggttttcttggattaaacttggttcgaaattcaaaagaggagccgcagttcacggtggaaagtaggcccatcgcctgtgtcccagtcctttcttcctcccgagcaatcaactttacaattctggattacgttaatcaaatattccgtattttattgcctcaacccccacttttaaaaaacaaaacgtagcatcctgcacaattttcctttcttctctttttcaggtcacagttcatttttggcatcgtgcctgatgattgtctctcctttttccacagctgctcccaggtgcttagccgggcctaatcctctctcttggaatcccttggtcaagacccgctggtttggagtcagcggaggacgctggaacaactcttgccctgcgatgccgggtttttgcagcggctgagacccagcgcgtaccggttgccttccactcccggtgtcctgagttaagcgaccaatagggaccatctgggagagctgctgagagtaggtggggatgtagctcagtggtagagcgcatgctttgcatgtatgaggccccgggttcgatccccggcatctccagtgtagttttgcacattcaattattgttttcgattttcctttcaaattttgaaatccagcatgtttgaagagctccaagaaaaaacccagagggtggagtctgcggagtagaaaaagaccgcggcggcccctgccctcctctgggccccattgtctttccctcctgttttaaaatccacacggtacttgaccgggtgaggtagctcacgtctgtaatcccagcactttgggaggccgaggcgggtggatcacgaggtcaggagtttgaggccagcctgactaacatggagaagccccgtctctactaaaaatacaaaaattagccgggagtggtggcacacgcctgtaatcccag

SEQ ID NO: 318664 - DNA, 4001 bp, Homo sapiens
ggctaattttgtattttaagtagagatggggttgctccatgttggtcaggctggtctggaattcccaacctcaggtgatccgcccacctcgacctcccaaagtgctgggattacgggcgtaagccaccgcacccagccaatccttttattctttcaacacctatttactgagctaggaactgaatttgcaaggtagaaaatgaccgatggtgattcatgtttgcttatctttttttttttttttaaggtggagtctcgctctgtctcccaggctggagtgcagtggcgcgatctcggctcactgcaagctctgcctcccgggttcacaccattctcctgcctcagcctccggagtagctgggactacaggcgcccgccaccacgcccggctattttgtatttttagtagagacaggggtttcaccgtgtttgccaggacggtcttgatctcctgacctcgtgatccgcccacctcggcctcccaaagtgctgggattacaggcgtgagccaccctgccaggcctcatgtttgcttatcttaaccaaaatgagccctcgtttcactttcctgttctaccctaaggaagataaaatatcattccaacttggggtagaggcaggtgccagtacccaagaccctgggctgtgcagcaggggctactgtaaacccaagaccctaaacttcctccctctgccagagccagggagcagctctgacgccctctagccccttctccgttagcctcgatttcaaataaaaacactgtgaacatgaaatttttttcactactgttttgttgacaaaacatgccatgaggctctttattgtattaatattcccacttattgaatatccatgtttctctgcagaaatagtaatgtgttccattacaagatgcttccgcaggccctaactggtatgttacgtaatatcagagtgactgagcgtcctgattcgctgggacagctccagtttaagccagttgttttgcaataattattttagcactgcttttcactttaaaaagctctggtttgtacaacaattatgtggacaccctatataatatggactctattatctttctgaaatcgattctgcggttccatagcacacactccaacaccacacacaccgagccctggtgctgagttctcaggcctctgtaatgtcccacggggggcctgcgggtgcctggctcaccagcagctccttgctctccttcttttccgtggaccggaacacctcacagtcctccagttccttcttcaagaccctcagcctggactccaagagctcctgtagatgaagggaaacaatgtaaggtgggggtgaggggcttctggaaacccccacctctgccttcctggagccagccaggagaaagggaaggccctgctcactgagggggaggccgggtagaagtcatctctacaggctacaggttacactgcgaggtgactctgaaggtctcgggatcttgcttccccaaaagcatctgctggaccagccagactgaaacacaagctccggcagccctacccctagtcgtctcctctactctccgcccccccaccaggaagccccgtggctgggagagttggagcaggatgggccagcaaggagagactggggactgccgcccgagcctccccgccccgccctcacccctgcacacaccctcgctgaggctcagcgagaaaatagcaaagaaagggcccccagaatcgacagcgttggcacagtcagacggctctaggtgcgcggcttaacccgggagccccctccctggacatcttggcgaggtcctctcactcagttccacgaggtggggactttgagcagagcccgcttcggggaaagagataagagtgggggcagcggctgcgtggctgtgccggagacttcccgcgggcagagagctgcggagacgcagaccaggctagaggctccgaacagacaggaagaacatcgccaagtccgtgggggacgtcgcgcaggcggcccagtatctggcccagagggaaacgcagtgggggtggggtgggggtattggtgatgttgggggtgacagagaaccgcgctcagcccgggaaccagcgctgggcttcctggaatggagaaagaagggaggggctcacccgggcctcctgatcgacaggctgttctctgcaccccgtgcgcgggagcgcgggaccaagtcagggggtcccggggacccacggggtgggtgggggctgcgctcaccttggcctcctgcaccgcctcgtccagcggcagcacggcgtgctcgcggtgctcgcgggcgcggtcgcacaccacgcagatggcgcgtccgtcgtcctggcagtagagcttgaagggttcgccatgctgcccgcagcgggcagccgctgcccgggccgcggccgcctgagacccgtgctctcccggggcagccgcgggcaggctgaagcgccgcaggagcgtggccactgccgccagctgccggttgggccgcagctgactggggcgcgcgggctcgcggcactgcggacagggcagtgggaaggggggcgcgcgggtggcggccccaacagaccccgcgcccgggcgctcccagcagcgccctatgcaggcgcggcagaagctgtggccgcactcgacggacaccggctcacgaaagagctctaggcagatggagcacgtcgcctcgccctgcagctctgccgccagcgctagagcctcggcgccggttccggggccggtccgcggtcccacagccgccatgcgcgctctccgcgcacccagatctggtcgcgcctgggcggccactggacctcacaggacgcggagctgggcgccgagggcccactgggagaggaagggcggggctgccactgggcaggcagagactcgagcccggggcgcgcccggctgggagccgggaggggaggcgcacgttgactacgggccattcaagtgcgggacagcgccctgcgccccggatctgcgctccaccagcccccgccctggccagcggcctctccccctcgcccccgtccctcagactctccaggccgccccagcctgacccagtcagccgcgggaaacgggccgcgacaggtgggcgcacaaatgctgccagcgccactcccggtttccgaccgaggccgacccagcatcgccggggcaagggcctggcgctcgggccacggtgtcaggttccgccagcgcaggttcgccccggccctgtgctgagttaaatttagagactggaacctggtcctgtcccctcacgcgcaagcgtggccttgtatccattccattaccttttctgcgactgtcctccggcttctttactctttacttagtatttgaacagataacacatttataatttcccattgtattcagtattattccccccccaccgcacacacacacacacacacacacacacacacaaacctcagcgctctcttgtcccccagctgtctccacagccccgcagcagagctgcctgtgttatccgcttccacaccctctctcctcgctcactctggaggccacttggatcaagctttcgcccgcaccctcctcagaaaccgcccttgccaatgtcaccgggaacttcagcaattctcacccaaaggcgaagacctcgcctcacctcatctgcccccggatgctccctccttcccgacttcccttctcagggccttccaggacccagtgtccccgatcttcttgctgttcctgaaccccgtggcctctgcgctggctgttccccttgcgtggacctcttttctcccaccacctgcatgctccctcccacctcattcaggtcttgtttcaaacgtctctgcccacgaagcccgccccgaacgcgcacactgtgtaaagtcgtctcttagcgcgctcccttctcagggccggctctgtgcccgcactctatctcctctggaatgtcagctttcagatggactgtactaggtttgttcacggctgaatcctgttt

SEQ ID NO: 318665 - DNA, 4001 bp, Homo sapiens
aaaaacccatggccaggcaggtgggcgtttgtctcggaaggtccccaggcaagcaagtcgggggatcaggaggtgagaggtcaggggacagggaataaagacaaggctcagtgaaaagggaagaagcaacttagagaggccccaggagctgtgaggtcactcacctgctcagcgtgcttttgaattcctggaaggaaagatagaggaaaccaaatcagcatcaggtaacctccattcacctctgagaaacaaagcttgccccttgctgtgcctcccagatgtaagcataagcaagtgtgccacgcctcactgcctgcgtgggcctcaggggcagcagcttccagtggctgctggctgcagggtgtctcacccacgcagtggacctctcaccctttgccacaactcttcacgtgctttctttctatctttgctgctttcttagttacagaatcatcactggagctatcccatgggacccagtgctgcgtgtgtcctggaaaccacctgagggaggtcacagcccttatgcacctactgctcactcagccccataatgactgttcttaacccatctatggattgtgaagtttatctagttgtttataactttttttttagcgaaatagaatagaaaacatcaaagtgcatacgtgtagcaaaggtgagtattattttctgagacttttgtctcaagcttgtgattctgaaatacgatatatattattgtggctcatagtcaagaaagttttcacatctctctagacctccaaccccaggaaaatcagggcacttctctccagtccccttcagctccagatcatgtgattctcctagaccccccaggactgacactgttctctagctgctggtcctgatgccttaggataaatgactcgagcccctggctgagccagacttacctggagaaagtcaaggtcaggcttttgagctgtctcctggatctggctgctgagcttggacagctgggtgatctcaaccccgagctgggccaggttctcattctgcttctgtgccacctcccgggacagttcctccaggcggcctagcagccgaccctcctgctccaccaggaaagccctcagtgcctggaactctgcccccaccttctcctgctccgctgccatctgtttctgtcccaggaggagaagttggagagggacttgaacatggagacataacatttggccagtggcctgagtcatcccacagggcaaggcttcgtccctgtcactgctggaggatcggagacacacccacctacgcacgcagtgcgtgctctattgtcagtgtcccagctctgaacaagctgtagtctggacacatgctcttttctcccctgccacagatgcacccacacatgtctgtggacctgtgctccatcacctaaaccaaggcagcttcatactccccccagaactacgccaagctgcagcttcctcacttgaaaagcagaagggataaattagtgcctcctggggcaaccataggattaaactgagattgctttttcttcctcaagcacatttatttcatcaccctcaaacttttacacttcactttctttttaaaggccatctttcctgtttagcagttataatgctaacacatgctcaaaatacaaaacttgggagatgtaggaaagtagaaagaaggaagaaaagtccgatgccagtgaccagaggtagcagcacacccccaaggaacgaagtgagaatatgcggcatgcaagtgtcatattctgttctttccattaacagcatacaccggattttttactcgagttttcagatgcagactcatgccctgatctcttgattttttatgtgaacacacgtttggcactcaatatgtcccaccaggaagttcctcttccttaaaactcctgggcggaggaagggagtcctgtgaagttgggagacctgggttcaaggtgtcctacaatgcccccacctttccttcagcttccaggcaggctgcagtagcctggagcgccttatggatattaactccctcaaccctgacggcagcccagtggggagggtgcacttcccttcaagtcttacaggtgaggagacaaaagacagacacatcaccaggaagtgttaagccaggcttctcggccagttgcctcacaaggaggtagcacaagtgaaacagtatttgccaaaatactctaagccagggtttcccaaccttaacacagttgacattttgggccagatacttcttggttgtagggggctgccctgtgccttgtaggacatttagccgcccctctggcctctaccacgaaatgccaatagcatccctatcccattgttgacaaccaaaaatatagtatctccagactttgccagatgtcccctggggtaggagcattttcaaataagagcattccttctcccttttgtgttgcagcaatagttgggctctacctctgatgtttcattaagcagggtattgtaaatgagacaagtgtcataaatccagaagtattttattgctgcaaagaacaggtagagctcacacctgtcatctcagcactttgggaggctgaggggggcaaagtcaggggagaaggttgcttgagcccacgagttccagaccagcctgggcaacacaggagactacccccaaccccagctctacaaaaaataaattaaaaattagccgggtgtagtagtgcacacctgtagtcccagctactcaggaggctgaagtggggggatcgcttgaacgactccagcctttgtgacaaagtgagactctgtctaaaagcaaagcaaaacaaaacaacaacaaaaacgaatgtgggggtggatggatggatgttgggagaggacagaggtggaaggtgttaagcaaggcctggggactccggtcagagactgtgaagctgccgccggtgccagggaaggccctctggttcctggatgtcaaccagtgggggaagagctgcattgggagtcatttctccagtggaggagggatgaaggtctagagggtgagctcttcctcatggaggaaagtgagtgatgaggtaggaaggtctgggatgcacactgggtgcaggcataacagatatagttgagggtctggaaaggaccctagggtgtctgaactccaggctcctcctccacccctcctgacattgaggatgggagggtcctctagttcaccttccttcaattccctgccttgacaggtcctagtagatcctttcattcttttttttttttttttttgagatggagtttcactctcgttgcccaggctggagtgcagtggcatgatcttggctgaccgcaacctctacctcccgggttcaagtgattctcctgcctcagcctcccgagtagctgggattacaggcatgtgccaccacggcaggctaattttgtattttaagtagagatggggttgctccatgttggtcaggctggtctggaattcccaacctcaggtgatccgcccacctcgacctcccaaagtgctgggattacgggcgtaagccaccgcacccagccaatccttttattctttcaacacctatttactgagctaggaactgaatttgcaaggtagaaaatgaccgatggtgattcatgtttgcttatctttttttttttttttaaggtggagtctcgctctgtctcccaggctggagtgcagtggcgcgatctcggctcactgcaagctctgcctcccgggttcacaccattctcctgcctcagcctccggagtagctgggactacaggcgcccgccaccacgcccggctattttgtatttttagtagagacaggggtttcaccgtgtttgccaggacggtcttgatctcctgacctcgtgatccgcccacctcggcctcccaaagtgctgggattacaggcgtgagccaccctgccaggcctcatgtttgcttatcttaaccaaaatgagccctcgtttcactttcctgttctaccctaaggaagataa

SEQ ID NO: 318666 - DNA, 4001 bp, Homo sapiens
gcctggtctcacaaacaccaaaaaatccatctccaacgcagaagagcctttctaacagagaggagctgaattctgcacagaatctattattctgtgacaggtaggtagagagaaagctagacttagcttcagggcatgaagggaatacgtcccagttctgctattaagaggtaagacggggctgctctatctggccagtcgcaccaaaaaaaaaaaggtgggggggggtagctttctttagaaggagctcatgttttcctaaacctttgctttctgcaggcacttctcaaggagagtgagcactggggagtagattaaccccaagctaacactggacagtcggctgtgtcactcccagccacaaccaatctgctaaaatgaatcaaaaataaccccgcctagcaaagatcaagacaaccaagagaagacagtactaaaccaggtatctaccagcactgctaacttctgcctctcaccatcgccctcccgctgcaattgctcctcgtgacccggattggggaactgatctcaccgaatctggggaggtgattttcaaagaggccacggaaaagcgtgaaccgccgacctcccgcgcgtcccccagcgcagggccgctcccccggcctgtcggtgtccccagcccggccgtcctccccgaggccgccaccagcacccccgcccgcctctccaggcccggacctggcccgccctcctccgctctccaacccggagtctgcatcctccctgccccgtgcccggcccgctaaggactgcgctctgggtgccggccccgaggccgccgccgccgccgccgcctcctcctcctcctgctgctgctcagccgacgcgcgagcagaccggactgggcgcggggacgcgggacgcggggacgcgggcccggctcgcgcgggatctgggccggagcgggaggaggcgccgccgctggggtaccggggacgccctgtcacgccccctgcgcagcaaacccggtgcccctcccgcggaccggtcgccacccgcgcctctcccgcggccaccccctctgcgccggggtggactcggggccacctggcaccgcctccacctccacgccacccacacagtgccccgcgagccccagccccgcgccgcccccccggggccacgttcccagctgaccctcccgggtcgtccccggagacaatggctcaccgcgcctcccggtcctccgagcttcagctcggccaccgtccccactccctgggcagtgagtgccgtgactgccccgtttcacagaagtgtagaccaaggccggggagatgacaggctagagggccaagcaaagaaacccggctgctaatggggtcgaggagggtccaggtacaaatcagccagagacaggcacagatcaaagaccaatttcccgtcccggaccggccccggctcagtccgctcggcctccggggtaagagcctccgcccacgccatctccgccgccgcctcctcggtcctccagcgaaagagacaaagagccggcgccccaacccgcgaagccgcggctgccgggagcggcagaccgggggattctgccctaaaacgaggggcgggcgcagggagggcgaggtggtggcattcgggccaagctgccgcgcgcccggctgcgcgggcagcgggacacgcggatgtggggcgggcagccccggcgcatggaagcagtggtcccaggcgagagcctgcgggccccgacggacggacgggcgggcaccagcgcgcggtggccggagctcggcagctccgcggcgggtcggccgagcgcttggggcagcgccgctgggcgggccggccgcagttgcactcaccggatcggaagaaggccgcgatgtcggccaggtccttggccgcctcctctgccccctcgccggcaccgcccccgcagcccgagccagccgcgctggccgccgcggcggggccggaggacgcggcgggggcggcggctccgccgctgctgccgctcatggctgcggcggcgcccgcggccgcgcccgcctcgggccccgcgcccctagcgccgcgtgccgcccgctccgcgccgggcctggcggcgccgagcacccagctgcccgcgcccggcgcgcggacgcagagccccggggcggcggggggcggcggcggcggctcggcccaaggagcgcgcccacatagacgaggactccgcccggtagccgcgagctggccgaggggcggaggcgcggagccacggcctcccgggcgccggccggagcgcgggcagcagcacgcgcctcccggacgcgcagtcgcgagggcgggggcccgtggccggcgagacctccgggatcacgggcgccggcggctgccgcgagcctccatcttgatttcaatggggaaggaaggaggggggagggggaaatcacggccgagggaacccgggtgaaaggaaaagggagaacagggaacggagaggaaggaaaaaaaagaggggcttcggtaatttccggcgaacttcgtcaagggccgagcctgggctcggcggtgggcggagcctgggggaggggcggggccgcgttgggcggatgggctcccgcagggctggcggggaggctgcaggaacgttcggtttggttcggtctgcttccccggggcagctccaagccttggaaggcgcaggaaagctctgaccagccggggcggaccttcccaggcccggcattgcgcccccaaccggggcgctggctcctgcaccggtgcgcggtcccctgagcgccgaggcgtttcgtcgtctagcccgcaaggcggggtgacgcgggccggggcgggtgcctccctagtgggctcagcgctggccctggctcggggagggggcttcttaatagttgttgagtgaacatagagggcccgaaaacaggttatctgctccagtcccggaggccacggtactcctaagggtacaaagctctcctgtaaaatgggattcctctcggtgtatccccatctcccaggggactttcggctgctgaacctcgggttcacggtttctcagtccttactccgccagaatgaatggggaagatgacggggtctggggaggccaaaagaaatgttcctttgcggaagatccgtgtcaaaccagcgctggacgaatattctagttcaaaacgcctatgccccggctacgaggagagtgaaaggatccagtgccgggggaaacaggcagaagcaagagagatgaaaaacaactgggtgatgaaaccaccacacgagtatactggaaatagacaaatgtaaatggtggatggtggccatcaaatcttcactgctggagtggaggttacagccaggaagaggctagagtgatccttgtggtacagggttagagttggagacatcgttatggactcatgtttggggtctacatctatattatatattcataatgtatataatgggtctgtacagagatttgtagataaagggtcgtacacatacttgtatctctttgctttgtcagctgagtgggcctagacacaacactctgtagcaacgaatacacctagcgctctgatcttgcttctagtaccattctccaataaaaggagccagagctccttgaggaaatgactgattctaggactgggacgggaaatattcaaggtgtgcctggagcaccttgtgccaaaaggtaggtaatttgctccccccatgaaaaaaaaatttttttaattgacatcagcaatggtgggggtacctcaaagggacacaggagctaattgaaagcgctcccagtggccaaagctgaaacgatttgagcaagaaaataaagcagaatgtgattataaccaaaagtataaaataaattatccatgagtccatagtgatgaaaataaatgattaagcaaataagtgggattaagtaatatataatatagtatttttaaaattaagtaaatcaatgggattaagtaaatacattgggaacaattctaaataatttatgtggatactgt

SEQ ID NO: 318667 - DNA, 4001 bp, Homo sapiens
caaacacaatattatgtctgttgagtagctttctaacactcaggtttatgtcttctttctttgcagtgctaaaaaaagaagccaaaacacacataaatgatcttagttcaaaaacaaaatgttaaaatgaagtgttttgaaaaactcagacaatacataagaaagcccagtagttaacagggtaagttggagttggcctgcctgggaccaaatctagagccaccccttgcctgtgggtcctctaccagctgtgccctgaagaagctgtgcctcagctcccagttagaaaaaggggacaacagtaagagttctcgctatgctgggctactgtgaagtcattaatacactcaaagtgtttaggacgatacctggcacatagtaagcacgcaataatgttggctttcactattactaatgaagttccacagctgtggggtcaggcctggggtctgcattgtaacaagtctccaatagccgtgattcgtgctgagaaaatctaatgctttcagcttggtatccagggcttcccttggtcccccttgctgcagtcctcctaacacctcccctttctacaacagtgacctggtcccggatcacacctctgtgccctgctatgcactgtcccagcttactggcctgatcaactgcagtcaccctctaagtcctattcaatgtctgcctccctctgagccctcctggacaggctcctcagagccaggcaggtgacatgtggcccctttgcaatcgtcccagcaccctacaagcagcgaccaccatgcatagtgcggttgtgtgcaggtgtctatgaactctggtgcagttgtacgtaggtgtctgtcctctaggtgcagctgtgctctggtgtgattatgcctagcgtctctgggcccaggtgtggttgtacatggggtgtctctaggctgcggtggcactgtgtacaggtgtctctgagcgctaaggtgtttacacaggtgtcgccaggctgtgatggggctttgtgcaggtgtctctgggccctggtgcaattatgctgacgtgtctgaactccagcacctagaaaatacccagtcaacagctattctgttaaaggaaaggtctcttcctctgcatcccctctgaggctggtggtctcacctgacctcaatccaccctccgtggacataaggagggtctgtgaaggtctggccccgccgctgagttccccccactccagggagcagcacagcccacaggccccaccataccatgaactgacttggtcacaaatgagtgggatgtgctttgaaccctaaaaatttaacatcgagtccgtgaggaacgggaacaattaaagggtctgagaagcagtggctcaaagaataaccacccagctttcggctgagactagagctctctgtaatgcgcagccatcctattctccaacgtgggactcagggccacatcaatgcactggaggacagccggggcaggggcagggtcagggccaggtccgtgagctgaggtcgggtcggggctcaatctgtgagctggggtcctgcgcgcagggctcgggtcggccgggtcagtgccctgcggtggggtcgcgtcattgcgctaggatccggtcggggcccggcggcctgtgcgcccgggtccagtcgggccggatcagtaccctggggttcggtcgcatcagaatcagtgcgctggggtcggggctcggtgcacgcgctggggtcggggcgggtgggtgcccagaggatgtgtcggacaggtccggctcacctgctgccgcgctgatgcacctccacgtggaccgttggcgactcggccacacagggaagcgcctgcttcaggtcgcccacggcctcgtccatggcgcccccgagagcagtggggacccaaccagggcgcggccgccgccacctcacgcccagcgtcgccgccacagccgctgcctcagcccgcgggccccgccctagcttcgaatctgccgcgcgaggcgcaccacctcctgacccggaagcgctcgggcccggcagggccacttcctgccgcggccccgcctcgccccgtttccggcgcggcccagcgagctcggcaacctcggcgcagcgagcgcgggcggccagccagggccagggggcggtggcggccaaggtccgaccgggtgccagctgttcccagcccccgcctcgggcccgccgccggcgccgccatgggcaagaagcacaagaagcacaaggccgagtggcgctcgtcctacgagggtgaggcggcggcgctttgtgacgcgcggcgggcggggtcccgggcacgggggaggagttccgggcacgcggacgggggtcctgggcaccgggcgaggtcctggccacgagggaggggttctgggcacgcgggagggggtcctgggatttcgggcagggaaccgggcacacgtgaggggtcctgggtaggcgcttacgttcctggtagagggttctgggttcgaggctgcaagcccactcaccccggtcctggagactagggaagcatctgtgctggcttttgtgtggagctcagggagaagctgggctgccctttctcccgcctttccctccctctcccttgctcccgcagcagctccatgggtgtcagcgggcagcacgggcgcctgcaggaagtcaggcgagggtgaaccgaagtgctgggggtttctaggagggagatcgggctccggggttccaggtccctcttaatccatcttcttgaacgagtaatgtgaacaacatcccacagggcctctggtgaggacaccgtggctcgaaagggacctgaagctccctgcggaggggaagggagaacaaggaggcagtgacatgccgccactgtggtcttcccttccgtctttccctgctggttggcagccccgctgtactccttagggaggcctttccctcttagcaccttcacgtctcacctggctgcgtggcgtttgcacctgagcacgcgggtagaactcggtctgtgtctgtgcagattatgccgacaagcccctggagaagcctctaaagctagtcctgaaggtcggaggaagtgaagtgactgaactctcaggatccggccacgactccagttactatgatgacaggtcagaccatgagcgagagaggcacaaagaaaagaaaaagaagaagaagaagaagtccgagaaggagaagcatctggacgatgaggaaagaaggaagcgaaaggtaaaggagcagcggcggtggcccggacgctgcccacgaggagcccgtggggagcctggtcccaggacccaggcagagtgcgcctgcgtggctggaggaggggagggggtgttccgttggtagcaaaacgcgaaccgctgaggcccgcagactcagttccaggatcctgggtgtgctgttcctcagcagaccctgccagggtctctgtgaggagggagcctggcatgaggaggatctcggagggggtttcccttagttctgtccctcccctgagaactgcgaggggattgggcagacctgtccggatcccgcctactcctgcctttctcactcccttgactctgccgcccaggaagagaagaagcggaagcgagagagggagcactgtgacacggagggagaggctgacgactttgatcctgggaagaaggtggaggtggagccgcccccagatcggccagtccgagcgtgccggacacagccaggcaagggtgcacttttagagactctcctggtgttcacagctcatcgttgtaaatgaggggtcggcaccgtgtcctgttgctttggggagaagcatgggagggaggagagctggtatttccagggcctcatcccaggtgtcctctggcctgaggtttcctccggtgtctctgaatgtctagagcaaggcgtggccagttaccactggtgcccttcagttttgttttttaacttgttagctaaggatggcttatatgttttttaagcgttcataaaaagaaacaaaaaggcatctccacagag

SEQ ID NO: 318668 - DNA, 4001 bp, Homo sapiens
aaaagaaaaaaaagatatatacctaactaccccaaggtatacacgagttcatacatttcaccagttaaatcctacaggaaacaagcaaagtatccttcttttactcattaaaatgttttatattaagatatactttccaaataattctactaatgtgggatggtttttccattgcatcttggaataaaaatattatctagtgttcctgaatgttaataagtgtttctattagtaatttattttctaccaagtaacatcatttagagaagaagttatcctcagttttttcaaactgtcctaggtaccacctatccaaatataactagtgctttgtatgtgcttctatttttctttttacttttaaaatccttattttcctatttggaagttggaagttatgaaactggatgtctatatctcattgtgtatagctccaggtggagctgaaacaagttttgatagctttatttttaaaaaagatttttcttgaaataaaatagatatgtgtaaccttttgatgatttcactgacctctatgataagagtctgaaataaacatctactactgagaaagaaagagaggcccttatattatgaaatgacaatactgaaaaaaagtaacatgcttaatatttatatggagggaaatgttgattgcctttactaagcaagagctcctggtagctctcatccaagataccgcatgcattctgcaattagcctcaatgaggctccacatagttctgatttttttctgggttaattactgcctaaaggagttatctagtctacatgcacctaagtttaggagcaagtgtttttggaaataaatatttatgaaagggtaattgtgacatagaagtttggtaagcttttaaataattgaatcaatgtcattgttaaaaagatcttggagattgggtttgcatcacatccataatgaatattctggatttaatgtgaattcattcataaatttgatgtgtactcggtgcttcagaaataagacccaccagcaggtggcattctgaggcaaaaattcactgagtgccaccagacagggtcaatcattattgccttttctgagtctaccctgaatccattacgcctctaaattataattaatagcaatagcattttggttgtgtctactcaatcataggtaaatgaatttacaacttcaaacttaaaggggagattatgagagtttcaaagctctgcctagattacacctctttcattaggagcatatttgttattttgaaatggatgtctaaaggagatacatagctcagaccatattttcaacaagaagaaaagaaaaatgacaatctctttcttgccacctgtagttctttaacagtggctacttattagaatataaccctctcccttctctcacccctatatttatattatgataaatacaaccacataaatacattagaaagctgtcagtagtgaagggaaagaagagacaacacctatacactcatctaggaataaaactatattactctagcacaaaaggaataggctaccgacatgagttgtccgtttctaaatggctttgaaaacttagacattctataaaagaaaaaaaaaatttcttctaccaactcaacaaataagaaagatctcagatccatctaaaaatctaagcagtgcactagaggaagaaggctgataaatgaaagttcaattacatattttagcgagaacacaacctctactggaaaaaaaaatcaatatgaaagaaccatcatagctgcttacattgagggtgtaatacgcaggcttgttcctcctctagatgaccggaatccggtgttgagtcgccagaagctggctccccatgggtggtagccaaggatgtaccgctctccgtggtgctgaagtatagagctggtcaagtgagttaagttgcaacgatgtgaaagcgcgctcctctgttctttgtgttgcagtggtaaaaactcgccttccgaggcagaaccgtgttaccgtccttttcctaatcggggggaaatttcccagagaacatgacggagaagcatctgtgtgagagtggcatgcggcgtggtgatgggttggtatagtccccaccccctctccccgacgtagcttgaaagggaggtagcaactctttcttcctgccatagctcctcaggatttctacctgccctttcctctgccccagaatagtacatcacacacacacacacacacacacacacacacacacacacacacacctcgttatataaggcagcatgttctgacttctgaggcagaatattcattggtttaaacaaatgaggaatgaggaatgaggaatgagctggtttcctacctgttgtgtctgtgtgtttacagagggagggggttaagaagaaaactaaaaccagagaagcctaaagagcgatagaagtagttttcttccgtaagtctcatcaccacaccacactttgtcttctgtgagtgatgtatcttccaactttactattttggttcatgatcttttagcattatctaggatcaggaagaggtcagtggtgtagaacaagtctcacattagtaacaagactaaaagggttagctttcatttgcaactttccattttttgaaacgaaattctcaatccaaaataccatttccccaacagttcccacgctcaccaattgctatgtaaccaaatggtctatgattcttaaacactgaggtactttaatgacatcattggaaagaaaccgtcttaactgaaatattgcctgtgtatgaaaaaccacagttgcttctacaatctacctgggttacttaccaataaatcagagtggttattttctgaaatcaactcacagcttaataactgacactctgtaaaactgttgctgtgtgcacttgcaatacttagggctaaggagttgcttataatgtattgtacacatgaccattctagttttacatccaaatgagattgcattggtttgttaatatgctactagtattttctctgaagataacatgatatgtgggaaaagaccttgggattttgattcacttattaactgtgtgaccttagacataacacttaacctattgaatctcagtcttctcatatgtgaatggttggtaataatagggtttataatgccttttaccaattgtcgtggtgataattaattgaaaaatcatgtacaaataactccaaagagctggcatttaaggtgtgcatgataagtttgaaagttcgttttaattttttaaaaatttgagacagggtctcacagtggtacaatcacggatcactgtagccttgacctcccaggctcaagtgatcctcttgcctcaccctccacagtggctgggaatacaggcacataccatcagacctggctaatttttaattttttagtagagaccttgtcccactatgttgcctaggctggtgtcgaaatcctgggctaaagctatcctcctgcctcgacctcacaaaggggtgggattacaggcataagccacaatactcgacccagtttgaatgttctttctcctctgcttgctcaatagaagttaaggtagttctctagttgtgggcatggtagtgtgaacctgtagtcccagctacttgggaggctgaggaataaggatcacttgaacccaggaggctgaggttgcagtgagctgagatcatgccactgcactccagcctgggtgacagagtgaaatcctgtcttgaaaagcaagcaaacaaacaacaacaacaacaaaaccctccaaaaagactggcaacaaatgcattttattcttataagcctccacgcaagttttacaatattaataattatgtttcattggataaaataccattctaaaaagaaattttctaatatcaaggctttcttaaaaaaattacaggcttgaaggatacagaaattttattttttattagaatcagaaacaagtagatttaatgcatttgaataaaatgctaatgaatt

SEQ ID NO: 318669 - DNA, 4001 bp, Homo sapiens
tgaggttagccccaaggtacagcaaacgtctgaggcttcgggcttacctgagtttccgaatagcctgggcaccagatagctaaggcagccttagttttcatggcgaacatttctttggcgagcgacgcgcagccggcggtgggattgaaggttaggctctggatttcagtaaggcaatgtggctgctcataggcggcaaagtttacgagaaaaggagaaaacaccagagagagaaagagttggtgagaattgagtgaaaggggaggggaggaaggtcagggaggagcggggaacacaagtcgagagtcagagagaagaggtcagggttgagtagagcaaggaagaaccaaccgcgggggagcaggggcgtggcgagggtggcggagggcactcgtcgcgaaaagactgtcacccacgctcgctcctcccaagtctccagggggcggaggctgccaaaattccgagcccgagcgcggaggcgccggaccccagcaggtggtgcccctaacaacgttccctcgtcccagttcccaatttgcctttcctccggatagagacttcctctccctaaattggaacagaagtgttgtcccaagctaggcgcagccccgctctgacagcccagatgtcccctttcccccggcggcggcgtcccggagcccaggcacctctcggagttctgcacgtagcaggatactccctctccaaaatgcctggcgtctccctggagaaagccagcagcactgaactctctactcacccgattgctacaagagacggtgttgttgaactcggtacttttggtctggaagaaagaaaaataggacaaagagggtaaagacttttaagtccacaaggaaaatcatccctccaccctttgctcccaggctttaaaggtgccctgaaaacagtttccactcaggtacctttttcctatgtcattgacaaggcagtgaaatagccattagatagtgctggttagtgcttgaaaccacaccaaaaggttcaggtctcagagggcgacctcccccctcccttccctcaagccataactgcacatagcactatgcttgtgagtaataatgccatcctttggatgtccgcatctgtactgtggccattcatgaatgcaaactctgtctagaaattaggttaatcaggaaaatgattactactgtatgttaaaaaaaattccaagtacaccatattctgtaataaatagcatcctgaaacatctaaaacactggagagacctggagcacagcatcaatccttagagtttatctcatgagaattatctcttttactcctctttcttaagctcttacctcctgctttttacagcatagtcagagtaacactttagcaaaggatagacatcctttgacgcataacgcgctgtctatcaatacctgctcctcatcagcatctgcacacttagaatgtgccaatttctagataatcattttagattagatatttgaatatcacttgtaagaatccttgacaaaatgtggggccatgattttttctaaattatttttctttcctacaaagttaaattgtagagtgtgtgtatgccgactcctctgatgaaaatacatttgttttaaaaaagcttcttcacttaccccactcatatatgtaatcaggtctttagaaatagtactgagataggctgctttaatcttctcaaagtcacagttagtgaagtcgtaagttaacaccagccctacaagttgtaagatgaagattttcctgaaagaaactgacagaacatatagtaaggcaaaagggaacatacgtggacacccaattccaccccagtttcacactaaactcttcccaccacgagtgtaagagatctgtaaggcctgccttaggggccagtgctcaagcaccaggttttgcctctcattgccagtccacaggaagcccttattcacccatgctgttgccttaagttggagtctccctgatgctccagagctttctggctgcactatataacacctaaacgcctacgggctcttttctcctaggccaatgattttctaccatgtcattctcttcctttatagaattctgaattgatgatgtgaaaggaaaaaaaaaaaggagtagctaaatctatggaattttaacatcagtaaagtcatcaggaatttccctcaccttcctcctttttgctttgccctaaacacttcataagtgtgaatgtcctttaagaaacggataccagtgtctttctcctacagggcatttccgtgaccaatcctttctatttgggagaaacaccttctgaaaccagcagccactgtaaggatttggagtccttgcatatgtcccatgcattctgaacatctttgagcatttcctgtggccactttcaactagtgctttcccttctccttggctagtaagaaactgtgcttgcttatgggatgctttggagggtggggtgcagtctcagtcttcgacagcacttccatgtgaaagcattaaatgtgcaaccgtgaccagaaccttaggggcaggaacgataagaggttgaaataagtggggaaagatctgatgtggcttgttctcaaaaaccctacttttcaaatttcccatatcaatttcaggaaaaacgcctactcttggtggctaggggcaccttaggggctgaagagtcctctagcactttctagcaggtgtcaagaacttttaaaaccacaaattccagcgcccagccaccttcacagtcccactcttaaggccagcgacacaagaagcggagccagaccgcgctgctgggtgcccagcggcgaccgcacggagacgatgctgtcctgagctcagctctcccggaggcggcgcacgctttagtgcgctctgcctcgcagaggcttagccccgcgcagcgtagactggaaaacgtctgtcacctggggcctcagcccgggcaccagttttagagacaggagaagcatcgagatggcgggctcagatttttactagcaaactcttgttgatccagaaaagagcgcttaaaagcacagcaaagtgagtcagggagagtgccctagaggatgtctgtctagcagtcttcccagttccagcaacaccaatggagggttgaagggagggaaaggccgacaccgatcaggttgctgagatgaaccccctgctcctccctggcttggctcatgcggccctgggccctctctacacccaggtcccctctctctctctttcccttccgctcccccgtccatcgcacccctcacccccgccccccgccctcgcgtgtcggagcctgcatcgctctggtccttgggaagttcctaggagtcatcgctcggagaaaggaggttggacgccgtgtgtgagtcccagcaaatgtcacaggccatgcggtgcctggggaaaagagcaaggaatgtcgagggattcgggaaaagagtaggggacaaactggagccagagttgaactcttcttcatagaaggcactcgagagggtcagaaaacctctgattcaccgctgacttcaaaaatggctcttttctggaattcttcatgtgttgtactcgagtcaccacagcattctttgaaaaaaaagtccactcttcccccatcaccaacttctcagggtattgtgggatgatgccaaaacctgattaatctattgtgacatcagagattattctggtcggcagctggacattattatataggcagacaggagctaaacttagatttcttcactgggctgggatagctccaagagacaaaggaaagggcatggtggctgcttctgtcaccctcacctgacatgccttcccctctagtggcttgctgtagggccagagagtgtgagtgcccactagaaccttcggcttcatctcttgattgctgatgggggcaagaacaacagaaagcagcctacactgagcttcgacttgcattcttctggaggtataaccaggctgcctccctttttttgtttcctctttta

SEQ ID NO: 318670 - DNA, 4001 bp, Homo sapiens
ctgaattacctttgagtagtacactgggcctcctagacacatggtatgcaaattaataaagtcacagggttattaagcacaaatcttaaaaaaacctgcaaaatcattattattagtcttagactctccatttgggcttgggagggactgaaataaatttctccaaactctccctttctcacatgctgtccaagaacttgatctagctttttgtttgtgctcttatttaaatgaattttattgtagccatctgcagatttgccagggtctccttcataagaaggcatgaagccaaataggtttcccatatggctgtctggtattgagtttctaattcaagctcaacccagatcagcgctatggcttcaatcctcaacctctagaaagtgacagttttggctgggcatggtggctcatgcttgtaattccagcactttgggaggccgaggcaggcagatcacaaggtcaggaattcgagaccagcctggccaatatggtgaaaccccgtctctactaaaaatacaaaagttagccaggcgtggtggcgggcacctgtagttccagctactcgggaggctgaggcttgaacccaggagatggaggttgcagtgagctgagatcgtgccactgcattccagcctgggtaacagagcgagattctgtctcaaaaaaaaaaaaaaaaaaaaagtgacagtcgtgtccatctacctagactgtagacatataaagtccactaggctaataaggagcaatcaaacatatctgcacttgtctctctctgttccttaaacttgtcaccatgaagataaatcctctacttgctgactgaaataaatattgagtgcctgttgtgtaccaggcactgttccaactgcatttacatgtgttgactaatttaatcctcagaaacaacctgtataagactaactgatatgatacttactttacccatgaagctacagtacacggaggctaagtaatttaactaagtcttcacagaagttatagggccaggattcaaagtcaggcaggttgtctccagagttcctgtgcctaactttccactacactatctccatatttaatgctacacgagcattcaaatgcagataactacatgtgcaaaaatgtgtaaagagacagcaatagcgcccacacaagcaattaagcaaacataggatagagattttatgtataatgtaattatacatttagcaaataagcacacaataattaagtgataagaacaagaggtgttgctcaaactttggactggacaagaatctcttaaggagccccataatctgagattttaatgttgaaggtctgggttgagtacctgggaattggcatttttagcagccatactcttatgctccagcaatcaaaacattctgatatagaagtctcactcatcatagcttgaaacattgccctaaggtttagaaccataattcagccaaaacagtatcagaaccgtagaaataggtgagtttgattccgggtatcaacgtgggtctaactgacatcctaccacttttacccggctcgtttgctcttcgaaagataaaacctaaataaaaataagagaacgacttctgcaccaaagccccagtttaatttgaggttagccccaaggtacagcaaacgtctgaggcttcgggcttacctgagtttccgaatagcctgggcaccagatagctaaggcagccttagttttcatggcgaacatttctttggcgagcgacgcgcagccggcggtgggattgaaggttaggctctggatttcagtaaggcaatgtggctgctcataggcggcaaagtttacgagaaaaggagaaaacaccagagagagaaagagttggtgagaattgagtgaaaggggaggggaggaaggtcagggaggagcggggaacacaagtcgagagtcagagagaagaggtcagggttgagtagagcaaggaagaaccaaccgcgggggagcaggggcgtggcgagggtggcggagggcactcgtcgcgaaaagactgtcacccacgctcgctcctcccaagtctccagggggcggaggctgccaaaattccgagcccgagcgcggaggcgccggaccccagcaggtggtgcccctaacaacgttccctcgtcccagttcccaatttgcctttcctccggatagagacttcctctccctaaattggaacagaagtgttgtcccaagctaggcgcagccccgctctgacagcccagatgtcccctttcccccggcggcggcgtcccggagcccaggcacctctcggagttctgcacgtagcaggatactccctctccaaaatgcctggcgtctccctggagaaagccagcagcactgaactctctactcacccgattgctacaagagacggtgttgttgaactcggtacttttggtctggaagaaagaaaaataggacaaagagggtaaagacttttaagtccacaaggaaaatcatccctccaccctttgctcccaggctttaaaggtgccctgaaaacagtttccactcaggtacctttttcctatgtcattgacaaggcagtgaaatagccattagatagtgctggttagtgcttgaaaccacaccaaaaggttcaggtctcagagggcgacctcccccctcccttccctcaagccataactgcacatagcactatgcttgtgagtaataatgccatcctttggatgtccgcatctgtactgtggccattcatgaatgcaaactctgtctagaaattaggttaatcaggaaaatgattactactgtatgttaaaaaaaattccaagtacaccatattctgtaataaatagcatcctgaaacatctaaaacactggagagacctggagcacagcatcaatccttagagtttatctcatgagaattatctcttttactcctctttcttaagctcttacctcctgctttttacagcatagtcagagtaacactttagcaaaggatagacatcctttgacgcataacgcgctgtctatcaatacctgctcctcatcagcatctgcacacttagaatgtgccaatttctagataatcattttagattagatatttgaatatcacttgtaagaatccttgacaaaatgtggggccatgattttttctaaattatttttctttcctacaaagttaaattgtagagtgtgtgtatgccgactcctctgatgaaaatacatttgttttaaaaaagcttcttcacttaccccactcatatatgtaatcaggtctttagaaatagtactgagataggctgctttaatcttctcaaagtcacagttagtgaagtcgtaagttaacaccagccctacaagttgtaagatgaagattttcctgaaagaaactgacagaacatatagtaaggcaaaagggaacatacgtggacacccaattccaccccagtttcacactaaactcttcccaccacgagtgtaagagatctgtaaggcctgccttaggggccagtgctcaagcaccaggttttgcctctcattgccagtccacaggaagcccttattcacccatgctgttgccttaagttggagtctccctgatgctccagagctttctggctgcactatataacacctaaacgcctacgggctcttttctcctaggccaatgattttctaccatgtcattctcttcctttatagaattctgaattgatgatgtgaaaggaaaaaaaaaaaggagtagctaaatctatggaattttaacatcagtaaagtcatcaggaatttccctcaccttcctcctttttgctttgccctaaacacttcataagtgtgaatgtcctttaagaaacggataccagtgtctttctcctacagggcatttccgtgaccaatcctttctatttgggagaaacaccttctgaaaccagcagccactgtaaggatttggagtccttgcatatgtcccatgcattctgaacatctttgagcatttcct

SEQ ID NO: 318671 - DNA, 4001 bp, Homo sapiens
caccagggtctgcctgacattaaacatgaaaacctctgtgcctgttccacaagcagcctcccttaggccaccttaacccaaatctgaaatcctccctccagcccccaagtgacccagcccagtcaattcagcctcttgactttcccagcaacctccctcacctttcccacctcaccatcccagctttgccccagccctgcccccattccaaacctccaggccctgcccctcatccaccctccacacagcagccaggcaagcggtctccagaacagaagccagatcagacccatcactggaagccctcgcttctccatgccaccttaacataacaccccacgctccgccccagcaacaaacccgggtctctcacgcctgctccccctcggtatttgaggttacttctgctcacagctctgcctcacctccaccctctgcccactaagccgtcaccttggctctgtactttctggctgtgtgaccctaggtaagtgacttaatttctctgtgtctattccttcagtttccccatctgtaaaatgcagataataaggcagttgtgagaatacaacaaattgaactcattgtatctgcctaacagccctcacaggcagattctttatcgtcgtctcccaggcaggcaagctgaggcccggagaggagagatgacttgcccaaggtgtcccagccaggcctgctacagccaggccttctgacttctttgccagtgctcccacacactgcccacaccctcaagagcctagcgctgcagtgcaaggacacccaccacaccagtgagctcggtgacacgtgggtggggggcagtgccactgagtcttgctgaacacaagggaaaaggcctggcatcttgacccaaggcctcaggagcagagactgcagagggccacggctttggagagatgggaaaaatgacctggcagggcccagggggacagatgccaccctgggaggggcactagtagctcccttccccggtaggggcagacccgcccaggagcctcagcttgtcagctgtggaatgttgaattctgttccccaaggccagctcccaggctctcaaccggggagatcctctcccagccgccaaggactcgccattgtccctccctgcccctcctggcaggtcagcctccttgtgcgggactggggtgggcagaggactgtgacccaccccactctgcaggagcctaaggtgaggcacctgacccaggtactactggaagggaaaggaggccggggaaggggcctggcggctcccttcacgccagaatctccttaccggctaaaccaggggtggggcttggcacgcatcccacatcccagggtaggaaggagggctgggcgagagggggcaacctgcacctagcacgcccctggggtcttcaaggaaacaccttccctttctccaccaggcctcgggattatttagggagactccctaccccaaccccgaccccacgctgtcgctaggacccgcccccagcaatccgggcctctgtagctacctcgggtggtcctggaagtgggcgtgggtgtggcagaagtggggggatggtcccgagctccaaactcttggggcagggagtggtctcccccagcaaaagactgaatctccctctcccaccaccccccagcacagggcaaggcgcagaccccgcgctcacccagaagacaatgttgaagccaaacaggaagtatttcccgcagcagccgacctcaggttcctggaaatgctggtgcttgccgggcatggtgagcggccacccgccggcccggaaaccggagccgggagccaggcccagcgccccgcgggccgccctgggctagagccgcccggggcctagccgggcggctgcggcttcatggcctcggccacacagagcgccggtcgggccccgcccgcccctcagggaccgccctcagcatccagacctccttgcccggagccctgctgtccccgcctctggaccgggccccgcccccacagccctcagtccctttggagtcccgcctcctgacctggctccgcccccatagatcaactcagtcccgcctgagccccgcctctggacctggctccgcttcccgagctccgcccccacagcctgattcggacctcctcgcagccccgccttcggccaggccccgcccccgcgcaggccgccgccgcgtttcccagcgtcctgcagacccgcccgggacgccggctgatggcgccggaggccgccggggtgtagaagccttgcttcccctgctgggtaccagcgccatcccaatccccagcctgctgttggagcccatcccaggggaaggttaactgctgctctggcaggcgaatggggaagctggtccggattgagtttttaacacgtgcaggacgttttgtcattgtggagtcgcatcaggctcaccttcacccagcggaaatccagctctacttatcctgactcaaactcaggccaaacgagggcctgggccttggtgccacgccggctgcgccctgccaggggcatatgccccccggaacctggctcaagcccccttggtggctgagtttccccagccacaccccctgtcctccatactggccagggtcccggtcaggctccttggtacccagtgatctcacatgagcccctgtaagacaggacagaggcagatcaaagtttgggggaacctgaatcttactccagtttgaagccctcttaaaaataattccaactttgttcagaagtatttatttaaaacaggaacagaaagatgcttaagcttttattatcaagtttatccacttccaccacttctaccagaaccttggtgaggcctagcccagcatccctccacctccacttcagtctggccctgaggcaggcaaggcccagacagccctggtcacagctggggagaaggggagcggccttgcaaggctctctcagtcctcagcaacccacgtatccctctgtacaaatgatggcgttcaccctccagaatgtctgtgcccttgagcccaccacccatggaagagtctgtctctcaggccacctcacctccttcctgggtggaaacagtaaacgctggactatgggtttctccgcctaccatagagccctccttccccgccatgactcaccccaccctcaggagttttttccaccctgctgctgtcctgtggccccaggacaagctaggtcctcagactgccaccactacccccatctagcccctaaggctcaggccccaactcatgttaaagagtgtttgcattcctgttcacttgaggacaggtaagaactaggctgtctgatccccagtcccgccccatcccccaaagtaatgaggctcagtggcggctgtcccattacataggaggggtgccaaggcccccctcacaccacaaacttgttcttggctagggagttgctcttggtggctgtgtctgcatgggcctggtacccaatgatggtctttggggagaggcccaggcgctctttgtatacacgcctgcaggtgcgggggacacagaggaaaagagacacaggtagtcatcagagggtcctagagataacttaggccaccagactcctaccctcattctggccacagccacacctgttgtgtcttacccatgtggaaacccaaaatatgacccccttaatgcaaaaggagagctgcactgccgtaagagaaagttagaaatctgaacgccagaccttccatacaggtgggcaaggcagaagggagggaggctatggagactttcagaggtctcccatgcaggccaagccccctccacccaccttccctctagcagagacccaagtccccaccctgtgccagagaccctcctcacccaacgtgcagcacgcccgcctggttttccgcctccctcgtccacacagcgatcttgtcccccttggtgcggatgttgacgacggccccacatacctctctgctgtgttcctcaaagctctccccgatca

SEQ ID NO: 318672 - DNA, 4001 bp, Homo sapiens
atgctactcctgaggatctaggataatactgaaagaagcacatatggggcacaagatttctagcactttaaagcttaatgctttaaaagtatgttttgaggcttctttaaaagtttatggatcttgcccagagctggagtcggagcccccgaggctgccgccgagagtgcccgcgagcccgtggcccagccgaagctctttcccgccgcctctccgcgcctcgtccccgtccagccccacccaacccccaacccagcctggtcccctgaccctcagtctggcccggtctggcctcccagcagggtcacgcaactgccccggggacgatgaaaggaggataaatggtgcccaaggtggacagcggtgccttcctgctgctcttcctgctcttgctgtcactgagccgttgcggccagtggggaccctctgctgagacaggctctgtgtccagcacctgctccgggtcacgctctgggggagtaggagtcgcacgactgtctcagccttggatttgactttggcctcatccacctaggggccacgggagaaccatgtgggttaccaagttcaaggggagagagaagaagctgatgaaaatagaggctcatctgggactgccttccttctctggctccacccttgacttcttcagagcttgggctttaagccgtgagctccatctcattccctgggccgcaagaagctcactgggcccgcgtctctggaggctgttgggggggcccttcctctgtctccatagtcgacggcttgctggggaaacccaggatctccgactgcctggacatttgcattgctgtcccctcgggttttgtctcaggctgtgcctggggctgtgcctctccctcaggctccagcttggtggcagacttcttgtcagagccaggttcgggggtccacaagggttcagttccccgggaactctccccctccttgttgatggccacagagggagatccccgtgccttgggctgcatccagcagtggctgaggatctcgtcgatgtggagccgccggttgacgtcgggctgcagcatgtggtagatgaggtccttgcactcgcctgtcaggtgcttggagcgtgggaagttgacgcggtgctccttctggatacgcagcatcttcttgatgttggagtcgtcgtagggcatggagccgcagaccatgatgtagaggatcacgcctaggctccagatgtcgtacaccttgggctggtagggaatgccctgcagcacctctggggccgcatacgctggtgacccacagaaggtcttgcttaatgccattcgaccactgtcatcccgcaggcagcgcttggagaagctgaagtcggacagcttgatgttgaagtccttgtcaaggagaaggttgtcacacttgaggtcccggtggacgacgtccaggtcgtggcagtacttgatggccaaggaaagctggtggaacttcttgcgagcttcgtcctcatgcagggctccccgggttttgattaactcgaggaggtcgccctggaccgcgagctccatgacgatgtagaccttgccatgtgatgtctcaaagatctcgtaggtcttaatgatggagcagtggtttaacatggccagaatctcaatttcccggggaaggaatttctccaagaagtctgcgggggccttcttgcggtcgatgatcttgatcgccacattgaacttcaggcgctcagagtaagcagattttacttttgcataggagccctctcctaaatttatccccaggaggtagcctcgtcgcttgaggacagcagcgtcatccatggtgccaggaatgcccagtgcctctgaggctgccctctacagccccgaggcgcatgggccagcagtgtgctcatttacatcctggatagagagtcctttgggctggccaggcctgctgttcctgcctcctagaggccaagactctggagtggaacatttggcactgtctcccagatgacttcagcgagtgaagtcacaaaggaggagtgccctgggggaatgagaccctggcctgaggcacttggacttggaatcctggaaggctggccagtaggctggagcagacaagatgagcagaaagtggcctcgtgtcttgctgggacctgaggtagaaggggactgtgtgggacacatgggcctgcccatgcttccaaacccagagccaggcatacttgtgcagaattgaggccaattcttgcaaaccagggcatctgaggaggatttaataaagggacaattaataaaggtgggagcagagtgtagggaaccctgagggtcacacaattaccccaagatagtagcagacccctggcctgcatagaaaagggtgggaatggtccctggaacccagaaagagtagtgtagacaggaccaccttgagagaggcagtggccttcaggggagaaaaagccagcctcagtgaccctacaggctggcaggggatgggaggaagtcccatccctgacttctttttctccccttcagcccttgatgctgtccacacaggtgaccctcaggagtgcagagcagggccaagaagagtggtgtgtcaagaaggtagacagcttcctggccccggagtcacgcagtttgagatgcctggattctgccgcctccctatacatctcttcccttgtctgagcctttgctggcttcttacagcagctctgtaggaggacagctggcaggagttctgctcttggctgtgagctccctcctggggacctgcccagctcacggccctggctgggctcccagggcatatctggggctgggggctgaaggtggggcctggatgccaccctgagcactggcagctgctctgaggacattacaagcagcaggggaagcactggacagcaaccatcatttcttctggcagtggagcctctgctgtgactggttctgtgtccagcacctgctctgggccacaccgtcaggaagaaggagttgcatgactgtcctagccttggatttgactttggcctcatccacctagagggagtgagaactccttcctcacatgagccaggtggaaccctgggcccttcaggagtgagttagtagagctggatgtcgctcaggctgggttgggtcaccaccagctgtggcccttctcccttttctctgctccttcaccttgttccccaactctgactgcccactgccagtcctttgtgcgtggttggtgctccttcctccagacagcctccttctccttcctgctggggaaaccccaagtgctgtctcttggaaaccaaaaataaaattctaatctccccagccatctgaatggacccctcttctcagccaaggccattccaaaattaatctgaaaaactagttcaggccatgatagaaagtaggggtcaggcaggcctcatcatccctcctcccttcaggtttcaggcacagctgagcagcagtaacatcgacacagagacctgaagactgacaacagactctggcagtaagatacagcaggctctgaaagaaactgaagtattttactatcaaacagatttctttgacatattttgaaatagctctgcaaagctgtctcttatgaggaaaatctacattctgtgaagaatccccttccctttctagctcttttctcctgagataattaactagagtctgataagaaacatttaacagtgtgttttttctgaagcctgatacctggaggcttcatctgcctaagaaccttggtctctacaacctcttaccccagagacagtcccttctattgattccaggtctttagataaactctctgagccaattgccaatcagaaaatctttgaatccacatgacccagaagcccgcctcccactttcaagttgtccctccttttctgactgaaccaatgtataccttacatacactgattgatgtctcgtgcctccctaaaatgtataaaaccaagttgcagccctatccctttgggcacttgttgtcaggatctt

SEQ ID NO: 318673 - DNA, 4001 bp, Homo sapiens
tacaagatgaacataactgaaggttcacagaaaataatgaaaatttctttgttaagcagacacactcaagtgcttccctgtcacgccaccgatttatctcagatccaacactactaaagccataagaagacaaaggggcaagttattctttaccacagatgaggtggtctatgatacagtatcgaccacattttaaaatgcagtgtaagtggcagatcttgcacaataaataaaatacttacctgtttctcttcatccgacatgtttttttccagttctattaggtattcttcatctagttcagaggaattcacatcttcattagatttgttctcaaccttgtccgctcctggctcctcctcaaatgaggcactgcagtcatgaaaacactcctcttctccctggtcctcctggagatgggcctcatcatccctgagcagcttactctgggaatgctgatttttgggatcaggaactggagggccagcacactcggcttcctgagtatctgtaaccttcaaaccatttaacagatcctctggaaccccacagttctctgacttctcccccatgctgcccagtgagggaggtgacgctaaagctgggggaaaacaaaacaaaactgctatataatggtgcttgtatttttaaaagttctgtttcaaacctaaacaaacctctgcattacagccaaaaaacacaccgtaatttcctttcactggaattcattatttaaaaatacagcttatcataagtaataataatgtcaaatcgtcattttaactgagaccccttttctggtcaaatctggtaccagattcttttttttttttttttttttttgagacttaatctcagtctgtcgcccaggctggagtgcagtggcgcgatctcggctcactgcaacctctgccgtccgggttcaagcgattctcctgcctcagcctcccgagtagctgggattacaggcgcctgccaccgcgcctggcccagaacttcttaaaagcaacaaaagaagccgtttttaatgtaactcttccacgttccaccgttcgtgttctgtttggatagcaaaaattaggcagaaactaaaacagtgccaagaaaaaggaagcagccctaatctccattcagaatgaataaccaaggcacgagtaagaaactacggtccgtctttttagcaccaccacaggaagcccaagaatacgtttctagtagacttcaaaataaaatccgtgccaaaattgtgatcactttaacccaaatgcgtgtggtagagcccactcagcttacactggaaggggaaccctggcgcaggtgaccctaatcaggattaccgtgggggccagagtcaggcattagaaagcgtgactctgaaccctagctgcccaagagaacactagagatactttagaaaataccactgctcagaccctgaccaaattctgatttattagtgtcgcgtcaagcaagggcatcaggtttatttatttatttatttatgttttcatcccaggtgattctgatatgcagccaattgcgaaccactgctgtagaagctgagtcagagcatcagcagcccagacatttgcaaaaatttgcgacagatttgcaagaacgtaaattgctctagtcgcagcaaaatcacgccaacgacccttgtatcacgacaagagtctgaatttgccctagtatgtgccaagaaaacttaaaaaaccagcaagatcttaatacggagacttcgcctccacagcaatgtcttgcttctcttcgctcccaggtctactggaagaacacaggagtttgagctcctacagttagggaagtgatgcctcgcgcttcccagcagattattccctagctttgttcctcacagccaacacgcttagacccacggggttactcacaacctcacagcttctccggtctccaccttcttagcctctgagagctcctacttccgctcagtcaggtgcacttccgtcgatgacgactaatagcgtcgctattggcaaagcatcctgggaaatgtagcgaaactctcagggaggaaaggcatagtcgctgtgtgacgtcattgtacggcgtgacatttgagagatggttgccatcttgggttacggcaagactccgcgttactctgcacgaagagaaaaaaggacaaaaggaagtctgtccctgtggtgttcgtttcactatttatttatttatttatttatttatttatttatttatttatttatttatttttgagacagagtctcagtctgtcgcccaggctggagtgcagtggcgcaatcacagcctctactcacttcagcctcaacctcctgggatcaagcgattctcttgcctcagccttacgagtagctgggaccacaggtgcgcgccaccacgcccagctaatttttttgtatttttagtagagacggagtttcactatgttgctcaggctgttcttgaactcctgggctcaagcgatcctccctcctcggcctaccaaagtgctgggattataggcgtgagccaccgcgcccggtccatttttatttttcaagggctagccaagtcaaacagtgggagtggagaagaaacaaaaagatctgtaactggttgtgatcagttagttgtaaacaccactgcactcagaccaacctcaataatatttaagaccgtaagggaaccctgagaccaagagtggttgccctatgcattcattcgagaaatgttcactgaatgtttattagaccctgggcattgtgctgggatcacagaattgaaatatagtacccatcctcaaggtagccagacaggtaaccagcaatgacagcagagaattcgttttctgtaattcacagaacctattgcagagatagatagctggaagagactttttcaggaagagtatgaaacttgttttttgaatttccatctaaatgagattatgcatacagttgtattttttgtaagttgaaagctttatatgctaaaagaaaacatcaaaaatatatcctattttggttttagtatttctgaattttaaaaaatacccccagaatttaaaaagtgtaaatggaggctgagtgtggtggctcatgcctgtaatcccagcactttggaaggtggacatgggaggatctcttggggccaggagttcgggaccagcctgaccaacatggcaaaacccatctctatctatatatacatatacatatgtgtgtgtgtgtataaattagctgggcacagtggcgcatatctgtagtctcagctgctcaggaggctgaggtgggaggatgcttgaacctaggagtcagaggctgcagtgagctgtgatcacgacactgcactttggcctgaacaacagagggagactgtctatatttaaaaaaaaaaaaaaaaaaaaaagcaaatggttaagcctctttaagtggccctgttaattcaattctggtgtaatggaaagactgtaaactttggagctaaataaataagtaactaaacccataaaacttgagttacggtctcagcttcctttactagctgtacaactctaaacaataattcccattgctaatattcatagactatacgcttattaagcaccgcatgctgtgaaaaatgctttaggtggcttatttgattactgagttctaattcagtctctgccactgagtagcagtgtgattttggggccagttacttatgcttctaaggtttttattttactttttttttttttaagagacaagttctcacatttcccaggctagtttcaaactcctgggctcaaacaatcctcctgcctcagcctcctaacatgcagggattatggatgtgagccacagggcccagccaactttttaatgtataaatttacctcatgtataaaaactgggatcggtaacaatggtacctacctcacaagcttgttgggagaaaaaatacctagaagacaaggagcacagggcgcgggagaaaaaaatatctagaagacaaggaac

SEQ ID NO: 318674 - DNA, 4001 bp, Homo sapiens
agtcgggaaaaagcaatcttctatcatgcataggttgtaaatacaaacagatattatagcagaatcattattaaagcacatcagaaacacaaccttcttttttattttattttatttttttttgagacagggtctctattgcccagactggagtgcagtgatggaatctcagcccaccacaacctctgcctccgggttcagctattctcctgcctcagcctcccgagtagctgggattacagtcgcgtgccactaccgcgcagctaatttttgtatttttagtagagacggggtttcaccatgttggtcaggctggtcgtgaacgcttctcatgcaaagctcctcacccaggtttgccttaagcaggaggtcccagtgtttcagcccagtaagtacctgtgatgtcaaaatgctgtgatacttacatatggaagcagaaatcccagtcgatgtcattgctaacagttgggatacggatggggctggcttgcatcttcttcctaccaagaatcaggtaaggtcagctttgagagaaaaggctgggtgtctgttctattttccccctctggtttgctattaacattaaactaaaactgctcaaatatataacccatcctaaatccacagactacgcatacttagatatggagaccgctggaaaacagacatttgccaaattaaatgtctaagttaaatttctttcccctaatttcaactccaccctacttctccaaaatccctggcctttatgtctcaaagcaagcacatttacagttcctgggtcatcaaaactatggtcacctacttaactcagatattgtttttgcaggtctgacggcgtgttggatttaagcaaagcaaccaactctcagtggtaaacgaagcacagccagtgtattggttaattctgctttcccccccccccccggggtcatttcactaattaatagcagattctagtacaggggtcacgaggcgggtacagaggctcacgcctgtaatcccagcactgtgggaagccgaggcgggtggatcacccgagttcaggagttcgagaccagcctggccaacagggtgaaaccccgtctctactaaaaatacaaaatatagtcggctgtggtggtgcacgcctgtagttccagctactcgggaggctgaggcaggagaatcgcttgaacccgggaggcggagatcgcgccactgcactccagcctgggcgacagagcgagactccgtctcaaaataaaataaaacaataaaatgaaattcatgtgtctgttttagttgttgctgttagatgataggagaaacctcggaagcacaaaacgaaaaatgtgatttctaaatacagtatttgtgaaattcaactctcaaggaaggctatgccagtcgcttaaatcaaacccaaatcgaacgcagttacttattgaatgttaacatccaccaagtcgcctctcctttcaccctccagaatcactaattcccaccgagccctgagtggctttctgacccaggctccagagcatccattatccgaaaatcagaaagggagagtcactaatttctctttttaacctccactttaaacactatgcccacagcaaagagttctgatctctcaaactcccggactctgttcctatgacgttccgcacggccctgagcccctcaaggacgaatcgctcctcttttcccgctgtggttctgcggcaagtctgtaagccctgacgccgcaggtcgagctctgagagcctctctgccgcggaggctctaagagaacgcgcgagtgcgcaaagggcacctggctcaaggcggagaaaccacgccccggaaccagcctcccagctccctgagcccgacggcgcggcttcctcccgctgcgtcggcctcctgaccctggcgcacctcggtccgggcgccaaagcggtgcctcgcgaaagctgcacagcctgcgacgtccccagttaccttccgcagcccaggtccggccaaggagacaataccgttgccatgggaacggaacgctacgggttctgctgggagcgcctgtagccatggcgacgcggggcacttccggttcggagagtccctgttgtctggcgcctacagcagcccttgccttaccctccgctttcccttccccgcaggttagacgcgcccggcctccggctcgccccaaaactggcctctgcatattgtatctcacgagaccttacccctcggaggtgaaggcgtaggaagagaagatacattccgtccaaggatggaagggagcgccgggccccacggccctacttatttaaagctgcgacgtgtgcgggctgtattcggcgacgatcctggccacggtgcacccccacagctcctcgggagttttgtttttatggaccccagaggaaaggcttagatatggctgttgactgtgctggcaccgtctgtgttacccagtaagattggagctaggcatggttaggaaagctgattgcaggaagagagtagggtaagaaatcgactactagatctgctaatggttagctgttcattatttatttagcacttagccctaaataatgcagccatatcttaccctttcgttggcatggaatacagtgtgtgtaatacacacaaggtgcagaggcaattgtggccatacccaaagaaacagcgccagctcttgcaacgctatgttgaaggatgttattatgaaccctatcatagactaggcctatggcaagtcaagttggagtgaatgtgtcccagttgttttcagaaaagagcagactaggtagagagacaaggagaacattgagaatgtgaaagatggtgtttacgtttggtgtttgttatttccagctctaggctggaagtttaattgccattgatccaagactgccaagaaagcctttttggagttaggttggaggagttatttaaatgagtttgcttgaatatctcttaagtaaaacctgtatggtctgttaactcaagatttaaatctgtactttcgagctccatagtcacaattttggaaagattcccccactttattctttttcctaagaaaactctcagcatggaacaatgatgacagcaatgaacctgatttcagaatgtcaaggttctggttttgactctgtagcctgggccgagtcacggccagtgggtcccaattttcttgcctatacggtgaaagtttttgtaccacttgctttctgaagcgccttctggttccaggtttctgtaaggggtaaacgatttttgtgactctatgaacagtatttaacatgtatgggagtaaaaaggaagaacctgtttcctgttctccaacatttatttcttttaccccttgttaagttggtcatcaaattgaaaggttttaatgttctttcattctaggaaatggctgtgagattgtttctaagtatattaaaggtaatgtctcttttctaaacctttgcttttgctgataattgtggagagaagaaccagaacaggcactgaattcccattcctaaagccaacgctctaattcggcctccatttcattagctctgaccggaagcatgttgcctgcatctgtaaaaattataaatcaaaataaaataactttggcgactattttttttctttttttgagacagagtctcactctgtggcccaggttggagtgcagtggtgtgatcttggctcagtgcaacctccgcctcccgggttcaagcaattctgctgcctcagcctcccgagtagctgggattacagatgtgtgccactactgtctgtctagtttttgtatttttagtagagacagggtttcactgtgttggccaggctagtctcgaactcctgacctcaggtgatctgcctgcctcagcctcccaaagtgccgggattacaggtgtgagccaccgtccagccagaactttgaggactcttgaagttttttggtatttctttccttgtcatgttaaccctgtcccccaaatgtaagctttagttgtagt

SEQ ID NO: 318675 - DNA, 4001 bp, Homo sapiens
ggtgggaaggaaaggaaaaagtgagaaacagacccacacatcttttaaaattaataggtcattcagattccaattaccctccccatcttccaacccaaaccactgttataaatgctggggacaagtataagttatggcccaaggtggtggctctcaaccatatgtgaaaaaaccacgccactattgcctcaggtgtttgagccattctcctccacagatcccttgagacctagagatcaggggctgcagaggtcaggacagactgaggttatgagggtgtgggaggcctgatgccactagcaatcgacaagtttaacctgaaagagggagacaaaaatacagtcctctcagacaaaaaaaggagttaatattgagtgaaacatacaggcaagttcagggatggagggaaaggaaaatgaggaatttcatgccccaagcttcacatttctccagcaaacagcggctagtcatctgctcaaagtaaaaggaaaataacagatctgagttcttgagaaaaagggaaaagactaaaatagtcactgtggagataaggaaaagcaacaaaggaaaaatagagataccaaacagtagtatcaagggcccactactgtgtaaaagcatgaatctgttatcaaggccattagcaaagttttatattttcttcaaaagtgtctggaaaccacagagtacagtcaatttcatacacgatatgtgctacaagagagtaaacaaaggatgccatgacatcagagaagagacacttgaggctttctggaggacttaagctttgaagaaaacttagccaggcttaaaaaggtatgtgaatcctagagcatgcaaagcactttctgcattagaaaatttaacattcccagttgtttcagatatcttaagccgaacgagtttattgttcctctatgactatctgaacatgaaattaaaacttcttatgaaggaggctttcctgagtctagttagaagcacgaggcttcaacatcctagacttaacatttttttaccagagtaagaaaccatgagagtaaaccacaatccacaccggtttcatgttaaactcatgaaaccagacaaattcaaccttttatataggattatatttcaggaatggcataacgattctaaacaacgacgctgtattctaaattcctgtactgttacaaagatccctatagtaggcgctcaacaactggcgacggcttcacatttacccagccgccagagagggcttgtcttgagtgtgtctgaggatgcagcacccaaagggaaaaaccactacatgaacaagatcaggaaatcacaacagcatccttctgggtaaaaggaggtattcagaggtgaggaatccaagaaacgatttacccaaaaacgccaccgcaagagaaaaaccagtattagtgactttcccttcatcggtcaacaataataaaaacgctcagaaaggctgccccggacgtcacctgcgcgttcacggaccgccccgggccgcagacacctctccagcggggagcggccggctcgtcccgcccgtcccaccgctcagggaaggttgcggccgcgcagctccgcgaaggtgccacggcgggcccgaccctcagactcgcttgtccctggagaccaaccctagcgaccaggctctgccggatcccgtcgggtttcaactcctattccgaaggtcctttctcccctaatcacaacacccactcgcctctttttcctcctcttcctcagcttccaccgccgaccgggcagccccagttacccgataacggctcccaaggccccgtgtttacattctttcccactggaagcagaaattatcacgcccaaattcctacctgccttccctggattcctggtttcctaagaaacgggtttggcccacccctgggcgttcgaacagtccacagaagcgggcaaaggaaagacgactcagtctttcccctccgccaatctcttctccgggaccacaaatcccagaagtcaccgcggccgcccccactgcatgaccttctgggatttgtagtagtcagggccacgcggctgggcgcgccctctagcagcagccctgagtgaccgcagcgcacgagcgcgggaaaatgaggctgcgcgggctgaagagcgcaccgagaggagccgcccccgcggtaccgcgcagcctcgcgtcccgtcagtggggaacaaggtgaggggaaaacttattttacgggattcaaaggattaggatatgctccttccccgaaggggtttatagcctagctgatgaggtcggccagacgcagagaacagagaggcaaaattcggttataaagggctcgaggcggccgggcggggaggctagtcagggaggctcgaggctgaactgcaggcttcacgttaaagttacaagtgagttggacccagaaggcagaattacagccagaacgtagctgtgcatcatgtcttgaaaataaacgagcacatgtaataaaggtaatcaagattgttaatttctccaactctcctgcccaaaagactcatttttggaagtcatactttctcagcctcagcaccattaacatttcaaactggataatgctttgttgggggacggggtgttctgtgcattgtagggtgcttagcagcatctctggtctctgtccacgggatgtcaccaccagtcgattgtgacagccaatggtttccccagtgaaatttcccctggaagaaaaactatccctcccaccctgccccgttgagaaccactgatgtcgaccaacgattgtcctgagggtcaatgacaccctttcaaagccaaaattattttcatactaatatgaagacgtgatttgccctttgcacaatgctgacatttgcactgatggtggaaaagcaatggtaggtcaaggtgctggcccctccacaggaattacagtaatgacaccaaaccgtactggagctcttcaccaccacacgctcacagtaagaaaaatgggccgggcgcggtggttcacgcctgtaatcttagcactttgggaggtcaggagttcgagaccagcctggccaacatggcgaaaccccatctctaccaaaaatacaaaaattagccaggcctggcggcacgcacctgaatcccaactactcgggaggctggggtgggaggatcccttgagcctgggaggtcgaggctgcagtgagccgaggtcatgccactgcattccagcctggatgacagagcaaggcacggtctcaaaaaaaaaaaaaaaaatggaaaaatgaacgctgtcaccagagaatatccctgatgaagttgtaaaagttactttattataaccactccgacacttaatattctttgtaaaaacttggaagtcctcacaaagtacttctgctgcatattgaagtatgacgtatcaaagaagagctactgtgagatggcattataaactgaagtaaatacttttttttcctggaacacaaattttactaagatgagtgacaaaccggttattcggacttgggtatttgacaaacctttcttgaaaatgaacaaagggaatctgtaacttcaagaaaaacaaggaaagggaaaggggaaggggaaaggaaaggaaaaaagagaaatagggagggagggaggaaagaaaaaaaaattgagtttgttgccaatgataaaattcaagattttaggcaaaaaaaaaatatgattttggaaaaatggtattcaccataatgatcttggcagcttcccagtatctccagaattttctgatataagtgattatcagttgtgacttttatttacattgtttgcttaaatacatcaatatttgtgcaggctgcataagtgaaccagtagtatttgaaaacgatcaatgcatgactgcggtagccagcctccaagatggcattcactcctggcattcacatccttatgcactgccttcctatattgtaccacggttggtctgtgttacctacagaagagggcagaagtgaccgtttat

SEQ ID NO: 318676 - DNA, 4001 bp, Homo sapiens
cctatataaatgtggaatgaggtactcaatggaagtgtttcccatcactggagatgaaaaagcacaggctggacaatccactcagcaggaatgttttaggataaactgaatgtcagatgggaagtaggactagaagcctcttagattcttccagcacaacgtctctaaggctctaaaatatctgtcttgctccaaatcactgcagcacctgctcctattgacactgccaaggggagaaagaagaaaaagatgtattcttgtaagcctgtcatcagagtacatgtcctgtggaaacaaggctgtagagagtaagcacagtttatggaatcagacacaaaattaaatataacttttatgaatttaaatgtcagtcaatattgtcactatggtagaaaatacgttctacattccaaattaactcaaaacaaatttgtttttatgagagagcccacttgtattaccttccgtgctgtattattatttcatgtatgcttggttttgcttccctgaaatctaaactcatgtaaactgagactattgtttaggggtttttttgtttttgttttttttttgagatggagttttgctcttgttgcccaggcggagtgcaaaggtgcgatctcagctcactgcaacctccacctcctgggttcaagtgattctcctgcctcagcctccctagtagctgggattacaggcgcccgccaccacgcccagtattttgcgtatttttcgtagagacggggtttcaccatgctggccaggctggtctcgaacccctaaccttcggtgatccgcccgtctcggcttcccaaagtgctgggattacaggcgtgagccaccgcgcccaacactgtttacgtttttgcatgctcccgcagatctttatcatgctgcttgagtaacaattctgctacactaacagataaactaactgcagacagagcatttagtgagttacggcacagactcttcaattttcagtcgtgctctgactggctccctgtgtaaactcaggccagtcatttaacctctctaagcctgttttcctatctgcaatatggtgaaagtgaggattatagaaaatattccatataaaagtacgtggcacgcagcagatgctcagtaaatgcttagtataacgctcagcacctaagtgccatgtgagtattaaataaacaaatctgttccttactacaattatcttaggcaaaaaaaaacctgccagatattagtattcagttgacttaagtaagtagtataactcctcttttaactgtcagaatattaaaactactagtgtgatgtgcaaattatatacccgaaactagatacagaaattggaatttggctttgggacagaaatctgcttcttccagaactctccaaaggaattcaacagtcaaaagagaccggtttttattctgcagcaaaacaatgatattctgaacctacgtcaactaactgaacatgtcacacagcccatttccccctccagtttcgcttatctcctttgctctctgaaggcaaggaacagctatgctttcccctgcctacagcctgaaacttcttactaggccccgctcctcgccccatgggagcacagtaaatcctgactgcacggggtaagagaagcaataagatgagacaggctagagatttccctgggaaggtattcgggggggtctaaggcattcacggcgcacctgaggcggtccacccagaggccccacaaggcaccgccctattcaacttaagtgacagccgcgccgccacctcatcgccgcccagttcacgctctcgccgaacactcagccacgcttgcgcggcccaaaatgaacagccccggccccgatcctttctttctctaagtaccatttcaatcgcctttaggatcccttgtgcaaaaccgacagaaatccaaacccacctggagcagatgctcctcttctacaaacgccgaggctgcaatgagagcgcatgcgcctttcccaggactcattcacgtgactggaagtggctgggttctgatttgctcggtatttgattaaaaggtcttaacgtgggtaaaagcgggaatttctctgttgcgcatgtgcgcgctctccgcctgataggagttgtagttctgcgggtgaagctcggcgttactatcaagcaaccaaactgcaagctttgggagttgttcgctgtccctgccctgctctgctagggagagaacgccagagggaggcggctggcccggcggcaggctctcagaaccgctaccggcgatgctactgctgtgggtgtcggtggtcgcagccttggcgctggcggtactggcccccggagcaggggagcagaggcggagagcagccaaagcgcccaatgtggtgctggtcgtgagcgactccttcgtaagtaccgcgaggcaggggaggggcgccccgctggggatcggcgacctcaccgccgccgcctgtgctgcaggctttggggagcagaacctgagacattttcaaacaccttttaccccgatgcaaagaaagaaatacattttatgtgaggccccgtgtactcacacgtacaccacatacctatgcaaacatgtaaaacaatagtgaaacactgaaaacatctttgcagatcttttttttttaatactgacctcgattcgctaaattattttaccacgactaatgaactttcagtccatacccccgtttggtttaattgtgtggtaaaataacattctgcatctccataaaagcgtgttagctttccaaaagtcattttccagttcacctcaagtttgcaggaattcatgtttgggtgagaagtgaagaaagtttatttttattacccaggtctgtgataatcctgttagtgctgattcaaatggaatcgttggtataacttgattcactcccccgtattccagagaaattgtgtgtatgtgtgtgtgttggtaatgtggctgaatcccaaacttaaacagtttttgaaactttcccaagccaaaggtgctactgtcaaccttacgcgatgcttttaggatgatccatgttttaaaaagtgctgcttagacaattgtttggttattaattgtaatattagtttattatcactcggtgttactgtggtcacacagatgttggtgttaagcatatctggcactaaagagtgtttgtaatcatatgttgtatttcctttctcgtagattcctgatgattaaaattacatagtctggatgtgcccatgggattttttgaaaatattacttaaagttatctttgtgatttaaacttagagaatgggcagtactggaaattgactagatggcattttattacagagtgctcttgtaatcaaaggcaaatgaaggaagcaggattgtgcagaggagaagctgaattttgttgccatcttatgaatgacagttctcaaactagtatggtgcttcagagctgctttccaataggagtgaggagaacagacctttccacctgcatgttggatggccactggttgtgggctgctcctagaatggggcatggtgttgggcaaagcagctgtcttcagcagaggcaattgttcattcctaaaagggaatccgaatgtggatcacaacatcccagaaacttccaaagatgactgagatatataggtttgttattttttttagtgtagtatgaatgcatagatttttctatatttgtgcttaaattttttgcattcacggccgggcgcggtggctcacgcctgtaatcccagcactttgggaggccgaggtgggcggatcacgaggtcaagagatcaagaccatcctggctaacacagtgaaaccccgtctctactaaaaatacaaaaaaattagccgggcgtggtttcgggcgcctgtagtcccagctactcgggaggctgaagcaggagaatggcgtgaacctgggaggcggagcttgcagtgacctgatatcgcaccactgcactccagcctgggcgacggagcgagagtccgt

SEQ ID NO: 318677 - DNA, 4001 bp, Homo sapiens
ttgaacccgggagtcagaggttgcagtgagccaagatcgcgccactgcactccagcctgggcaacagagcgagactccatctcaaaaaaaaataaaaataaaaattacataaaccgggagcagtggctcacatctgtaatcccagcactttgggaaacaggtgggaggatcacttaagcccaggagttcaaggctgcagggagccatgatgggccactgcactcccgcctgggcaacagagcaagccctcatcccttaaaaaaacaaaaacaaaacagtaaagattccaaaagatgatgctcgtaaagcactgagcacagcatctggtacacagtgagcgctttcattcatggtaattgtgttactatgactcacccttctccacaactctctgctgtcctgcctccatccaggacaccccagggaaaagaaagacctgcctattcctgttaaggtctaaatgacaagcgagaccgagggtctggactttaacaggactatgaggagtggggtgaaggagcatgaaagtaaggcctccactctccaccctcgccatgcctctagagtggctgccttccctaccggcaagttgggggttaccgggagtctcccgtgtttctcgtctgtttttcatgcagggagctgagcaagactggcctccttaagacagtggtccagcagcgtggactccagactgggctttggcgtcagagagacaggcttctgccacgtatcagaagcgcaaacttaggcggggcctgagcatcttcatctgtgaaatggagacactaaacggaaccgatctgacagggtttgtgggagcattaaatgggataatgatgtaaataaagcacgatgcacagttcctggctcctaatacggccacaacaatgtcggtatttgatataatgttattaataataaattgcttatcaccagagggtatgcctcagcagcgcttaccgcactgtccctcctggctaccagccacgggctgagggcggcctgaacgcggcccaaccacccccgggctcccgtccaccggccctcagcccaccggccccctttcgcgggccaccagcgggcggtgcgcggggagagaagtcggggagacgcgcccggggagacgccaagaaggggcgagtcgcgcaccgccggccttcgcgcaggtccagagcgtcgcccgggtggacctcagctcgccccatcatctcatgcaccgcccccggcccacactcaccctccacgccgcggacgggaagtcccagcacccacagcaatacttgccaccagccgaggagccgcatgacgcggggcggtcgtcgaccggcagccgggaccattgcccaggccgagaggcaatcggcgcacggctacgcgagtcgtgctgccagccggaggaaggctgggggaggagagcctgggagcgcgggcgcggccccgcgccgccatcttaacacctggcagctgtggcgggcgccatcttggagtcgggcggacggcctctagccgctggccgtcggcgctggactggagacctctttaggagctaagcgccagacgttgcaggtcgttttgaactctgctgaccccagagtgcagagcatggctctggcagaggcccatggcctcctttcttccctcggaagtcagagcttggctacttgaagcactgcgcccgcctaaggagggttttccacgcttcattcccagagccagaaaggcccaggagccttcctgttctagtgtcccatcgaggtgcagaaactttggaggctgcaaatcttctaatcgcttgcctaacctgtgctcccctacctagggttgccacatagaatacctgatacccagttatatttgaatttcacataatgaatattttttactataacccttatagtataagggatataccttaaaactgagcatcctgtaacttcgtgacatctggcaaccctaaccctacctatccactcagggcaggagaggttggttttaactgatttaccttgcagggcaatctctttttaatcatggttggggccgtgagcatcattggctctggctcatggtggaggtggagccacctcgagcataaagtagataggaaagggcttagaatgaagaaagcatagatggggagatgaggaacagggctctgcattcccaagcaaacgcacagagcgggagtcttaagagaaaattcttggaatagagaggatgacaccactaattggggtattttgccggggggcctgctaaaatggaataaggcaagctttaagcagccaccagtcagtgctaaatcagtgcagagtgcagcttttcaaacttatgaggttgaaaaaatagaaactgatttaaaatacatcagtctattggttaacatagcaatggtaaggggaacctgtgctttttggccgcttggtgaatcccaacttcagcacatgtgatagttcacagtcagcaggttatgtaacttaaagttaagtttcttcagctgtaaagtggaaatgacgttatatagagtcttatagatgaaatgagatgtaaagtgatgagcacagtgtcctggggcacaggaagcatttcaaagtggtaggcattattaattgaataatacaattctgatggtgtggccatagtccccttatctctatgcccatcaaaaagacactgttaggccagaaagatgcatcattaatctgtccctgtggatgattcttttattctaaatacgttggtatggttttgctgttgtagatcctcaagtgccatcttgtgggtccagaagaatatgaaacaatggacatggataaaagagcccacagttctagagcttattactagtcatcatttcgctaagtacctccctcacccctaacagtggaacaacaaacctttcctttttaaactatctttctcatacccccatacatgatttgaaggtgcatgaaaagccaacaggacagagcaccaaaaggatttatgactaatgaaaaggaagctgatctggatactccaacatggatgccctgtggttactactccttcctttttattatctcctttcctttcctgtatgtgtgtttgtttgatttttttattttttgagacaagagtttcgctcttgttgcccaggctggagtgcaatggcgcgatcttggctcactgcaatctccacctccccgggttcaagcaattctcctatctcagcctcccaagtagctgggattacaggcatgcgccaccacgcccgactaattttatatttttagtagagatggggtttcaccatgttggtcagactggtctcaaactcctgacctcaggtgatccacccgccttggcctcccaaagtgttgggattacaggcatgagccactgcgcccggccccttcctgtgtttttactttagctctgtgtttgggacagatacgcttacagatgttagaattagatgttagaattggatgttagaattgtctttcaatttttttttttttttaggcacagtctcgctgtcacccaggtgcaattgctcagttatggctcattgcagccacaaccccttgggctcaagcgatcttcccaccccgtttttaaatttttttctagagatgaggtctcactgtttgacccagtttgatttcaaactcctgggctcaagcagtcctcccgcctcggcctcccaaagggctgggattacaggcttgagcgtctttgaataaatactgtatataccccctctaatgacaacaaatgtagtccacaggttagaatccttatttaactgtctcaccaccaacgtgcacttcttttcagtgagaaaactgccttcacaattgtcctggtttctatcaaatttctgggggtgaggaaagaaaagctgacattattctcttcctttggctgaaattaaatccgccaaatttgtcttgctatctcaaaaggcctttctgtgagtctgggacatcttatatcaaaatgcaaaacttaaa

SEQ ID NO: 318678 - DNA, 4001 bp, Homo sapiens
gccagtccctattttaaaggctctgcactaacaccaaatccacctctcagatcaggagactcaacacaaggctttccaacattcgtcatagtcaaattcttgtaacctgcagatctctggaaactacaaaaggtgccatgcattcaactcagaattaagcagagcattacagtaaggagccagggcgacaatgacatgaactagtttactatctgaatttgtcatgagtgctaatcaaatacgctgatttcaagctttagaaagatgacttttgcaccaaaaagggcatctcctttcagagactgtaacctcaattaaaaatgctacattatatacacacacaaatacatatgcagttgtttttcatggggcatcataatttgcaactagtccacattaaaaaaatggtttttagtcaatctcaagcaaattaggccaccacgaacagaagccttagaagaactgcactgcttgacgcctacctttaaatggctaagagaagctacgaatgaattaaataagttggccaaatccaagtgcctcacataggctttataatagctgagaggtgacttcctgagcgacaaatctaagtttttatgctagatattttgttcaattagggcaggtgtccccagaaaaaatgttaagaaaaatgtgcagagtatcaaaatgatgttttctcacttattttttctatgtctctaagtatccaataaaaggtaaacaacggaataatcattttctatctcacaaccccaatacctcctaacaaaaccctattttatttaccaaaggaggcccagggagtatcagattagcgccagtctaagggaaggcatttttccagactcgggaggctatagataggggctttcttcaccagccagagctgagttccagaaagcactggcagccggggtggccagctctaaggtcccagatctctaagtcagttcccaaggtcctttcaggcgggcggggacagagtcgggtttcgggggatgggttaacctccgggcctcacgcactggaccccaccctcagggcacaaatggaaaggattggcaggagtcgggagaggggttcgccccaacacggctcctcggagaagacggcggggccgtgaaacaaagctgactggtgctgccggagaggaacaagctcccgcaggagctcactttgaggggacaagaagggggcgccgcagggtgcaggggcgggcggataatgtctgatcgcctgggcgagacgccgggcagctggccgaaatgggcagcagggaaccctagaccagtcgatcgacaccgttttactttttgtggggaggggaagcagtatcaaaatttcttcgggcgccagaacgagcggcaaagcttatgggagtagggccgaggctaggacccggcttccgccagtcccgctgggcccacagccggccctctgagggtcacaaaggggaaggtgtctgggatccacgccctgcagccccgcagctttgaggggccgtcatctaggcgaaggtgaaggcccttaccgcttgaaatcccgcatgagcctcctccgggccggggtcgacatgctccgcagctgccccgcggtcagtctgaaaaaaaaaaagtcccgcgcagcccccccaccccccggcgcggcggccgaatcactgtggatcgccgccgccgccgccgccgccgccgccgccgagactgacaaacaaccctgcaatgacgtctccctccgccgcctccggatccctccgccctccgccgctaccacagtgtgagtgctgggggaggagggggcgggacgcgggagcgcgccttccccgagcccttcagcggggcgcggttccccctgggcttcctgaagtaatagacaaatttgtgttctctgtgttcagactagaggttgtggattcaaagaccacgaaacagaaacactatcccgtctccctccccgtcactagtttaggctcggcggggtggagaaagagggacgcatccgggccagagatttcagggaaaggaggtgggatgatgtaagatcacgtgactgcccgcggccttgtcaacaatccacccctgagtgggagggggagaagtatctagaaccacgtgtccctatgacgcgtttagaacgggtcacgtgagcgcctcgcctggatgtgagtttcagccaggtctgtgaagcgggtttaagagggtgagggcgggataaacctttattagttgttttctgtttatcacaggtatagagacaacattacccaagaggtcatggcagaatcaacagcttgttttgttttctttaaaccgggaccaaaaataattcccctctggttggttcagtggcttattaactctggtacttggggcaagaagagtgagaggatcgcacgatcttctaaggcagccttgaatactgaggcccacacaacaatctcctgaaatggttccttgaagctaccagatagtctttctgctttgcagtggggtttctagtattggaaattctgggcaaatattaaaggatggtgtattatgcagtttttcctttctgggtctgctttcaattgaagatatgtgtcagagtccggggacttgcctatggtgggggagtaccattgtatttttaaggaatgtgggggtgcagtcttccaagcatatcaatgagtggttggttgtcaaagaaacctacaaatatgattcatattctgggggagagctccggcagacatgagtgagggttatatatctagcctgagataacttcaggttttctacactagcaagaaaggtgcaaatgggccagaagggccccccaccaccagggggttcagaggtgttgacctcccaaagaccttgaatattttctgtggtcaccgtccttccctctattgcttccaattcctaccttcaggactttgttatactaaggactctgagtacttttgtatccatttggggaactgttcagttcaacaggtaaagggagggtggaatgaggaccttaacattgcctcagccttgcccctgattccatggaagcagagttaacttttctgactttccttgtacctctttcttcaaaccctgaattccctctctgcttccagtgactgccttggtgatcaggttagccaggcctaactcttgataggtcctgttagacattcgcaatgtgttttttaagttaaaagctgaatattcttaatttttttgcctttctgccattgcagtcctaacccttccaatagcaaaggaggaagacacacaggtagggttacatggagaaaaatggtaaagagaaactatatcttaaaaatatccctcatgagctggggcattagctcatgcctgtaatcctaatactttgggaggccaggagttgaagaccagcctgggcaacataggagatcctgtctctacaaaaagtaaaattagccaggcatggtggcgcacaccaatagtcccagcaactcaggaggctgaggcagaagaatcgcttgagacgaggaagttgaagctgcagtgagccatcatcatgccactgagaccctgcctcaaaaaaatcccgcaacaaccaaaaaaacccttgtaatttatcagtcaaggcagtcactgaaagcagagacagaattcagggtttgaagaaagggaggtacaaggaaagtgggaaaagttaaccctttctggttccatggaactatgggcaagattagggcaatgctgaggtcctcctcctaccccctctttccctgttgagctgacgaatggatacaaaagtgctcagagtcctcctgacccaccaacgaagtcctgaagatgggaactggaggcaatagaggtaaggaattcagagactacagggatttataattgttttggaaacagtttattattttccaaaatgatataacacttttaactgattcagtgaatgtgcatcataaagtcttacagctgtgtattagcaagaatcactggctgtccttgttaacc

SEQ ID NO: 318679 - DNA, 4001 bp, Homo sapiens
aactggttctcttcctcttgcatccccatcccatcattcagaatggataaccccagtacctacttctaagtagctacaggtataggccgtgtgcagtggctgattgatgcctgtaattccaacacttaagggaggcagagacaggaggctagcttgagcccaggagttccacaccagcctggacaacacggcaagaccccgttctccactaaaaggaaaaagatgtattgaagaaaaaagtagctaccggtttaatatagccaatctgagtagccaagtgaaacaccaaacagaaattaatagtggtgcctccctacttctaagaaaaaaaacatgaaagtggcactaagaggttacaacatcagaaagggaaaaaaaataaattttaagccaatcttatagtctagatgtattattaggaaaacctccttattgataactaaataacccttcactttaaagagcaaagaaatcctttttaatacaaaatctagtaaaaccccttcccagttaagagtctcggtaaacatatcacctaatagcgtcaagtccattttgcgaagaggctgtgaaaggaacttttgtataatttctctggtggttttcaatgttcaggtttctacctctacctttgccaatgtacagcttttctattagatccaatcctgcaaaacggaagtgttagtttctaactacatacagcaacctcaaggaataaaatgattctccctctacttccctcctccctcattaagtcaccttttttttttcttctgaacttccaactcttaacagtttctggacaagcagggtggaccgatgtgtgctgccacccaagaggtaagtgaactcaggatatacttgtggatcgggcaaaacggcttcctctgtcagcccgagctcaggcggttttgtggagggagctagggcaggtgtgggaggagggaacagaaatggggcgagaagccctttcgacctctgtcgaaggggccgcccaacgccccagcgcccccctcggccccaaccccgccatcctggcccgacaatggccctcaagtgcagcggcagtcccagactggagagaagccctaagagtccacaccatgcgggcctggaagggcagccggggaggaacgctgaggccgcgagagcacctccggcctaagcgcgggctgcgcgccggggcctccacgggcgccatcactgggagtggggtatggaggccgccccgaggggccagcaccggcagcaagatccaaggaggccgcgagcccgacggagactacggcgggaagtgcaggccgcagcctgctcagctggccagcagcgcagccgacctccggccgcttaccttgtggattctcttcagagccatggtgggaggcgggtggcggcggcccccggggcggggacgggggcggggaagggacggggaaggggctagggagcctgaggccgcctcggcgatctcggtcggcaggagaagatggagagttgaggaaagcgggtccggcgggacgggctgagggccggggcccactcagctcctgggcctgccgcagcggtcaccgcatcacccggcggcggcccctttattcgccgccgccctagccgccaccgccgccgccgccgtagctgcctcttcctcccaggatcagcgccgcctcctaaaccgccgcagatccctccgccagaaagcaaaagcccaagcctcgggctcggccggcctctcttggtcggacagccggagggattgcctgtcttcctccctgctgcaggtggaccgagggacgcgcgggcgggcgggctgcgccgccggggtggggccgtcggagcacggggtgggcccgaccgaggggcaggtcgggaggcgcggggattggcgggccaggggagggagggccgagccgcgccggcggcggagggatacgggccgcccctgtgagtaagctacgcaccgccgtcgccgccacggccccggagggcgtgacgctgcgaagccctgggcggagatctcgcgagatctagagcgcgagttctgcaggctccagcgccgcgaccgttgacttcattgctgatggaaacccacgcgcgtgtcacaaaagatcaataaatattaaaaggcgaatgttgtccagatctcacgaccgtccccgtactagtcccgggaggaggcacttaggcccactgcagcgctcctgaaggaggaagggacttggccaaggtcacagagctcttctgaagtcctgggacttagcacatctctttccagaggccgcgtggctacagctcgggcacctgccacgagggagatgtctcatagccgctcgggttgcagtgagattggccttccggaccaaggccccagatggagaggatttgaatgttgtgttctcagccactggcatgtatgtgtgccttcgaggtgtccagactctgctcagcttagtgaattgcaaattgttacaagcaagcactgtaccagctgcgtcagaaaaaaaatcacagtgtgtgccccaaatagttaaaaccaacggctgggcgcggtgactcacccctgtaatctcagcactttgggaggctgaggctggcgcatcacctgaggtcaagagttcgagaccagcctggccaacatggtgaaaccccatctctactaaaaatacaaaaattaggccgggcacggtcactcacgcctgtaatcccagcactttgggaggccaaggcaggcggatcacgaggtcaggaattcgagaccagcctggccaacacagtgaaaccccttctgtactaaatatacaaaaattacccgggcatggtggcaggcgcctgtagtcccagctactcgggaggctgaggcaggagaatcgcttgaatccgggaggcggaggttgccgtgagccgagatcacgccagttcactccagcctaggcaacagcaagaatgcgtctcaaaaaaaaaaaaaaaaaatagccgagagtggtggcaggttcctgtaaacccagctactggggaggctgaggcaggagaatcgctggaacccaggaggcagaggttgcagtgagccgagagcacgccattgcactccagcctgggcgacgagcaaaactccatctccaaaaaaaaaaaaaaaaccaacctcgtgctccagatacccatcaggagggtccgctgaaaatcaaacctagaatatttggaattgttttttaggagatggagacaaaaagctaaatcactgagcacctaccctgtgcccagccctacaccatgactggtgtgagatacggagccaagccagggctagaggccttacacaggagaatagtaaagaatattttgctgggaggtaatgcccacattctgaaatctacccctggcgttttctgattctaaatgtctccttttcgctacatccagaaaggaccttgcagatcattgattctagctcctgaatttatagagaagaaaaaactggagcccaactaagggaaggatcttgccaaaagccacacagtaggtgagtggcaaagctcatactgcctcacctactgagaaggttggaccattaggacagaagcaccgtgcacccagtgagagaaaattgtatccagtggttcagggtgggtatagttgaggttgagggtaaaatggaacatctcacagccccagatattttcttcctaagaaatgtgatgggaggggtacaaaaatctccactggacagatttctttttttttttttttgagacggagtctcactctgtcgcccaggctggagtgcggtgacgctatctcggctcactgcaagctcttctcccgggttcaggccattctcccgcctcagcctcccgagtagctgggactacaggcacctgcaagcacgcccgggtaatttttttgtatttttagtagaaacgggatttcaccttgttatccaggatggtctcaatctcctgacctcgtgatccgcccgcctcggcctcccaaagtgctgggattacagg

SEQ ID NO: 318680 - DNA, 4001 bp, Homo sapiens
gcctgcagtgaaagtgccaggcagggaagaagtgatggcttctgataggccgcctgtagaaagatcaagccgaggtcatttggggtcttttaaagaaaacgatgattttttcataaatctaaaagatgcccacacagcaatgtaattttcttaagtaatgcttaatattgattcaggaaaacaccagagaactcaaccgcagtcgacagcatataattcgagcagataacaccatcacgcactcaccctgctctcaagtactttggggtttctttgcgtaaagctgccatctgatgcaataggtgagaaggctcaggagaactgtttggcccttcgtttcgtatttcgttaaaatctttagccctgataaaggatttaactgcttggggcagtgaggtaaggggatgaagaaaaagaagcaggtctgaaagagaccaagacctggaacgtctaccccagaggtggtggtcctaaggggttcggggaaggaagggggtgctctgaggggaaaacaggcattgccgtggggggggggggtctggtcttgtctcttaagggaatgcccaaaccacaccgccgcctctctagagtgagttcccaagagcaaaatttccacctttccaggagaggcagcccagaagaaggcagggggcggatttacaagcaggcagctgtccctccccacggcacccacctgcagatctcccacccgagtcccctgcggaggagccttgtgtgtgtgtgtgtggggggggttggggaggtgggagatcagctaggttggacacttaaatcctgaggtccagaaaaagttctcaccttcatagagattatagggacaggagattgaggagcagacaagagaggggcgagaaaaggtgagacggaggggaaagaagagtaggggagccagggagggtggagaaggaaaaaatgaaaaaggaacgggggtgggaatagatggggggacagagaaaggggtgagaggagaaagagtccaggaggaaagggagaggagggtatgggagagggaggctaaggaagagggatggaagagaactatgaagggatgaggagagaatgagcaagctagagagaccagagagacggcagagaccgataccagagagacgggcagagactgagaccagacggggacgggagagacgggacggaaagcaggggcaggaagaaaacgctcagggaaaagaggtggaggcgctcggagcatccccgtggggcgctggtgtagtcagagcagggagcgagatggccggaggggccggcgctggccctcaccacggggcccgggcgcccggcggcgctgcagacccgatctcggccccgcgcccccagccccggcgcgctcgccttacctggcccttgaccaggctggctgcgaactggcgcatgacggcctccacggtgtaggcgctggaccagccgcgcggcgtgagcagctccatgcagatggcgccgccgtccagcacgtagccgttctccaggcgcgggctgagcacccgcatgaagggcggcgagaaggggaagttgtcggggaaggtgaggttgagcaggatgaactcggtgttggtctccttcatgtcctgccacagcaccgagtccttgtccacctggtgcagcttcacgttccagtcgaacaggctctcgtccaccagctccacggagatgaagcggtcgctaaggcgcgcgatgtcctgcagctccttcatgagccgccggctgcgcacctgcgtgcagtgttgctggcgcgccgcggggaccaggctgccgcccgccgccgccgccaccgccgggcccggccccgccctggcgcccgctgccctctcgcgggggcccccggcccccgccgcagccgccgccgccgccgccgcagccgccggcgccttgtcgcgcggggccagctccgccgcgcgcttgccctttcccttgccgggtcccgggctggcgtcgcccgcgcccccggggtgctgctgctgctgccactgtgtggtgtgtgtgtgcgagcgtggtgtgtgtgcatgtgatgtgtgagtgtggtgtgtggtgtgtatgtatgtatggtgtgagtgtggtgtggtgtgtgtgtgagtgtagtgtgtgtagtgtgtggtgtttgcatggtgtgtgtgagcatagtgtatgagtgtgtcgtgtgtgaatgtgtgatgtgtgtgtggtgtgtgtggggtgtgagtatggtgtatgagtgtgtggtgtgtgtgcatgtgtgtgcttgtgtgatgtgtgaatgtgtgatatgtgtggtgtgtgtgtggggtgtgtgagcgtggtgtatgagtgtgtgatatgtgtgtgcgtgtatgtggtgttagtgtgtgagtgtgtggtgtgtgactgggatgtggtgtgagggtgtggtgtgtgtgtgctgtgtatgtaatgtgtgtatggtgtgtgtgagagtgatgtgtgagtgtgtgagggtgttttgtgtgtggtgtgagggtgatgtgtgtggtgtgtgtgtgtggtgtgtgtgtggtgtgtgtgagtagtgtgtgtaattgtgtgtagtgtgtggtgtgtgtggtgtgttgtgtgtgagcgtggtgtgtgtgctttgtgtgaatgtgtggtgtctgagtgtggtgtgtggtgtgtgtggtgtttgcatggtgtatgtgagcatagtgtatgagtgtgtagtgtgtgaatgtgtggtgtgtgtggtatgtgtcgtgtgtgtggtgtatgagtgtgtggtgtgtgtgtagtgtgtgtgcatgtgtgtgcttgtgtgtggtgtgtgaatgcatgatatgtgtggtgtgtgtgggggtgtgtgagcgtggtgtatgagtgtgtggtgtgtgtgtagtgtgtgcgtgtgtgtggtgtttgtgtgtgtgtggtgtgtgactgatgtggtgtgtgtgtggtgtgtttgtggtgtgtgtgtgagggtgtgtgtggtgtatgagtgtgtgggaatgtgtgtagtgtgtgcgtgtgtgcggtgtgtgtgatgtgtgtgtgatgtgtgtggtatgagtgtaatgtttgtggtgtgtgtgtgatgtgtgtggtgtgtggtgtgtgtgtgcagtgtgtgtgtggtgtgtctgtgtgtgatgtgtgtggtgtgtgagtgtgtgtggtgtgtggtgtgtgagtgtgtgtggtgtgtggtgtgtgagtgtgtgtggtgtgtggtgtgtgagtgtgtgtggtgtgtggtgtgtgtgtgcggtgtgtggtgtgtgtgagtgtgtgagtgtgtgtgtggtgtgtggtgtgtgtacggtgtgtggtgtgtgtgtgtgtgtgtgtgcggtgtgtggtgagtgtgtgagtgtgtggtgtgtctgtgagtgtgtgatgtgtggtgtgtgtgtgagtgtgtgagtgtgtggtgtgtctgtgagtgtgtgatgtgtgtggtgtgtgtggtgtgtgtgtgcggccgagctgtccagcggtgaggctgtagtggtggcgaagtacaggagagattacgccggaagcctgcatggtttaggattgtaaaccttgctgccgctgctgctggtggtttggctttgaacttgaggagcgtccgagttctccaggaaagcctttcactctgggtgccgtcatggtgacttcttgtttttaacttcttttaccatttttaccttttctaagttattagaaattttcactgaaaaataactcttctggccactgtggaaacagtttcaggcctgaaaggtttggggtcgggtgatttggggttgtctgcgggagagccagttgacagcgtgagctaaaagagtaggggtgcctgcacgcctgggtccccgagaggcgaccggcagacgagtgcgtctgcagagggctgggggcctgtgctctcaggtgggtgccctggcagtgggaatctcagctgcgacgggagggcctatttgccctggtttcatggttgattttgttttgttttgagaccttgctctatccagctgttttgtctgtttgtttgt

SEQ ID NO: 318681 - DNA, 4001 bp, Homo sapiens
gtcttaatttagggtaacgtattccattttagacagaactataacaaatgttatattcttcaattaaaagtggaccttttgagttaaactgaaatacagtttaaatattttctgtaagacataagaataaaagggaatcctacgagagctagaaaggcaaccagcactaatatcgcatatattgtgatgcgtagtagtgcagagtttggagtgaaatcatctgagttccaggtgaccctggacaagtgattgctcttctagactagtggttttcaaagcatggtccctgggctaacgaacagcattgacctcacttggtaatttggtagaaatgtaattggggtggagagaagggacctaggaatctgtgttttaacaaggtcagtcctcctcacctctgatgaatgctcaaatttgagagtcagtactacaggctcttcaatgttttcagccttaaaaaaaatgtgccagagggcatgggctctatatggttaataaagcagcataaaaacgttacgaagcacctatcccacaagtggaaattccaagttggcaaatgccttaaagggccaagcgaaacaaacaccataaaaattgtaaatgcatatgtctttaagatttgtttaaaagttactgaaccttatttcatcattaagaccgttcacaccaatgaagcagtgtgatataaatgcatgagctattttgctttcacatttaaccttctttcttagtattttgtatcatttcagatcccatcagatttataagctgaaaaatgatttggggtgtggggaggagtgaagttggcaaacccaaacaagcaagcaaagaatacacttccatatggtcaacctagggtcaagaatagctgtttaggttggagttctacctaacatactgtgttgactttgcctagtcaatccacctcttggcctcagtcttctcaacaagatgaggctactaatattcactggacaggagtagtgttaaggtatgaagtaacacctgtgacagcactttgtaaactgtaaaacacaatacaaatggtgttcatgatggaataaaaacatgctaaacaattatctcattgaagcttcacaatcctgaaccaacagctgttgtcctcattatacaaatgagaatcctgaaaagaaattaaacttgcccgggaccacaaacctaaaaagtggcaaatgaagaaattttaaagtatagcagtaaaagtaacactttgggaattaacgggaggttaactttcaacaatcccagcaaaagataaccgtgaagcactaagaactccggcgagaaccgcacaccagcaacaactgcgaggtggtgcagggtcgggggctgtgctaactgacttaggggagcattaggaggcaggtggaggctccagaaccaaaaaggccgggatgccttcaacaaggaggttgaggggagggatggacaagcctgagaagacggaggaatgaagtttggggacgcaaaacccactgggaaacagaaagccctccaaataggctagactgctggatgggaggacagcggcccccgcgactaagcgggccggggctaggggcctgggcgtcagactaggacagacactatccccagcccgccgcagtgcaagccacgccgcgcgggccgcaaagccactgtccccgagccccaacagcgtctccaagggcagcgcgccagggtgccccgcaacccctcacctggagcgcggtggaacctgcggcagcggacgcagaaaccggccgctgagagaccgaaagcgaccggaagtgaagggcgggaccggaaccggctgaaaaaccggaagtgggtggtttgaaacggaaatatgttggggacggaacaactgcttcctttgaatctcttcgggtgctaatcaaatggccgctgtaagggatctccacaaagccacgaagaagccaggcctttccgagactgtaaccgctgtgcagatagcgccgatccctgggtggccgctctctcgttctgcgcgtgcgctcgttctgggctgggagcggatgggtgctgaggcgtgtgacgtctctagtagtgtcgtaactgggtgtgctgccttttccaggtgtactgaggtcttcgtgagattcagggctaggactcgtgtggctgtgtcatgttccgaatgaagcttaaaaggtgatctttgagaactgaagacttgagacccctccatgggcccaggggctgccaacactaataatttcagagacttagaatctgaggagaatctccaatctaaggggaaacggaagagggtcaggaaagagaaggggcaagcttaagtgactcagaatccaagaagcaagtctcataggagagctgcgatcgaggttaccatacagtatccaatcgtctcaaccttcccatccatacttccatgctgtctttcctctgaatgcaaggaaaaccggttacacaaacgctgacaaaagaatgtcagacttgaatggaaattcggagcagtacccatctggtccatacagcgaactcccagtgagcaccacggcaatgtaactaattcatgtttccctcttggcagtgcgggaaaggcagcaaagagccaagttttgtatcttaacagttctttagttaagaggcacacgctattttgcattcttccctacttttgataatttttggctgcactagtaatgcatgagtatctgctcatttaaaaaactcaaactttttcagtgaaaagtatgcccttttcttcagaaagtcttaattaaaaaaaaaaaaaaaatcattgcccagaccaacattttcaagcattttctcaaatcgttttcttggaatagctgcatagttttgggtcttacattgaagtttggtgctcatatgtgggagctaaaaaaaagttgactccatggagatagagagtaaaattgtggttaccagaggctgggaaggataaggagggagaaggagatgaagagaagttaaaaggagcgaaaatatggttagacagaaggaataagttgtagcgttccacagcacagtagggtgactatagtaatcaataatttattttgtatttcaaaatagaggagaaaggttgggatagtctcaacacaaatgataaatgttggccgggcacagtgtggctcacacctgtaatcccagcactttgggaggccaagacaggcagatgactagaggtcaggagttcaagaccagcctggccaacatggtgaaacccagtctttactaaaaataaaaaaaattagctaggtgtggtggcatgtgcctttaaccctagctactcgggaggctgaggcatgagaatcacttgagcctgggaggtggaggttgtagtgagccaagatcatgccactgcactccatcctgggtgatagagcaagactatctcaaaaaaaaaaaaaaaaaaaaagaaaagaagaacttttgcctcctgttgctccctggagcctctcttctaatgtgtggaggataatatacttgtccttcattcatgcatctctgtagcagctaaagatgcctgggaattcctccatagattgtcaggtctgagagtctaaataatatatggaaacaatttcacaacatcagatgacaaactgttaatattactgtgaccacatttactttggaagataaaaggacattcctgcacctaggccagaaatcccccactactctgcttttatctccatctcccccagacttttttctccccttttctctctctggccattttctttctctagcaagtgtgttctcttgcccagctcagatctactcccctcaaaaagctttccctctcttcccagttggaagacaatcctcttcaaaaatttagttccctctagaagtttgtctctctcttctaatacctactcctttgcctttatcttgcctgcagtaagagagctgaaaatatttagaatctgccccacatgacagaatacaggttcttaatgaagcatgcccagttactg

SEQ ID NO: 318682 - DNA, 4001 bp, Homo sapiens
catcagggcccatgtcctctctccaaaagaaaataaagacgtttggtggttaatgttcctttttctaaacttcatgtacagcagagcttacggtccagagaactcagtcctcaaagaaactgatactatagctatctaactggataccaccggtaataaattacccaaagctaagatttcacgctttttaaagcccatattaataatgcctgtctggtcataagtcacactaccaaaaggcttaaataaattaatccacatacattacggagaagagcaaaatgcttatgacaatattaaaatgagtgtgaaaaaaatttaattaaaactaaacactagcgataacaaatactaatatatttcagaatcattaatgatcaacacaattagaggaagattcattttgatccttcaatttcaccttaacccaaggctgttttaaatcgtgccctttttatcttcctgctttgttgtcactgaggatctcaatatgccagtaataatgctacgacataaaatacactataaagtagcattttcatggactttttcaagacaacttccactgagttctcaagttatttacccaggatttagtcatacaggatacccacagattttaataaagtggcatggctaaccatcatggaattcaggaaatccattagccaaaaaacttaggtgtacatggtttgtgaagagagcttaagtgacagggcaagcaactggtctaaatgttagtatgctacgaaaaagttgtaaaccctcccatacccaaacaatttaaaaatttacagacatgcacattttaaggcagctaacattaggtcacaaatcaaaccaacgctgtcatctttgcctaaaggctgtttatcactaaaatattctacagaatggacgtaaccaaaggtcacttaaataaagatagaactaattttattattatactgccatactacaactactactgattgaattaaaatacctatcctcagcacgcttttactataaagtaggagtgcgttcccgtgttagaaaacttttaaagtactgatcttactgggtggggtaagtcagggtccaactgcacttgtacttttatcctacatattttccttctacgtaagacagatgggaatgtgattagcccaccccgacagcacaccggcctaacacccccaagctctagctaggagccacgttttacccgggaagaccgtttccccacccctccttaatacaatgcctgcggccactggagactcctccagccgagctccagaaactcgcaggtttaaatggccaatctggaaccaaccggggcagctgtcatctgaaactcaggaaagctgagaccagccaactccacagaacaaggaagggtgcggaaagatgtggcggggcccgtcggagggaacgcatcaagctccctccccccgccatcaattcgcttttctgcaaccccggcgccgccatcctgatcctcaataattaaacggcctggagagggagtgaggtggccagaagggcagcttcgggtccgacttccccgagccgagcggggcggtcggcgaggccaagggctacgtccccggcgctcagaggacttttcttcagggctggggcgggaaggggcgacccccgcggctggcaggacagccggaagcggagcgcggggaatgacgtggaagaggggatgacaaaggggcgcgggggcccggcgcggcccgcgggggtcgggacaggtggccgggcctggccgggaacaatggggggccgaggctgccccctggcgctcacctacctccggtgccctccgagttctcgttgaggctgcccgaggagtcgtgctgggcgcccacacacccgcccatgggggcccccggcgcctcgtccgccacctccggacgctcgtccgggcccgccgccgccgccgctgcagcctcctccggcgccaccgccgagctccggacaggcgcgccgctccgctcgcccgccgcggcccagcctccgcccccctcgccgctccacccaccgccttggctcggccccttcctccgcgcccacttctacctcaacccccgggccgcccgcccggcaggcctggcccgcgcgccgccctcgccttcggctcagccccgccaggccagggctggcccatcccgggcgggccgcagcgcccgcctcgccccctcacagccccgcacacccgagtccaggcgagccccgcgccggcgcctcgcgtccgccaggacccatcggcccccggcccgcggcgccgccctccgcacccacggcctgggctcggcccggcccgcccggaatcgccggagaagggcggggccaccggaggccgcgctctgattggctgcgggcggggctgcgagcggagcggggcgagggtgaggcgggggaggggacgcagggggctaggtggggggaggactgcaggcggggggaggactggaggcgaggggaggaggagagagggaggacgggaagaagaaaggagagggaagaagggagggaaagcaggaaaaagccgaacaaaagtgagaaaagaggagtgggaaggggcgaaatcgagttcctggctcctcggccgtcggctccttcttgctggtggaagcgggtcgcacgggggaaccgagaagtagtcgtggaagactcgcaggcggggacggggcggtttcccaaataacgggggctcgggggagagtgtcctggccgaacgttgaggtcccagcgccctttgaatttgtatggcgctccgtgggttggtaccccgaatctgggcttcctcttgcctgcccacccccgtcttccctaaaatcatggggccccattattaggggtggaggcagtggttgtggcaaaccaaactgagattagaggcgaggcgtcctgatggaacgcctggaaagaagagataaacgctgaccttagttcagggggcgtgggtttctttcattttcacgggattaatgattcaaacaatactacttatcaagatcctgcctttgggtatcttaaatcgtccttaggccaaagtgaagtgtaaatgagtgaaacaccctgccttttcgaatctagaatttgggacattgaccacgcccaacattcttggcggttacttttccaatctcagccaaattgttaatggtccctttagaattgtgcttcgtgctatgatgccttaaaattgttatcatcctgcttgggactttctaaagcttatttctgcctaagaagctgttttaactatctgctccatttttatatcagactttctttttttaacatcctgggtcagcttttgcttagcacgaaaaaaaattttttaagttgaaatacctaagaaagagatgctctgcagcttgggatttgcatttaaatatattctcatacattgctggtgggagtgtaaattggttcaatcttttttgcaaagcaatttggcaatgcagatcaagagccttaaaaatgttcatatcctttgactcgggattattccacatctggaaatctagctcacagaaatagatcaagctattatacaaagatttagatctctgtattcatttgataaaaagacagtagacaagcaaaacctacacttaggttaaaacacagaaatgtcgtgagatatagaaatctgctatattaaactcatcctgaagaattagtattgtcctcagttgtggtcctgaacattccaaaaagagcttatgccatcgatgttattatgagttttcagaggttgctctgacatcaggggctgtgtcacaaagccttctgtctgatcattttcaactaactatacacgttggcagacacatcacttcatcacttccctgaagaagagaagctgcatgccgaatatttgcaaagagattgctttgtcctgaatttcactctagaaattgcagaaaccaagacttccacgatgtctattaaacagatggtaggcacccaaatgatgagggctctccgatgagcac

SEQ ID NO: 318683 - DNA, 4001 bp, Homo sapiens
gattgagaccaccccggctaacatggagaaaccccgtctctactaaaaatacaaaaaagttagccgggcatggtggccggcgcctgtattcccagctactcgggaggctgaggcaggagaatggcatgaatccaggaggcggagcttgcagtgagccgagatcacaccactgcactccagcctgggccacagagagagactccatctcaaaaaaaaaaaaaaaaatgtacaataagtgtcagagctgttaggagttattctaaaaccaaaacgtttggcaattataaaaatcccaggtcactcaaaactagactccacagaatcagggtaaccaattggctgatgccacagctgaaagagcagcattcaagccaccagcaccaatccaggaaatgcccataaaacctgaaacacttaaaaacatgttgaaagaaactgagagcacagctccatcaaaggagaaatccacttggaaacaagcaggggaatacttgactcccgaaactaaaatatagtgtggacctaataataaatccattattccaatggcatatcaggtgcccttatggaatatattcataatcaaacccattggaatccagataaaatgaaaccctggtgtaaaaaaatattactggaaaccgtccttcatggtggcaaatagtttactcttgatgtgacatttgtcccaaatataacccaggaaattccctccatggggccaagggtcattttccttttccagctggaccttttaaggtattgattgattttatccagctgccatcatctcaaaattacaagtatgttttagtaatggtctgcatgtttttccattgggttgaagcttttccctgcaggcaagtaacagctatggcagctggaaaaaatctactagaaaaaaattatgccattgtggggagtcccctgtgaacttcacagtgacagaggaactcattttactggccaggttattcaaaatatttgtaaaattcagcccatatgttaacatttccattgtgtctaccatccctggtcctcaggcctggtggagaggcccaatggaataattaaaacatatctaagttcacgaaggcatttcacctcccctggcccaaagcactccccctagtgctgcttacaccccaatccaccactttcggtaaacattaactgtccccttatgaaattagaacaggaaggccatgtgtatggaaatgaagataaccaatccaacttttctcaagggagatatattgcaatattgtgagggactcatttatcatctcttcaaaaagccaagatttagtaaagaattccttttacagtgtgctcccagaagatgagatgcctcatcatgatctgcaacccagagattttgtctattggaaaagacatctaataaaggattcccttcaaccacaatggaaggtcccataccaggtaccattgacaaatccatgtgctgcaaaattagagggtttagactcatggattcacatctctcatcttagaaaggcacaacctcctgagtggactgtaactcccaacaaagacctttacctccagtttactaaacatcaatcttcaacccaggattaaaagcagatgacagctgttgtggactgtttaaccccaagacacaggaccaggcatgtatacaaaggaatgcctgtgtttattgtacaataaccattacaattattgtccattacaattatatataggatataacagcaactcctgtcttagaaagaacaggcacttaaactatctgatttaatatcctttagtaactgaagtgaatttcacaaccttgctatcattgatcctatgtccctacatcttcttgccactgccaatcacagatgccaatgaaatgaacctgtttctataatgggctcaggattatgcagacagattataaaaggacacctactggatatgtggactcatgcctctttccagtggctctggtctaccatggtgggtatcccccttccaaggtcaggactggatagaataccaaaaatttattacatcacagaaagggtctggtatccttagtaacggcataacaaaagacaatatatagaattggcccattaaaaacatgtttaagaacaagggacataggaaaagtatttcaatgggaaggatcatctcattagctctcactttagcatcctctcaacaaaaacaggaagtggtaaccacaccccaaacaacagcgcattttcaaaatgggataatgcaaatttgggatggatttatctgtctcaccccttcatttggccaattcagccaaaatgcttctttgtactgggagcaaagaaaccacacgaagaacctatggccaaaaagtacaggagatatggggtggatagctggagaatgctgtgaccacattatcatattacgagacactgactggcatgccactgattgggtgcagggactaggtatttattgagtagctccagatgggacatattggctgtgtggcactaatttatggctgtggttacttccagggtggttaggatgatgttttttaggttatgcttgggtacaaggacgagtaattcaaaccctgccaaaatcagcaagccttttttctttaaatcttgttggatacattcagtattccgatgatatgatcacttagcttctgccaccaagttcccaaagattcaaaccaaccatttaaccaattgattagtgagggttttggatctgacaggttggttatctgggttttcatattagtcataagttaggttatgttcttagattcatctggaatataaacacaacattcagtttttatgatagtgcgggttcccccttgggctgtcttaagtatatttaaagccacaagatttggcagcacagctttcctcataaacatgacttcattatttagcaaagagatactcgtgcagctatcatttagggctttttgggtgtagtttattaatgcctctatatgccatttaacatcttcaatacttatctgtggtacaaagattgaagctaagtgatcataccatgggaatatataatgtgtaaactttattatgaactatattgtgaaaggggtgtgtgtgtgtgcacgtgtgtgtgtatgtgtgtgtgtgtgtgtgtattttgagacaggatctggctttgtcacctagactggagtgcaatggcgtgatctcatgtcactgcaacgtccctctcccaggcacaagccatcctcccacctcagcctcccgagtagctagtactacaggtgcatgccaccatgcctggctaatatttgtattttttgtagagacagagtttcaccatgtttcccaggctggtctcaaactcctgagcctatgcaatccacctgcctcagcctcccaaagtgctaggattacaggcatgagctactgcacccaatcaaattatatataacaataattttattcatcatatattattatttaaattttatattcccaatgcttgcttagatatatccatgtattttccattccctttacttttttttaagatagggtctccctctgttgcccgggctggagtgcagtgactcattgcaacctctgcctcctaggttcaagagattctcctgtctcagcctcccaagtacctggaatatcaggtgcccgccaccataaccagcttattttttttttgtatgttcagtagagatgtgtttcaccatattagccagactggtcttgaactcctgagctcaagtgatccacccacctcggcctcccaaagtgctgggattacagatgtgagccacggtgcccagcccattcctgttgttctttgtattttctttccaccctgaccttcttcctggaatcacctcttcctaaagtacatcctatagcatttcctctattgagaatcagagagtgagaattttctccttttcttttccctgatagtgacttttttcatcctcataattaaaagataaatttactacttct

SEQ ID NO: 318684 - DNA, 4001 bp, Homo sapiens
gccgagagtttgaggatggaggtggaaggggagtagagaaatagtgcgcagctgtctgaatgactcactctacttatactcagacttgaatagtctaaagcaacaagggatgtataaagtacaaatctgcaacggtcttgctcacattttaatccatgtaagaacagggactcaggaagaaggggtcctcacagaaacagccactcatagtgggtcttaaggactcaaatggctttctggggcaaagacctggattccagcatctggattcagaaacgacaccagctccctcttgaagtctgaggaaggagggctgtgtacttccaagaagttaagaagctctgttgcttcactgctactaacactcagaaagcggggaaaagacttcaaatgaactaacacagtttcttagtgattgaggcgggcggatcacgaggtcaggagatggagaccatcctggctaacacggttaaaccccgtctctactaaaagaatacaaaagaattagctgggcgtggtggcgggcgcctgtagtcccagcccagctactcgggaggctgaggcaggagaatggcgtgaacccgggaggcggagcttgcagtgagttgagatggcgccactgcacttcagcctgggcgacagagcaagactccgtctcaaaaaaaaaaaaaaaaagaaagaaaatccttagtgaaaacggcatcagagcggaagttgtggtgagcgtggtcttggggtaagaaaccctaaacaattcttcatgggacattaaggaggccacatgtgctcttaagaaaggcatctcacttccctgtccctcagttgccctctcagaatatcaaaatgggcactaaattagatgatccgtggttccttccagctctaagagccctgattctccgtgatctaaaaggaatcctttagcgcccactacggattaaaataaagtcttggggaagatcgatcctgggatcgagctcatatataattctctttcatcttctacttcctttgaaataaaaataaaataaaactgaggcccaaaatgcagaattaacagtcccatgaatcccttaaaaacggtcagcggcacaggtaaaaggaaggaggctccaaaagatccgaatgacctgggttctctcctcagacctgggcagttctccaggtttcccctggagaaaaacactccgctggcattgcagtcatgaaatacctgcctgcgccaccctggctccatatgcagcttcacaacatttgcagtgctgccctcaggagtgcctttccctggtctccaagaggctggaaacggtcaccaccgtttctgctggaagctactgtgcacctcccggccccatggagcttagggtgagcctctgaaagtcccactgcgctctagagaaggcagcccaggaactcaagctctggtcctggtctcaaatttctggccccagtcctgcgggacggggagcgcgtcctgaacaagaagagagaagaaaggagagtgtcttttctcaaaaactgtcttcctcacctcagcaatagaggcccctctctgccccacggctagatgggcttctccctcctccagccaggtccgcaagcccagcctggaaaatcgcctggataactctgatcaatcgccgttcgctggagccctggcagtgcggggatccgggacgcgcctgtctgggaattctccggccaagcactcacccagtgtagatattgtcaggattttggcagcctctgagagcaggaccccagaaagaaggaaggccactagaagcagcacccgctgcccaaccatgctcacttccacagaagcagcggatctcagcctgggctgcgcgccctgcgccgggctaaggactctgtgcgcgcctcagtactccaaaggcactggctgtgggcctaggaagaggtaggagacggatcctgccaattctctcgcccttctgttcgttctctttcccgctgcccctcctccctgggtgcatgctccatgggataatctgccctcaccctatcaaactacctgaagtcagtaggagggggttggtaacctgatctgtaacctttctctgcctgcgtaatcacagctgtcctatctggaaaatccttactaagagccaggaatgacaggggcctcagtaaatcacgttaatgaaggctccatccccaaggaaaccacctgtctttcgtggagctgtctgaacttatgttactctgcttcccttccagctgcctctattacctcatagtgccatctccatgcccccattttccccagaaacctgctgaaaatctctagctggtgtcccaagctcaagatgtccctgagagggaatccctaagggaaactgatctaccctctctgagggcctctttagaagataacattcatgaagaggagctagtagtgttctaattctgaaagtcactccgggtctgtacctggagactgaaattcgaacacagagactatgattctgaatgtgtatcataaaatagaactagggatattttgataatctccccaaagcacaaactgagaatagcttgtaattctgcccccttgaagggtcaaccctgggaaagacagggatcactacaccaggtatggtcacctttgtactctctatcctcaaaccaagactttcggaaaggctttcagtgcaattctagacagacagagaaatccttcaatggattatatctaccggctgtaataggcccttgaattctgcttgtactattcttgccttcagtctacaggtattacatttttaatctgaatttaaagcattacattttatttaaagcattacatttgtgcatccttcacctagacatgttcattgtggagagggaggaaatgagaaagagagagagccagacagacagatgcacaaacatacacacacatacactcacacacacacacactgggttgggggagcgaaagggagaaggggaaagagaagtgtggaggggggaaggtttaccaggcttcacaagactccagtccatctattcttataccttttataatgcattagcaaaataaaggacttgctatcaagcttcaagctcttcatttattcaacaattattctgacagctaattattacaccagatatgtttgctggacagacagaggctaaacacaataagaaatgaaatacataatatattcatgagaaatgctgccaagagaaaacaaacaaggaaagagatatgaaaggtcaggtattagaagtgttaacatattaaatagtatgatttaaaccaattctaaaaaattataggagtatgagagaaaaatgagcacaaaacttgatgatattaagtagttactgttgctttggagaattttatgttattatgaaaggaaattaaatttggggacacaaaactcatttgaccaaagggaaaagtcaagcttggaactgggtcacacaaacctgcgtctcccttttggttcctaaataagatggctacaagatggaaagctacacacctcccccatatgttgcccacaaggaaattcctagtgagctcttaaaatttcaccgtggcaatgcaaattgatagcttatttttacaggtgcagtcacccccagcccaccagacataaatgcatatctgcccaattttgtctatgttatcttatgtaaaaatgcagattccctgcattttttttctctgctccatttgttttatatcatcttatataaaaaatgcaaggtggccaggcacggtggctcacgcctgtaatcccagcacttttggaggccaaggcgggtggatcacaaggtcaggagattaagaccatcctggccaacatggtgaaatcccgtctctcctaaaaatacaaaaattagctgggcgtggtagcacgtgcctgtaatcccagctactcgagaggctgaggcaggagaatcgctggaacccaggaggcggaggttgcagtgagccaagatcgcgccactgcactcaa

SEQ ID NO: 318685 - DNA, 4001 bp, Homo sapiens
gaaaggatgtacttaatttaggccacacaatgatcaagttctaattaagacatttgaggacaactgtggggcgcttggggtgggcctgctggatcctggttgcacgagagactagggaatcattgattccagaaacatccatcctaaggaaagagaagcttgatcctcaaaagaggtacaagttccacgaaatcaatgtcttctcagtacatgttctaatacacagcctttgcttgaatctaaggttctcagcagcagagaaaggaagatcagaagagaaggtaatgtaatagtaaataccaaaagcctgcggggtgggggtggaagggagtagagaagtagtgttcagctctctgaatgactcagtttacttatacccaggcttgaatagtctggagcaacaagggacgtataaagtacaaatctgcaacaggtcttgctcacattttaatccacgtaagaacagggagctgggaagaaggggtccccacagaaacagctgttagcggtggatcttggggagtcaggtggctttctggggcaaaaatcagcattctagcacctcagaaatgacatcaactccttcttggagcctgaggaaggagggctgtgtactttcaagaagttaagaagctctgttgcttcactgctactaacactcagaaagagggggaaaaagtcttcaaatggacttgcactgtttcttaaacagtgatttttgaaaatccccagtgaaaagggcttcagagtggaagttgtggtgagcatggtcttgcagtaagaaaaccctgagttaattcctcatgggacatcagggaggccacaagtgctcttaaggaaggcatctcactccccatccttcaattgccctctcaggaaatgaaaatgggcactaaattagatgatctgtggttcttcccagccctacgagccctaattctccatgatctaaaaggaatccattagaacccactatgggttgaaataaagtcttggggaagctcgatcctgagatgatccctttatgttcatatatgtttctcttttatcttctattccctttggggtaaaagtaaaagaagtaaaactgagacccaaaatgcagaattaacagtcccatgaatccctcaaataacggtcagcggcacaggtaaaaggaaagatactccaaaagatgcgaatgacctggatcttctcctcagccctcggcagttctccaggtttcccctggtggaaaacactccactggcattgcagccatgaaatacctgcctgcgccaccctggctccggatgcagcttcacaacatttgcagtgctgccctcaggagggcctttccctggtctccaagagcctgaaaacgctcaccactgtttctactggaagctactgtgcacccacacacacgcaccctccggagcttaaggtgagcctctgaaagtcccactgcgccctggagaaggcagcccaggaactcaagctctgggatgagtctcaaatttctggccccagccctgcgggatgggggcgcgtcctgaacaggaagaagacagtaaaggagaatctcttttctccaaaactttcttccccacctcagcaatagaggcccctctctgccccacagctgaatgggcttctccctcctccagccgggtccgcaagcccagcctggaaaatcacgtggatgactctgatcaagcgctgttctctggagccctggcagtgcgagtatccgggacgcgcctgtctgggaattctccggccaagcactcacctactgtagatattgtcaggattttggcagcctctgagagcaggaccccagggagaaggaagcccactagaagaagcactcgctgcccagccatgctcacttctacggaagccgcggatctcagcctgggctgcgcgccctgcgcccggctaagggaccctgtgcacctcagtgcgccaaaggcactggctgtgggtagaggtaggagtaaggatcctgccagtcttctcttctgtccatcccctcttgccctctgcccctcctccctcgtgctccattggataatctatcctcgctctaccaaactaccagcagtcagtaggaggggtcggtgagcccatacttaaccctgctctgcccttgtgatcacagccctcctgcctggaaaatccttactgtgagtgaggaatggcagggacctcagtaaatcgagctgatgaaagctctatctccatgggacccacctctcttttgcaaaggctgtgtgaatttacctactctagttcccttctaactgcctctattacctcatactgccagccccgcgatctatttcctgagagacttgcttaaaatcttgagctgatgttccaagcccaagacctccctggaagggaatccccaagggaaatcaatctaccatccctggaatctatctcttagtgtctctttagaaggtaacattcctgaaaagaggctagagtcctacctctggaagtccaggtctgtccctggaggactgaaattcaaaagctgagactatcattctgaatgagtatcctgaaataggactggtgaatctttccataatttccaagagcacatgctgatgacagcttgtaattctgcctccgtgcaatgtcagccccagtgaggtcagggatcaccaggtccggtagtcccctttactctctatcctcaaactaagacttcctttaggaaaggctttcagtgcaactctaaataagcagagaaatccttggttgcagtgggtccttgaattctgcgtgttctattcctgccttcttcagtctacaggggttattttttctcattggaatttaaagcattacattcttatgcatttgtgcatccctcacctagccatgcctattgtggagaaagaggagagagagagagagagagagagagagagagagagagagagagagagaaaagtgtgggaagggcgaggtttaccagacatcacaaggctccagttcgtcttattcttgtacttttcataatgcattagcaaaataaaggatttgttatcaaactccaagatttttatttattcaacaattatattgatagattttttttttttttgagacagagtctcgctctgtcacccaggctagagtgcagtggtgcactctcagcttactgcaacctctgcctcccaagtttaagcaattcttctgtctcagcctcccgagtagctgggattacaggtgcctgccaccacacccggctgatttttgtattttttagtagagactgggtttcaccatgttggccaggctggtcttgaactcctgacctcacatgatccacccgccttggcctcccaaaatgctgtgattacaggcatgagccaccacgcctggctgatagctatttattatgccaggcattgttctgccaggcaaactgatactaaacacactaagaaataaaatatatagtacattaatggcaaatgttactaagaaaaatcaaatggaaagagatatgaagagtcaggtatcagattcgttaacgttttacatagcatgattccaatggactctaaaatattataggagtatcagagatatatgaacccaaattttgaaaatattaactagttattgttgctttggagaagagttctatgtaattgtggttataaacatcttataaagaaattctggctgggtgcagtggttcatgctataaccccagcactttggtaggtgaggtggggggaacacgaagtcaggagttcaaggccatcctggccaatatagtgaagccccgtctctactaaaaatgcaaaaattagccaggcatggtggcatgtgcctgtggtcccagctacccgggaggccgaggtgggagaatcgcttgaacccaggaaatggaggttgcagtgagccgagatcgcagcactgcactccagcttaggaaacatagtgagactttgtcaaaaaagaagggaggaaggaagggaggaagggag

SEQ ID NO: 318686 - DNA, 4001 bp, Homo sapiens
gtaatttaaaatcttgacagtctgggtaccaaacttgtcaaaattgctttgaaagcttgggggcacagggaccttaagaacaatcctttataaatgattgacttttacccctaaataggtacctagcactttctttatttggagacaaggtcttgctctgtcacccaggctggagtgcagtagggcaatcagcctcgacctggtccaaaggtcaagcaatcctcctacctcagtttcccgagaagctgggaaccacaggcacgcgccaccacgcccagctaattttttttttttaattttgagggttttaagagacagggtctcactctcttgcccatgctgaagggcagtggcacgatcatagctcacctgcagcctccacttcctgggctcacgggatcctcctgcctcagccacctgagtagctgagactataggcaggcgccaccacactctaataattttttttattttttgtagagacagggtctcctatgttgcccaggcgggtcttgatactcctggactcaagtgatttttctgcctcggcctctcaaagtgctgggagtataggagtgagccaccaggcccgtcgaccaagcgctctaataactaaatacaatgaacttatttccgtaatttttgtaaaaaggtaaatgcatacctacacacgcatacatccctgatacttcattttccattttttcagtttatattcagcctcagtttaggacaagtgtgtaacaatacaatccaaacactttagtatctagtatcacaacaactctgcgtcgtaggtattcatatcacgatgttccacatgaggaaacttaacgcaaacagcggataagctggtaaagggctgagagttgaagctgaatgtatctgattccaaaaacacactttcattcgactacaaggcactgcctcccttgacaggaaaacaataaagacagaagcataaacttttcactttttccgggtgtcatttctatatctcggtgcgatgtagtgattaaatgaaagaacactggagtccagctgctgggattcaaatccagctccactactgcccgggactcgcgccccgttaactgagcggcagggcaccagcccgccggctgtggcgctcgagaagcctgcggcgctgcctaagcacctggaaacgcgccggccctgcgggggcgaaatcgtctaggacgatagggatctccaaggagtgcgctgggggttattttcggggcaaataattagagaaaacgaggatcacacaacaaaacagcaacccggcacgggaaggagcgcgggcctggcgccccgaggcgtgaggcggcgcggaccacggctgagggagctcggcgctcgcccgacgcccgggaggatgcaggccgccccccaggtgtgaaagggacccgcccggcaaccgaaggtgcaaagcccaacctggcgttccgaggggccctgcgtggcgtcaggggagacccaacccgcgtcccgaacccacctcaaccttgggaaggacccagccccggcatctggagaagcccaacccggcaccagtaatggccggtcccggcgtccggaatccgccccggaatcgggagggtcccagccccgcatcccgagcccacttcggcgtccggagggacccacccccgacttcggcaaggccagccccggcgtccggagcccacccccgcgtcgcgagagacacaccccggcatcaggaagggccgccccggcgtcgggagaggcctaccttggcgtcgggaagcgcccctcccggagagtagcgggccgcggacccgctgaggaagaaaaggaggcagggaggggtgggcggagctgtgcgcaggcggcgggtactcactcgctggcgcaggccgctctgtagaccttctccgggttgccgggggtcgcgagccgccacacgttgggagcgcggggggagggggaggggcgcgcgcgtccgatgccagagacacgctctcggggcgggcgcaggcgcagcgcgcggagacttaaccaacccccgccgcgggggagccatccgggacgtaccaactgcgcgggaggcgctgaccgcccgtgagccggctcgcaccttgcgcggtctcagttgcttgcgctttgggggaaagcaaggagtaacaacagactcagagatagctgtggggcaaaatgtatagaacggccacttttgaggacaattccgtgtgatgaaatttaaaatgtccattttatgacccagcaatttcacgtctagaaaaatacggaaatgccgggtgcgatggctcacgcctgtaatcccagcgctttgggaggcagaggcgggcggattacctgaggtcgggagttcgagaccagcctggtcaacatagagaaaccccttctgtactaaaatacaaaaattagccaggcgtggtggcgcgtgcgtgtaataacagctactcaggagcctgaggcaggagaatcgcttgaatccgggaggcggaggatgcagtgagcccaggtcactgccactgcactccagcctgggcaacagagcgagactccgtctcaaaaaaaaaaaaaaaaaaaaagggaaagaaagaaaagaaaaatacagacactcctacaggtgtgcacaagacatgttcaaggaggccagcttcctggcggaaaatgtgaacagcagaaatgtccaataagtctcgcataaataaaacaccaaatgtccctacagtgatatactacaacaaataaaacaaaggaatcctatatgtgtcaacatttgctaggtcacaactacttaagttattgaaatagcgacatgccaacaaatatgtacactgtgaaatgatttatataaatttaaaaataggtaaattagaacagtatatactgtttacagaaaatctatgtgtgtaaaagtatataagatgaactagatggataccatggtaatggtaaaggggtgaaagaaggagtagcggaaaatgtggggagaagcaaacaggacttcagatagatctgtcatgatttctattaaaaagaaagacctggccaggcgtggtggatcacgcctgtaatcccagcactttggggggccaaggtaggcagatcacttgaggtcaggagttagagactagcctgaccaacatggtgaaaccccatctccactaaaaatacaaaaattagcttggcgtggtggtacatgccagtaatcccagctattcgggaggctgaggcaggaaaatcgcttgaacctgggaggcagaggttgcagtgagccgagatcacaccactgcactccagcctgggtgacagagtgagactctgtctcaaaaaaaaaaaaaagagagagagagacctaaaaataaacgtaagaaaatgttaacagtagggtaatcgaacgtggaactacaggcacattattcttaatacttttctgtaacatttacattctggaatgcctttgccctatctcccccatgccacctacctccaactgatcctccaaaacccacctgaaccatttcttccactgcttccttgaacctcagttcatttctcctgcatccttcctcagctgctgggacattcgatctcccacagtatactacaattctttgctctatgagtctatatctcttctataagacttgtgagctctatgaagacatgatccatgtaatcctcacaagtagcaatgggcctgtcctaaagcaaacactcaaaaaatgttgattgaattgaattgaggagtggggagatcagaaaaggtttcagtgcagggccaaaaagatccttttagggcatcttacttcagggaagactattgatgcattggtggtggcagccattctgcaaacctgaggacagacagcctatggcaggcagcctgtaagatggccctagatcccacaggctggcaaccacactcttgtgtaatctctcttcttgtgtgtgggctatgcttaataactcacttctaaacaatagaataaggcagaaatgat

SEQ ID NO: 318687 - DNA, 4001 bp, Homo sapiens
gacagtctgggtaccaaacttgtcaaaattgctttgaaagcttgggggcacagggaccttaagaacaatcctttataaatgattgacttttacccctaaataggtacctagcactttctttatttggagacaaggtcttgctctgtcacccaggctggagtgcagtagggcaatcagcctcgacctggtccaaaggtcaagcaatcctcctacctcagtttcccgagaagctgggaaccacaggcacgcgccaccacgcccagctaattttttttttttaattttgagggttttaagagacagggtctcactctcttgcccatgctgaagggcagtggcacgatcatagctcacctgcagcctccacttcctgggctcacgggatcctcctgcctcagccacctgagtagctgagactataggcaggcgccaccacactctaataattttttttattttttgtagagacagggtctcctatgttgcccaggcgggtcttgatactcctggactcaagtgatttttctgcctcggcctctcaaagtgctgggagtataggagtgagccaccaggcccgtcgaccaagcgctctaataactaaatacaatgaacttatttccgtaatttttgtaaaaaggtaaatgcatacctacacacgcatacatccctgatacttcattttccattttttcagtttatattcagcctcagtttaggacaagtgtgtaacaatacaatccaaacactttagtatctagtatcacaacaactctgcgtcgtaggtattcatatcacgatgttccacatgaggaaacttaacgcaaacagcggataagctggtaaagggctgagagttgaagctgaatgtatctgattccaaaaacacactttcattcgactacaaggcactgcctcccttgacaggaaaacaataaagacagaagcataaacttttcactttttccgggtgtcatttctatatctcggtgcgatgtagtgattaaatgaaagaacactggagtccagctgctgggattcaaatccagctccactactgcccgggactcgcgccccgttaactgagcggcagggcaccagcccgccggctgtggcgctcgagaagcctgcggcgctgcctaagcacctggaaacgcgccggccctgcgggggcgaaatcgtctaggacgatagggatctccaaggagtgcgctgggggttattttcggggcaaataattagagaaaacgaggatcacacaacaaaacagcaacccggcacgggaaggagcgcgggcctggcgccccgaggcgtgaggcggcgcggaccacggctgagggagctcggcgctcgcccgacgcccgggaggatgcaggccgccccccaggtgtgaaagggacccgcccggcaaccgaaggtgcaaagcccaacctggcgttccgaggggccctgcgtggcgtcaggggagacccaacccgcgtcccgaacccacctcaaccttgggaaggacccagccccggcatctggagaagcccaacccggcaccagtaatggccggtcccggcgtccggaatccgccccggaatcgggagggtcccagccccgcatcccgagcccacttcggcgtccggagggacccacccccgacttcggcaaggccagccccggcgtccggagcccacccccgcgtcgcgagagacacaccccggcatcaggaagggccgccccggcgtcgggagaggcctaccttggcgtcgggaagcgcccctcccggagagtagcgggccgcggacccgctgaggaagaaaaggaggcagggaggggtgggcggagctgtgcgcaggcggcgggtactcactcgctggcgcaggccgctctgtagaccttctccgggttgccgggggtcgcgagccgccacacgttgggagcgcggggggagggggaggggcgcgcgcgtccgatgccagagacacgctctcggggcgggcgcaggcgcagcgcgcggagacttaaccaacccccgccgcgggggagccatccgggacgtaccaactgcgcgggaggcgctgaccgcccgtgagccggctcgcaccttgcgcggtctcagttgcttgcgctttgggggaaagcaaggagtaacaacagactcagagatagctgtggggcaaaatgtatagaacggccacttttgaggacaattccgtgtgatgaaatttaaaatgtccattttatgacccagcaatttcacgtctagaaaaatacggaaatgccgggtgcgatggctcacgcctgtaatcccagcgctttgggaggcagaggcgggcggattacctgaggtcgggagttcgagaccagcctggtcaacatagagaaaccccttctgtactaaaatacaaaaattagccaggcgtggtggcgcgtgcgtgtaataacagctactcaggagcctgaggcaggagaatcgcttgaatccgggaggcggaggatgcagtgagcccaggtcactgccactgcactccagcctgggcaacagagcgagactccgtctcaaaaaaaaaaaaaaaaaaaaagggaaagaaagaaaagaaaaatacagacactcctacaggtgtgcacaagacatgttcaaggaggccagcttcctggcggaaaatgtgaacagcagaaatgtccaataagtctcgcataaataaaacaccaaatgtccctacagtgatatactacaacaaataaaacaaaggaatcctatatgtgtcaacatttgctaggtcacaactacttaagttattgaaatagcgacatgccaacaaatatgtacactgtgaaatgatttatataaatttaaaaataggtaaattagaacagtatatactgtttacagaaaatctatgtgtgtaaaagtatataagatgaactagatggataccatggtaatggtaaaggggtgaaagaaggagtagcggaaaatgtggggagaagcaaacaggacttcagatagatctgtcatgatttctattaaaaagaaagacctggccaggcgtggtggatcacgcctgtaatcccagcactttggggggccaaggtaggcagatcacttgaggtcaggagttagagactagcctgaccaacatggtgaaaccccatctccactaaaaatacaaaaattagcttggcgtggtggtacatgccagtaatcccagctattcgggaggctgaggcaggaaaatcgcttgaacctgggaggcagaggttgcagtgagccgagatcacaccactgcactccagcctgggtgacagagtgagactctgtctcaaaaaaaaaaaaaagagagagagagacctaaaaataaacgtaagaaaatgttaacagtagggtaatcgaacgtggaactacaggcacattattcttaatacttttctgtaacatttacattctggaatgcctttgccctatctcccccatgccacctacctccaactgatcctccaaaacccacctgaaccatttcttccactgcttccttgaacctcagttcatttctcctgcatccttcctcagctgctgggacattcgatctcccacagtatactacaattctttgctctatgagtctatatctcttctataagacttgtgagctctatgaagacatgatccatgtaatcctcacaagtagcaatgggcctgtcctaaagcaaacactcaaaaaatgttgattgaattgaattgaggagtggggagatcagaaaaggtttcagtgcagggccaaaaagatccttttagggcatcttacttcagggaagactattgatgcattggtggtggcagccattctgcaaacctgaggacagacagcctatggcaggcagcctgtaagatggccctagatcccacaggctggcaaccacactcttgtgtaatctctcttcttgtgtgtgggctatgcttaataactcacttctaaacaatagaataaggcagaaatgatggcatgtcatttcca

SEQ ID NO: 318688 - DNA, 4001 bp, Homo sapiens
tttttttttaagttactacccttcaaagatgaagaactcactaaaataatggtctatcttcacttattgaactaaagctaaaatgaattaccactaactgccaatgaaggaggaatcaagtctggatgccaacagcagcttcttaatgacaattaaggaacaaaatgtctccagaaagatgcagaagcaggacaggtgccccagtaatgagacttatttatttcacaggtaacattttgggcagtgtccttgaaaatcctcaatttcagatattatttgccattttatttcagcacatccatcgtcttgatctatctgaagaaaaatcactgacaaggtaatttaaaatcttgacagtctgggtaccaaacttgtcaaaattgctttgaaagcttgggggcacagggaccttaagaacaatcctttataaatgattgacttttacccctaaataggtacctagcactttctttatttggagacaaggtcttgctctgtcacccaggctggagtgcagtagggcaatcagcctcgacctggtccaaaggtcaagcaatcctcctacctcagtttcccgagaagctgggaaccacaggcacgcgccaccacgcccagctaattttttttttttaattttgagggttttaagagacagggtctcactctcttgcccatgctgaagggcagtggcacgatcatagctcacctgcagcctccacttcctgggctcacgggatcctcctgcctcagccacctgagtagctgagactataggcaggcgccaccacactctaataattttttttattttttgtagagacagggtctcctatgttgcccaggcgggtcttgatactcctggactcaagtgatttttctgcctcggcctctcaaagtgctgggagtataggagtgagccaccaggcccgtcgaccaagcgctctaataactaaatacaatgaacttatttccgtaatttttgtaaaaaggtaaatgcatacctacacacgcatacatccctgatacttcattttccattttttcagtttatattcagcctcagtttaggacaagtgtgtaacaatacaatccaaacactttagtatctagtatcacaacaactctgcgtcgtaggtattcatatcacgatgttccacatgaggaaacttaacgcaaacagcggataagctggtaaagggctgagagttgaagctgaatgtatctgattccaaaaacacactttcattcgactacaaggcactgcctcccttgacaggaaaacaataaagacagaagcataaacttttcactttttccgggtgtcatttctatatctcggtgcgatgtagtgattaaatgaaagaacactggagtccagctgctgggattcaaatccagctccactactgcccgggactcgcgccccgttaactgagcggcagggcaccagcccgccggctgtggcgctcgagaagcctgcggcgctgcctaagcacctggaaacgcgccggccctgcgggggcgaaatcgtctaggacgatagggatctccaaggagtgcgctgggggttattttcggggcaaataattagagaaaacgaggatcacacaacaaaacagcaacccggcacgggaaggagcgcgggcctggcgccccgaggcgtgaggcggcgcggaccacggctgagggagctcggcgctcgcccgacgcccgggaggatgcaggccgccccccaggtgtgaaagggacccgcccggcaaccgaaggtgcaaagcccaacctggcgttccgaggggccctgcgtggcgtcaggggagacccaacccgcgtcccgaacccacctcaaccttgggaaggacccagccccggcatctggagaagcccaacccggcaccagtaatggccggtcccggcgtccggaatccgccccggaatcgggagggtcccagccccgcatcccgagcccacttcggcgtccggagggacccacccccgacttcggcaaggccagccccggcgtccggagcccacccccgcgtcgcgagagacacaccccggcatcaggaagggccgccccggcgtcgggagaggcctaccttggcgtcgggaagcgcccctcccggagagtagcgggccgcggacccgctgaggaagaaaaggaggcagggaggggtgggcggagctgtgcgcaggcggcgggtactcactcgctggcgcaggccgctctgtagaccttctccgggttgccgggggtcgcgagccgccacacgttgggagcgcggggggagggggaggggcgcgcgcgtccgatgccagagacacgctctcggggcgggcgcaggcgcagcgcgcggagacttaaccaacccccgccgcgggggagccatccgggacgtaccaactgcgcgggaggcgctgaccgcccgtgagccggctcgcaccttgcgcggtctcagttgcttgcgctttgggggaaagcaaggagtaacaacagactcagagatagctgtggggcaaaatgtatagaacggccacttttgaggacaattccgtgtgatgaaatttaaaatgtccattttatgacccagcaatttcacgtctagaaaaatacggaaatgccgggtgcgatggctcacgcctgtaatcccagcgctttgggaggcagaggcgggcggattacctgaggtcgggagttcgagaccagcctggtcaacatagagaaaccccttctgtactaaaatacaaaaattagccaggcgtggtggcgcgtgcgtgtaataacagctactcaggagcctgaggcaggagaatcgcttgaatccgggaggcggaggatgcagtgagcccaggtcactgccactgcactccagcctgggcaacagagcgagactccgtctcaaaaaaaaaaaaaaaaaaaaagggaaagaaagaaaagaaaaatacagacactcctacaggtgtgcacaagacatgttcaaggaggccagcttcctggcggaaaatgtgaacagcagaaatgtccaataagtctcgcataaataaaacaccaaatgtccctacagtgatatactacaacaaataaaacaaaggaatcctatatgtgtcaacatttgctaggtcacaactacttaagttattgaaatagcgacatgccaacaaatatgtacactgtgaaatgatttatataaatttaaaaataggtaaattagaacagtatatactgtttacagaaaatctatgtgtgtaaaagtatataagatgaactagatggataccatggtaatggtaaaggggtgaaagaaggagtagcggaaaatgtggggagaagcaaacaggacttcagatagatctgtcatgatttctattaaaaagaaagacctggccaggcgtggtggatcacgcctgtaatcccagcactttggggggccaaggtaggcagatcacttgaggtcaggagttagagactagcctgaccaacatggtgaaaccccatctccactaaaaatacaaaaattagcttggcgtggtggtacatgccagtaatcccagctattcgggaggctgaggcaggaaaatcgcttgaacctgggaggcagaggttgcagtgagccgagatcacaccactgcactccagcctgggtgacagagtgagactctgtctcaaaaaaaaaaaaaagagagagagagacctaaaaataaacgtaagaaaatgttaacagtagggtaatcgaacgtggaactacaggcacattattcttaatacttttctgtaacatttacattctggaatgcctttgccctatctcccccatgccacctacctccaactgatcctccaaaacccacctgaaccatttcttccactgcttccttgaacctcagttcatttctcctgcatccttcctcagctgctgggacattcgatctcccacagtatactacaattctttgctctatgagtctatatctcttctataagacttgtgagctctatgaagaca

SEQ ID NO: 318689 - DNA, 4001 bp, Homo sapiens
ccccttatctgtacacgctcacctgtgcaactgcacacagccgtcacacacgtgcggcatgctggtcatcacacacgttcatcagggcacacacatgccaatgctgcacacaccatgccaacccccctggttacccgggcacacatgtcaacccacagccttcacacgtgctcacgtgggcgacatgcagctatgaccacacagccctcaaaagcatcaactcagaaaacatttccagggtacctactgggtgtcaggcaacaccccacctgtgtgtggggcactaatatccccacctcatcatggacaacagtgcaacctgcacccgggtgctcatctgcggagctgcacacacgcccctaacacacacatgtggcggacacggacacacacccaacagcagttcagcctctcagcttggtcaggattagaaggagaggccctggggaagaagaggggtgctgatggagaagggagatagaaggggtgggatggagtagagaggggtactgaggaggcaggatggggcgggcggtcaggcagtggtgggtgcaggatgcgctgcgcagagacaccctttaaggaaacagccatcggcctcaatcatcaggctggctcctgagctcccactcattgatctctgatcaatctggtttggcagctcagaaaccccagtgctcccttccaacacccctgttataagcagcggcctggccaggctggggagtaaccgcccaggttctaggggcagcaagaatcgagaattgccagggtaagcctcaagcccccttgaccacacaaatggcacccaccccccaccaccacagacacatacgctcaactcagctaagtgcatggggggcagagatcaggaggcccccacagctcagcctaggtgaaggctcagggacagcagacaaaggatgcaggggaacttcctccccccaagcccctcccaagggaatgaggtgggctgagggctgagttagcagtgggttagggtgaccaatggggcatgcaggggccaagaaaggctatggagtttaaggaagaaggggaaactggcggaccaaccacacacaactctggccccccgcaccagggaggccaggagccacagccccggccaccgggaccgcggcgctttgactgtgctggctgcaaggactgggggctggtgtatgcgcctccacgcctgagtgtgtgcgtgtgagagcgtgtgtggcggggacagaggaggacactgtgttctggacgtgggcagaggccaggtgccaagctgggagattgtgagtggctgtttagggcagatgctaccgggaagaggtatcttaaacgttccccgcaccccccatttcctgggcactgggataggctcaaaaccctctaatcttcgaatcctcaaagtcaggctccctggggttgatccaaacccccagccctgctccgggcccaggcaaccagcaaacttcccccacccggaggcgtggggtgtctacactcgccagccccgcgggctgacagctgctcctggacttggcagaacccaggcttccgggagagcgcgcggggaagctgcgcagcagcaagaagagccccccgcgtcccgcctcgcaaagtttggcctcggggggctcccagccgggtctggcagcgctggtcagggacccccagagcagcgagcgttcgcgcgcacggtcccccgcaagcctccccagagcgcgcgcggcgtgactcacccgagccgcggagccaagcggcgaggactatgcccaggagcgctggccacaggccgggccggacggccatggccgcgggcgggcaggcgggcgggccgggcgcggggccccgcgggcgggagggcggctttagcgcctcagcccggagccccagctcggggcgcccccggggcccatgccagcggactgcgctgcctccgggcggccggctgccgggcgcacgcggcgcgtggctcccttgggcacgggagcgcagcaatgcagccggggcggagcgcagcgccagccgcgccgcgcaccgagccagccgcgccgcggagcccgcagccggagagcgggccggtgggcgccgcaaaacccggactggagcgacggagcggggcggcggctgggaggggcgggggaaggaaggaggggccgggccgccccgcgcagcgcgcgcgggccacccccagcaccgggaatccctctgggcgatgcctgaggctcccccagggaggggcttggggtggtgggcgtggaggcctcccaccgccccgcggggtctccagggacaggggcaggagtctgaaacccggagtggatcggtgctccggatccgggctctcgcgggcccgccagtctgcgcacaggtggcccgggaggggcccggggctgcggcgaccccggcgcggcgccagcctgcggagagccgcccagggcaggggtgccccgggcaggttccgctgcagtcctctcccccgccctttcctcgcggccgcgctccggggtcgtccgggcgccgcggtacgctgccagcccgcggcttggttaggggactgcgggagagccccggggccctggcccgcgcgcagaggtgccctggccaccagagctggcaggccagactcggggacacccgcagtcccagcctcgcaggctggtggattccaggggcgcgcctcacaccatgacccaaggtttccctaacccctcggcgccgttcgccgaaggaaaacaaccttcaggcgcagcacacccgactgggcgcgcggtgtttgagccccgagagcgcacggcgcccgcgacgtgggtgtaaaggaacgagctgggctttggcagctagggagaccgggggtagggtccaggcgacttcaccttccagctctgtgaccttggtcaagtcacgtcgtctcctggagcctccagcagtgaccgctgctggagtctcctgtgccccacccccattccctaatcgggttaaaataaacagagggctgccttgaaggagaaaggaaatgacagccgcgtgcggtgtgcctggggggagtgatcggaaaaagagagggtcctagtctgggtcgggaggggaatgagcagggtgagggcagggtcgcaaactcaaacgcctacggggccggtcgataatataaattggcgctgcaggctaggcgatgtaagggatggtcttgcttccacaaagagatatgagctctcctatatttcttgagacacgaggccctctctcggtctgtcttttgtttcccacttttgatagagaagggttatgaaaaatgttttgctttcctcttaagtctactataaaaaacaccagctaaagctccagaggcaaccatacagacgctgggctccatcgccagggaggcaaagggcagtgctggggacaggcacaaggatcccatctcaaggggcagctgccttttctgctccaggtgctggttgtcgggggaggggaccggggcacagtatagccgcatcttccaaattttcaacagaagccgtcgtatgtgaaatattctgatttaaaatttttaactagtaaaaaataattttttagacttcatgtgagcccaggggaaagtgttcaccaccttctggtttgggaactttgctttcggggcagtttgaatgtacacggtgtcagggcctgatcaactcacatgtctcgtgtgtgtgtgtgtgtgtgtgtgtgtgtgtgtgtgtaggagcagtgtgtgcccaggctgctcctgttggcaccataacacccctcttcagcctctgcaggaaagaggtgggtgggagaggagagtcagtggcaggatctgcccttggggcccactggggattgggcactggaggctggtggctgaggatgaaggaagaggattgagggctggggtataagatgacattataatagtgtatgctctgtctaaagggatggccgggtgtggtgggtcacaccgtaatcccagcactttgggaggctgaggtgggtgg

SEQ ID NO: 318690 - DNA, 4001 bp, Homo sapiens
ctgggcagcaagcagcccaggatggctttgaatccgacccaacaaaaatttgtaaactttctaaaacgctgagggttttttttgccattttttaaagcttatcagctattgtaatgttagcgtattttatgtgtggcccagggaagctaaaagattggacacccctgcaatagagcatagttttaagagcatcactttagtgcaagactccaccattcactgctgtataatttctggcaaattacttaatctctctgtgcccatttcctcatctgccaaatgaggatacgttaaaggtgcttgtgaggtttaacagttcatttgtgtagctaagaagagtatttgaggcccagagcaccatggcttacgcctgtaatcccagcactttgggaggctgaggcgcacagatcatctgaggtcaggagttccagaccagcctggccaacatggtgaaacctgtctctactaaaaatacaaaaaattagccaggtgtggtgtcctgcacctgtaatcccagctactcggaggctgagacaggagaatcgtttgaacccaggaggcacagatggcagtgagccgagatcacaccactgcactccagcctgggtgagagagcaagactccatctcaaaaaataaaaaataaaagcgtccctgacacatactaattacaatatagttagtagactttattgttgctatgggagcagagggccaagaaccagcactcgccatagcccatgtcacccacaaatggttagatgcaggagtacctgcagctactttcttgtagataatggaacaaagggggagccctgctctttcaccaaaacccgagaccaggcaaaacttcaagactcatgctgaggaggggcgcttcatgaacttgaatattagtggtcacacaggattctactcacaaaaatgtaatatcacaacagtgcagaccataggaagtttattgtgtctttgagacactacaatgcagactcctcttccagagaaaggtctttcagagacagggaaccgtcatccggatgcgttgctcatttgtcattttcataggcagctggattcttcctcttggatctctcgaactcttcagtcccccatgtgtagataagataaaacactacaaactctttaaaaattaagagagtaaacagagagcacacatataagacatatagaagaaaaaaaaaggtctcagtcctcttgtcttctttaaagcatacacttcagtagttcttagcatatccaaggccatgcaactatcatcactatctgctgcacgtttaacacaaagcatttcaccactggtaagaactaaataaaggtgacctcagaggaacatgctggaatcacccgagtgaccttgggccagtcatttcagttctgtagctcagttttccccgtgtaagatggggaggataatatgaccagcttaagggcggtcaggaatattcaatgagaaaggtgtgtacggcaagttacagagcgcctgcccggccgccagcgctcagaggggaggcgcagtgactgctgctgctgctggggtccagcctcccgctcccgcgggcccaaggcactcacgcggcaccacgcgaaagaaagactcccgaatgcggcgcagaacattggggattcctttagtgaagacgtgcggataggcgcgctgctcgaacggtgacaagctgtagctgatcacatgccgcatccgcgtcagattcccaaactcgcggcccattgtggcggcggccctgcaggaccgagggtggacaggcgcttggctcgctttcgcgaagcgccgcagtccccgcgggggtccatccccaaccccagactcctgcccctgcactccttatcctttcccagcccagcggggcgcccctagcctcccagggtccacgaacactgcacaaccagaccccactcacgcacagggctcagctcgccctccacagtcaccgatccggttgactcgttcgtcatttccggcaaggttggaagccgctcttggaggtcgtgaggtaacttccgggagataccattttcctactgtctctaagggatgacgcctttgtcccagaaagaagtgggctgactgggtgacccgtaggtgggaggtgccttggaggccctgcccgggccggtggggtggagcctagcggaggacgtcggggattgaactgactttgggggacagtggacaggcggaggcgctcacacttctcctcagccctcggcttttctgtggaatcccagtcaggaagcggccgaatgcgggaggcgggggagggaacaaaaaggtgacgaggaaggggcctgccgacctccggggcagcgctggccaggagcttggggcctgcgagtcttcccagctgtagacagagcgcctctgagccccgaggccgggccgccccacagcagaggagcacgaggtttcatttggccttggccagtagctcaaagggggcttcgttattttcaggccatgagcgaccccagcaccaaaatcagggacacacatcgaaggcttctcttggactctgttttagagtcccctggcaggctgttaacgttcccaagagataatacaaacgtttcgtcagtttcagccacaaaaataatcaaataatcgtcaattgatgaatgctgaggccgcctcgacagcagccagcgtcctccccagatggtttgcgtggggtggggggaatcacgatgccccagttctttcttctccccacgtgagaagcaaggaaagtcgggtgagaggccttattatgttttccctgaagtgcattctgcttgacgatgctgttgtcaatgtacagctcgccctgaggtgtcttgtcagtgttttgttaatggaattgctggccatattttatctaggactaagctctcattcaacagttggctgtgttttataacactacttacggaccacggaggctcggcaggcagtcaacttgtattttgcagacataccttagttttctcatgtaggtactgcacaaactggcttcgtatcttgcactatgagtgtaggctgactcttccagcatagtctccttcggggtggcgctgaatatcccctcatttcagcttttcatggtgctcctttgcctcatttttttaaaccataatgtctagcctggtctcagctccaaggcaagaacagaaatacaggtaaggacagaaatattgtggcaaattctaccaccatttggatgaataataataaaacgttcatttattttatagcatctgcaaacatcccaaaacctttcaaccaaaatatgtatagatgagtgtgcagaccaaagtaaggacatcagtatgttacatttaaaaataagtcaaggttaaaggcggtgtcctcttttaagaacatcgcaaatacaattccagtactccaagtacgtattctgtacccagccacctgggaggactgagagacctaatggttttctgctttctggaacttctatgccaattgtgactttctcacccaaatttgtaaattcgcaaattaacatgcagcgaataattacaattgtaaacacctggaagtggaaaaggccgtgaggataaattgagaggaagagtaaacctaataccataagttgcataccagcagatctgagtatcgtcatgaataattggttagcttttccacatgccttagaagtttcagcaagcacctagcgaacatcttaatccaaatttctcaaaaaatgagagattttatttaagatcattcctcaatttatcttagactttcagctacatagttagtccggtagtgtaacagtaacgggttttacgtaaatgccaggggaaaagagaggaaagctaaataaccaagtaaatctgtatctaattaacaaattggctaaataaggtgttatcagctgcttgatatagagctgataaaatcttcagctaggcatacttgaggcctgattacagaagtgaccgtagtccacccacacacct

SEQ ID NO: 318691 - DNA, 4001 bp, Homo sapiens
attacaagcaatacttcaataaacatctttacacatatgagattcaaattttaaaatttaattcatttggcattgattgatcatctgttctgtgctaggcatttgtatggttaatctgattaagcagtatggacttttacataaaattccaagaaaaaatagatatcaaattatctgcccaaactataagctgctgatagatggttttcagttaataattctctgttagagcatccagagtataacatatgctagagaaattggcataaacacaaatcccttctccctcattacgtcccacactcaccttatagttgttccagtacagtgtatcttgggtgattttttcaccaagtataggatatgtctgaatagctacaggcttataaccagccataattccatataattgcactattgtccaagagtcactattttggaattggtattagaaataattacagtgactctgccttaattctgaaaaataaaatattttatatacatattataagcttgtacacatagttgattttcactctgctttctttaaaaagtctgtgtggaagtatatagattagagaccaataagccatttaattctaacccagaaaaggcaatctataggaagcaggaataattaaagtgaaggctatcatatcgcaccatctattcagctgtacacaaaggttctcacacctagccaaccattttacaacacttaggaataaatctagcacagccttacagtagccaaaccaaaaaggatcatgctggctttgagtgtccattttttggcaacaggaaatattaaggtgaaactgcaaatacaagtttcctgaaaccaagtttaagatgacatttaatctataacaattatagttacggatttgatttcctgaaagcctaaaaatgccaagaagtaagaaacacaaagctaatattctaatgtagaagcttaaaattaaatttactttaaaaggtttaaacagtaggaaagaaaactgtaataaagcagtcctgaaattaaattcaacactaaagtggcagaataggataaaacttttaaataacatgcaatcaagccaaaacatttttccagaacgactcaattgcaaaagagattcaatgttatcaggtaaatgattccagaggtgctgctcatcatctattccaaaaagcctgaaaactttacattagtaacaccacgataaataggtgtaacatatatttaaaaggtgctttaatgaaatacaatgaccaatgattgtatttcactggtctttgggaacactcttctgttcattaaagtacctaccaatgtgcaggacactgctctaggcactggggctataatggtgaatgaaataaagacatggtctgtgcctttgcttactccaatatactccattttggctggtgactggcaccagatattaacctagactcagccttgacgtgtccttttcttcctcactcctaacatccaaatagttaacaagatctgctgattttatctcccaaatattttaaaactccattaggttcacttcacctgagggagcctcgtaagcaaaggcaaagatggaaatgtgtccattgccttggagagttgctgattactccgggaactaacaacggtggacaggaaagggtgtaatcgcagagaagaacctaggtcgaagcttaattgaggggaacttgagccggttaaagaatttggccactctcctatatagcctgggaagccccagaagagcatgccagattaacacaggaaggccgggtgtgagtgtgggcttccctcaatgggagccgccttcacctacctccactgagccccaaagggtccgacgagacacctcgacccaaggacaattaatcggactgtgccagctccctaccctgcacagttcagcagcactggcgtaaaaatcacatggaccctcaaggagccggcgacacacacagcgaaccgaacgtcgcgcgaagatgacgtaccagagcacgctcatgagactcacgcagcccggcggcgcagaggcgggtcaggtgggcggggcgatctggagtaggaggtgtgaccggagggcgaaattggggcttcctctgctctggtgacccagaaccgtcaactgaaatgaccctgtctgtgtagtactccggcaggatgggcctcggagcgtaaaggcggcaaaaacaaaaatattaaaaaaaaggagagagggacaaaaaaaagaaaacccgaaagtttcagctgcattgctgcggaacgttttttagccagaaggcgaaagaagaaatcggaagtgacgtcgcggccaaaacaagcccgggcttggaggcctgtactgaagctggcctcagatgggaaggcccgactcgctgtctgctgtcgtcggtggtcgcgagaccttgcactctcaccgggtcggcctccagcccctgtgcccgggatccgctcgccgcggatgagcgagagtttcttcctgggacttttcgggcacagctggccggtggcgacagaacggactttctttcctgcaagagtctcccctccagcgggagacagcgggctcctgtctcgggacgctgggacacctgtcgcctgtgaggcatcatttattttcatagcaccttcctctccttgtagaataattccaggatcaggaagaaacgaggggctcctgttattagcatccacaggaactagcatagctgcccactttatctccgtagactctctatcccttcatccctgggctctgacagatcgaggtgaacctagctatcgattgccttaccccctttttctcaccaccacctcttctaagtcctgttaccccactcccctcacccccgcctccctctcctgttcttcaaaattttggcctaccaatcaactttgcttctcctctcgttaaactgctgtgccaagataagcgttcattttccacccacccccttcgcctaagcacatttgctattctcctctcgaagacctgtaattccatctataaaccctgatttgtaacatggaagctgtttagagctggaaagaatattagaaaggcctatttcaacacctttttataatagatgaatttcagaaaacttgtattatttatttgtccaggagtggccagctagttagtagcgatgttgggagtggaaagccaggtctaatcagcaaatgttagaaatagaaaagaatatggaaaaaattgttaaagttaagatcagaaaacatttatggagcacctggtaggaccaagtactgttctgtgtgcaaaaattagtaagagtggtccccatcctaggggagttttcaatttagctgttatttaaatggaaattgtcaaaaggatggtgaatgctaaaatacagatacatgcagggtgctcagagagcttaggggagttgcacttagccaaccgctggataggagaaagggggagatggttcttccctcaggaaacacagttcacattgtccagtcccttttaagacgcatggactaatgcattgcacatccatctccctttgaatcactgaactaattttcttttctggtttccttctttttgcccaaatgtattaaccttcttacttcctgctttttttttttttccttactatactatgtgttatttattcaactctctcgtggagattttggctttgtttagggctgcctcattttaatggtcagagtgatggagtcagaagagctgagtaagccctcataattcatgagcttccttttttacccctcctaggtggacatatgattacctgacctgcctactcaaaggattgttataaagactaatctttgaaaatgtttttaaaattgtagaaggtggttatctgtaaatgtatggtttcgcgacccttgctccactgcgatcctaatgcatttttcttttaattccaattccaattttgaaacaccctgcaccctctcaaaattcctaagaggcaattaaccctaacatgaa

SEQ ID NO: 318692 - DNA, 4001 bp, Homo sapiens
aagtcttgtgagctgaactgggggcagatccgaaggagcgcaccgcctccctcgctcctccctccctgctgccttggagcacgggaaaggcagggatttcacactagccattcatttgtcagctgtgggggaggggacgcagaagctagagagagagaacagaggctgggagaggggaagggaggcagagaagatggagacagagggagacacaaagatgaggaacgcgacccagagagactctgccgcgggtgtgcgcgcggcaggacaactctccaggcgccgtgtagatttctcccccttcccgcagcatctcccagggacatgcaggacttgccgagacgcagttggattggagagcaaatagtttaggctatgacactatttttctaccccgctctcctctgcctaacacccagaccgctccacgcccagtgacacagaccgcgggccagaacaacccggatgccctaggtctgcacgcaccagggatgtcgccctacagcgcccacgcctctgcaggacggtggggcgctccagccgaggacgtcccccggggctcccggcacacgcgcgcgccgctgccgctagacctgccagtaaagttgctcaactagagcggagaactaggagagggtggggaatatgtaaggaaacggaggactcctgtagtctgggcgagaggactgacccagaggcccctgattcgggtccccgagccacctttgtctgcagtgcgctctgggtgccggtttgcttgttgagatgggagcgacagaccctatttcactcttcagggtgagaaaaattgttgcacatccctgccgattcagaacaggcttttcccgcccaggggcctcccagacctccgcggggctccaacaaccccaccccccatcctctgctccttccctgctggccccttcgcaccgcgtgcaggacaaaagaacccaggggcgccgggagagaaccgtgacagtccccaagtcgtcaaagagacacggcggggatcctgcacctcccccggccggacctcctcccagactgcctgcggtctgaaggggtcaggtccgcgcaaggtcccaggctgcttgggcgccgggtcgcactgtcaggagctgcccgggagtggctttccaggaacaccaggcactgaccacacaccaggggctgggaaaccaggtggcctgcaccaaggcggcttcggggacttgtctgtggcaagtcttggtagtccccattcaaacttttgcctcgagcgtgttaagaacaacaacaacaaaaaaatcaaagtgccaaaggtccctctcttctctccagctcaagaacccaccacttttctatgatttctttacaatttattccctcccttcccccaattccgttagtcattttaccccccaccccaccctgggtttcttttgtctgaatctttttcaacaccaaggtccctctgtatgcctctccccaaaagcccttatgaaagttacctgcattttttaagtgcctacattttcttaacttcgccttacagctctttgccttaattaaagccttctaccaattgcttcttttttctaagctcgcgggtttttttctataagttttttgtttttgttttttaaggggggaacaaaagaaacgtgattaccttggaaggcggcttattgcagtttggggggaaaattcactgcagcgctgcgcgactgggttcggcgttgcccaggcgggtcacataggaagcgtggtggcccggggaaggatgcggagggtgcgggacggtgctggaagatgcgggaggatgcggggctggccgaagatcttggtcccagctcctgtccacaacacctaatgttctcggctgttgcgtccgcacgcctggagttcttccccagaaaggctcggggcagctcgcctgcaagttcaaatgcgggttgtgacacccatcatcattatatcactgtaccgtcagagccgaggaggagactcagcgagaagaaggaggagggagaggaggagggttcattcacaggctccaaaagcgctccgcagcttcagccactcctaagagtccaggcttggaaagcaggcggaggggcggaaaggcagctccccgcgcctgcggtagggaccgcctgcctccctccccaggcactcccacctcttggcgtttcttcctgacaagaagtaccaatcggcttggggacagcagcgctccccattcagggactcactcagtaacatcgctctgctcgcggaaaccactgccctcccactccttccccacccccatttccccgccccccgtgcagctagttctgggttaggggaaaggagcccccaggctcttagggggcaggccagcaatagacaattgagtacgatcacttcttctcgggagcacacaaaactgtaaaatcagcaaagaacttggttacagcgtgtttacgcgcccacagagcttgcctgtcccatcaaagggaagtgtcaggctcaaggctcctgccaacctgaaagagacactgagaaaacgagatccttcggggacctagagggaaagtgtaagaattccccactgcactcccagggaactgcccaatggggagcccggcttcaaaagaccctggtaataaaaggctggacaggaaattcccccaggcaaatcccttgtcggattcaaagagaatacttttcctctgccacaaatctctccccacataagtctagattctgctttcttcgttcttcctttccttcagtctttccaagtatctctgagtagaatatttgataattttcctgagtaacagggacttcttggaagtatcaatcacctttcatgctttccggaaataagaccataatctttcatgcgtatatgcgattttttttcttcagtcaggcccaccccactgtgtaaacagcatcaacacatggaagagtcccctgcattgtgttacaaaagatttccaataggaccttacagagaaaagggtcaaacagttgacacaaaggatttctgtccccttagaaaagagggactttggattttccttttctttgaagtcaagtatgagtttatacaataggaacaaaataaatccaaggtgcacatcagtataacactagggatactagaatggatggcaaacttttccttctacacaaatatgaaagtatcctcacaactcttctctctgaagcctctacttagaaaattatattaaacataggacctcaaaacagtagtgattaaagatgaaagccaatttttcctctcaacttctttgattagtttggtttaaacttatgctttaaaacttttagtaacttagactcctgtacatgcgcatttataagatttcttttatattttgtaatttgtaggcattcagcatggtcattgattttaagtgataaacaggtagaagacttgtcaggataatttcagttctcaccatgtgcatctttcatttcttttgttatttatcagccctctgcagtaatataactgtcagttacatcatttggaaatcaatgtgtttttgcagtgaattatttattcttagtaaatttattgtactaccattccaaacactgaaatttgatttcatcagatgtttagaatgatagtcacagagcagaatcagacttcaaccttcatgtataacatgtaaacaaactaaggtgcagaaagttactgtcccaaagtcacacaattaatagtccagtggtcttttcagtgctaatcatagcaactttagattcaagattgcttgattcaggaatggagagaaataaaataaaatgaatgttcattgaaatatatactccagacattaagatagacctttctgtgaaacacttcaagatgtggatttgtattctcattcttaaatttgagtaaatctagttgagtttcaaagagttcaagtaacctgcccaaggccattttgtaagtgacagatctgccagtctgaaaagcttattatcttttaccc

SEQ ID NO: 318693 - DNA, 4001 bp, Homo sapiens
tacccccacagacccttctcaagcacctactgtgtgccaggcagcaccaccccaggcactgaagacaaagtagcacagggcctcagtgcctcagtctgacccttaggagctgagttggtccagagctggggtgggcagaatgaaggctggccctcggtagtctgctctggccttctcctgcctcagtggagaagtttaggcaacagaggagccctttcccctatctccccaggagaggggaggctagtcaaggggacagggaccccgggcggaacgggctctaaaccagggtctgctcctgcattcaagatctccacatgcaaacttactgctccagcttgacaatgtccatttgtaaacttacaagatttttcataaattaagctgaaagttactcaatacctggtatacaaatgcttgtcaataatagtgaaagaatgtttaaaaacaggagctacatttattgaaccccttccacaacgccacgtgtagcaaaatggtctgcgggggatgggctggattcacccaaaaagccccaagggtgtcagggtttctacttagcccttctccacaccggcactgttctaaaggtttcatgctaattaattcattttattattccccaaaactcatcgaaggagaggtacaattgctcccgtcctatagatgagaaaacgaaggtatggggacttcccagctgtgtgaccttgtacaaaccactaagactgcgggcctctaatccaaagtcaggctccgaaacagtttccagaatgcaccgccgcatttggcgaatgaatgaacgaccgaaccagtaatcactcctaagaccaagaaggccacatccttccccgtggggcctccttttccgaggccaaaccttcagcccaggcccgagctccggcctctaccgcctaagtcgactctcggccggcgcgttccgctctagaaggctctggcacaggcgggcggtgccgggcgccagcttctgcgggcgtgggccggccagggcgcgtgggcctggggactcggggccacggtcgtcacgtgagctcatccccgaggcggcagcgtggccggcacccgcccgctggcctggtccggcgagcgtgggcggcgaacgggtccccgccggatgcacgctggtgggatccagggccagagggcgccgccggggaaggtcacctagacgcgcggcccgccgggcctccacgcggccgcccttgcacttccgcccgcaagcccgggccgcctctcgccgccagccgcaggcgtctctggaccctcggcctcgcgctccccagcccagacctgttcggcacccgcctgtgcggccttctctgcccgcccgctcaccagccaggcccgcgccggccgctcgcgatccctccccgcggccgggctgccggggcccctcgcccgctcctccctcagcgcctccctctcagctccccaggggcctggcccccgccgtccagggcgcaaggaagccggggtccttttccgctgcgcctacctcagaggatgtggcggcgggctcggaggcggctacggcgggggctgcgacgcggaggcagggagccgagccagggagcggagccgagcgagcggctgggccaagggcggggcggcgcggacggcggcggcgcggacccgcctcccctcctgcgcgcccggcccggcgcgctccgcccccaggccccgcccgggacagcgtccaggccgggccagggtccccatcccgctagcgagccgcgttcttacccttccgggccccgctgccccggcagcagacacaggagcctgcgggcgtgttgcgggcgcgcgggaggacctgcgtgagtcggggcacggggaggcgccggactgacgtgtgcaccgtgtgtgcgtgcgcagggacacgcgggttcttgctggaaacctcggccccagtggcagcgctcgggaagggggaggaggccttccgattctctgagctgtggcccggaggtccctgcgctaatggaagacgcgcggggctcctgggcctcctgcttggcctccgcgctgctagatcccccgggagttgatgtggccggcgctggacccaagcctcgcctgggtggacaaagtggcccccggccccccatcaaagcccgcgtgggccccatcccccgagggcagtcccaggcccagcgcggacactgggcgcctggggcggcgcagatacagagtagaggcggcgactgttgctcccgagctccgcgctccggatacaatgtgtctggcgcctccgacccgcccgcgcggcgtctagacaatctcagagaaaacccctgtgcgccgattttgcactacagattagcgattttctcctgtagcaaagctactagcagccaatttccatgcatttgagaggcaaaaagacaaaataaaacaaaacgtggattgggttttgcgaggtccctgctgggtctctcggcgcgaggagatcacgccggttatggccggccggccgactgagggcaccccgggtaacccccgcgaccagccggggcgtgtcctgcgggacccagttagtgtgtgttgagtgaacggtcacctcgctgctaggcctaagcgagtggtctcgttcaccactgagtgtcccctgtgttacgcgcgaggcccactcgaagcaggtttcgagaattaattcgtagatggacgaagattctacacatccttcgcctttgatcaacaaacgtcctggaaggcttgaggcgtctagggccctgtggaggaggtgccgggttacagaatcaggacactcctcacagccagctgcgacactatctaaagcagtgggcaactggggctacggaggaggcaatcaggactggctgctgggaaaaggcggcagattaaaagtggcgactggagttggaaaaggtgctccagtgggatagggtgctgaggaagagggcagctgatacagagtgggagtggggtgcagacaggttacctaggccctgtgtaggggctgggggaggggtgactgggaatgtaaggaagagcccccttcaagatcctgaggagtgtaggacggattctatgaccctcccaggcgcacgagttgcctgggaactctgggcttcccagcctggtggtccccaccccgcacactgagactggtgggcagggggaggacaagaactcagggaggccgggcgggacaaggcggggctccaggaaccccacagggctaggaacagatgccggtgcaacccagttttgaggctgggagcaaatgtcgaagggcttcctcccctccagcgccacctctcaactccgctttaaagaaccaatctgggccgggtgcagtggctcaagcctgtaatcctagtactttgggaggccgagacaggcagatcacttgaggccaggacttcgagaccagcctgggcaacatggcaaaaccctgtctctactaaaaatacaaaaactagacgggcgtggtggcgcgcgcctgtagtcccagctactcaggaggctgaggcacgagaatcgcttgaacttggaaggaggaggctggagtcagctgagattgagccgctgtactccagcctgactgacagagtgacattgtcccccccccccaaaaaaaaaaaacaaaaaaaaacaacaacttggaaagagttcttcatggcctctgctaccctgggccccttcgccagctcccctaggtgctagtttcagattaaccactcacttagtggctgcgtgacccaggcaagaaggctggcctctaagagcctcagcttcagagtgttggtgtaagtttaaaatgggacacataaagagtaggcactcggccccgtgcagtggctcactcctgtaatcccagcactttgggaggctgaggcggctggatcacctgaggtcgggagttcgagaccagccttaccaacatggagaaaccccgtctctactaaaaatacaaaaattagccgggcatggtggcacatgcctataatcccagctac

SEQ ID NO: 318694 - DNA, 4001 bp, Homo sapiens
gtctagtttcccctgtagaagaaactaatctgtaggactgtaggaagtctgactggggacagcatatatagccatagtcatgggatagagcacttgtagacccaattagtgacttaggttcattagctccttttttttttctttttactcccaagtattttcagttttagaggtcacagcccaatgcattggttaatctgagcagtgtacagtctgggtaaagaacatttacatgccatgatgttacgaatgtatcatcagtgttagaactagaggagaacttaaaagccatctttattatgactaaatgtcaacacacagtaagtaaattgttaactttataaaatgtacaaatatgttactctcctcaccacagggtttctttggaagtagaatatagggaaaaacacctgtgtctgtgtgtaatgcagtgtcaggaaagacactgtaccaaagacaagatttcaagagttatttcagtaataaactcagaaaaattacatttcaaggaagaaaacattaaccagcaaaagcaaaagttagcaagcaaggaacaagtgcagagaatggtaacactaaatactttcacatgattaatatggttctaacccaccctgtctccattaccagctcagactctgagaaacccaattgctcttcacctcagctctgccctcactttccttttccactaactcaactagttcctacctcccagctctttttgctaataagccatttgatattcacaatcctccaagagagacaactctacctgttttccagaaaagaaagtacttaattaacactgactattatcatcctcctcatcaaggtttctgttctcacagaggttacattctttcggagaagacaaaagaaacaagtaaacaagagacactattacaatgatcgatgaactgttataggagaaaaaatcatcactaacaagtgatttatctgaaatttactttaatagattatataaaggtgctacggtataatgacacctatgttgcaaagaaacggctgcaaggcttagagtgacagtgccagacactttgcgttagttgaaaataactgattgctattagatattttccctaacggtaattaatctcaccatctccggttctcccaatgtattctacctagagtgaatttctaactcagctcgtgtcaccaataacgtaatagcgtgcatgtttttctctctcattaagaatgcaagaggtagaggtttgtcttaattatgtttccaccttcaagggaaggtcaataaatattcactgaacaaatattactgccatacaactgagatgttctctagcagtttccccttggccaggctgcctctgaaacacgccccaggaggactgcaagtgccaaatcagcacgtggacgtgaccggatggcgaaatattaataggacagggaggggttaaagaagggaagcccgtggtaaatgggaagggagaaccggactgctccaggacagagttagaggccaaggagggtggttttcctgggaagctaacaaaagaagtcactcacgtcataggtgtggaaactcttgcccacgcaggttgttacatagaaccggcgcttgagcgcgctgaaccgcaccacgtgtggaatgtcgttgctgaaaagtcccaaggcccggaaccccgcaaaaagcgcgctggccgtgcgcctttctgaggcccgttccattgccgccgcgatcccagctcctctcagctctggtcctgaaggaaaacacgtacccagtcccttcagcgtgtctagtggaacagtcctctgccagagctgcagacacaacaccgcttccggcgcccgctgcgaatcgcgtttccggagactgccctcagtgcaacacataaagttctccctccagagctcacatgggaggcgtgacttgggttccgagggccaaggtctccagcacgttgcctagcattgttctccagctcttttgcggtggaaggaagctcgttaggttccgacagaaccgcaagggcgggaaacaaagagggaagcgcgacgcccaggagaatggaggggaggtcgacgccttggagatggaaacgatttaaacatgtgattatttaaaaatgtacaaaaacatgagactggaaaaatttaaacactggatatctgatgatattaaggaattatgtttcatttttacatatgatagtagcattatgattacgtttttaaagatcctcatcttttggatacatattgacatatttacagatgaaaactataatgggacatttcaaaactgacagagggattcactcacagaccctctggggagtagaactaattacttgtggggagggaactgctcacttgggcaacttggataagtgtagattcctcccagaaaaggaagataaatattaaatgttattgggattcctggattaagtcagtattccttgaggtcggctgtcaaaagcagacagtagaggttctaaagaggagcttatcataatgcaaacgggagtccgggcagttcattagagctgagtgccttaggatgctgaaggagactgattccagtgaagtgggtgtcaagacgcctcactcctcaggagccagctgccttaccaagatgtaggtttggggaacaatctctgagcatgtgaacattaactaaaacagtggtgagcttagagcccaggaccaaagttcaacatatggaataacctcttctcttactgttttatttccatttcatttcgtttatgaaaacgttttggcagcctattaaggtttgggtcgagtgactaacgtaactatactagtacttgagagggataaaaagggtatatttactaatgtaaatgtacttgaaagagataaagagggtctgtctctacacagatcagtgtactctctcgggttccttccagttctaaaatgtaattattatgaaacaaaagtcacttgttagctaatttgaatacctgactcatacattcttgaacaaaaaaaatcttgatttattttatagttcttggcacaaagcctcaaacactttggatgttaagatcattaaggggcagatgctaacagaatgagagcttgttatttagtccttgacatgttgtacttacttgtattttcatttgtaccccggatttctcaatagcagtgcacattttcagccatgtttttggtatgacttaaaagtgaacaagttgctaattatttgtaaatgttctttaaattaaaaaagaggggagaggggaggagccaagatggccgaataggaacagctccggtctacagctcccagcgtgagcgacgcagaagacgggtgatttctgcatttccatctgaggtaccgggttcatctcagtagggagtgccagacagtaggcgcaggttagtgggtgcgcgcaccgtgcgcgagccgaagcagggcgaggcattgcctcacttgggaagcacaaggggtcagggagttccctttcctaatcaaagaaaggggtgatggacggcatctggaaaattgggtcactcccaccccaatactgcgcttttccgacgggcttaaaaaacggcacaccacgagattatatcccgcacctggctcggagggtcctacgcccacggagtcttgctgattgctagcacagcagtctgagatcaaactgcaaggcggcagcaaggctgggggaggggcgcccaccattgcccaggcttgcttaggtaaacaaagcagctggaagctggaactgggtggagtccaccacagctcaaggaggcctgcctgcctctgtaggctccacctatggcagcagggcacagacaaacaaaaagacagcagtaacctctgcagacttaaatgtccctgtctgacagttttgaagagagcagtggttctcctagtacgcagctggagatctgagaacgggcagactgcctcctcaagtgggtccctgacccctgacccctgagcagcctaactgggaggcacc

SEQ ID NO: 318695 - DNA, 4001 bp, Homo sapiens
aatgtacaaattcacagcagttatacaactcaattagatttatatgaagaaatatataaatttaaaacatgcataaatgttttccaaaaaaaaaaccaccaccacaaagcattgattttgtatttattctgtcttccttctagaagagattgtggtgagaaatttgaaaactatataaactgcttctcctccaatgaaaacttgccaggaatgggagacctggttaagcaaataacatgattaaccaaagaaccaggttaaaacagaattatccaaaatgtcgtatataccatatatggctattcaataatccacaatctcaaggatttaggattaatctgaaataagaaatttttaaaaacagacaataccgtcaactgcaaagacatgcggaagttaaaattgagaagactgcctactctcaacaatccaatttcttacttttaacaatctaaacaaatacttcttatgagaaataaaatgcaattcacaaattctgttcttgtcaggcctctgagcccaagctaagccatcgcatccccggtgacttgcacatatacgcccagatggcctgaaataactgaagaatcacaaaagaagtgaaaatgccctgccccgccttaactgatgacattccaccacaaaagtgaaaatggccggtcctcgccttaagtgatgacattaccttgtaaaagtccttttcctggctcatcctggctcaaaaagctcccctgagcaccttgccccactcctgcccgccagagaacaactcccctttgactgtaattttcctttacctacccaaatcctataaaacggccccacccctatctcccttcgctgactctcttttcggactcagcccgcctgcacccaggtgattaaaagcttttattgctcacacaaagcctgtttggtggtctcttcacacggacgcgcatgaaagttcttgtgtggcatacgaaataaatttgggacctcaaaatttccaagactgcaaaaattattttattcacatttcaaatgtaaatttcattacacacggtctattcaattattcgggcccatgaagaaagtgtgactatgaaaccaaaaacagcagttaattagaaaatcatgttcttgaccttgaagcagattactttttaaaaataattatatcctttttcggttgttggataagtaaattaattttatattccctgaccaagtatcagtagacgccaggaagagacaccaattcaaataaaccaaaagtggaaagctgcggtcacaactcgttcgtttctagctaaatcgtatactttttaagtggaaatgaagatagtttcggtagccagaagccctaagttgtcacaggtcccaataggactgctgaccagctgagcgtccctgagccaggatctcacgattcagctagccgtgggacggggccgggggtctgcagctccagggtgcgcctggggtcccgccgggtctgaggagctccggctcccgcgccctccgcccccaccgtcgtgagaacagcgcgtggcacgagctcagcagccagccccgcctccgcccgggtccccgcggtcggaacccaggaaggccgaaccggaacgaagccgcccctccagcaagctcgacggacgcagagcagacccacccggggtttacctcggccagtccctgcggttctcggcctcccccgatcagccatcgcaacatccgggcagcggcggcgtcttgcccggtccagccccagtcagcccaaactccgccccaggctcggcctcctccttcctccccggctgcagcgcaactgagacgctaatacttcccgccccagatcagcccacgggccgaaggaatgcagaccacagttgagggagaatttttgtccccaaagcgctcccgtacccagccacggaggcttagtttgggcagtcgcttggggtgcggcggccgacggcgggggcggctgcggcgattgcggggcgcgcgctgctccgagtgagcacgcgcgggagcgccgccgggtagcgcacggagcttaggtagctcgagcggcccctggtggacgcgcgcggagcagcaacccgaccccggcgagcaagcgcgcacgaagaataatgcccctccctgtgacatggctttagtatcctccacttcctagggtaccaggaaatctcccctgctttcccaagagcttgctgaagaaggtgtaccgcagtagacttctgcatccagacaaatccagtggctcatgtgtacagccgaataaatccggccaacatttactgtgtgctatagtacagctactgtgctaaggctttacataaatcctcatggtaaacctatatcctctattttacacatcaagaaactaaagctctgaatgattaggtaatttgtctaaagataacagctaggaagtggctacattggtagtgttcttgaccgtatgctatattaacatagaatctccctaaagaatagaaggcagttcatatacctttttttgactactacattttcttaggtagtcaaagggctgtggttatctatgctgactgcatatcagaattacctgggtagcttttgaaaatgtagattcctggcttccacctcagactcattaaaataatctttgtggttgggacgtaggaatcggggttttgggaaggctcctcaggtgattctgatgagtagcaaggtctgaaaatcactggtctaggaactacttatacatatcatgtttgcaaaagtataaatatatatatttgcatatgtattaggttcaaataatcctcctagcagtaaattgttgtagggaatctacaaatgtcccaactaatgcattaattcagcaaacatgtattggacacagatgcactagagaagcagaaaggaatcacataaaatgctgctctggagggacaaggcataatgtcccagtcaccaataagagagagccatacatcccactttaagctaagttggttgtgagcagctacacaaacttacagtccctctggaactcggatctcctataattcatctttgtattccttttgagtgcactcggcaagaacacactcccaaggatcaggagcatgttgccttctgtgtgctagccccaaattgcagtctgcatacagttgaagacagaccaaaacagagactatcccctgggaaagagggacttatctttaagtaaaacaaaactcagagacatcaggagttcagttctggaaggaatatcttcacgtgagacaatgtggttgcccaaatagcctacattttattcttctgattatccacattctttagggtttgccccatgctctttagggtttgcccaatgccacattactctgatgtaagggacattctgctgatgctttaaagcactggtccagggttgaacacttcctcccttggttcctcttaggacagctaagaaagaattttttacaagattagtatattattgggcacacaatgtataaagatgtaatttgtggcatcaatagaaagggtgggggtggagcaatataggagcagagtctttgtatgctattgaagttacgttggtataaattaaaatgagattgttataacgttaggatgttaaatgtaattctcatggtaaacacaaaaatacctgtaaaatatacataaatggaaatgatcagggaatcaaaacatttactacaaaaaataagctaaatacaaaagatggcagtaatagagaaaatgaggtacaaaaaaactataaggcatatagaaaacaaatagaaaaatagaaattcctctttatcagtaattactttaaatataaatagattaaactgtccaaagaaaaggcagattgacaaaaaaaaaccaaactctagaatccaactatatgctgtctatgaaagactgactttagatcaaagacacaaatagatcaaaagggaaagaatagaaaaagatattccatgcaaatagtaaccaaaagagaactggag

SEQ ID NO: 318696 - DNA, 4001 bp, Homo sapiens
ttctagtcatataacggactagtaagctacgatcagcattttgtgtacatgtacacaataatagaataaaatcagcaattgtatcacagagcatcatatataatgtaaaaggtatttctctgtgaggcaaggtcaaagacgtttgaaaaacattagtgaaggagacagcattcaaataattacacaaatggacatatggttaccaaccattcattattaagggaaaggtaccatggcacctggtgccatggcagcatctaacaggtaaccaattttagtctggggagagaggaagagggaagagatcctggaaactcagagatagtaggtaaaagtgaggggaaaggagttttccggacagaatagcacatgcaaatgggctgaggtttcgagatttttttttgagatggagttttgctcttgttgcccaggctggagtgcaatggcacgatctcggctcactgccacctccacctcccaggttcaagcgattctcctgcctcagcctcccgagaagctgggattacaggtgcccgccaccacacccagctaatttttctatttttagtagagacaggatttcaccatgttggccaggctggtctccaactcctgacctcaggtgataccccaccttggtctcccaaagtgctgggattacaggcatgagccaccacgcccggcccaagacgtatttttaaaaggtatggatgaatgagcacagatggtcagggcgttgaaggcaggattgagaaatttgtactaaatcctaaaagcagaccattgaagggttttaatcaagggagtgtctcactctattgtccaagctggagtgcagtggcacgatcttggctcactgcaacctccaccgcccgaatccaagtgattcttctgcctcagcctcccgtgtagctgggattacaggcccgcgccaccacaccgggctaatttttgtatttttagtagagacggggtttcaccatgttgaacaggctggtctcgagctccaacctcaggtgacccgcccacctcggcctcccaaagtgcgggtattacaggcgtgagccaagatttgtggtttgaaaaatcacttaaaggggcctgctgagcctgtctcgggcacaatataataatccggtaggagtccgggcacggtggtttacgcctgtaatcccagcactctgggaggaaggcaggtggatcacgaggtcaggagttcaagaccagcctggccaagatggtgaaaccccgtctctactacaaatacaaaaaaaattagccgggcgtggtggcgggcgcttataatcccagctactcgggaggctgaggaagagaactgcttgaacccggaagggggaggttgcagtgagcccagatcgcgccactgcactccagcctcggcgacagagcgagactccgtctcaaaaataaataggtaagtaaataaataataatcggtgggaaataacaaggccttaaagggctttttggcctactacggtatctgggctctgtcacgacattccagttctttcaacagattggtgtgatagaagagccgaatgttactgaataaattggacccaaagaatcttgcaaaatttgtctccctgcaactttctctcatctctcctgttcccaggtccacccccgggaagcttccagacccggcgccccggccctgccccgctctcacacgaacacgtccccgtccacgtcccctgcagccagtaggtcacgggccggatggaacgccagcccactagccggagcttccagcacgatgtcttccggagtgtcccggatccgggttggggcttccatggagtctgggtcctcctcgtcgctcccatcctcagcgggcctctcctcacaagtgcggtccatgctgagaaggactgcgagccgcgccgccgcagggtagtcagcctcggaaccacccacactgcgggaggagtagcctggcactccgcttccgcctcggggggcggggccggaagtgtctccgggacgttcttcctcttacaggagaggtgggtgggccgctgctggtgcgggtggagcggagcgaagagaccgcatctgggagatcggctacttccttgtcctgctgtgaccccgtttgggctaggtagacggtgcgaccgtcaattccctccctagtcacgtcacgtaaagttgagaactgcgtgtaaatctttcctctcctacttcatccagacaggcttaatgcccttgggataggagagagggacgctagtccttcgtggcttggtgaaacccaagatcaagtcaagcgacagcctgggctgtcaggaagccgcaaaatcccacgctgcgcgatgacatacgggagtctgggacagcaggcagctcaagcagctggtgtccacgcccctaacgtctttgtggccagtttgctgtgccagttcctacaatttgtctacagaaactcaatgggctggacaagcagtgctcagttaccaagaatttttttttcttttttgttttgctttgttttgagacagggtcttgcgctgtcgcgcaggctggagtgcagtggcacgatcaccgctcggctcaagcgatcctccgagtagctggaactacaggcacgcggcaccacgcctggctaatttttatttatttattgagacggagtctcgccctggctggagtgcaatggtgcgatctcggctcactgcaacctccgtctcccgggttcaagagattttcctgcctcagcctaccgagtagatgggactagaggcgcatgccaccacgcccagctaattttttgtatctttagtagaaacagggtttcaccatgttggccaggctggtctcaaactcctgacctcgtgatccgcccgccttggcctcccaaagtgctgggactacaggcgtgagccaccgcacctggccaatttttgtatattttgtagaaacgaggactcagtatgttgcccaggctggccttgaactcttgacgtgtcttcccacctcagcctcccaaagtgctaggattataggcgtgagccacggcgcccagcccctgaatttctttttttaaatcaaggtcttgctctgtcacccaggctcagaatgcagtggtgtgatcatagctcactacagccttgaactcttcggttcgatcctcctgcatagctatagactcatgaactcctggcctcaagagactctcctgctttggcctcccaaagcactgagactgtgggcatgagccatcgagcctggcctcagaaactgaatttcaaacccacaatctccaggtcttgcttttagtgactctccagatgtcttcacctgtgccatgtctctgtgaccatttttaataattgggactgcctacctacatccatagaaccatggtgtcatttgtctgaaattagccattctaggtgctattgcagcaaggcccaatttcagcctcttacatgccatgcacaatactggcttcctcacaaaaacctgtcctaccaaggtgaatataatcaaagacaaggtaatggctaaggtgactttctagctttcttggatctggtgaggccacaaatcttgggctcagggtagacagtggcagcgtggcatccagccaggaagcagtagtgacacctaatgatgagcaccaggccaaagtgctggtaatgagcagaagggaagaaaagggaagggaatggtgtgattcaaaggtcaacagacctattctgggccttggcaaatgtttcagggtgatgaagggcaccaaacccttctggtctaggataggaattcctgtacctgcagggccacactatatcagctctaaacccaaagcacttccctaaggttacacctttagccaaggagacagtgatttgtactcaacattaataaagctcatagtacataaactcataaaaggttttggttcccacccataagtgattttcattagatgccttcatccagagcccagtccttcatagcctggagatcag

SEQ ID NO: 318697 - DNA, 4001 bp, Homo sapiens
tttgcaatataattaaggttatggacttttaaatagggaaactatcctatttggcccttaaaggcaaagatgcagaacagctatggcagaagaagtcagagagatccaatgtctgagaagaatttgaggcattatagttggcttgaagacgaaaggggcaacatgagaagtaatgcaggtactttaaggagctaagagggaaacagaaatctcagccctctaacaaggaactggatgagcatggaaacattctcctcctcccccagtaactttatcaaaactcttaaaattttcccctatttggcacaaacatatggacaactttctcactcctgagtaaaggaatgatgtactaaaatgaaggatttataccgggtggggtggctcatgcctgtaatcactttgagaggctcaggtgggcggactgcttgagctcaggagattgatcagcctgggcaacatggtgaaacctcgtctctaccaaaagtataaaaaattagccaggtgtggtggcacacatctgtggtcccagctactcaggagactaaggtgggaggatggcttaagcctgggaggaggaggctgcaatgagcgaagatcgcactagtacactccagcctgggtgacagagcgagactccatctcaaaaaataaaaaaagaatagaaaaggctgggcacagtggctcacgcctgtaatcccagcactttcggaggccgagacgggcggatcacgaggtcaggagatcgagatcatcctggctaacacggtgaaaccctgtctctactaaaaatacaaaaaaaaaatcagccgggcgaggtggcgggcgcctgtagtcccagctactcgggaggctgagaccggagaatggcgtgaatccgggaggcagagattgcagtgagccgagatcttgccaccgcactccagcctgggcgactgagcgagactccgtctccaaaaaaaaaaagaatgaatagagaaactacagaactagtatgtgtgaacacaacccaaggccaatatgtgtaagtctactgtttaattactatcatagaattaatacacgctggtcaaaagaaaacaagaagaccttgagaaaaggttcagggaagttagaatcccaatgtttggatgaacagcatttataattttaaaatggaaaataaagagaaatcatttttcatgtatcagtctactaagttttgttttcattttttaaataattttctttttaaataataatacctactctgtgttggtagggatatggtaaaaatggcattcttaattctgttaactttggtataacctggaacaagttttttgatgggtattacggcaataagcatcaagaagctttaaaaggcacatacccaatttttcagctttttaagtatttatatttctgaataaactacactctcttttagaaatctaccctaccgaattacgtatttttaaaaatcctcgtacaaatgctgttatttacaaaaatgttcattttagcattattggtgacttaaaattagaaaaatcctttctcttcctctctctccagactctcataactgtcatctgagttggttccaacggataacgcagaatagaagacaaatgggagaagaatattgacaaactgcaaggtatgcacccgagctacaataattccgagttgacagctcgatctccactcccactctgcggatcttcaaacctctgcacaaggaagagggtctctgcctggggcagtcactcaccgaaccccgtgaagcccatggtgaccgcaagctgcgggtccggtcccgacgcgtctgagcctgtcactggagcaagaggaaaagagaggcggcctagttagtgcggcgccccagctcccccgacacggcccaccccgcccggactcgcctcatgaaacccaccttcgctgggcccagagcgctccatggctggccgcacaccccagaaccagccacagggacagcccaaacaactgcaggggaacttgccaataacttgcggcaaatgctggaggaagtaccgccttcaagctacagcggcgccgccgaagccaagagcggcgccttccgcagagggaccgcggctttctgcgcggcaccgccctaccggacaggcgggaaagcgccgcgcaactcagaccactggaggggagaagtagtatctggagtttctataacatcctttccctttttttttttttttttttaagccagagcctctgtcgcccaggctgcagtacagtggcgtaatctcagctgactgcaacctctgcctcccgggatcaagcgattctcctgcctcagcctcccgagtagctgggattacaggtgccggctaatttttggttttttgttttggtttgttttttttttgtttttgtttttgttttgagacggagcctctgtcgcccaggctggagtgcaatggcgtgatctcggctcactgcaacctccgcctcccgggttcaagcgattctcctgtctcagcctcccaagtagctgggattacaggcgtccaccaccacgcgcagctaattttttgtatttttagtagacacgacgttttgccatgttggccaggctggtttcgaactcctggcctcaagtgatccgcctgcctcggcctcccaaagtgctgggattacaggcgacaccctttgctttttttttttttttttttttttttgaggcagagtctcactctgttgcccaggctggagtgcaatggcgtgatctcggctcactgcaacctctgccacccaggttcaagctcttctcttgcctcagtgtcctgagtagctgggattacaggcgcctgccaccacacccggctaatttttgtgtatttagtagagacggggttttgctatgttggccaggctggtcttgaactcctgacctcaggtgatctgcccaccttggcctcccaaagtgctgggattacaggccccgtgccaccgcgctctgcctttttgttgttgttgttgttgttgttgactgagtctccctctgttgccttggctggagtgcagtggcgtgatctcagctgactgcaacctctgcctcccaggttcaagcgattctcttgcctcagcctcccgagcagctgggactacaggtgtgcgccaccatgcccggctatttagtatttgagactacaggcacccgccaccacgcccagctaattttttctatttttagtagaggcagggtttacaccgtgttagccaggatggtctcaatctcctgaccttgtgatctgcccacctcagcctcccaaagttctgcgattaaaggcgtgagccactgcacctggcctgtcagtctaaagtttacaaggctaatcgtgtgctcaggattgtccttcttaaacagaatgtgggagttcaacactttaacgtttagaaggtggagaagaatctctttctttttgagacagaatctcactctgtcacccaggctggaatgcagtggcacaatctcggctcaatgaacctccacctcctgggttcaagcgattcttgtgcctcagcctcctaagtagctgggattacatgtgaccgccaccacacccgacttttttttttttttttgagacagagtctcgctccattgcccagactggagtgcagtggcgcgatctcagctcactgcaacctccgcctcctgggttcaagcaattctgccacagccttgcgagtagctgggattacaggccctgccaccacccctggctaatttttgcattcttagtagagacagagtttcaccatgttggccaggctggtctcaaactcctgacctcaagtgatatgcccgcctcagcctcccaaagtgctgggattacagacgtgagccactgtgcccggcctaatttttgtattttttgtagagatagggtttcatcatgttgcccatgctggtcttgaactcctgagctcaagcgatccacccgcctcagcctccctaagtgctaggattacag

SEQ ID NO: 318698 - DNA, 4001 bp, Homo sapiens
ttcttttgaacctcatcttttttttttttttttttttttgagacaaggtcttgctctgtcacccaggcaggagtgtagtggtgtgatcatagctcactatatccttgaactcctgggttccagaaatcctcccaactcagccttccaggtctctgggactacaggcacatgctaccatgccggctaatatttttacttttatttttagtagagacgaggtcttgctatgttgcccaggctggtctcgaactcctgaactcaagcgatcctcctgccttagccttccaaagtgctgggattataggcatggttccaacacgtgcttagccactttctccgtcttctttactctcgttcccctaactattctcaggtgaatgttatcttcaaaaatgacatgcaaactacggcacacagttacaaatgggtgcacgtgcacacccatacacacacatagacacacaccccacctgaggcacaactcaatgtgacgtctcagcttttctgttgagattttatggcagttagccatgtgaaacttcctcaggagctgcaaacacacagccctttccccatttttatttcatgcaactcagtgcaagatcagtgtgtacaaacgcacaaatataggcatgcatttaaaaaatagagtaatttccgctgggcacggtggcttacgcctgtaatcccagcacttttggaggctgaggtgggtggatcacctgaggtcaggagtttgagaccagcctggccaacatggtgaaaccccatctctactaaaaatacaaaaaattagccaggcatgttgcatgcctgtaatcccagctactcgggaggctgaggcaggagaatcacttgaactccggaggcggaagttgcggtaagccgagattgcgccattgcactccagcctgggcaacagagtgagactccgtctcaaaaaaagaaaaaaaaaaaagagtaatttcctacatttatctcatacatagagacacctcatacccacctcattcaacccataggatacttctgatgaactaaacagaactggccttactgacccaaatgacaaatctggggctgagagagggtaggtaatttactcaaggccacacagcaaggaaatggcaggtcagcaggtcactggcagcatttttatttcactgtgcaatacatgtcacacatatacacatactgcaagccccactccattcacatatataccccttgtacaggtgagtcccacacaaacttaccacttctcagcctgttgtgggtggagagctgaagagcattttcagggcagttccagcgttcccaagcaaactggaacttgcactcctcgatgccactctgggcacccaaggccacactagtcgtgtaggtcagataggcctggcaaagggaaaagggctgtgagcttctgcccggtatgggtcatctgtggttgggggagcaggcaggactcagatgggccagctctccattaagaatcaaccatgggttcctctgggtgaggggctctggcactgtccccgcccctcttttctccagaagagtccccttagggccctcagtgggtaaaaacagaagctggagatcatcctaccttgggacctgttatcaggaaattgttcactgacctaccaaaaagagaaaaagtgaggcagaggtgaatggggatgagacaatgggggcctccttggcaaggagtgagggttgggaaaggacttaccaggcagaggcactgaatgcagcacagcatatgcccagagctgcccagagcataaacaggttccccatcgccctgcctaccccagtggaccaggtccagctcagggccaagtccagagaagtgaggagagggcagggtcttcctcagtatttatgtgagaaaattctgaatgtccaagggaggaaatcagcagctcttctcatttgttcctaactggcagggctgcaggagccaccggcccagtgggggatctgggaggagggactcagttttcgccaaaagccccgccctgcccagcccctccagcccttcttccctcccagaatgagaaggaggctgcttttctcctatacgtgagatttctttcttctatatgtcaattttgtctcttcctgcttctttggcccatttctcagaatcatgtaggccagagcaggctgggtccttaaccctgaaggcaggtcacctattcttggagctacagtgtcctcatctgtcagtgagagcccactctctgtcctgccatcctccccaaggtgttaataatcataaagcaactccatctggggctgcttcctactcatttacctaaaccagtgagtgcgccatccctaccacttccttcaaggctgtgaggtgatggagctgtgggactatggagcaggaacacttcagagtccatctctgcaacagtcccttccaccacattctagcaactgctgggaaatttccttaattcctagcaaatctatccttttatatctgagggttacaactccagttagttgattttttatatatctgagaaccaaccttagggccacccagggttatatttgggaagactgatgcctttctcttttttttttttttttgagacagagtctctcgctctgtcgcccaggctggagtgcagtggtgcaatctcagctcactacaacctctgcctcctgggttcaagtgattctcctacctcagcctcccaagtatctgagactacaggtgccagccaccacacccagctaaattttgtatttttagtagagaaggggtttcgccagttggccagcctggtcttgaactcctgggctcaagtgatctgcccaccttggcctcccaaaatgctgggattataggcatgagccactgggcgtggccctgatgcctttctttctgatactactttgttactaggacttcagctccttaggtgggaatctgtcttttattttattttatttatttatttatttatttatttatttatttatttatttattttgagatggagtctcactctgtcgccaggctggagtgcagtggcatgatctcggctcactgcaacctccacttcctgggatcgagcaattctcctgcctcagcctccggagtagctgggattacaggtgtgcgccaccatgcccagctaatttttgtatttttagtagagacgggtttcaccatgttggccgggatggtctcgatctcttaatctcgtgatccacctgcctcggcctcccaaagtgctgggattacaggcgtgagccaccatacccagccttattttattttattttttgaggcagagtttcactcttgtcacccgggctggagtgcaagtgtgccatctcaacttactgcaacctccacctctgtgttcaagtgattctcctgcctcagcctccccagtagctgagattacaggcatgtgccaccatgtccagctaattttgtacttttagtagagacagggtttccctatgttggccaggctggtctcaaactcctgacatcaggtgatccacacgcctttggcctcctgaagtgctgggattacaggcatgagccaccgcacccagccaggaatgtcttttaggttcactttcggttcttagagcttaagaaggcacctggatgaacaaacgaaagaccctgtgacccctagtgggcaccattaggtatgcttggggactagaacaaaaggtgggaaagtccttcttggttgctgaagctctttcctaaggctggagaaggaagtctagagaagttcagaggaaagcatagatggaaagtcacagttctgactccatcctgtgaccattacaacatccagatcacttcccagaactttggacctggtttgggtgggaagtggagctcagagatccccccaccaaaggagttccaggggccaaagagtccccaggtgtctttagggcatactccaagtatgggccaggcttggcgtcggtctgcaaactgactg

SEQ ID NO: 318699 - DNA, 4001 bp, Homo sapiens
gcacacaggcctccgtaaactacagggacctaaattggggcaggtcacatatgtttgaacttgtgtctgttctgagaaaaggacaagagaaaaggtgctgccaagttcaccaacacagtagcagagctggcaactgacccgagtaagggtggggaagcagtgtgtcagggtgacaagtttgcaggttagaacttcagagctggtgaagaactggtacgcagaatggcagaaaaatcaaaatacttgagcaaatcacacctctgggcttcaaattttctcttatgtttcaaatgggagttgggcgctgatgtacgtcccttccaagttttaagcatcccaatattcccttccaagcaaactttttaaattcagggaaatggtgggctcccccatctgacaaacagggaaactgaggctcagaggttgaagcagcttgcctaagagatgctctctagcactaaatatttaccttccagattacattcatgagacattcagcatggtgctgagtgtagaggaggcatccaggaagcgctgaatgaacgaatgaatgaatgaatgaaagtaagtgctcccagaaactaccgagaatctcaactctcattttctttccgcttatattctttttttgacccacatcttgctacatacacttctgggacacctccacccccaccacacaagatgaagagtccaagaaattcaccttggttgctttacagggacctgacccccaaggtcacagacaaggtttaaagtccgcattccccaagacactctgcccacagaccgtgtcaacaacatcgtggtccggggactctaggacatacatggagagggtgaatgtatgtgtgtgtgtgcagcatgtgagcaaagaaatgccaaacaaccaggagaaagtctggagaggtaagagccacaccgagctatctcaggctccatctgcctctgcacattatctcaacctacagcggcctggtacccaccaaggtcaggtcccgctggtgcagggctgaggagcctcgccgcccccttccccgatcagggaagaaagagaggagaaagaggcgaggggcaaggctttccgggaggcctctcacctccatctccatcctaacagcttccaagttgctgccagattcctggataaccagtctccctcatctgccctcccccgcttcttcacttcctccccaccctcgggttccagggccccctggctgcccctgtgctgttctcagcagcttccaaggcacctgtcaaaaagcacacctcaggttgccttcctctgcgccgagtgccctctctccagtggtctcccacggaatcctggggtcttgaccaccccctctaaccggacacttccccatccccatccgcccaccccccacgctgggtggaagcctccccgggaagacccggcttcacccggctaggtcgctcccccaacccccgcccccgcccgacctctcttcctaaagggggcgggcggggctagagcttaaggtcaaaactccgggcaggtgccggctggggcctaagtcctccaactggggatggcggtggggcagcctgggccagctccccggcaggcgcctcctctcggtggcccactgaggcgggagcagcgctccagaaggttggggggagcagggggtggcgaactgaagagagctcaagaggcacgcagagctcccctgccccctcccagtcccggccggcggctccaggggcaggtgggggcccaggcgggggtgtgggggcacggaggagggttccagggtcctacctgtcccgcgggtcgatccagctggtggtgcggttcgtgtggtctatgtagtagaccttgccgtcgaagtcgcgcgcctcctcccagccctccggcaggggcagctccggccggggcatcttcccaagcgctgccggcgctcccccatgcagctcccggccgcagcgggggctcagcggctccagccggccgctcttagcccgggcggccgccgaggcaccatgatccggggggtggcgcccgcagatggggggccctagtaggggccggccggggtggcgccgctgtccatgcggccctgcagccccgacccggcgccgcccgctcctcccgccgccggcctctcacgctgccatgtgcgtccgcagcggcgcggtgcgagcccgggtgcgcgcccagccggccgggcagagcgagccgagcgccgccgccgccgccgtctgccctcctccgccgcgcggcgcgctgcgccctccacgccgccgctgccgctgccgcctccctcctccctgcagccgggtgccgtccctcctctccgctccaccgctctgagctcgccgggtttgtgacttctgcctccgccaggtgcggctcgggcggtgcaggtaaccgcgctgccccggaaacgggaggcggagcgccgggcgcctgggttcccgggtcccctccccgcgcgcagcgcctcgagggcgggtcctagggcccgagacgcgccccctcgtgggacagtcccagccgccggccacccttacgctgcccctgccaggggaaggagagaccgcccctcacctgcgtcccagacctagggggctgggccaaaaaccgctctgcctgtacttaaaacgctcctgtctctctccacccggagtagccaggctctcggcacaggtggccccaaatcttaaaaactccctgcttttctgtggtgtagaatcaggagtcaggcaagaagtggttaaatggaaacattcttgcgaattgggaaacataagttttccaggatctctggtcccttcccccaacacaggcaccatctgtctccttctattcaactctccctacgacgtttcgcccaccctccacccttccccaccatttggaaatgtagctggctcccctcagggtccctaaaattaggagcgctgtggatccgctttcctgggaggacttccagagggtgtcagggaaaacactttgtaaaagtaatagtaatgccattgttattgttagctaaattgaggacttacttgtgacaggctgtggctagcagcttcacaggctttctttcctgtgatactttgaggtaggtgtgttatggatttgggagaagtggggctatgaaaaagaagaaagtaagcaaagcaaaattccatcttgaaaaatgttcaagagaataaaacaatcagagacacaatgtttcttgagaaattaaaaatgtagaattagtgggtgcggtggctcacgcctgtaatcccagcactttgggagggtgaggcagacagattacctgaggtcaggatttcagaccagcctggccaacatagtgaaccccatctctactaaaaaataataataataaattagctgggcgtggtggtgcacgcccgtagtcccagctactcgggaggctgaggcatgagaatcacttcaacctgggaggtggaggttgcagtgagccaagatcgcaccactgcactccagcctgggcaacaaagcgagactctgtctcaaataaataaataaataaatttaaaatgtagcattaaatacaaaaagcaagctagcatgattgagtgaatgatcaactggctgttcacttccccatctcctcttacatctgtgtactgagtgggaatttaacccttttttgccctcggcatatggcaggaagctggactggtcgaatgaagcccagttgggtgtcttctcttgcctgagccccacggtcttccagaagaaccagcaccctgtgctgtatggaccagggtgttgctgagccagagagggaatcatgtttgtggtctcatctcctcttgacagaaaagacccaccagagtgagcctcgcctccaaatgccttcttcatagttaattccttccctgaggccaggcctcggggctcagtgcttggccctccttcattccataaataccaggcaccagagtccagggacaccagcctcagactggccctcaacacccaaaagttggaa

SEQ ID NO: 318700 - DNA, 4001 bp, Homo sapiens
gattttatttctagtaaggaaaggatccaagatggttttaaatgaggattcactgcaaagctgccagaaagattttagaaattgtgatataatctgaaaaccaaaaagtagggggtttatgtaagacaatggagctaaactaccacctcccaaaaaaaactcaccacgtcagattaactttgatgttttacataaatgcaataaacattatacatatttgttcagcctcatttattggcatatgtgtttctctatagataacttaaaaactggcaatgccgttctttactgttttgaagctcaggtacataagaagtcatagcctaaaattaattaaaatatatagatatagcaaatcaattgtgatctctaacaagttaagctttctgatgcttttcacaggtagcctgaagcagagcttcatacagaagtattacctttatatgtaacaaagatcaagacaatcttcacatgaaaccaagggcagttatgtctacagacacatttactgccctaaaagccaagctcgataaattgcacaacataatttccataactaaaccaggtttgtttaatttgaatggcaagacctaaaaggtataatataaaggaattacaagacagaacattaaaagactttttttatccttaggtggagagtactgtatcttttaaatacctttcttattcccctctcccccaaccttattaaattccttaaaggaacagaccatctttgttcctatgctgcaatctgaagatccatgaataaagcaggcacccagtaaatacttgctaatttgtgtatttgaccaactcttgacaattcaatataacagactcaaatatcaagttagttatagtttaaaacaaaacctttgtgtgccctagtgaacaatgtaaacacaaatagcagaatcccaaatcttctaatcattgtgttgccctaaatacaaaagggtctcataggccgaatacagttcataaaccaaaatctcacgtgagttaccttctctctttctctctatccaccttctaagtccataaaaaattgaaaacattctgaaaagaactctctcctgcctgagaaaaaatacaccacacatttagaaccaaaagcttgccataagggggcaaagagtgaaaaactctcatttctaatactttattagaattccaagaactacgcaaattcaaacatgtcaaagcgcctgtttctccatcgataaaatgcagaaagaaaaacgtgtgtgtgtagtagaacctcacctaatgggataattaaaatcagaaaaagctaaatactactactgattaaaagttgccttgtcatttgtcttgccagttgatctctttaaagtacctaatcaatcgctgcagtccgcaaacggcagttccttcccattggttaccacagaaagttctttcctgacctcaaattgcctagtacgtttcagcctcgatgcctggttggaacccacagtttaccaatatctggggattgaaaggacaggccagtgctggggaaatgctcaaacagcctactcaacactaccctctggattcaaccgtcctcccaatcccacaaccaacacagagcatttcaaaagtgcttcgcattcccaagaatccctcagatgcaaacggagaaactgaaaagggggtgaacaggtcgcaccctgaggataatgccgagaaccctagcatccccaaaagcccacaagaggaagtcgcgggagctcacaaattgagggggattctcgcattgtggagttctaggggtaagtagcagggaacttttttaaaaagaaagcaaaaagataaaaagaacagaacctcagatttttgttatttaaagaggcagccccacttccggatcctacctctccgtgactctacttccggtatcttccaaaacgcccgctttcacagatcaaggttttgcaaccaatgagagtatcagctacttccgccggcctgcgggacgtgatctaaatcccgccttttccggtggagaggagcctatcctagtgtcttaaccgcccgtcttggtaggcggtgccgtgacaagcccaaccggacggctggagagggcgagaagggcagacgggacatgcagcctcttccgcctgagccccggaagggtgatgtggctgcggcatcgccggcctcgctatggtaagaagtggggctcccaggtcgcggttgatcttcgagaaggggttgtggatctagactagggctggagtttgtgcggcagcccggggtgtgtgggcccggagctgagaggccttggagccatgtggtccctccacggccaaccagagagaatcaggacggactgtccgaggaagactgctgggtcggcagcccgcccctcatgcaaagtccgctttcctactttgtttaggaaaaaaaaatgcgttggtgtgttttaacacgttggctacgtagattatgtgtggtcattgaccctttgaagcattagcgcttctcgagtttccgcttgttttgttgcaactccttatctcgccctaggggctttactctggtgttattgtttgatttttggggggagtttcttttggcaccaaactccataccttcattttcatctgtttagtcagtagcctctcaagacccttccaccttcttctcttaactttgaaaatgctgctttacaagctataggttttaatagttaagagttctctgcaaaggtggattgcccttctaggagcttaatgtacttattggagtggtgtctagcctcaggccttcctcctcttttacctccaggtccatgtgccaaatgttatgtatatttctggacaaaggatgcatgcctgcaaatagacccaaaaacaactatgactccaaaaagcttgagtctccatggtgaaaaattatgagcctatgttcacagaagttgctgcagaatcccatatagcaataattcattttcttctctggacgaatttaccacctggtgggaagatggcagttgagactaggaagactgccactcttaattcttatacatctttctagaaactgaagttgaattcttctactcgtagtgcaagtcaaagataactctttttattatctcactgtcagactagctaaaaataagatgcatatactgtgcttaagatcaacagtatataaactatcttgtcatgcttgtttttccaaaagtagcaaatgctttcatttattatcacgtcctatgtaccaggctcttttcaaaaaatcagtttataagcatggaaatatcaagttcacagcaacttctgaatagatgtttacaagtgaaagaagtgaaacatgaagagactgacttgcctcggatcacacctagtagattgtaaagccagtactcaaacttattttaatgtccaggtccccgaaatcttcatgctgttatcgatagaaacacaacataactaaggatgaaataagacttagtgatttgtttcttataaatataagtacataaattagacataggtggaaaacggaaacaactggcaggtggttttttattcctgtgagcttgggatgtcaaaagtacattgtttgcagagctacgaagtgaggtttcaagaaggctaacttagcagcttaagaaatggattagtgtctcagtatctttgagttcgcatctaaacttagtttatttgtgaggtaacccaatggtaatgacttaataaacctgaattactgtattttaatgattttttttttttttgagatggagtctccctctgttgcccaggctggagtgcagtggcataatctcagctcactgcaacctctgcttcctgggttcaagcaattctcctgcctcagcctcccgagtagctgggactacaggcgtgcacaaccacgcctggctaatttttgtatttttagtagagacgaggtttcaccatgttggccaagatggtctcgatctcttgacctcgtgatcctcccacctcagcctcccaaagtgc

SEQ ID NO: 318701 - DNA, 4001 bp, Homo sapiens
aagcagactcaaagagactatatgttttagaaaggatagcctaaccaagacagacactattacagagccacagtgaatttgaattttgttttgttttttaaattcttgggcactctaatccaaacacattcctgtattgcatgtttctcacaaactgacagatacataaccttcccctgccctcatcgtggaacagtctttatgaggtttcaaattcgggatccatgatgaacatcatttaacacatgaattgtctgaagttatatatgcacatttatttgggtgtttgagtgaatgcatgtatttatgggaaagaggcccagttgtaataggattctcaaagagatccagaaccatctaaaaaagtttaagcaatcctagtataggaagctcctttatttgacaggaagctgataagattatctctagggtcctaagaaactaaggagatgatgttttaggtgagattgctagaaagccttcagttcatgtatttttgtcacaaacaccaggtactataaaaagatcatttaaaaaaaaatgttcagaggctaacggctttgagtcaacctcctcagtatgcaacttataacacgtgtggcactgaccataagggtttgagaaggaggagtaataaaaatgattatcaactgctgtatgaaaatcgcctgatgattcgtaataaggagcttacatcattaaataatgtcactaagcactttcaattagcactgataaaagtctcagagttggactgatttaactactaacaaaatactttaatttttcactggtcctatgaactaacagcctatctcctaggtacctgaagctcccatcatcttctaaatacagaaatactgttactagaaaacagttcttcaaacaagctacttttccattcatggtacacctgaagagtttgcagaagacactcaactcttaaatagaacaataccttcgaagccaagccagtgtcacatatctctctagaggaagaagattatgcatgaaagatcatactcctgataaaggacatgttcacatattgttttaggcagaaccaaatattctaaatatgtgttttcactgcaatgtagactaaattaattgccaaagatgaaaagttacttgctatagggtcctccacttcctccataatcataggactgctgtgactgatcatcgatgctgtaacttgtctggtagaaatccgtgtttaagttttcaaagcctgacattgcaaataatctgtaataaaagagaaatggcaaatattccttatgcccaaggttctactgaattcgttcctggcagtctgcttaagcaaatagaaacacaacaaatattttttcagtaattcggagaggggatgggggcggaaagtacgcagcatttgaacgacggtagcggagagagagtaagaaaatgtatattcttttaagttgcggcccagtaagacaactccaccttaaagagctgatatgccttccattaggggcgaggtcgtgggagttgtggttccataagcggtctaaaatatcaataacaacaaagatgatttttcaccttaggactgggctttacagctgacaaggcgactgcttccttgcaaaataaggcctgcggcctgccaggaaaaagtgcagaatctggaaggtcgcgcctgaggtgcaggggaccgcgtcagggcaagggcttgaatgagagcgagggtctgagcgaaaggaccagggcgcggcgccgaaagacggcaacaagcccatttgcacgggtgtggagagaagctgaacactgtgccacgggcctgggtcactcaccaaactctgaggctgcgctggcggcaaaggcagtagcttcactaatcccaaacaacccccaaactctgtttcagaccctgaaccagccccgttgctacgtgtcacagggccaaagaacggcttccggggcacgcccgctcgcgcaggcgtgttagcaggttgggcaccggtgggcgggaggaggagacacgagtatggagcttgcgcagtatctacccaacctgcggctggcccgtgccaaagaggaaagtgcttccggcagcctggttaggggtggaaccaggaaagcgcaggcgtagcaattgctgcttactcgtaggtaggaggaggagtttctcagacctaggtgatggaggaagactgggaggcgctaaaatgagacagacggagtcccctctcctgtccacaaactacaatgcctacaatgcctcggtgtcagcatttactgtgattcaagcactgtgctaaagtgtttgtatgtattatttaatctttacaacctaatgagatggttaccctatttcccttttgtaagtgaagctattaagtattcattcattctgtgctagctgctggggatactgtggtaaatataagctaggtgacatctacccacctggagttggtggtggagaggggtaatcgaacacatacaaatgcatgtgaaattgctactaatattctttagtgttccataattctttgaaagagtaacattcatctgggaagaagagtctgtaaagccactataagagggttatcaaagggtgagtgggagttagagaagaccagaaaagagaagaaagggcaacgggaaaggaggataagggaaaatagcctgaatattttaggcaaagagaacaatgtgtgcaagatctgggaagcatggtctgaggaaagatgaaaatcgagctctgaacttcagcattattaacattttgagtcaggatgtttctttattgggggctgccctgtgcatgatgcttagcagtagcatccctaatctctagccattagatgccagtactccccccaaccaaccaccaccaccatcaccaccaagttgtgacagctaaaaatctctccagacattgccaaatccaaatgtccttgggggcggtgggggcaacattagctgaatttgtcaaccactcttctaagtggaacctgagtgactggaacagcaagtgaggggagccacataggagttgaggctggaataacaggaaggggccaggaaatatcctgtgggatttgtgtgttggttctaaaagaagtgaagattgtgaactgatgagtgatgtttaaattgttttcttttgaaaatgattgctttggctcctgtgttaaatcactttcccaagatggtggaatcccgaatattgtgactcgaaataagatgctattaactaatgagcagaactttcttcagggtttatagcaataaaatttatcatgagccactgcattatattctgggatcaaaatcctgaggccctcacaaaagaagccagaccattgttggggactagtttccaaaggaacaataaaatttcacttaaaacttttctctcaacaccccccaccccaataaaacaaacagaaaacgcactcccctccaaacaaaaatagcaacaacaaaaggatgtaagacccaaccaaaaaacctaggattgtactctagagaccaacaggcagctgccctttgaggtttttacccattagcgaatttatttgttttatttttgtggatacatcatagttgtacatatttatgagataaatgtgacattttgatacaagcatacaatgtgtaataatgaaatctgggtaattgagatatatctgtcgcctcagacatttgtcattgctttgtgtagagaaaattataaatctactcctagttattttgaactatacaataaattattgttaactatagctaccctattttgccactgaacactagatttttgtgctttctaactatatttttgaatttctgaaattgctcattcaagtgttcaccacctttcatcaatcattttagcatttattggtttaggtatcatctgcacaacttcaggtagaatgaccacatattatgatttgctggagacaattccattgtcccattttctgcctatttttacttaccctcagcataattattaatgttgc

SEQ ID NO: 318702 - DNA, 4001 bp, Homo sapiens
atgcatgtcttaataagcttatgtttttctcttgttaatatgtcttttatcagtctaatttgcagggtcccagccaaggaacctaagctgggtagaagaaaaagcattttcctagggaaaaacaaaacaaaacaaaaaaggggggaagaggtagacagagggaagaggaaagagttgaatttggtacagacctgaatcttttatctacatatgatacaattaagaatgtgaagttaaaacagtaataagtacttaaatgtactcagaaacgtttctcccttttttgggcaaataatcttttttaaaaaaaataagaaaagctaccagcttaccctttacttttagagaccaaaccaagagactgactgagtcgatgaataaaggctctttcagtactggtcaaagaagaaggaaattccatttctacacggaaaaaaaacaaagtagtaaaatttgtagataggcaattttctctcaagtaaaacacacagatacaaaatatgaaaaacatacatagacaatcaaatttattatactttatttgaggttaactttatatttcatattctatttatgtaaattaataaaattaagatattttattaattcaataactactgaatgtctatcagaattctgatattaataaaaagacagctatgtattaaacctaaatgtgataaaggcctctgatattcaccaaaaacgactcctcttacttgttctggaattttgagttggtataatgactgaacatatttaacttggtccctacttgtttagttaacaaaatgtttattttcttcaatgatgagatatgttcaaatattatgaattctcaacatgaaactccattgtctttgctttcaaaactgtacagaattcgtatttcactatttcagagggatttgttatatattgctgaggctttctctttttttaatgtgaatttagaatctctctgtctagaacattccccgttttggactataagattccagagtaagaggtcccctaactaagccagcaggtccgaatgagccctcaacagactgcacaggtcaccgcaggtcagttgctggttctgcattatatgacccaagacaagtggctatctaacctcaagaggtgtggaagatgcttcgtgtgccaaacaagtttaatttaagtgggtagcgtgatgcttcagggtccaaacgtattgctggtgcatttatttatatgtttgatttctttctgctcttctacatctgtagcttaaacgtgccacaattaggtgacacccccttaaaaagggttagggctaaccaatatctgaaacacggtggcttaaccgcccaaggctgctgaaagacgcgggggaaaaacactttcagctagggagcaaagtgcccataaccccattgatccgcagagcacctcgcattccaccgcagggccaacagccgcgttccagacccgggtgccgccgctgaggcccgccccggacggtggcccgggtcttccctccctcttcggaggcacccccatcactcggtgggccgccgtttggggggcgctggggtgaggggggtatcctgactgccagcatggtccctgtccggaacctcacctctctggtccccgtatcggaagcgctccagcgcgatattgactgcgatcttcacctcctcatcaatgcgaatgtccttcagccccttggcccggccgccgcccccagggccacaaggcgaggggccgccgcctccgccaccgccaggagccggctgccgcggggagacgctgctcggcctggacattgccctgaagagatggtctctccgcacgggagcggccaggcctgctagctgacagccaatgacaaagaccgtgggaatccggggccactaccgggaagctccggagacggcctgtgttgggctgaggtcaccagaaaggcctcagtcaccgccacagcagaagtgaagcctgcgccattgatatcacggccaggcgaggagcgcgggcgtaatgacgtcaccagggccggcgcccgtgacctcagcgcggccgccgctgcgcgcctaaaggaggctgtctgcggagctatggtgcggttctcttcccgcgccgcccaccaagggtcgctcctcatcttcttattcactcacttgctacttcgtttagtccttcattaattcctgcagtaagcatgtatgggcttctactgtggacctggcattatgccacgccttcgatgtacattggagaaccagagagccaaggttcctaccttcatggagtttatattttagtgggaggagggttgccagatttagcaaataaaaatacagaatgcttaataatttgcatttcagataaacgaataatttttagtgtatatatttcccatgcaatatttggaaaaatatcataaaaaatacatatactaaagaatgagccactgttgtgtgtcttgcattcttcccttttctgaatgggagattttaatgcaagtatgccacccttgctctatcacgctacacagggtagctgagtgggggcaggtatgtagtacatatttacatagttcatgagttacctggcaatgaggatatacatctggatctaataaagaggactgtgtatcaacaacagatcctggatgcagtgactagatagaattccaggtgtctggggagggtatatgtgtattctgtgtgtggtaagaagggggcggaatatttggtgacaagaagtatcttttcttcctaggcattatatttcccaactctcctgcagttagctgggggccacatggctgagttccggccattggaatgttgctggaactgatgtataccacttccaggattggtctataacaccttccttgaatcttcccttctctgtctttcctggtcttctggaagttcttagacaacggtggaaccactagatagataacaggttcccgattccctgaacgagtgtgatagagtgtcctcaccaacccacattggaatatgacatgggtaagaaataattcttagttgtggtaaactgctgagatttgggaagatttttttttgtaacattatggtaaattgttgaattcatcaaaggtatggcctttgatgaatcacacattcctctgttcacacccttgtattcttccttcccacatggactctgtctttggctatgtaacttgctttggccattgggacatcagcaaatacgagataagcaggggcttgaaaggtgtttgtgcattaaggcttagcctgttttgctgctgagaattcttcttccacaaagtaaagaagcttaggctagcccactgacaactatggcccaatcatccaccagcaccaagggcaagacgtgaaaaaggccataatggaaagtctagtcttagaaaagctgctggatgaccacaactctgtaagcaacccaaagcaagattagcaaaaccacctagctaaacatagtccaaactgttgacccacagaacacataaacaaataaaatgaatattgctgtaagccactaagttttaggttgggtttcttacacagcagtagataactgatacaaagagttagcttattctgactaatatatttgtacaatgataaggctgatcttgggcataagtgactaggctgaaagaactagcttcacccgttccagtttgtacccagttgcctaagaactggggtcatcaacatcttgatatgcctgtaaacaacttgtggcatacgagcatgccacagcacagtggtctggagactgctctcttctcatctataaaattgacctggtagagtaataaagtcttaaaatataaccaacatgattttattattgatgctagggatatttcctcccaccctttgccccctcatcacccctactttgccagccctccatccctttctctcttgttcagccaggtcatttaggggttattatttggggaaatattgtcttaagttggtttcggttctctggaactg

SEQ ID NO: 318703 - DNA, 4001 bp, Homo sapiens
gatgtccctgaataccaatataaagaataaaggaagagatcaaaacctggatgaataatctgtataaacatgggcatatacacaaggtatgactataatattgagactcatcctataaagcacctacaaaagttgattgtattattttatacttatgcttgtgcacataaaaaatatttggcaggctaaaggccaaagaaccaggcactgttctcaaaaggacatagcagattaactacacctctatttgtccttctatactcaaggctacttactgtagttgggttgaccaggcagagtttaaatcaatatatgttggttgagcctggatcttagatgagaaattcacactaacgtgaaattcacacagacatatgtggaaacactaaaaacattttcttttacttcatccaccagtgactttaatgaaagcagagcataataattaatacaagtaattagagttgacaactgaagtgtcaagaaaaccacagttcatctgttatccgtccatctctgttgaaatattagtttactgccatatattaatctatttataaagagatccagacaattagaaaaattagtctggaatcaccaggctgaaggcttagctgaagttaaaagacaagtaaaaatgcctccaaactgtaaaacctgagttggggaataaatggtaaaatgtgtaaaaatttagaaaaaggttatatgtggactgtaaaaaatacactggactcacaggtaattaaggggtgaatcagagttgtttcctaaatggcataagccaaactcttagatatttctaccattagctaaaaggcagagaagcactctctctctctattaatgcacttttaaaaatgaaaattgtgaagtgttctgcccttaaagtggacctttatttcaggtctgcattactttgcttaatagatatggtcctaaagattaaggtggtgatccattttatcttgtaaaaatgcataatttaatctgagttataggaatttaaagctgccctactttgaaggcctttgtgactcaaagatttttttaatttaatttttaaattgagaattacctggcttgggcttttggtctttttataatacgtattgctgtctacttttttttttattcttggctgcctcaagctattcttgcctccaaaaggtgtcagcatatgaataaaaacagcagaaaataattaccctaattaggtcaatgtattaagctgtttctacaactgtttctcttaaacaccttatctttgtagtcttggctcattagaaattcgactagtggtaagtatttatttttttccttcaagggggtttttgctttgctaagcctcgggcatttggttcgtgcaagaaatcacagaaactgctccagcggactccgaaaggagcggaaaattcttttgtttgggggccatgaggggtgggggaggggtggggattctggtgtaagcttttggcttgcattcgctttctccctccgaaagtgggcgacatcaagcaagtcccagttacagaaagaacccactgcagggcgtccagtcacttgcccagtgaaaagactgtaatcagacaactttaataaagggagagcaggagagtggtgacgaatttccacattccgaacaagcttgtcgaaagaggagtgcagggaaggagcaagaatgaggcactggaagacggtgagcggggccttgccacagaatcccgggcccacctgctttctcacagtcgcgacagccggcccggagaagggcagcccagcgaagggcacgccccgcgcgggtgccagggaggccggcaggggcgtccgcggtcgctgctcacctgcgctccccgctgcccggcccagcccgcctcgccaccgagtctggaagcccacactcacccctttacccgggaaacgcggccggagccggcggcgggtcgggagtccgagatggtagatccccctccaggcgcctcgctgacattttgtcccggacggaaaacctccgcgcgtgccccttaaagacacagcgctgcattcacacgtctgcggggaaaggggggccgtcacgtgtggccttcgcccgaaagcggtaggggagtcgctctgaaaccgccaaggatcgcgagcgacagatttgtgttggccagggttttaagatgacgcaatagctgagtgtggttgaaatgtaactattgttttacaactttgcattaaccttccaagacctgaattcccgggcctgagtctcagagcgcggtttgcatctttgcaggctgtaggcgcatgatgtcacaagttattggaagaaatccctccaacctaggttgggacagatgaaggcggcgcttattggtgttcaccaaaacaccagcatggtgtaccagctttggctagatgatgctcaggtaacgaacaacccctgcaactcagtggcttaaaggtccatttctcaagcgaattactgtggctgcagggagctttggcagtactccaccagttttcttcactccaggctgaaaggtcaacttttctgggccatgctccctgctgggctggtaaaccaactttgagggagaagggggaagtccagatatgtagtgtttgctatttctatgatgtaaatgctcccacaatggccgatttcaagctacaaacagtccaacaagtggcttgccaagttcctggaaatttaacaattagctcctgtacatgactggcacaagctgctttccaaactcacattccgcatgcctcagttctgctcactttctattggtcaaaacttgctgtcagtgggtggggaagtgtacccctctcttaaggaagccttgcaagtcttgtgacaatgaaacaggagagttccctgatttcctcccggcccccgccctcccacagccctttgcaggacgtgcaacagggttgtggctcgtgtgttcggtctctgcctgctgaaaccccttatgggaggtggagcatgcagacggacgggtgcaggagccagggtgcaaaagctggggcgctgggcttccagccccacggcagtgtccaggggcaggatcccgtgattcccggagcccaaatgggcgtgtgttacagtgtgctcttttagccttaccatcagctgacggcttaagtgttaaccagctcaatagaccctctgcctttttgcaagcgcagagggtcagtgtgacagtttctgtatctcagctcttgtctcacctcccagaagaatcaggtcacacatggacttgaaggatggtgagtgccggggtgggggcgggggtagaggagttgggggaaggttgggggtgtttattaggtggtaggggtggcactcagtaggatggatggggagctggaaagggggtggagtagggagatgatcttcccctggagtttaaccgtccagcggtggattctctaactgtccccagctgaactccacccaatattccttctcttttctctttatctgcggctcttctgctcttctgctcttctgttcatctgctcatcttttgctgctggagcctggtgtctggagtttatacgggtacaggatagggggtcatggagggccaaaaggtaacttttgggcacaagaacgggaatgcctctcttcatttagggccatgggtttccaggcttgagggtggggcctttgccagggaacggccttattctacccagtagttccctgtctactgtccctatcaacaataagtgagctgaataatatccttaaaagaagaacaagaaataactgggtacaataatacaatccaccattccaataatggttttggaggaagaaactggttgggtatcttcaaaggcagaggtccccaaccccgggccatgaaccagtaccctttgtaccctgttaggaacctggtggcacagcaggagttgagtaaggggcaagcaaatgagggaagcttcatctgtatttacatccgctccccatgactagcattgccgcctgagctcca

SEQ ID NO: 318704 - DNA, 4001 bp, Homo sapiens
caacatagtgaaactctgtctctactaaaaatacaaaaattagctgggtgtggtggcgcatgcctgtagtcccatctactcgggaggctgaggcaggagaatcgcttgaacccagggggcagaggttgctgtgagctgagatcattgcagtgagctgagatcacgccactgcactccagcctgggtgacacagccagactctgtctcaaaaaaaggctgggtacggtggctcatgtccataatcccagcactttgggaggccgaggaaggcggatcacctgaggtcaggagtttgagactggccctgccaacttggcgaaacctcgtctctactaaaaatacaaaaattagctgtgcatggtgatcccagctactggagaggctgatgcaggagaatcgcttgatctgggaggcagaggttgcagtgagccgagatgatgccactgcgctctccagactgggtgacggagtgagactctgtctcaaaaacaaaacaaactggaaatcattacaagatctgttaagagtccattcctatccaccttgactatgtctctcaagtatattttaatttaaaatttatctgttttgaacagttttaggaaaatcaatttaaagtattcttctccataaccctcaaaaagggagaacaggtggcaagaattttcaagggcctcaaagatgaacttactgcccaagaggcttgtgttttagaacctcacaatttgcacttgcgcttttgtggtatttaggaattacaatatcctaaaaaacgtaaacattaaaaagcatcatgataaggagatattgttaaacaggcatgataatggtattgtggttgtgtttttaaaaagtcctcatttgttagatacagacaattatttacaagtgaaataagatgtctgggattcctttgaaatacgtacttcagcacactcacaaacatgcacaaagcggggtggagataaaagaaatgactggccttaagttggtaactcttgaagctggatgatgggtatacatcattacaccgttctattttaatgtattttggaaactttccataataaaaagataaaaagcattatcttaagatagatatcactcattttaagcatgattcttttgagagattatcttcagatgcttaatgaaagatctgatataacaaagtaaaatgtttttgcaagtttatgaagggtagatatgaaaaagtattacaaatgagaaaaatcagttaaaagtgaacactcacaaaacaaatatttagggaatgctaatatatatatattccagcagtgaaaacaccaaagtgcagctgtaaacctaaaactccaaaccaaatacaattcaacttctttctagccactgcgtatgcaagatcatgataggcgcaggtgtctggggaggcagagcatttaaccattacattttacagttaaaatcaatagccaggagaatgggggcaggaacttggtggctgggcagacgctccaggggcaaacgcctgggatcgtggctttgtcacttacaggatgggacctttccaagcctcagttcctccagaggggataacagtacctaccttacagggttgttaggagatttaattataagaatgcatgcaaataacaagcagctcttaactgataggacctgatggtgttactgttaaggacggagatttttacagcctcccgggtgagataagaacgccagctgctaggaaaaaaaaaaaaaagactcagcgcggtctccgcccgcccgtctccaagcctgaggcgcaggcctatgggatgcacgggcttcttttaggcgcccgtttcaggctccagtcccactctccgctcagcctagggcccagcctctggccgtcggaaccagtagagacggcggttcctcgggtccaacccccgggcaggaatctgcggtgcgcctggagagagaagcatccgcaacaacctccgcctcagccaggcccgggttccatccgggttctccagggtgcttcccgcccgcaaactgggagaggcgtctcccacacgcaggcgcagtagcaaagggctgtgggatgggctggctggcttgagtattgagcatgcgcgctagcccttcccaattttttttttaagattgtgtacgtggaacaagaaatcgtttgtttattgtgtctgccagagaggatgaactgtacaatttcaggaatggaaggggctgtaaactccacatagttctttttaacatgcagagcacttaaacttttatattgtgtcgggctttgagcttggagataaaacgcctgataattgccatgttccatgtggaataaatgagagaaaaagagaaggaagctcattgtaatttcagattagacatttcagcagtggaggatgagcttccatagcttgtgtactgttgcctatgcaagctgatcccactttccgtaagtgggagcatagggatgaatttccatgtcatcatcatatatctgaaatatttttattttaaattctttcaacaacatgatttcaaagaaataaacccatattagagaggttttagagaaaaatcccaagtagaaactaggaaacgttgttgaaagaaaccggaatatagccctttcctgtttgggggtctttccagaattcttataaacttaatgagtttactcatttttgtacaatcttgttagaagcattccataagactagtgtgtgtgaggagtggtggggcgtcaacgaatgtgggccagatacatcattttcaggtgttaagggtgagcctggtaaatattgacgggctgctgaagttttttgtggatggaagaaactgctaaagaccagccttgttggtcaagaaattagggccttcaatactagagaaaggggtaggcttcagaatcccacagctagcttcatgtcctgactccaacggttaggatttgtgcaggttacttggagttaattccatgtgctttttgtaaaacttacatatcatccattaccccatgaaattcttttgaggaaggagataacattatgacaattacagtacataattctcgcactcaaaaggcagctattattgagataataaaatcaaagctcaatctgagtaatgtcctaggcattatgtttttttcttttttttttttttttttttttgagacagggtctcattctgttgcccaggctggagagcagtggcgcaatctcagctcactgtaacttcttgaaccgggttcaagcaattctcatgcctcagcctcctgagtagctgggattataggcgtgtgccaccatgcccagctaattttcgtatttttcatagagacagggctctgctatgttggccaggctggctaggcattacttttccaaaataaaacagaagacatgattctggatattacagaattcttcctaaatctaagtaaaccaggcctcatagaagagggaaagaggtccagaaaggttaggtgacaagatgctgaaattttcttaaactcacagaagctaatccaggttcccctccctgtcccataaacaacttttctgccaaatattagaaataatgctacaaaccactcacagttaagtattgtcatttatgtatctttaacaaaagataaaatacaaaacggacacaacatcagcctttatgttgaaccaccctgtttaggtaggaaaatgaacattgtttttcattcttaaagtaaataggaattaaatctatttgcattgctgtttaatttcataccaatctaaagctcgacactatgtatatccaaagtacttgacaatttgactcagttactcacaccactgtttctgagatgctgacttaatgcagtatcctacaggtggtttttggtagtttagaaaagccagtgagtgggctgttaaaagttgatatactgatgtcagaggttttgttaggctgttttcactgattctactgtcagtattatcttcacagtgttctgagaagaggcttcagga

SEQ ID NO: 318705 - DNA, 4001 bp, Homo sapiens
ccatcccatttttgatctcagaattgtctgacttaatggtgggcgcagtggctcatgcctgtaatcccagtactttgggaagctaaggtgggcagatcacttgacatcaggagttcgagaccagcctgaccaacatggtgaaaccccgtctctactaaaaaatacaaaaattagcagggcatggtggcggacgcctgtagtcccagctagtcgggaggctgaggcaggagaatcatttgaaccagggaggcagaggttgcagtgagccaagatcgcaccactgcattccagcctgggcaacagagtgagactccgtctaaaaaaaaaacaaaaaaaacctgtctgacttcgagccttcttccttcaccaagcttactactctaactccctaagtctgtctgtacatttgaggaactcttcttatcaggcctgaaagggtagatggaaaggagaagaaaaagggattatttgaattaaaaaatataaaaagatatacagataaacacacatacatatactagcagactctgagctacatatagacatgaaaatggagatggcatgaaatatttatgaaaaagaggcagatgtctggatgtgcaaaggctgttggaaaaaaaagctttataagaaaggggttgccgcgcgcggtagctcacgcctgtaatcccagcactttgggaggccaaggcgggcggatctcgaggtcaggggatcgagaccatcctggctaacacggtgaaaccccatctctactaaaaatacaaaaaaccagccgggcatggtggcgggcgcctgtagtcccagctactcgggaggctgaggcaggggaacggcgtgaacccggggggcggagcttgcagtgagccaagattgcacctctgcactccagcctgggagacagagcaagactccgcctcaaaaaaaaaaaaaaaaaaaaaaaaaaaaaagaaaggggcatctggggtgacccttgcattatttgtcagctatgaatctcttctgccactctctcttgttcattaggcgtaatggctatctttcagttctgtaaaaagtaagtttcaggctcaaagcaattatgccactatccggatgctctttctcaaaatcctcgtatgactgttcctttttcatcctttaaatctctgttcaaattccacctcttcagagatgcctttccagtccaaccaacctaaagtgggcctttccctctttccatcacaacagcttacttccttcaaagctgttatcaccagctgtatttacaatttgtggtttatcgactgtttccatcactagaatgtaagctctctgaaagcaaggattttgtcttgaacacctctatttatacccaatgtctggcacagaacggtaggaactaaataaattaatatttattgaaagagagaatgagtagcaaaaggtggtaagatagcctgggaaagcaatcggcattgaaggcagggtgttcctaaggaaggcgctagaataaggaagtaggaaaaggcagctgggctggacactgaataggaaactgaaggtttacgtcggctggaataaaggtgtcggaccggggcttcagggctcccctgtccacgcgtggggttggcggaggggcataaatcactgagtgaccaactgtgggcgttcctttcagagaaaccaaacgcgacagttgtcttcaaaccccgctctgtcccgtgccgcagactttacgcggctgtcttccgcgaaatcgctaacccccggtcaccagacttatcgcccgggcccgagccccccgggagccagaagagtgtttgagaaacggacattctccgccggtcccaataggggtccgacaccagcccgttgacgcgcgtttccccgctcccagccctccagtggacccgaaccggatccttacttacgcttgtctccgggctattagccgatgcatgggagtcgccatcttagcgcggtcaaagccggccgcgcagggttttgggaaactcctcggaagggcggggcttccaaccgggaggccgtagacgtaggcggggccagacaggcttctaaggggaggtatcttagtgccggctggtgggtcgggaggggaggggctggagggtcgggaggggaggggctggagggtcgggaggggaggggctggaggggctggagggtcgggacgggagggactggtgggtcgggaggggccggtgtctccagtatgggtctcgggttctcgggccgaacagggtttcaaaggatgattacaggcaagaacattatctgtggaaaatgaggacaacattctcgaacgagggatacacatacaaagacaaagaatgaaactttggtgttcagaaaactagaagtagtctggagaatagaaaggaattagttgaccaggattgagaccatcaattgaaagaatgactttagcaagccatggagtgcaaacatatacgttatttctgttttttatgtatttcacagcgttgttacgagtactaaatgggactgtataactaaagctgctttatcaagcagaaaaggactatacaaatattttagaatattttagctgcacctacatctaatgtcagctcacggagctattattctcttaaaacccacgttctctgaaatatatataattttctgaagtgtgtgtgtgtttctgggtcatccatattttttccttttttttttaatttgagacagagtctcgctgtgtcgccaggctggagtgcagtggcgcgatctcggctcagtgcaacctctgggtccctggttcaagagattctcttgtctcacactcccgaatagctgggatgacaagcacgcgccaccatgcccagctaatttttgtatttttactagagacagggtttcaccatgttggccaggatggtctcgatctcctgacctcataatccgcccgcctcggcctcctaaagtgctgggattacaggcgtgagccaccgcgcccagccatattttttcaattaataattaacacttaaaatgttttaggagctgaggacagagcatttgaacaaataaaatccgtgtacacatggaactttctacagacaatgaatgaagactattctcatgggcataagtactctaacgaaaaatatttcagagtaagggattaaagagtgattaggagttagggaaggtgatgatgtgacctttgagcacaacttgttcttcaaaaaaataggctcttacatgttgtgttctccagcttgattttttcattcctcagtgtacttatgaaaatgttttcccggccaggcgcagtggctcacgcctgtaatcccagcactttcggaggccgagaagggcggatcacctgaggttgggagttcaaggccagcttgaccaacatggagaaaccccatctctactaaaaatacaaaaaaaattagccgggcgtggtggtgcattcatgtaatcccagctactcgggaggctgaggcaagagattcgcttgaacttgggaagcagaggttgcagtgagccgagatcgcgccattgcactccagcctgggcaacaagagtgaaactccatctcaaaaacaaaaaaagaaaagaaaatattttcccatgtctgcacatacagatctaattcattctttttatacattatgttatggattacatggatattccccaagtatccagccagtaccctattgctgaacaattagatcatttaccacaacaacagaaagagtaaatcccccgtgttgctataagatgacatcctagtaggattgctgggtcaaaggacatgcaccctgtttttcttttttttgagacggagtctacctctattgcccaggctggagtgcagtgacactatcttggctcactgcaccctccgcctcccgggttcaagtgattcccctgcctcagcctcccgaatagctgggactacaggcgcctgcccccgtgcctggctaattttggtatttttagtagagacagggtttcaccat

SEQ ID NO: 318706 - DNA, 4001 bp, Homo sapiens
gacagctccattcatgttactgcccctgaaaaccttccagtaggacaagatgtggaggaagaaaagagtgatattgatgctcctgacccggtgtaggcacaatgtgtgtgtcttagtttataacaacaaaaaaaatttttacaggaaaaagctatagaataatgtaagggaataaagaaaatatttttatatagctatacaacacattagcattttaagctaagtgttattacaaaagagtgggccgggtatggtggctcacgcctgtaatcccagcactttgggaggccaaggccaggtggatcacaaggtcaggatatcgagaccatcctggccaacatggtcaaaccccatctctactaaaaatacaaaaattagctgggcgtggtggcgcactcttgtagtcccagctacaggcgcgcaccacctgggaagctgaggcaggagaatcgcttgaactcaagaggtggacgttgcagtgagctgagattgcgccactgcactccagcctgggtgacaagagcaaaactctgtctcaaaaatgagagacagagagaataaactccgtctcaaaaaaaaaaaaaaaaggtcaaggagttaaaattaatttaaaagtttataaagttaaaaaagcacagtaagctaaggttattaccttatttttaataaacttagactaagcataccgcatttataaagtctacagtagtgtacagtaataccctaaataatatcgtaggccttcacactcacataccactcactgactcacttaatagctaccgacagccctgcaagctccatgcgtaagtgccctattcagctgtaccatgttttcttttacactatatttttacagtatcttttctgtgtttagatacacaccatccttttacaactgcctacagtatttagtagttatactgtacaggtctgtagactaggagtaacaggctatcccatacggcccagctgtgtaggtttgtgcaagtacactatgatgttcacacaaccacgaaacggcccaaccatttctcataactataccagttcttaaggggagcatggctgtattaagccaccaccttttttgttgttgttgtggtcgttgttgagacggagtctcactctgtagcccaacctggagtgcagtgggcgatcttggctcactgcaacctctgccgccagggctcaagcgattctcgggcctcagcctcccgaatagctgggattacaggcgcgtgccaccacgcccagctaattttttgtattttagtagagaaggggtttcaccatgttgcccagggtggtctcgaactcctgagctcaggagatctgcccgcctcgacctcccaaagtgctgggattacaggcgtgagccaccgcgcccggcctaaattatcaccttttaagaccagcatccctggcaaccccccaagtctcagctcctagtaacagaaagaccccttccacagaagctgaagggtggacccaatgaattggtgtgagaaactccatgccactttaccagcgcactcttcgctgaagtttatgcgactgtcatagtggggaccgaagctgttcaaaaggaagtagattatccttcccctacgtacgtgggaagggggaggctctgggttatcaagagggtgaagtgggagagccaagcggcccacccacaggcggattccagggcggctggacgcacagcccccagcagccggagcccaacagctgaggtcgccgcccctagacagcccgcgctccagccagctcagggacccagcggctaagccttctgtcctcccagcttcccacgcaagttccgccaggccagagggaacgaacgacgagaccctgcagctttggtggctgagaacctcacctcaccgcgctaccgcgcagcttcttaccgcgcacgaatcccccagagcagccgagttggcgagccggggaagaccgccctcctgcggtattggagaccggaagcacatagtgcccgagagcgcgtcacttccggcgtcacagacggtctttacaagcgactcgtgggcgtcaatactgggctgagtttgtggcgcgcttagtgatgggatggccctgtgcaggacgccgacacgaaaagatgaagagttcaatccgtgctgtctgaactcacagtgtagcaggcgagatagacgggaagatcggtagggtgggagatgccggaaaggcttcccgtgagactggataagaaatcaaaaatctggtgaaattgccggcaagagggagttaaggacattccaggcagaggcaaggtaaaggcgcggtgggagtgggtcactgtgataaaagtctgaaaaggacatttgggggctctcttgggtgagaggcagtgcctcatgtccccccttcagtgctcgttgagcattcaattaaaatgttaacactttgtagccaaacaagttctctttttaagaggaaaaccctggatttccaaacggctcattttctgtagcttcttgcaaatggataccaccaccagctgtgcctagtgaaaaaatgcaatttaccaggaccactactctcaacagtttgctcaatccatttaaccttttgaatatttgtccacttctttttatctctgttggcacctcctcccttgtcccatattgtacctgtagttctacaactggtctggggattcattctgccccaactccctgaaatccattttccgtgtcgtaggaacggaacttttgaaaatgtaaatcattacatttaaagcagtactgctgtactgctttaaactctcccttcgcttcccattgttttaggatgaaattcgaactccttatgaagtccctgcctacttccctagcctcaccttgctcagtctctcctttgagctccgtgcataggatcattttttcaatttctcaaatgccgtgtgtaccttgccatctccaggcctttacatttgctagtctctttgtatggtactccttttcttcttccagttactttctactcacccttcaaggctttaagtattttattctcaagaaagccttccagccccctacccccatactagaccaatcccctactgtgtgctcacggcagtctatactttcttatgacacggttcacatttgtaattacacaataattgtgtaagtttattgtatcctcattgcctggtacatccttggtgctcactgcgtatttgtttttttgttttgttttgttttgttttttgagaaggagtttggctcttgtcgcccaggctggagtgcaatggcgcgatctcggctcactgcaacctctgcgtcccgggttcaagcgattcttctgcctcagccgcccaagtagctgagattacaggcgcccgccaccgcgcccggctagattttgtatttttagtagtgatgggatatcgccatgttggccaggttggtctcaaactcctgagttaggcgatccgcccacctcttccctccaaagtgctgggattacaggcgtgagccaccgcgcctggccctcgtatttgttaagtaaatgaagaataagtactttgcgatgtttgtttaaagcaaactagaaagtggcccagttttctttaagagaagggattttaaagtcagtgcttgtaggaatgttgagatttggtatggtacatatcacaaataccgtagttcatatggtggagaaagttttaaaagacaacaaacaaacaacagcaacttccagctcttgaagatagggaacttcctaaaagatgtgtggtagtgctgcccatactgtaatgatctcaaccagctggtttcagggtagtgacatttcatgaagaggttttatctttggtagatgcaaggtacttacacataacataccactagagggcgcatttaactaaaacttttctttttagtggtatattgcattttaaactgtaggtcgttcattcttggaagcaaaggaacataccgatttctttttgtagcggtatgtccaataaa

SEQ ID NO: 318707 - DNA, 4001 bp, Homo sapiens
cctgctcacatggccctgctcatccagtcttgcacacacggccctatacacccggcccttcacacatggccctgcacacacagccctgctcacccagatctagaggagatgagtccacccgtcggccctgcacacacagccctgcttacccaggcctagagaagatgaggctacccattggccctgcatacacagccctgtgccagtcggggaccgggaaggctgcccccgtgccccttttggttcatccctgttggacacagggcaaatcccccacagaatgtaccgcacccccagaggctcagtcagcccagccaagcacagtgaccccaaaaccctttacagcttgagggacagagcagggccacaggagggacatcccaggtataaacacagccggatgcagccccaaaggccctggaggagcctgggttctttcataccagagacccctgagcactgggagagaagacagcctcagacaggaggagcagggggaggagcgagggagctgcacaacctacccgctccctgtagaccccagacagctcactcagggaccctctccccgagaatagctcagggaaacccccctcagactccctcagggcccctccggactctctcggggactccagactctctcgaggaccccagactcactcagggaccctgggcctctttcttgggccctctgggctcagagcctggctgcgggggcactggggagaggatccttgtcccctggagccaggagaagctgggctccccgtgcctgggacgtcagctcccgccctcagatcctggctccctcctcctctcaccctgggacaaacacagactctccatggcaaccaaatagaaggggtggagtgcggggccctccagtcaccctgcctggcccctggaccgccttctagccaggagttcagggttgacagccatctccgcagggcagcccagaggccctcgcagtgtggcctaagcttggcatggaaacgcaggctgccgacctgcggggcatggcgctgttcctccttggcaccaggggcaaggagaaaggtgctggccatgtgcaaaatgctgcgcagggattttagcggaaggctgccagcagggcgggtcctgcgccacgccagggggctgctgtccctcctgacagattccctctccggagccccctcagccaacgctgtcctgtcctgaccctaagcaggggctgcacagagcatgagtggccactgggcccacctgcaggctcaggggacatagtctggcccagggcaggtgactggtgccaccgggcagccatggcccagaccccacagccaggtccatcgcaagttcctccaggaacccctcccgcttagaccatgccacgatgaaaaggataccacgtaggcaatgtatttccacgcgtgaggcaggaagggaatgaagatcccgaaggtggccgaggaaaggcccacgaagacagcccaggtcaccacctggaagtagtgcaggggtaacgaccagccgttcactctggagatgcggggcggcaagaccagcttttcattattgagtatggcttctggggtgacggaacactggctcccggagcgggtgtccatctgcaggacacagaaggggaggacctgcgccgtcagatcctgggagggccggccccgcccactgtcacagagaccaaggggactgggaatgcagccgccaggaccagcactgacagccaatggcccagcactgcctggggccacgttccccgcagagggagcaggggctgggctggagtcggtgcagggccccgcccaggggaatgaacagacatgctgcagaatgtgaccccggccagagccgagtggcaacggaaaacggctctccagggtgtggaggacccagtgcccgcgcgaccgcccatcagttcccctgaggatttgttacgttctggggagtgctcgacagcccccacacagcgacaggtcccacaacccgttcacgaatacacaggcccacccaggactccccaggtgcaagaagaaaacccacgtcagaaagaggccacactgagcagagggctgcgcctgtgagaaactgaggcaatgcctgaagagctcgtgagccgttactcactggtgcaacactgaaacctgccagatcctccctgagaggcttctctgagcttcccagaggagcaggacccgagagctcacttcacagggtcctgtgtgtctccccttccacaggacagggaagcccgtccagccacgcggggctggggtctccgcccgggtggacagtggctgggaggttctgaacacgctgcggctgctcctggccagtcaggtggggagggcggcaggggtgggagggacgtggtgtcacagagcggcagtgaaagacactcaacggccgctacggggtggggggttgatcttgaggggctgggcggtctctacagaggagggttaggaagcttcgccacgttatgcctcgctcaaagtccttgttgtctctttgggaaaaaaccttcagaaaatgaagttgatattaaatgtatttctttgagaagagagacattgagaaatagttaacaattcttcgttcttgcagtcgtgaacgtccatgatacagtggctctgcgctgcctttggtggctcctccctggtcctctaaatgtgacaccaggcggatgcggggccacaggaccctggggcttgagtcacacaagaatgtctctgggagacccgagagactcacagttatgaaacaggaccatggttctttggccgggcgcgggggctcacgcctgtaatcccagcactgtgggaagccgaggcgtgcctatcacctgaggtcaggagttccagaccagcctgggcaacacggcgaaaccctgtctctactaaaaatacaaagattagcagggcatggtggcacatgcctctaatcccagctactcgggaggctgaggcatgagaatcgtttgaacctgggaggtcgaggctgcagtgagccaagattgcaccactgcattccagcctgggcaacagagggagactccatctcaaaaaaaaaaaaaagaaagaaagaaaagtcaaagttaccaaggaaggaaatagaaacacagaaagacaaccctgtacattaaaaacacaattcccagttaaaaacaaaacccaaatgaaagtgccaacaaacagaaatgatgtcgccaagtcacattggtaaaacctggaatatcaaatccaggaaggaccacagatcttagagaggagaagaggggaatcgctcagcggccttgagccttgagcctggagacaacacgttcatctgtcaggatttcagaacagaaaggtggagagtctgtgagagaaaaaagaaaacactgaagaactttgagaagactgaagacttcaggtcgaaactgtgcaccaagagctggaaaggatgattggaaaaagtaatacatccaaattagagaaaatgtgagcaagccagggagacagaccccacagaggacaacgagcagcggggacagactccacagaggacagtgagccagggggacagaccccacggaggacaatgagcagcggggacagacgccacggaggacagtaagctggaggtacagactccacagaggacagtgagcaagggggacagaccccacggaggacagcgagccggggggacagaccacacggaggacagcgagcagcggggacagaccccacagaggacagcaaaccgggggacagaccccatggaggacagcgagccgggggaagagaccccacggaggacagcaagcagcggggacagaccccacggaggacagcgagccgggggtacagaccacacggaggacagcgagcagcggggacagaccccacggaggacagtgagcagcggggacagaccccgcggaggacagcgagccgaggggacagaccccacgcaggacagcaagcagcagggaaagaccccacggagga

SEQ ID NO: 318708 - DNA, 4001 bp, Homo sapiens
gacaacttgcccaccagtattcataaagctacaagaattggaacacaatattactgacttatttaccagatacattgttgaccacctactgtatactaggcaccattgcatggggtaggggtggatacagctgtaaataaaacagataaactctccgcaatcatggatgttatagccgaacagggaaaagcatcaatggaacaaattaaaattctaccaacctaaatggttcaaatacacatgtatttatgtatgtgtgtgtatatatatatttcattcaagatatgaaataagtgacatttcatatcaacgaagaaaaaattactaagtaacttgtaacaaaggcttaccatttggaaaaaaataaaaatgtacacaaaaaatgaaagtactaagagaaactacaaacatttttgtaatctcgtgggacagacagcttctctgccagtgatgtcaaacacccaaacgtgaagaaaaggttttcatgtgtgaccataagaacctgtgacgtttctgcacagtcaggaaacatgcttatgtatcagatacaaaattaaaatacaaaatgcaaactgcgtgaaaatattcattagtgttcaaaatgcaaatgtaaacaatcctatcttttgcacctctcagaagttcaagagaatactaacattcacagttggtgtgggtaaatctggcactcttacactgcaagtgtttatataaactgcaacttttctggagggaataagacaggaggtatcaaaatccttactgtaccctggacctagaaatttcactttaagagatttatagaataagacaaaatgcaaagatgtatgtagccagatggcctatactgtttataatactgaaaaaaaaaaagaaaaaagaaaaccctaacacaaaaacctaaggagaggattcaatacgacacatccatactttccctcacactcattaaaatgacgtagctctatttaaaatctggtataagtagatggtgtcaacatattccaatgtttttttcagatgtattctctatcttcattgggtgtttaggccagtaaaaaattacaaggcttaagatttgtgcacttcaaaccccttaccaaatgcatctcatgactcagttttaaaagatagatggagaaaaagctgctaatattcatatttctgtttaaaaacaaagtacaaagtgtttctatgcttatacacatatccacgctgccatgcagatggagatagattttgaatgattgttttaatctcaattttccagttgtgctacagtgaaatcgcttaaggaaaaaaagaaaagattccccgaggtcgaaacctgcaccaggttggcctccccattcttattgtgagatgggaggggagcccacgccagcgctctcggaatgagatccagagggcgggtccggagacccggtttacacaaagggcagatgctgcacagggagacccagcctctggcccagaatccccgggatgtccgcgggttaggttcgctccacggtcgcagcgtgtcccgggacaaagctgcgcgcggctggggaaagccagggaggaacccgggtccgagcgactcttggaaccttgggcccctccctgacccgtggtggccggcgtggcccttgttcgagcccccatccccgctgctccggggctgtgattccacctcggcgcctgcccaggacagcgccgaaggacactcagctgccagcgtgctcccgccgccagctcctggggaagagggagcgcacctggagccggaggcccggcgctccacaggcgcagtgaggccgcacccccggcccatctgctgcgggcccgcccctcaaccctcaggaagctggggcctcgccccgcaatccggagctcctcctgcgggggcctacaagactcacggatggcgcgcgcccccgccaccggccccgcactcaccctctcccagcaggagcgggagcagcggcgaccgacacagccgcgaccggcgcttacagcccggagcgccagactacatttcccacaaggctgcggggctgcagtgcggccaggccgtcggcgtgtgcgagaacggggccccagagggcaaggctgtgccagtggccagctgaggtggcccacggtgtggcctctgcaggtcatcggtgtgtccaggcgggacgcggggttcccaggcggccccttaccccggctaaagtcgtctctctggccaggcctgcaatctcagcactttgggaggcgggtgggtgaatcacctgaggtcaggaattcaagaccagcctggctaacatggtgaaaccctgtctctactaaaaatacaaaaaaaattagccaggcgtggtggcgggcacctgtagtcccagctactcgggaggctgagacaagaaaatcacttgaacctgagaggcagaggttgcagtgagccgatattgcgccacctcactccagcctgggtgacaagagcaagagagtgtcttaaaaaaaaaaaaaaggcattaatttaccagcaaataaaatattttaaacttttatgtatttaataacataagatacaaaatacataaagcaaacatgggcagaacccatttttaattttgttttctttcttttttgtacagatgggatcttactctgttgcccaagctggtctcaaacttctgggctcaagcaacgctcctgccttggcctcccaaaatgctgggattataggcgtcagccaccaccctggcctcagagtttttaacctaccttctcagtaactaatagaaaagctgacaaaaaggtcactatagatatgaaatatttgaaaagcaaaattagttttatgttaatgaatagacatgtagactactccaccccaaaactgaagaaaacacatggaaaagcatatatttacttaagaaatgatctcatactagtctgtaaagtagcctcaacacatttcaagcaattggtatcacacaagaccatattctttgacaatgtaattaagctaaacattttttaaaagactagaaactttttagaaaagatttaggtaaagggaatatttagaggaaattttgcagccttcaaagcatacagtaaagaagaaaagaaggcagattgggtacaacacatctaattttgttccctcctaacacgtactgatatagttcaggacacacacactcactgccaaaatatggcacctcatcatttgagaaaacagcagaaacaggaaggacttttccacacatctcccacgaagcaggttgtaaaacctaggaagaatttcctaacgtcccctgaagcaggtcgtaagattctcatgtgagatttgcactccctatacctggaggaaagtaacatctttattgctgaagacacacagtcacagagaaaactcttgaacaaacaggccttgctaagttgcccccagtgtattactattagatcatatcctctttgtccatttatatttctctgtgacttcatcaaatttagcataaaaatacacaactttaactgtttctttgggacttcatttccttatgtaggctgctgtgtcatgtaaaacttgtattaaagaaacttgtatgttttgctcttgttaatttgtcttttgtcttaggggtctcagccaccaacataggacgcgcaagaaaaatgtattttgcctcctctgtaccactaaaagcaaatgtaacagattgtttgaaaacttgttaattcacaaggtcaggaaaaacaagtaaggacacaccagcaacattttaaatcttggaaacggatgttattttcttggcaaacctgaaataatgccaaatcccagagagctgtaagaaaggtaaaggccaggctgggtacagtggctcatgcctgtaatcccagcaccctgggaggccgaagtcaggggatcactcaagaccgcaagttccaggacagcctgggcaacatggcgagatgctgtctttacaaaaaataaaggtaggaaggaatggagtctctctactgtt

SEQ ID NO: 318709 - DNA, 4001 bp, Homo sapiens
gagcaaagaaaggaaacaagacaagagaaagtgacaaaatgcttaccaacccagaacaaagagtacctaggaggggcaaaatgtacaaaggaaagatgggactaaggaacagagaagtgatatgcagatgagaagagaatatggtttgtgttctagctactgttgcatttgtcttatgaatattaggaatgtatatgattaacgtgagttggttctattgcttaaatatagaaataagaatgaaaggtgatttttccttaaagtaaaaaactgaaatagaacattctcatgccaagtagtggagaagagatttctagttgtcgtaggggaggaggtgagcaaaggcgatactaaaagggaggctgattttctgaatcaaacccggcagggactggcttggagtcattgacacaattagtctattaggctagtgtaacactaaatatagggacaagtctcagaagggaagaactacttacgtcttatttgttctttaaacactctacatcagtgattttgataacgacttgtcatatgtaacaatctgccaataactggttgagttaatgtaaaaaaataattttctaacggctgtttagtttcttctgtaaaaatccctaccctaatacactgtattgagtataccattgtttgaagtaacaacaaattggagacaacccaaatgcccccgaatagatctaaaaaaggacagaacatcgaaaacatccaaacaatggcccatccaatacttaccacagctctgtaaaacaaaacgaaacaaaacacaacttctgtgttctgacatgtagagaccagtaagataaagtgaaagaatcaaggagttagaaggatttctatcacctgtgtgaaaaaagggggaactaactagttatatttgccagtatttgcagaaattcggaaaagatacaaaggaacaaaagtggttacctaagagggtagggcctaggaagatacctaagcgggatgggaagaaatctttcactggtaactttttatatttttaatatcccagccatatgaatatattacatatttcatattattattttttttaagccttgagctttcacaaagaaatgctcctgctggccaactactttaaatgtcttagagcagcacacccagccctggcattccccagtgatcttttccgtcccacccctgggttcccgcaggctgtcccctgggtctaagaaactcttcgaccttcctctccctacctagttaactccttttctgcttgcaggaacacgcggcaggtcgcctcctccccggtgcacccgtctgtatgcaggtgcgcttccccagatgagggctaggacgcacctccggggtctctattcacacctgcagcgggagcttatcatcatcactcaccgaccaaaaaaaaaaaagaaaaaaaggtggtggggtggagcggaggggaagaaggtcgaatcagatcacccctagaggtctctctgccctcgcaatcactctcaagtcctagagtaccaaacttaactgcagagggagcacgaaatggtgggtattttgaagcgctaatttttagggatcccctcccatccaaaacagggatgaatagttgaggaacaccggagcggggccctggcccttctcggaacgttgagcagacctaacatgacgctggtccgttcaaacgtcgcagttgtggcccacacagagcccagtctgttccaggggcgcgccctgcacccctctgcctgcccgaggtcttccctcccctccgctccccagaaacgcacccactgagacatgtgcggggagggggcacgcttactcccacatcccgcccgagacccgcggagcagccaagacccggccaaaaaggggagggcgtggcaggcaagggccgggggcgggagcgcgggcggccgcggactcacgtactggctgtggcggcgccgcgggaacccggccgccagcgggacaaaagcgcggaccgcacggccggaagaacccgcgccggccctggggcacttccgcgccctctctgggacgctggaggactgactcgatggtccgggccgacggcgccggcgggagggagggaggggagcgcctcctcggctatttattgaggaccagctgcagggcgcgcgctccaggcgcggccaggaggccgtgggcggggctttctgtttccgtgcccattagcttctggggtaggctgggggaggggcacaggtaataaagtaaatacctgcctacctggttcctgaacacgtgattcattgccaggtgtgggtgcggggacgttcccggaagtgggggcctggcgggaaatgggggaatccgggaggggcgcaggacagcgctgggctggggacccattgccttctcagctggttgggggctggcccgagagcaccagcccttcctggtcgtcagcaccagaagcgcccccggttaggcactggggatgcggagtgggagcgcgcccctggagccgtccctgggaccgggccacgctcccacccggggcgccagcttggcagcgacctcgccccctgcccaccccaccgccggtgtcggcttccaaacccagggcctaaaatgactttgaagaccttttttttttttttaaattaatgtttgtgggtacatagtaggtgtccctatttgtcgagtacgtgagatatcttgatacagacaggaatgcaatgcgtaataatcatatcagggttaatggcgtgtccatcacttcaagcatttatcctttgtgttacaagcaatcaaattatattcttatttttaaatatacaactaagttattggctatagtcagccttttttaaaaacagcaacatctaaatatttttcatattaagtttaaataattgcaaagggtatatttttggcatgctgttaatattaagaacaaaattgctttcaagtgtatccaatggaatctaaatccctgaagatttggtattatccacttttaacagtcataagttttacatcttttagggtttttttccttgaacttttatgtccctcaccggctttttattctactgtaaaaatattttcattctatgtgcctcattgaattttatcctagtgtaaaatagttctatgcattgttttattgtttattgtttatcctagcatatatgtccgtaacgaaagtagattacattttttcttagtgttattttctggattattagcaaaattatataaatatttcaaaatgtttactgttaattcttagacaaaaagtgaagtgctttggaagcacaacttgtaatgagatggattttgttttacagctcaaattatttatattatttgaatgaattttacatattgctggggtgagccggtgtttggcatcagctcgacgcctatttttcatttttatacatgtgggtgctgagacactgtgttcactcaagtagagggaatgggcgtttcattgtagcaataagacccttgacggcatttgggcttcacgccacaaccccacccacctcgaagaacgtctgggcgagttagcaggcagcagcgactcctaaggaggagcagagccccaggcccaggtctgcagctttaggtgagagccccagagcgagcagaggattgggagttagagctgcccccaaaggatagtgagacacatgcagctgttgagcacttgaaatgtgggtagtgctgctgaggatctgaatttttaattacatttaatgtaaatagccacatgtggctaatggccaccttattggatagcacagctctagaaggagcttcaggtggtcctcacaggcctccagaattaaagctgcccttaaaggttcatggtaggcaaagactgggtttttacctctaggcagcaagatagaaaaatattcatatctgggttggaacacttcgctcaatgaaaggtggtgtgtgtgtggaagggattatgggaaacccacataaatcatcttgagtcagatgctttttatttt

SEQ ID NO: 318710 - DNA, 4001 bp, Homo sapiens
tacaataatggtaccttttacaacaaatggcatcttaggatgccatggaaaacagtaacttggtttctcaaaaccacaagtttcagcccaaaaagatagtttgcccagcatctcattttacagatgatgaacatgaaaacccaactatatgatgttcccaacgtcataaaatcaagagcaaaagaggccaggtgtggtggctcatgccggtaatcctagcactctgggaggccgaggcaggactctgcccaggagttcgagatcagcctgggcaacataggtcctttctctctaagaaaaattatttattcaaaaaaaaaaaatcaagagcaaaagagactgaactcgggtcttctggctcccaatgatgccctttccattaaacaccgtgcctcctgaagtaaatcaaatgaaaaaaactgcctgggtttaaccaacatctaacatacataaaaagcatatcacgcaggagccgtgtgcgcttatggcctgaatcaaaagtctcagattgactcaaaagtaacaatttaacaatccactgttgtgtttgtctttggtaagatgtataatgaactacagacttcagaaatgagagcttcccttaaagcagggatttcatccggtgcattacaatgactcagtacaatctcacttgcatcttcttccctccccaccattccccgcaggggaaagacccccgcaaggagaatgacaggcccacctggggcctaaactccatagctcaaacaaggctgggcactcatttatcagcactagaaacttcgcacatcttttccagtctaagaactacacaatttacaggtggttggtatgtgaatctctctccttgcaggaaaaactaaaggaacccgatgaacacagtgacacccgcagtttgtcagcaggactcgctagcgatggagcgtctggggaagaagccccacggcggaggaaaaggtacccgagacaacgacacgttatctgggctccgggggttgaagcaccaggcgacgacgcagagaggcgtcgcacgagaagccagtggacctgcgacacggcactccccgtgaggtcccttcagccaccctctccatcccccaagtgggaagaagatgggaggtgggggctggacgcgcggaggcggggactggggggcctgccgggcggcggtggcggctccgctcggcggccgcaggaggccattttagttaaggggccgctgaagggccctgaggcctccacgtccctacacctccgccgtctctacctcccccctactgggggccgctccccgccgcgggccgggccgggccgggcaaggcggggcggggcggggcggggcgggagaggccgccgggctgggccgggccaggcctgcagcgggccggggctctgggatggctggggacgggcgcgggggcgtcgcatcgacaggatccggaccgaggggagagcaaggggcgaacagagagaaggcaggatgccgttacctatattgggccgcagccgccgccgccgccgccccgctgtgggtgaatccaaagtagttgccggtcgccattttggcatcttcccccagccggctgggcactgcggcgggcacgaagagtcgggtcccatggcgggacaagagacacagaggagccgagacgccgagggagggcagggagagaaagagagaggcgccgtgagagcagccctggcggggcccaggccgcggccgcgccgcctccccctcccgcctcgcactccctcactcactcgcacgcccgggtggcggccgccgcctcctccccggagcctgccccaacccccgcggctccccgctgcccggggccagggagggggccgggcagaggcctcgcgggccacattagactcaccataggtgaaagaaactacagggcatatgggaatcatgggctcgggctgctgctgctgaactctgaactctcacccgctgcctccctcctctgccccgctcctcctcagcggagaacagaccgccgcctccgaccgcactgcgcaggcgcgcctgtgctcggcatcctgggagctgtagtccccgccgtcttcgcggctcccccgggcgcgtgccggggcctcggcggtgcgggcgcggggaagcccgcgggggaagaggggcctggccttctccgaagtggtggtgacgccgcgcggccgcggggcgacgggggcgtgtgccagaagcgcctcgcctgtcctctggggagtcggggagcgtgaccagagagagtgacgtctgttcgcctttttctttgctttccactggcttccttaacttttgcatgtgcacttattccctgcctccctgtcttcctcgctcattaatttttcattggaattcgagctgggcaatttaggatttttccttatttcctgctttcccgcagcttttccccaacctctgaagtgcggagggagggagaaggagaggagagaaatagaaaaaggatggagagtgcttttctgttggactaaaagcacaccctaaacatccctcccggacatacctcttgctataccctttcctcgacctgcacccactccctgagccatccggcgtatatcggtcacccagcagggtgtcaggcagtgttgtaggtgctggagatacggcagagaacaaaacaaagtccctgttcccgtggagtttacgttctaggagcgggtatatgtcagccaacagccggtagccaaaacacagaaattctgtctgatggtgactggagcttcaagcataaataaagcagagtaaggaaaataagggtaagggaggtgctatttcatgtagagtgtggttagggagaccacttgaaggaaggaaggacaggcctgggagatgcctgcaggaagagcagcaagtggaagggtccagatgaaggaatgaatgttcaagagcaagaagatcagtctggctggagtcaagtgagagggagaccagatcacgtgccagatctttagtggtaaggacagaacagtacttgcccccatgtaagcatttcctctttccctctgtttcctcgctttcttccctttagtttctcagttcgttttcaaccattctctttcctcttccagtccctcttctgatcgtctagtttctctggccttatgtttcgtgtcttccatcaagtacatatgtactgcctgcatttcacctcttccttaccttctccatgcccatcccccagactccctgctcctcatctctcctcattgttggatatgaacattaaaaggaaatgctggccgggcgcggtggctcacgcctgtaatcccaacactttgggcggccgaggcgggtggatcacgaggtgaggtcagtggccaacatggtgaaaccccgtctcaaaaaaaaagaaaaaaaaaaaaagccgggcgtggtggcgggcgcctgtagtcccagccactcagaaggctgaggcaggagaatcgcttgaaccctggaagcagaggttgcagtgagccgagatcgcgcccctggactccagcctgagcgacagagcgagactccgtcttaaaaaaaaaaaaaaaaaggaaaggaaaaaaaagaaatgcaaagggtgaatcagaacccacccatgaaattcagggctttgtcctactttcttgtgccagagcagaaacaatgcctcaattcttttttgtgccaaccttgctccccacgcctcctacaaaagtacaggctctcagaacctgtctgatttgtcctgttactcatttcagaaagagaaaatgtagaaccttggagaaaagttaagtgtcattatttttgagaatactgatgttttcccaggcaaaagttatttgtgccccaaggatgttgctaggaagaaatacctcctacacataggacattagaactgtattttaaaggtattttgccttgaacttcattgagcagtcaagcttcaagacactgactgtaactgctttgatgaaccggctctattagttactaggctatttgaataaaa

SEQ ID NO: 318711 - DNA, 4001 bp, Homo sapiens
tacaggcatcaaaagtaatgtgtttaacaaacttaaaaaaaagcaaaactctatgacctagcaattctacttacagaaaaaacactagcacgcatacaccagaaaacatcacaaagaactttcactgttgcaagggttgtaacagtgtaaaattttaaacaacctaacagcccaccaatccaaaaatggttaaatcagctttctcaaactgtggtctcaggacccctggatgtccccaggagcctttcagcaggcttgtaagatcctcgcttttcctgctacgtatctgttcaaggctggtgttttcttcatatgcttcaacctaaaccagatagcacaacagactgaacagaagcaaacatgaaaatccagctgtcttctataatgccagacattaaagtgattcgcaaaaatttgaaacaatgccacgctcctcttctaagttttgttttagaaaatggttacttttcactaaaaaattatttaatacatgagtctgtgatttttaaatgaataaaacattttcaattttctgagttttaatttccaaaatggtaaatatactgcagcattaggaaccaaaaactctattggtcctcaataatttttaagcgtaattatccccaatcataatgttaaatgaactgtagcactattctatcatgtaacattatgattgaggataattaatgcggatttggctttatctgtaatataactgtttcaaaagatactttgctcatgtataatcaagaagtcatttttatgaagctttttaaaaacatggggaaatgcttacaacgtaatttaaatcaaggaaagcagacaatccaacgatataaaatctcatctcaagaaaatgcacaggggaaaaaaagactcaaaggaaaaaagtcaaaatattataagtaattgattactattacatggtggaattatgattgatcatttttccttattctttattctattttttcaatttttgccactaagcatgcggtttaatatccaggagaggaaaaaaaggaagaaattaggcgaaaaattatatatagttctactggattaaaccattaaactcccgccaactcaagagacgacaagctcaagtgaataaatggaggaatctgattgaatcaacaaagtgcctattttttgaattgaaaagattaacttaatatcaaatgtatggactggttttcatacaagtcaaactaataagaaagaacatccttagtctggaacataatatttgcaatcacgatagtacaaataagagttaaaaataaggtcctcttttggagttctcaaaagtaccaaaggaaaggcagcgggaaagacggccactgcatccttctggtctctaaccaagagaaaatgcatgggtgcgggaatggacagtgcgagagcaccggcggcgatgagactcctctgcggggaccgagcctctgccactcctgaagaaccacagtcccctccgcagtcgcagcccctccccaggcgggacggcggcgccagggcgcttctccctccgtccgctggggtctctcccccaggagcgccgaacactccggcggcccgggagcggggaaccgggcaaacagccgccgtgattgccctcccggtccagtccggtctggcccttcaggctccaggaggggacatcagattggagggccagggttccccggccagctccgggggctcggaaaaggaatcggtcggggcccaggctctgtccccagaggaagagggccagacccagcgcccaggtcggcgggtccagcggtcaccccgcccccctgtgggaacagcagggctgaggggaggccgagacgaccggtcacggggggctcttacctccctacagcccctgcggagctttttgggaactcgacacgacgtcgcgctgaggagtgaagagctaccccggccgggagtcctgggagtgccagatcccggctcagggcttctttccccgccccaccgggcagcgcagagagcgcaggcgcagaggacgctttcctcttcggctcacacgccccctccctcggcatccgcggccgtctccaggcccggggcgcttgcgcactacgacgcaggttccgagccaagggcactagatttcttaccggaagtgcctgagtgggttgttgggtgacggggacgcctgatgattcgaccttaggtcgggactcggttctccactcgactgcgggatcgggaggccactcgcgtcagtgtctgacttcctttacccttcgctaacctagaggcagcttccccggctccagccttagccctttgctgagcctgcgcggcgttccggtctctactggacagacccgccttcccggcagcgggctaggcctgctctccgcgctgctggcccctcggaaaacataactttttgtttacttcaaactgattttacaacacgctgcccccccgcctcccccgcttcccccgcttccccttcctcctcccggcagcaataaaaatgctcccagccaacgccgagctccaagcccctccagctgactggacattcccagccacactttccttcccttcgctgcgttagttctgcatttttattttaaagcagctggtagaacagctgtctccctgtctaaaagcaaaagctgacttatctgatgtagaaataaaatgtcactcacttgatgtatatttgcttgttgagttttgctatttttaccacaagtttcctataaatttaaatgagacccggcgcggtggctcacgcctgtcatcccagcactttgggaggccgaggcgggaggatcgcttgaagtcaagagttccagacaggcctgggcaacatagcaagaccctgtctctactaaaaatgaaaatgaaaaaattagccaggcgtgttggcgcgtgcctgtagtcccagctactggctgggagtctgaagtgggaggatcacttaagcccaggaggtcaaggctgcagtgagctctgatggcaacactgcattccagcctgagcaacagaaccagaccgtgtctctaaaaaaataaaaaataaaaacaagggaagagacatacatgtgggatcagatacagacagatacagggaaaaagcagttcctcaaaggttaaacagctcacagttcatactgatctttcaaaaatcgcaagaattggccgggcgcagtggctcacgcctgtaaccccagcactttgggaggccgaggcaggcggatcacctgaagtcaggagttcgagaccaatctggccaacatggtgaaactccgtctctactaaaaatacaaaaattagctgggtgtggtggcgggcgcctgtaatcccagctacttgggaggctgaggcaggacaatcaggaccattgaatgaacccaggaggcagaggtcacagtgagccaagatcgagccaccacactccagcctgggtgacagagcaaggctccgtctcaaaaaagaaaaaaaaaaaattgcaagaattataatttttcgagtattccagccacatgtgatttgtgatgaaagatttgagaatcagggttcgcatcttaaatctgcagtttacaactatagttcctgatctttgaaagatacttaatctttaaccttggttttcctaaacaacaaaatgaaatagccaaacttttgattgcctaaagtaatgtgtgtattgagcatctgctttgtgacagtgtgttagatgctttgcttacgttatctcatttaatcctaagaataattctacaaactacagtatgcctttttcctactatgtgttaggcattgttcacagataaaataaaatggggccactgcccatggggaaccacagtctagtagcagagactcacatatacaaatgcatactggggacagaagtatttatacggtaaagtgtgagggtaaagagaatagaaaaaagacacaaacaccttaaatagatcaatggggaaagtatatacaatggtcagttcacaaaatatgaaattt

SEQ ID NO: 318712 - DNA, 4001 bp, Homo sapiens
cccaggctggtcttgaattcctgggctcaagcaatcctcctgccttggcctcccaaagtgctgggaatacaggcgtgagccactgtgcccagccaatgctaataacatgaagaaacccactgagtgaccactcctagagacactatcatgtcaacttgagaccttgggagacacagaaaaacaaatataaagatagaattacaggcaagaaggacgtaatcctggggccaaggaccttccttaacacttcctaaaaccaaaataggtggcttattagatgcattcttggctgcagaggaaaaatgataagcaactcaccctcccatctcagattgaggggttgtcttggtaatgacaattgtcttcccaagcttggattccaagtccaccttgtagtccctatgccgtaaaagctctcgcttgacaggctgcactggttttcctgaaacataatggggaaggaagtcccttcaatattatagttcctcaaccagaaaggaaaaaaaatgcatgaaatccaaaattcaggtcttactcatttcaaaatcattcctgaaaggacacaacagacacttaaagtagcagctggggagaatctcaacacaggaagaaatcataagcaatcctcaactctacagcttttctccactttaaagccagcaaatctaaaaacagtatgttttatattcattgattaactgaattgtgggggagaatttctgaagaattactagaagcaactttttcaaaacgggagcaaggacattcaagaatgctttcaggcagataccctaggcataacggaaaggaaccttctgagagctgggcaaatttataaaaggggaccaacatctaggaaatgcctgttacatgtcaagcactatttattttacatgttacataaaaaatgaaagagttagtgagtgcaaggtggcctggaggtaaagggaaagaagaatgtacacgtttgaaacagatgacaaaataaaacatttctttatgcaatctcttaaacaggagagaagcaccaactccctgatgtacaaggcacagagaaacagcactactaagctctagctgaaacaatcacagatcctgcaaagttccccggcttttctcagactatatgggagggtcttgattgggccaggaatgttctctcccttaagaaatttcaagggaaagaggggggtcactgatagcggtaatgcacagcagcaaaatactctacttaacttctctgtcactactaaggatgccgttatcttctctgtacttcaggaaagcattaaacgagccaagcaaagggtgggcaaggaagcagagtgaaatagagctgaagagcatctcaaaactacttacttcatcccacctcctcgctctcattttgtaaatgcagaaacctaggcccagggaagcagcactctgccagagcttacaccgcgtgggaaggcagcgcacttcaactcccacccgctctccatcatcgcatcgcctctgtgatacccttagcccttgatgtagttagcacccaccatctttcttttctctctcttccgtgagcctcttctcggcgagtttctcatattcatctttgtcccactttcggcgaaagtccaagttttttgtctgtggggaggaaaaagcgtcaagatccgtcgccgtgtctgggcccctagagaagcagggaaccgcgccctcgcggtccaggtgtctacaggacgttttgaaagcaaagcctctttggactgtacgagaagactgaggtagcctcaagaccccaacccgagaaacctccgcgattctactgaccctctgccaaggcctattactggggagttcttgaacctgaaccctgggatctcgaggagatatcgggaagccagtcgggtgcaggagtttgtctctattcaggtctgaaaaaccattccccaccccgcaaaacctcctcctcagacacaacacctaccccgctgcccgacgccatcttcacagcgaagtgaatggcgagctgaaaaacgccgtaaaaagcggcttggagccgtaaggcaagatagccctccaataagcttggagtcttgtgttctaaacgagctaaggactggagggtttctaaaacaggcttgttggccccgcctctgctccaaggagacagcgcaggcgcaagaggagtatgaagcaacacggaagtaagggcgcttgcaattgttttttgccttggatttcaaaacaagcattaaagggtcaagatttagttcaactattttacaaacaaggaaactgaggttcgcaaaacagtggtctctgatctagtctagcaactttgcgtccactgccaagaatttctaaaccttttttaaggccgaagcgccattagggggtctagatgcctctcattcacctgcatgcactagggatatgaccctaaactacactgaaacgtttgcaacagaggcacccttcccgacgcacatataaaaagcatgttttgcacttgggctcttttccttgaagcaatgctaccaccctttggttcacttatttttccatcatctggggaactttatagtagaacataatttaatcagcataattggatttggaaaggccagtcatcaacaacactctagagtgaagcactgtggcataccggctcactatatgttgatttttagcaacaaaactacctcttggccgggcacagtggctcatgcctgtaatcccagcactttgggaggctgaggtgggtggattatgaggtcaggagtttgagaccagcctggccaagatggtgaaaccctgtctctactaaaaatacaaaaattagctggctactcgggaggctgaagcaggagaatctcttgaacctgagaggcggaggttgcagtgagccgagatcacgccactgcactctagcctgggtgacagagcaagactccgtctaaaaacaaacaaacaaaaaaactacctcttgaggagacagggaaagagggagaaactgtggctgctcatcactgaatacagaagcatcatcccagggaggttacttctacctcacagaattctccaatgtacactcaagcattttctatggtctatgcaaacaaagcccttgataacaataacaaattacccaaactactacacttaatattttatttaacatgttatccaaccacttctaaaacagcctccatggcacggtatggaatagagcagtgattctggcacaggaaatggtctccaaaatctcaaaatatcagatctctaccttgtcaagtcatctattaagttcaatgttcaagattatcaagcatacagccccactcttctactgtaagcaatggatgggctagagagatgtcaaatcaacatgggtactgccatgcccttaggatagcatctgtcctcaaagctgaaagcagccattgcccctctttgctgtcttccaaaaactccccagacaggccaatggctgattgtggacaaattcaccagaatctggttccgtagctacagtagaaggctaagtatctggtttctgatctcaatggttcagaatcctgagcctgaggtgactctcccagagccttgctcacagcaacaatctcactacctcttgacaacgttccgtggcacttcaaatttgcctctgcagctagagcatgtctctttcacatccagccatctgcacccatgcagaatagctgctcacactagcccaggagtcctcagggtcttctacagttctgcacccaggaagaatggaggaggcagaaggtacttgtcacccttcctggctagttgttgtgaagtccatcactcaattccagaggaattcagttctagaggaaaccttttctacaaagagcagcagatgggaatcaggcaaggatcaagactcagacagtcgcttctgaatttcagccacaaaattttcccgtttaatggccacctgaaacataagagaatcctcatgtgataaactagaaagtgatact

SEQ ID NO: 318713 - DNA, 4001 bp, Homo sapiens
taagacttctcaggtatcaaaagaacaatttatctacctttacctacaggaactactgatgcctatttcctatggtgtcttgataaactgtctaaaactgcttcaccaattgtttgctaagtattgtatttaaaacaagcatttaaataaaatggcttctttgatttattaaataaaaaaacaacaagaatcatttaccttctatctccaccaatggttcttgggtaaactcctgaaagaatttgtagaagaacttactacaagcagccaaaacagccttgtgagccttaaaatggtgtcctaggtaaaataagaaaaaaaaagaaaatcatacacaagcacgaaaatcaaatgtataactacaaaatagacttaaaaatcatataaagcaaaataggtcttccttcattacgtaactacagaaattattgaactaaatgcagaatattcttggcagctatcttggcaaatgttaatctcaattagatataaagctaaatcttcacttcaaacccctttagttttataaagcctaatttacaacactaggtaaggagcctcttgacactctgttgtttccaattaagtagtgagaagcatatccaactcagttgaaactgctaaataaaaggacaacccaaaaggtcacatatcatttggaaagagagaaaaaaaccgtaagcacaaagctggatatgtctgctatgaaaaacattttaatatgcctaatatttggaagctccatctatggtagacccataattttaaaaacaggttaccttgagaaacctattttcgctaaacagaaaacatacccacgctggatttccttccattatagaggcaactcctaaggctggtaaagaccccattttattttggagattctcaaagggggtatgagtgctgcaatggaatctctcattctcccttcaagaccatttgggaaactagaaaaaaaatcaacacttcccaaatgactcctgtaagggacttctcaaagcttaccaacaagaggctatcaaccaaacattttgagacaatctgtccccaacgacatcatcttgcactcaacaggatgtaagaagttaaaatgagatgaacaccagactacgtggaaggcatgactgaccaaccagccttctgcagcacgctgtgtgagtggacactgacaagtgcaatctggtcccagtgcacacactctgcagactttggtagggagaccatagaggatgggttaaaaaaaaaaaaaaaaaaaaaaaggcgggtgtccgaaggacagaaaaaaactgaagccaaaaattcgctcctctgcccactgccctacccaccgtcgacaattagggtgatgtcagtaaaccggtcctgctctcgctgttcattcaatcggtcgaggatcattttatgatgttcagggaactcctgaaggcattccatcgtctcttcagcctccatggccgtcgggctgctctacaaaagaagagcatgataatgtacacccatgagctcgagccgaggaacaaaacccctaaagcataaaacaacaacaaaaaaaaccagcaacgtgaaaagaaggggggagggtgaagcaagaggagagaaaggcgagggaagaaaggcgagccgagcggccccggagcgttgagaccggagccgcggccgcgggactccgagcctgacctaattggagtcgggagacgcgagctagagcggggtgggcacagcgccggaggttccgagcgccagggcgcgcaagtccaacaagggaggggactcgacagccgtggcggtcctctaacggcccgccaagcccttctgcccggccggggctcccaccgccccgggacccggtccggcccgcgacccacaacgactctcgggtcgcctctccctcccccgccctccctcttctcccccgccccgaccgggccggcactcactgagggaaggaggagcggcccaggcttgcgcgtcacttacgtcgacgcacaccgtcaccgcgtcgagctccggctgacgcggacgccttccgggcgccgaccagcaagggaacgggccacgcccctacccacacccctcagtggatgggcggggccgagcgcggggatttggcgctcacgaagggcgagggcttgctctctgagaagaaaccgggcagcggtgggcttgggctactgcagagcctggcagggccagaagctgggaacctaagtcattgcccttcaacctctcaccctccccagcttgactccaggggcggacacttcccgacccgagcccggaatgaactcgccaaccgtcctcacagcccagctactgcgcggcccctcccgccccgtcctgccccgcccccttccttccgagacctgggttggcccgccttacctagctcgtgggtcgccctccttcctctccgtccctcagagcctcttgttccgtgctttcccctcccagggcataatgcgccccacgcctttcctgacccctaacccgtgggtcgccctccattttcttcgtgagagccggggctccccttctgctcgggccccgctggcgcacgtgcgttcggttgggcacccgggcggccgcggccccggcagcggcagctacgggcgcgagcacgttcgggccgcccggaatcttcctccgcgaagcgcgccctccccgcgccctgccgcagcacgtgcttgctgggctcaggacctggagctgctcagaattatttacaccggatcccgttagtgcaggccttccccactcctttaaagagtccaggccggcgcggtggctcatgcctgtaatcccaacactttgagaggcctgggcgggtggagcacatgaggtcaggagttcgaaaccagcctgggcaacatggcgaaaccccgtctctactaaaaatacaaaaattagccgggaatggtggtgggcgcctgtaatcccagctattcgggaggctgaggcaggagaatagcttgaagcggggaggtggaggttgtagtgagctgaggtagtgccactgcattccagcctgggcgacagagcgagacaacgtctcaaaaaaaaaaaaaagtccagtgacccacagtcagctgcatgtgactgcttccttaattcctccaaagaaatattatatataaatacattttgaggataattctataattgagatttacttatttttttctctcaaagaacttgagaattgggattacggaggaactcaaatagctatatggtaataatgtcatcataacttcaacagatatgtattgagaatcctagtactagacactgagaagtccagctgtgaacaaggtatatgtggtttctgcctttctgaatcttaagtctagtagactgcatagatattttgaacagtaattgcctaggtgcttgctgatgagttttgcaacacctgaagaacgaagtaactgggtgtcaaggaaagccagttgacctgtaagaagagatgtgggcgggcgcggtggctcacgcttgtaatcccagcactttgggaggccgagttggggaggaggagttcagcccaggagtttgaggccagcctgggcacatagcgagaccccatctgtattaaaacaaaaaatgtttttaagtgatgtgaagtctaagtgttcttagccaaaagtatagcacatgcaaaggcaccaagattatagcattcaggaaactgaaacaatgttgctggatagacgcacaagggtgccttataaaaagtgttgaagatgtcagattttctttttgcaaggggaagccttgccgcatggtgacatcctaagatgtactttttaaagagataattctagccccaatatggagaacagattaaatgggacaagctgctaggaatagagatcaactgggagactgttagtaatgtagatgaaaccatgggggaaaatggaattagagagctggtcagaatctagagataggctgggcgcagtggttcaggcctgtaatcccatcactttgggaggccc

SEQ ID NO: 318714 - DNA, 4001 bp, Homo sapiens
tatcaaaagaacaatttatctacctttacctacaggaactactgatgcctatttcctatggtgtcttgataaactgtctaaaactgcttcaccaattgtttgctaagtattgtatttaaaacaagcatttaaataaaatggcttctttgatttattaaataaaaaaacaacaagaatcatttaccttctatctccaccaatggttcttgggtaaactcctgaaagaatttgtagaagaacttactacaagcagccaaaacagccttgtgagccttaaaatggtgtcctaggtaaaataagaaaaaaaaagaaaatcatacacaagcacgaaaatcaaatgtataactacaaaatagacttaaaaatcatataaagcaaaataggtcttccttcattacgtaactacagaaattattgaactaaatgcagaatattcttggcagctatcttggcaaatgttaatctcaattagatataaagctaaatcttcacttcaaacccctttagttttataaagcctaatttacaacactaggtaaggagcctcttgacactctgttgtttccaattaagtagtgagaagcatatccaactcagttgaaactgctaaataaaaggacaacccaaaaggtcacatatcatttggaaagagagaaaaaaaccgtaagcacaaagctggatatgtctgctatgaaaaacattttaatatgcctaatatttggaagctccatctatggtagacccataattttaaaaacaggttaccttgagaaacctattttcgctaaacagaaaacatacccacgctggatttccttccattatagaggcaactcctaaggctggtaaagaccccattttattttggagattctcaaagggggtatgagtgctgcaatggaatctctcattctcccttcaagaccatttgggaaactagaaaaaaaatcaacacttcccaaatgactcctgtaagggacttctcaaagcttaccaacaagaggctatcaaccaaacattttgagacaatctgtccccaacgacatcatcttgcactcaacaggatgtaagaagttaaaatgagatgaacaccagactacgtggaaggcatgactgaccaaccagccttctgcagcacgctgtgtgagtggacactgacaagtgcaatctggtcccagtgcacacactctgcagactttggtagggagaccatagaggatgggttaaaaaaaaaaaaaaaaaaaaaaaggcgggtgtccgaaggacagaaaaaaactgaagccaaaaattcgctcctctgcccactgccctacccaccgtcgacaattagggtgatgtcagtaaaccggtcctgctctcgctgttcattcaatcggtcgaggatcattttatgatgttcagggaactcctgaaggcattccatcgtctcttcagcctccatggccgtcgggctgctctacaaaagaagagcatgataatgtacacccatgagctcgagccgaggaacaaaacccctaaagcataaaacaacaacaaaaaaaaccagcaacgtgaaaagaaggggggagggtgaagcaagaggagagaaaggcgagggaagaaaggcgagccgagcggccccggagcgttgagaccggagccgcggccgcgggactccgagcctgacctaattggagtcgggagacgcgagctagagcggggtgggcacagcgccggaggttccgagcgccagggcgcgcaagtccaacaagggaggggactcgacagccgtggcggtcctctaacggcccgccaagcccttctgcccggccggggctcccaccgccccgggacccggtccggcccgcgacccacaacgactctcgggtcgcctctccctcccccgccctccctcttctcccccgccccgaccgggccggcactcactgagggaaggaggagcggcccaggcttgcgcgtcacttacgtcgacgcacaccgtcaccgcgtcgagctccggctgacgcggacgccttccgggcgccgaccagcaagggaacgggccacgcccctacccacacccctcagtggatgggcggggccgagcgcggggatttggcgctcacgaagggcgagggcttgctctctgagaagaaaccgggcagcggtgggcttgggctactgcagagcctggcagggccagaagctgggaacctaagtcattgcccttcaacctctcaccctccccagcttgactccaggggcggacacttcccgacccgagcccggaatgaactcgccaaccgtcctcacagcccagctactgcgcggcccctcccgccccgtcctgccccgcccccttccttccgagacctgggttggcccgccttacctagctcgtgggtcgccctccttcctctccgtccctcagagcctcttgttccgtgctttcccctcccagggcataatgcgccccacgcctttcctgacccctaacccgtgggtcgccctccattttcttcgtgagagccggggctccccttctgctcgggccccgctggcgcacgtgcgttcggttgggcacccgggcggccgcggccccggcagcggcagctacgggcgcgagcacgttcgggccgcccggaatcttcctccgcgaagcgcgccctccccgcgccctgccgcagcacgtgcttgctgggctcaggacctggagctgctcagaattatttacaccggatcccgttagtgcaggccttccccactcctttaaagagtccaggccggcgcggtggctcatgcctgtaatcccaacactttgagaggcctgggcgggtggagcacatgaggtcaggagttcgaaaccagcctgggcaacatggcgaaaccccgtctctactaaaaatacaaaaattagccgggaatggtggtgggcgcctgtaatcccagctattcgggaggctgaggcaggagaatagcttgaagcggggaggtggaggttgtagtgagctgaggtagtgccactgcattccagcctgggcgacagagcgagacaacgtctcaaaaaaaaaaaaaagtccagtgacccacagtcagctgcatgtgactgcttccttaattcctccaaagaaatattatatataaatacattttgaggataattctataattgagatttacttatttttttctctcaaagaacttgagaattgggattacggaggaactcaaatagctatatggtaataatgtcatcataacttcaacagatatgtattgagaatcctagtactagacactgagaagtccagctgtgaacaaggtatatgtggtttctgcctttctgaatcttaagtctagtagactgcatagatattttgaacagtaattgcctaggtgcttgctgatgagttttgcaacacctgaagaacgaagtaactgggtgtcaaggaaagccagttgacctgtaagaagagatgtgggcgggcgcggtggctcacgcttgtaatcccagcactttgggaggccgagttggggaggaggagttcagcccaggagtttgaggccagcctgggcacatagcgagaccccatctgtattaaaacaaaaaatgtttttaagtgatgtgaagtctaagtgttcttagccaaaagtatagcacatgcaaaggcaccaagattatagcattcaggaaactgaaacaatgttgctggatagacgcacaagggtgccttataaaaagtgttgaagatgtcagattttctttttgcaaggggaagccttgccgcatggtgacatcctaagatgtactttttaaagagataattctagccccaatatggagaacagattaaatgggacaagctgctaggaatagagatcaactgggagactgttagtaatgtagatgaaaccatgggggaaaatggaattagagagctggtcagaatctagagataggctgggcgcagtggttcaggcctgtaatcccatcactttgggaggcccagtcggggaggatc

SEQ ID NO: 318715 - DNA, 4001 bp, Homo sapiens
agccaggttttttacatattacctagaaactctttcgaggtcttgatctttgttgttaccaccttttccttcatccagattttagctaactttactttccatttgattgtatgaaaaaccaaagaagaattttttttttttttaaaaagcaactcacctgggacttcatcattttttgctcttccaaaaggccagatgactgaaaaagcaaaactggtgatcagaatgtttttcatagtccaaacccagactgcagctttcacattcaccaatcttgcaacaactaacatcagaagtcaagtaactaatgggctaccctgtgggataaggttgtttgagccttacagaagtctcagcaggcaccatgtggaggagggatcattctttactcctcttgtacctataatatgatcacatagaagttgaccaaggttttataattggatagatgtgaagatatgtttccagttgatttactaacaacttactgttccccttgggaatcagcaattctatttatagaagattttcatgaggcaataatcatggatagctatataaggatataagtgaagatggagctccttggcagtaagaatgggaatgaccaaatggaaaactgaggcatgtgttccctattcctaaaaagaaccagcagctgaattccaacaattttccaagaactctcttatattttcccccaacttagaaaactcttgctaaatcaatgtgcatgaactcaaaggttaattttaagatgttttctgtttaaatttttattgctctttttcaacagctctattgtctgtatacaaaaatggtgataggttggaaccactggaaaaaaaaagagtataccacaatgcaggaaggtaaatacctggtaaattttcctcagtcccaggacaagtcatgcagacagagctgaactatttcagaggacgtgggggctcccatgacagacagattattttatatgggggtatcaaaacatctggaaggaaacaaaagaaacaatcatactcatctctggatatcccgcagatgctcaataaatgtctcttgaataaaatataaaatgatttaaataaacttagaaagtggagaactgaaatcaaacttttaattatgattttatcagttttgatttgtttggtcttgttttaaaatgaccatttgatgggggtaccatcagaaatgcttagtgggcaatggtagactaagaaaagatgtgaaaaggggttgacctttaagaactcaaacagttgcctatgacctgtggaaatttaacgttaagtaaaggccttccccagtaaaatgtggctgaccaccatgacaccgtggccccattactgtccccatctaaatctcggaattctcaggcctagtaatcatataccctactgaactcccccatgtccatcacatcactgaacacatggacgcccccatcatttagtccatagcctcccatcactgattcctcagagtcccctaaatcactgaacccagttaaacccaccagtcagtccacctgcaagccattcctgacctaatagacaccccctcacctctcacttccctgttactaatcacatctcggactcccacataaatccaacattaatcccacctacttcccccaccagtgatttcataaacctcctaccactgaccctcacgggctcctctcctcccattaccaatcccacagactcacccttcaccgcacacatcccgcctctgactcccagctcgattatcaggtcccaaaaccaccatcaccgcttaatgggaaccgctgtcacatccctattggcaaactctcctgcttcctgtccgcgagcaccacaccgggctcccgaggctgcgccgttccgtactgggcggttttgcccgttccgcatcttcagaggctttgttcaggaagcaacatggctgctccctggagctgtttccgcatggggccgccatcttgagagcccggtcgtcttcgtactagcggaggattcgcccagtgctgagcccgagaatgggctgtaccacagcggcagcgaagggaggggaaggcgacggaaaggaggcctgcgaaaggagcattaaggagcacacttttgcagaaagattttacaagggggattgaagaggaagttggagtgaaccttcctctattggaagcatgcttctgacgaaaggggaggaattttagatggtaccatggacgtgtttgtgaatggtacagccccatgccgggagattcgactgctcagaggggaagcgtggaatggtgcggtcctctccagggagatttcactgtgggagagagggacaaaatctgggggctgaacaatcattgtgtactgtaattatgccaataacaacggtaaggaatccttataagggaatttgatattgcagtaataagtaataagaggtcgactgaaggaaaaagggaaattaagagcagggaagaggagactgaggcacaaagagagggaagtgagaagcagagaatcagagagaaaatgggggaaatggggacaaaggagccagcctagaaaggaggagagacgggagactgaagagaaaaaaatagacataggaatagaagtggggatctaaggggtagagcgtggtagacagacagattgagacagaaaagagacttgaaaattggaacagacataagggagagactgagaaggttagatttcagaaacaacaacaacaacatgattttttaaaaatgaaccagccaaagagaatactaaaattgttatcttaacccttagaccttacatcaagctttaaaaaagcaaaatgcatgttcacagaccaatgtttcatttgtataaatgaatacaattttgaatcataattttcacacgagtcatgctttttgatatgttatgaaataggcagcaattttacatttagcaatttatttctcatgtcaaaacaaatgcacttagataagaagacaatgtattcagaaagaacactgttgcattaggaagaatgctccaatctcaaatctgcaagaatcacaatatcaacaaaatgactttttttttttttatagggaagagtaagaagggttagcaggaactttgtagggagaaggatatgagataggggtgtgcaggtggcaaaaccagggcatttctacagaaattgtttctgttgtcatggaattctgagaataagcggttaaggggagatgttttgaatcatagtgcattagtgcagtgtttcaactcaggggaagccaaaatgaaggggcctgcgggaaggagagaagtctgactaaaggttggtcaagacaaagaggataagaaatagttggttgtgaacacttaacctcttcatctctatttagacttccacagttatatcaatatttatttcttgacttgagcttaagacagtgtagacactgagtttagtggtaaaggtatatagtaatgattaattcagatacctcaccctcaaggagtgatgccagtggaagttgtagagtcaggaaaaggccagactctactactattcctatgcggagagccttgtaggaattgtaaaaactttagttcttcatcttaagaattacggaaagctgtccttatgtagtacctaatttaaaaagaagatgttgaaggaacaggaagcctccctcataatgaaaggaagaaaattaaagccatagtacaataccatttcccatctatttgcttataaaatattttctaagtttggcaacactgttaggccatgggaaatatcatgtgttactggtgggacagcaaacttacagccctctttagagggtttggcaatatctagcaaaactacatgtattagttatctattgctgtgtaacaaattacccaaaacttagcaacttgaaattataaatatttattgtcgcatagtttctgtgagtcaagaatgggaacagctgggctgggtggttcaggtttagtctctcgtgatgttgcaatcaa

SEQ ID NO: 318716 - DNA, 4001 bp, Homo sapiens
actggaactgttttggtgtctgcttcctggactagactgcaagcctttccagggcaagggcagtatcttcctctgatactccagctctgaagctcaaccagttccgggtccagagcaggcatcagtgagtgtttgtcaagttaatgaaaggaaaattggggtaggggaggaaactaccaaacaagtgtgaaagtaggagagccgggtgcggtggctcatgcctgtaatcccagcactttgggaggtcaaggcgggcagatcacttgaggtcaggagttcgagaacagcctggccaacatggtgaaaccccatctctactaaaaatacaaaaatcagctgagcgtcatggcagcagcctgtaatcccagctactccggaggctgaggcagtatagaattgcttgaacccaggaggcggaggttgcagtgtgattgtgccactgcactccaacctgggtgacagagtgagactctctcaaaaaaaaaaaaaaaaaaaaggagagagggccccagaaatagtgtgtgtgtgtgtgtgtgtgtatacataaaatacttacaagtgtatataaaaatatatatacagatttatgtgtgtatatattatatatatacatttatgtgtgtgtatattatatatacgcatacacacacaccatttctggggccctgtctccttcttttttatatataatatacattatatatatatataaacttaggagacaggctagacttgtttttaaattggagaagtatataccagggtataggtctgtgtaccttccttagatatggtcaaaatttcaattttatccaattttatccagggcagtcagttcacaaatagcatattaaactttcgaagacaagtctgctcagcaagcaaacaaatcactggagaaatctgatttccctccagatacctgacaaggttagcagagaagcccagatagagttcttgtacatctgggttagcatcaagcagctggctctgtaaaggacagtgaagggagtcacacaagcaggtcaggacagctcttttccatccttctctttctttcatcccatcttacccagtctcaggtcaagtgcagagcaagctggggcgcttcggcccaggagtgacccctaacgtggctttgcatacactgttctcagcaactttgggtcaagtgtaggacacaaagaagctggagccaaagcaaacccagaccagtttctcaggctccttgtccccaccttagaataagggacccagcaagtagaggccagagagctaaaaacgggtaagccagggctcagtcatcaagaccaggaggaacccagggggtaaggagaaggccttccagagccctcggaagtgtggggcttgagagaagggaggcgagaggccctaggaggaaatctggagattgggacgatggggagtcaaggagtggtgaggggcactcggcttggcttaccgggatggcaaagactgtaggtctccgacaggacgagtatagggatgacagtcctcgaatgtgggaaaaactgcgctgtagtgaatgatgaaggaggaggaggaaaacccagggcctgagcgtgagcggcccttcaccctcagcgcgctgggggcccgattcttggggtgcccgcgcccggatggggagcacaagtctgggggtcccggggcgcagcacgcaaggaggcgggccagggggtgtgaccgtcggcgcttccgcagttccccgcgagccgcgcagcgggcgaggggctttctgcctccaaagcccccgactcaccttcctctctacccaccggctgggcaccggacacggcttcccacaggcggcgcgccctctcgcggtcaaagcgcaccccgtccggctcctggccctccagcaactccgagctgctgtaaggcccggccgctccgccgtccgcggcctgcaccgtggccggcgcgggatactccatcttccccgcaaaccctcaccggtagagagcctctcaggcgcctaggtatcgcgagatttggtgggtggtacttggcccagccaacaaatctcgcgaggtttgggcgctgcacccgcgctgccgtgcgggaccccgcgcttattttgctttgctacctctggtacctcagagcgtgtgccgtggattcggaaacctgtcgctgattccgcagcagtgacccccccctcccggagaggctcgtgtggttttggctcatggctctcaccttgctcacggtcagcccttgatacttttcatttcgttctcaaggtcccgttatgtgggagtgttttcgccatttcattcacagggaaactgaggcccagaacctaaaaatggttaactcaagagctcgctactagtaagtagtagtacagctaaggttccatattactgctaataatacatactatttgttgagttccaagtgccagctcccagctctgatcttccccgagactccggacctgtatacatccagttgcctcttccacagttcactcgaatggctaataggcttctccaatgtagctgtcagaccccaaattttatcttccaaccccagagctgctccttcccgtgtctttgggagccaccatctcttgcctaggttattgtagtagcaacctcactggcattcccagcacagcagttccaggaatcctcttatgacaagtcagatcatgacgcttaggttctcaaatcctccaacagcttcccatctcactcttagtaaaagccaaagtccggccaggcgcggtggctcacgcctgtaatcccagcactttgggaggctaagggggggcggatcacctgaggtccggagttcgagaccagcctgaccaacatggagaaaccccgtctctactaaaaatacaaaattagacgggtgtggtggcacatgcctgtaatcccatctactcggaggctgagccaggagaatggcttgaacccgggaggcagaggttgctgtgagccgagctggcgccattgcaccccagcctgggcaacaagagcgaaactccgactaaaaaaaaaaaaagccaaagtccttacttcgaccaacaaggccctgtacaatctgacttcccttaacctccctgatcctgatgtgttactcagtccccaactccttaattcctgtcccagttatccaggcctcctggggtgaatttctctcatatatcttcatggctcagtctcccacttccttctctggctactctatctaaaataccttgtctggctatcccatctaaaatgttacttttccacacacacttcatgtccttctttcctgctttatttcttttatattttaccttttatcttgcttattgtctgtctcccgactagaaggcaagccccaggaaggcagggatttttgtctcttttcttttctttctttttttaaattgtttttgaggcagagttttgctctgtcgccaggttggagtgcagtgacgcgatctcggctcactgcagcttccgtctcccgggttcaagcaattctccagcctcagcctcctgagtagctgggattacaggcacatgccacggcacccagctaatttttatatttttggtagagacggggtttcactatgttagctaggctgatctcaaactcctgatctcataatctgcctgcctcgggctcccaaaatgctgagattacaggcacatgccaccttgcgtagccttttgtctcttgtcattgcacctgaatctccagcactttgaaatagaacctggaccctcctaggtatatacaaaacatttgtttaatgaatgaagcttttaatattactagcttatttcaacctcattttttcaaatacttatggagaatttactatgagctagatgatattttgagcatggaaatatagtggtgaacaagacagggaagctgtagtaaagtattttttattgtagtggaggagagtacaataagaaagttaacagtaggcctggcgcagtggctcatgcctgtaatccagc

SEQ ID NO: 318717 - DNA, 4001 bp, Homo sapiens
aggagaattgcttcaacctgggaggcagaggttgcagcgagccgagatcccgccactgcctgggcgacaaagcgagattcaaaaaaaaaaaaaaaaaagagaaccactagacacgggtggggagggtgggtggtcctccctacagaatccaccactcatgagggcggaccagctcctccaagagaaaaggacttgggctccatcctggctggagatggtcccgggtgaagaactccagttagtggggaaaatccatccactgggatctgggagggcaatgagctcacctggggcctcgcttcccgctgcccagcagccatgtcctctttctggctctcccgggaggacggcgcagtctccagaaggcagatctgagaagaaaaagggagccaggaagaaccccttctgctttccagccctggaatccgcagctctaaaaccccgactcccgctgagaaggaccccgcgcgccctcacagggattcgggaggagccaggagcccgcggaccagagcagcgctgggccgcccggccaggcccaggccccacaggcttggggcttacggaggggacgctggagccgcagtggcagcagcgacccgctgagcccaccagggccagggctcgccccacgccgctgagttcctcggcgccagctggcactgccagcacccactgcaccgctcaggaaactgaggcagcgccggggcacctgccccgttcacgccgctgcgaggcgggccgggactcccaccacgacggccccgggacgacttccctccgcctcaagcctttcccagccggttcctctctctcccgccaacgaatcatctcccgactccacggaaaacggcttttttttttttgaggcggagtctcgctctgttggccagactggagtgcagtagcgcagtggcaggatctcggctcactgcaagctctgcctcccgggttcaagccattctcctgcctcagcctcccgagtagctgggactacaggcgcccggctcatttttgtatttttagtagagacgaggtttcaccgtgttgcccaggctggtctcgaactcctgatctcaggtgatctgcccgccttggcatcccaaaaatctaggattacaggcgtgagccaccacgcccgaccccatgtatcccatttctaacacgatgtttcttttttgagacggagtctcgctctgtcgctcaggctggagtgcagggcttgatctcggctcactgcaagctccgcctcctgggttcacgccattctcctgcctcggcctcacaagtagctgggactacaggcgcccgccactacgcccggctaattttttttgtatttttagtagagacggggtttcaccgtgttagtcaggatggtctcgatctcctgacctcgtgatccacccgcttcggcctcccaaagtgctgggattacaggcgtgagccaccgcgcccggccaaacaccagctctgaagaggaaagcgctgggtgtcccgaggcgggaggggtggccgtcctggggacggactcggaaaccggggcccggctgcgtccgccctgccctcggggtcccggtgccccgagtccgcgaggcccacatggagtgggcaggacgggcccgggaggaaacgccaggcccggcgtccacggcgagccggacgcgggtgcaccagcaacggcgagggagcgccccgcgggggggcgagagtccagatcccggcgcgggggccggtgacagacgcgggggtgcccgccagcgcccacaaaggctttcggagcctcggcagccgcaggcagtccccgtgccgggcgccgcctcctaccggcttggcctgccgccgacgctcacctccctaagctcgagcgtcccgggccgcgcctccccagccgcgaggctccggaaccgccggccgggatgcagcctcgcgacccggctccgccccgacggcgtctgggcgacctcaggcccggcgccgctcaccccgcggcgcgccggggaccaggaggggcggggcagccgctgaggccgctgggaaatggagtccacgagaggacacctgcattcggggaagtgtagttccatgcgtttgaggcggggtcccggctgagctgttacgcgcccacatgccacaagagggcccctgtgagctggagggccccaggttcctggttatagggaagataaggggaggttcgctgagggcagtaacttgcaactctgtgtctgtgggaatttcgggagggagggcgtgggcggcaggaaaacggcccagaacagacctagtgcccctcagttattcaccagaggggcactgagcacctgctgtgtgccaagcacggttgcaagtggtttcacatgtatcaatcaatgaaagaaacgtcactgccctggagaacatttttttggggggtagggagcagacaataagccatacacataattatataacattttcggggataaatgtgaggagaaacagggtatgtggaggggtttcgtcgctgaggtgagaatggacgaggactcccaggaagtgcctgaagcaaaggggagggaggtgccagctactgtgaagccaacggatgtatgtatgtatatgtgtgtgtgtgtgtgtgtatatatatatatattttttttaaactaaatcttctcagttacaaaaagaacaccggctccatttagaaagtttggcgcttccctacttaagaatatgccttgaacatttgaatttgtcaataaatattctccctcagtggcatttttgatagcttcattgcattccattgcatttatttttttaaaaaaaacgtttaattggctgggggcggtggctcatgtctgtaatcccagcactttgggaggccgaggcgggttgatcacgacgttagttcaagaccagcctggccgagatggtgaaaccccgtctctactaaaaatacaaaaattagctgggcgtggtagcgggcgcctgtagtcccagcaactcaggaggctgaggcagagaattgcttgaaccgggagacggaagttacagtaagccaagattgcgccactgcactccagcctgggcgacagagcgagactccatctcaaaaaaaaaaaaaaaaagtagttgcctctgaggagggtactgggagctggaataatacttgcacttgctatttaacaccttgatatacttttcaacattttgctttaccatatgcatgtatgacatgaatgcttttaagagagaaaacaatttccaggcttgcaaaattggctgtatcattagcaatacttccagcaccaacatacagaaacctttgctaacagtggcttgcatcatgacatttattatttgtttaaaaagcgatctagaggtaggcagaaggaactgaccgcagttggtttggtggcttgatgacatcagcgagggctcagtgtctttccgtctgtctgctctgccacccaaagttctggctatggtctccactcaagagcccagcatagctgctgctccaggaaccagttttctcacagccacatccaatatcaggaaggaaattacagaaacaaaaaggactaacttccacatgatgatcaccttttattttcttttccagaagccaccatcccttttcctcctccaacccattcagctcctttccatccttctcttgcatttcattggccagaattaggtcacttcctcacctctgaaccaatcacagggaatttagttcacctgaactgaagcagctccatcatatctcatcatctggagctgagcgcattgctcactgaacaaaattggtgttcttgacaaagaagaggagggcagtgactgttaggcaggcagtaacagggtgtaccaggcagactgactgaccaattaactaaccagctaccatcccttatgaggagacaactgccagcctgtctgtcagaatcacaaagcctggaatctctcacgacgaaaggctatacaatcctgaggccttggtcctatgttaa

SEQ ID NO: 318718 - DNA, 4001 bp, Homo sapiens
cagtaactactcagtgcccagccctgatccgaacactttccacacactaactcatgtgatcccttcatctacgctgggaggtgggcacggctgttattcccattttacaggtgagaaaactgaggcacagagaggtgaagcccaaggcccacaaacagcaacagaggagatgggttaaaacgctgccatctggcttaacagccctacttcctaactaccacctacgctgcctctgcactattgctatcccatgaaacccttcctgccgctagctgaggggtcttctgtgtcctgcgagtcaagcgacctctccaactctgttcactctcgtctcaactagaaagggtggcctcctcattcccactacacaaaaatgaaaacggtctacaatagatttcaagacagtgatacaagcaaagaatatgattcacaaagttaagagggacaaaaaactaacaacgatgcgttggagaagcctggggaaggggtggtgttatgaggattctcaggggtgaaaagagaaagtattcctgcgaaggacaggaacggagacatgggtgagtggaggaggcagggatttttcccacgtgtgtacgtttgctcttagtgacagacagacttgtggtatcttacttgtcaaactagtcacacaatggatgaagattcgtgaacaaactgttaattaaaaaccactagacacgggtggggagggtgggtggtcctccctacagaatccaccagtcatgagggcggaccagctcctccaagagaaaaggacttgggctccatcctggctggagatggtcccgggtgaagaactccagttagtggggaaaatccatccactgggatctgggagggcaatgagctcacctggggcctcgcttcccgctgcccagcagccatgtcctctttctggctctcccgggaggacggcgcagtctccagaaggcagatctgagaagaaaaagggagccaggaagaaccccttctgctttccagccctggaatccgcagctctaaaaccccgactcccgctgagaaggaccccgcgcgccctcacagggattcgggaggagccaggagcccgcggaccagagcagcgctgggccgcccggccaggcccaggccccacaggcttggggcttacggaggggacgctggacccgcagtggcagcagcgacccgctgagcccaccagggccagggctcgccccacgccgctgagttcctcggcgccagctggcactgccagcacccactgcaccgctcaggaaactgaggcagcgccggggcacctgccccgttcacgccgctgcgaggcgggccgggactcccaccacgacggccccgggacgacttccctccgcctcaagcctttcccagccggttcctctctctcccgccaacgaatcgtctcccgactccacggaaaacggctttgaagaggaaagcgctgggtgtcccgaggcaggaggagtggccgtcctggggactgactcagaaaccgggcccggctgcctctgccctgcgctcggggtcccggcgccccgagtccgcgaggcccacacggcgcgcgcagggtgggcccgggaggaaacgcctggccccgcgttcacggcgggcggcgcgagccagaggcaggggcgtcggcagcggcaccggagcggcccgtgaggggcgagagtccaagtcctggcgcgggggccggtgacagacgcgggggtgcccccccgcgcccacagaggccctcggagccccgcggcctcaggtcgccctggcgccaggcgccgcctcctcccggcacagccagccatgccgctcacctccccaggatcccgcgttcccgggccgcgcctccccgccgcactctgcaagcaggaagctccagcctcgtgacccggctcctccgacgtctgggcgacctcaagcccggcgccgctcaccgggcagcgaaagctccgcagagcgcctgggacctagaggagcaaggcggccgctaaggcctctaggaaatggagtccacgggaggacgctggctttctgggaagtgtagttccacgcgtttgaggcgaggtcgcagctgagctgttaggcgcccagacctatgagagggcccgggtgagctgtagagccccgggttcctggttcttcggaagagaaggggaggttcccggagggcagtaacttgcaactctgtgtgtgaatttcaggatggcgtgggcggcacgaaaacaactactacacaattgggaaaggaaaatcccctgcaaaagatgttgacaaagctggatttccacgtgcaaaagatgagcctgtaccctgaccgtacaccatacataaaaattaactcaaaattgattaaaaacctaaatgtgagaccaaattattttataaattactaaagtaaaaagggaaaaaacttcaggatgttggagatggcaatgatttcttgaatatgacatcagaagcacagataacagcaaaaatagacaaatgggactacatcaaacttaaaaactttggctaatcaaaggaaacaaaggcaatctacagaatagacgaaaatgcttacatatcatatatctgatttgcaatgtatcctggatttatatggaacttttacaactcaacaacaataacaaaaccaaataacctgattttaaaatggacaaaggacttgaataggcaattctccaatgaagatatacaaatgagcaatgagcaacaagcatataaaaagatggtaaacatctctaggtataagagaaatataaacccaaactcaatgagaaatcactgcacctccattaggatggccactatcaaaaggatgtaaattggtacaatcattacagaaaacggtatagaggttcctcaaaaaattataactagagctacattaggatccaccaatcccatttctggctatagatccagaggaagtgaaactccgtgagatacctgcactcccatgttagctgcaacattattcaccatggccaagatatggaaacaactatctgttgatggatgaatagataaaggaaatgttttgtttgtttgtttgtttgggacggtgtcttgctctgtcacccaggctggagtgcaatggcgcaatcttggctcactgccacctccgccttccaggttcaagcagttctctgcctcagtctcccaagtagcagggattacaggcacccgcgaccacgcccagctaatttttgtagttttaatagagatggggtttcaccatcttcaccaggctggtcttgaacttctgacctcgtgatccaccctcctcggcctcccaaagtgctcggattacaggcgtgagccaccgagcccggccacaatgtgtttatatacacaaaggaatattattctgccttaaaaaaataaagaaatcctgacatatgtgacaatatggatgaacccggaggacattatgttaagtgaaataaagaaggcacagaaatacaaatactgcattatttcatttacacgtagaatctaaaatagtcaaaatcatagaagaaagtagcatggtgatttccctgtgtgttaattaccaatcttcccatataggtaattccatatggcacaactgtcccttacttgtagagccacgcccaccctgttgccatgaactgcaggtgtccttccatggttgcttgcccagtgcaaggccctgttatctctctctacactactctacacttccacaagctgctgcttctgtttttttttgttgttgttgttgttgtttgtttttgtttttgagagacggggtctcactatgttgcccaggctggtctcaaacgcctaggctcaagtgatcctcccgcctcggcctcccaaagtgctgggattacaggcgtgagccactatgcctggtgtaaaaaagattttttaacaaaaatgagatgttttattgtcttctctttgcaattagagtgaaagccagaatccttgttgtgggccctaaaccatatggcttt

SEQ ID NO: 318719 - DNA, 4001 bp, Homo sapiens
cttctgggatatttcccctgaacatttaatcatgtttcctaagatcgataccacgaactcccagaagatggaaatgacagctttcctctttccatcccgtgtgctgcacaggatcctgtacatagggctcaataaatgcttgtggaggctgtcttccggcccttccacatcttagccccaagtgtgactatatcctctatgaagacagagactgcttcatgccccattctccccacccagcaccagtgtagtgggaagcatatgctcagaactgcctcaaatgtggatcacagagtgagcggggtgaattaagagtagtctcgggacaaaagaggcacattcctcagcagccccttgctaagcccaagacactgggaaaaacttttgaggttccggattcttcatcgttttggttggaccaaaaagtacctggacaaagtctggaaacatgtctaccatctctgaatccagaagccaactgatgaaaaagacaaccttcactcactctcacctgagcagacagcagatccacagccatcccttcctcctcagtcttcctgcccagggagagcagagtgtggacacggtgggtctgcagaggaaaaaggtgtcaagaggaaccctggcgtcaggagatggcttggagagaggaagttacaaccgcccataatgtccatcaggtctcaaaaaagccaccccccgtaatgatgtaaagcaagaagagtgtttactagtttactagggcaatgtgccaaccctacttctatttctgcacttggactctttaacttccaccttcgggcctctcagctacctctaggcaaaccgtgactcccccatggatgtctggagtccttcgctagctttgaactgcacacctaaaagtcgcaatgaatatccagtctcctggggcgccacttcccagcctagctagctgatcctcatcctgcctgccctgcctcaccctttcctccctatggtagccacgataaagaggcttccccgcatccctaccctggtgacagaccccactgctcgccctgagtggtccttccgtggagtgctgtgttctccccaagaaactgtgagcataatccaaccactcagctttcccagcctctttactagatcttcgtcgggccttaccacactttacccaaggtaacaggattaaggcactgtccccacccaaagccagagctttgctgtccctcctaatactccacaggtgccgcctctaatggcacccacaaccagaaacagccgtcgctgcccaaacaccaaccccaggtgggagaggtggaaaccgtgcccgccccacagaaagcaagggaagaggctgcctggggcagccgggcaagtgtgagggcctccaggcccgcgatctgcagcggcgactcagggtgccccctagcatggagccaacctggggctctgccaggccagttccagcgggtgcctcgaccagcccaggggaagctgccacacaaggcctcggttacgcgacgaagcgcacctcctcccaggaagcggtgagtgttttccacgcagtattttcaatcttcacatttacagatgttacggagactgaaaaccaggaggtcgtgacctgcccaaagtcataagggccgggaaggcaatcctgatcctagccccaggccccagttacatctggggcaatgacctcgccactctgcctcggtctcctcctgacagagcgggaacagcgtaccgccaccctatctgttagcagggatgcgcggagttcgttcgggcgatgcgctagtctggtgcctggcacccgagcgctctcggcgggcatcagctattgcttttattatttccgttactcagaagaaaatgcacagaagaaaatcgcagaatgaacaacgacaaaaggctggcatccccaccccagcggcccggcgcacccagctcacctggcgaggcgctccctcccgcgggtctccggcagtccaggccgctcgcggacggcgccccgggacccagtggccaaggggcccgagccgcgtagggctggtcccagaagcccagacgaggctgcacgccgcccactcgctggagaggcccggatccaccccggcccggaagagaccactgcgagcgcctcaaccccaggccggcaatcctagccaagcctggatggcccaagccaggagaacccccgaaaggccgcgagctgtccccgaaaccccgccaaccgcgggagaactaccactcccggcatgcctccggccccacgccgactacacttcccaggggacgccgcggtgcgcgctgcgaactccgggagaggaaccgcctccgccaacgagagctctcaaaggcgacagtgcgcggaggggctgcagtgcgagggagtacgcacgccgcacacgaggcaggaggtctccagctgctggccgtgctgcctacagcccgcgcacttgttaagcaagcggagtagtttgaaaaaacaaaaccggaaattagattcatttaggaggatcagtgtgctgtagctcccaccgctggttgtgattacttttctgttgatacaaaataatttacataatgtatagggtccatgtgagtgcttgttacgtgcatagactgtaatgatcatcaagtcacagtatttggggtatccatcaccttaagcatttatcatttttatgcgttggtatcatttcaagccctctcttcgatttactttgaaatatacacaatattattgccaagtatagtcaccctagtctgctattaaatattagaaattatttcttccatctaactgtatgtttgtacccataaccaacctctcttcattccccttcctttctggccttcctggcctttggtatctatcctcctgttgtctatgtccatgagatcaagtgttttaactcccgaatataagtgagaacatgcagtacttgtctttctgtgcctggcttatttcacttaacataatgaccttcggctccatccatgttgctgtgaatacattatttcattcatttttatggcagaatagtattccattgtgtctatgtatgacattttctttacccattcatctattgctggtaggttgagtctatatcttggctactgcaaatagtgcagtgacaaacgtgagtgcaggtatccttttcatatactgatttctctccctttaccagtagtagggttgctggattgtatggtagttccatttttagttttttgagaaacctccacactgttttccatagtggctgtactaatttacattcccaccaatagtgtataagagttcccttttccccaaatcctcactggcatctgtcatttttttgtctttataataataatcattctaactggagtgagcttatatctaattagaaagtgttagtaaccaaaagagcatgatatttgtataaaaatagacacacacacccccccatggaacagaataagagaacccagaaatcagtgcacccatttacagccaactgattttcaacaaaggtgccaagaacacacaatgaggaaaggactacgtctttaataaatggttctggggaaaactggataataatatgcagaagaatgaacttggaccccttctctctcaacatatataaaagtcaactccagatagattaaagatttaaagactccaaactataaaactgatagaaggaaacatcgggacaactcttcaggacattgatctaggcaaagatttttctttttcttgcctgtgcttttgaggtctgtggctaagacctcaaaagcacaggcaacaaaaagaaaaataaacaactatattaatctaaaaagtgtctgcacagcaaaagaaacaacagagtgaagcaacaacttgagagaaaatatttataaattactcatccaacaaaggactaatacccagtatatacaaagaattcaaataacaggtttgtgaccagccaggccaatgtggcgaaaccccgtctctactaaaaatgcaa

SEQ ID NO: 318720 - DNA, 4001 bp, Homo sapiens
gcatatcctcagcttcttaatctcaagccatagtcatgctagcagtggggctgttttctgagccactggcctacccaccttgtgctttccttgtctttaatttaattgccttccttgtctttaacaaatgactctgctgtcatttgtttcctattgtgttgcatctgatgcttttactcagtaaacaaaactagaatgtgttctgtgatgttgttttagttgagcacaaaattcaatacattatcaagagaaatgaaactgaaaggagcaagtcaagatcgcagacctgcgttttcttctggggccacagttgctgataaatgatgcaataatgccctcgacaatctattccagctacctcttgatctgaagatctatggaaatggagtagttaggggaggtggtagggtagcagtaaaacactttcaattgttattagaataattttgcatccgcaagctggcaaacgctattcacgtctctttacattgctcgttttatgatgctcctaaagaaaatccttgaaaaaaggagaagaaaaaagaggtctgactaatggaacaaaagctacatcacagtctagttctgtcatgttttctcatccttagtaagatgatggttcaattttgaataaagattaattacttgaatgtggttaaagcatagtctagccaaattaatttttaaaatgagagtccagctatttttatcttattcttcacatcccaggtgatttcaatcagtaaatttcatagcagtgaatatttttaaaaagtatgcttggccattggcttttacccattcggcatctctctgaattaaagtattaatattgggaaacataacgagtctctcggagtgaccttgctgacctatttttgacaacatgatttcggctccctcatggcttgcgatgataggtgctggtaacattatcctttatgactaatctaattgaagcaagttagacttttaaaaactagttgtgtatgttagcttgactagcttgctacgccctatttggtgcttggaaaaccaggcactgggtgaatgcttttcaattgcgtctgtaacttagtttttccctcctactgacataaatgatccatcttaatcctcccattctagctgcatattgttttccaaaactaaagctatatgccccaaaacctttgccttctatcatgtggcagatgacatcttccactgacagtgaataataaatttacactcaacccgcatggggaacctgaacacataagctccccacatgcagaactatttccaagtgacattcccttctctctttcccttctacttcagtgatgcagaataaccatcatataacaattaacaatcctcctttagggggatgctgaatggaaagaaaagaacaggagaagggcacctcaatccaggtaacgtattaacaaaaaccccagagcaaaccacagtccttaacagacaccctgataaggctcccaggacacagtactgaggaagagcaaattctccagtgggacacatctcacacgccagtggctcctggttctcccagccacatgatctgtgccaaaattcagatttaacgcagtgtcctctttagtcccaatgtaattctatttctagttttgccagccttagttctgcaaagcatcagtattctcttaccaaaaaaaagtattagctgaaattctgggccatctatcacttataccctttggttaaggactactcccagtaaggtattttctgttgaagatgcccacagcagtatccacccaggaaccttgaaaaggaagcagaaatgattgcatgggtaacttaccagctcctgaggtctgaatggctgcagcagccccactcctttacctgatccctgctctctctgtctctctccctctctctctccctctttctcttgtgtacagattgcagggaacttaaagaactcgcagggacagtgtttcgaatgacttaagaaagagaacaggaacaatacttcgttctctttttctcagatgagtaccttcgggaagaaggaaggaagggaggggagagggaggaagtcaacaaccctttgctttcctgaaaaaaaataaggaaacagaagatagacatctcattttctcttaaacaaaatgttggaaggggcaaaaaaaaaaaatctttgaaaaaaggaattcctcaaatatgttctctgccctgggagctttaaagagatgaaacgccttagtggcctgtcctgtccaaacaaacggtgttccagacaggcaggctctcctgagcctgcagcctctggtatctggtttgcagaactgacacagccgaaagggaacaaatcatgtcatgtcgacttagagcaagggagagcttggcctgttgtgctaaccaaggtaaacctgcagcctgtaagacagtgtcggggctgggcagccaggactcctggcttttcttaggccctttgaaacaccagcattgctgcaattcctcgctgactctagatccttagagtttttccaggatcaaatagcagatttatgcccaccgaactttatacagtggacccaatccagcttccatcactgatggatgaaaaaggaaaagaagcaactaaccacaactgctgccggccatggttatctcagatctgttgtttatattattctatcctctacattcctaaggcgtcttggatttaatcacctctggaaaactggaaggagatttctaatttgttttcaaaatactgtgaagcagcatagggtttagataaatcagccatggtgttcgaaaaaagataggggaggcaggagcagttaaaatggagggagtaacctttatcaaggtagaagacttggggcttcagcaggcaggcatgagcttgcttaggctagttgcacttaggaataagcttggttttaacttctctgatttgtgttatgtctcttgtgtcccttattcatctggttaggaccattttcactgtgaacaggaaccagcagttatgtagacctttgtggcagcaaaagaaaaaccagccttacactacttcctcatttcacccaactgtgaaaaaaatggggtggacagatacacctgattgcaaagagtcatgaaagtgagttcaggggaagaatgattctgattcagtgaccctgtaagattttgattgagtccttattggcctataggattatgtttttattctgacagatatttttctatcatctatctgtctatctatcatctatctatctatctatctatctatcatctatctatctaatctatccatatatctatctatctccctgtctatctagttatctgaatatgtgtgcatgtatcagagagagacatgaagattttgttactcggtaggtgtgcacaagccagagcagagtcccattccttgcatccgccacagcaccaacactggcacaacccatggcactgagttctggcctgggtgacccagcctcaccaacagtggggaacacggatgaccagagacagtctctttggttcgcttagagccacacgccaacacgttcctgtctcctgatcccggctctcgggctctttgccctctgctggccttcctctacatcctgcctttgtagaaatgggaagggaaatgaaaatgaaaatctgagaaagccagggaagggcatgagggaatggagcaggaaggcctaggaatggagtcttttaaagggggagaaacactggggcaaacctttgagtaaccggaggtgaaacaagcaggcagctgaaattcacaataaaaaagcagacgtccttgggagtgaggtggggtgaggagaagcaatagggagggggcaaggtgtgcggggcatcagcagcagaggaaaggagggacccaaggaacaagacgctcatggtaccaactcctcacaggcaggaaaccgcctctgatcacttgaagaatccattgcagctgcacacaggccttcccatatttttactcctctttg

SEQ ID NO: 318721 - DNA, 4001 bp, Homo sapiens
ttcttatcaattccccagcctcagatatttatttagagcaatgtaaaaagggactaatacatgcttttaccacttcagatccctaatcttacttgctagtgaaaagagtacaggttttgatttcacagggacctgggttccagtcccagctgtgacatttatgtgacctttagcaagttatacagctgcaacacccaccaggatgagccggatatggggcggggttggagggtgttggttggggagaggcaactgaggtcagtgtctgggtgggactggattgggaataaagctcccggtctgaggaagcaaacatgccacactcttcaaatccagaaagcaatttagggggaagaaacccccactcacctggaccatggttggcaggtggctgacagccattctttcttctccgatgagccctcttagggacaggcaaagtgctatggaggcaggtgtggagcttcacacctgcaggactcctcaggctagaagggtccacacacctgctattaggagagaactgggtcaaaagctctcatacagcagtccagagcgaggcagtgagcattcacatcctgggaggcctccagtaccccaagcagtgagtgttttggttcctgtttgctccccattctctctcctccttctgagggtactatacattgacttttccctgcagaaagcctgctccaggtccagttctcatgccttccacccaccctctggtctttcccttcagcctcactgagcgatctcaagagaattctttttttgtttgtttgtttgagacagagtctcgctctgtcacctaggctggagtgcagtggcacgatcttggctcactgcaacctccgccttccgggttcaagcgattctcccgccccagtctccggagtagctgggattacacgcacccgccaccacgcccggctaattttttatatttttagtagagaccgggatttcaccatgttggtcggactggtctcgaactccggacctcaggtgatcggctcgcctcggcctcccaaagtactgggattacaggcgtgagccgccgcactcggccgagaattatctctttaacaagttattcagctccagaacccaccaggatgtacccgaaaaggtgggagcgctggggagaggcaacggagggcagtgtctgggttcgactggattggaagaccgctccgctctccctctgcggctttggaacagctgccttatctggcagtgacaggagaagaggaaaaggagggtggtcttcttcctcctcagaaaggaggctaagaaggctcttcactgtcgaagcctctcaggcaaacccttctctggcctcagtgttctcactctctggggcccagtctgggtggcctggagtcacgggtgggcagaagcggcgtttgtgtgagctgggcgggaggggagagggaagggttaggaaccctaatcacacacagccccgtcccgcccctgccgcttcgccaggtccctcgggggctgtggcaggggctgcgcagcggctgcctccggccttggcgagttcctggcgcaggactcggaaccacgccaggcgtgtatctatcacctgagaggaaaccctgggcttctcggagtccgctccaagacacatgccagaggccctggctccatctcctccacaggcactcacagactcgaccctcagcccaggatgaccacccctggccgtcctccctctctgggatcaaatctcagacatacattccgggaagtttggggcattcgatcagcgtcctccagaatggaccacaacccgcacctcctcggctttgcctccgcccttctccccagacgacctcacgaccgctcccgctctccctctgcggctttgaccaccgtgcctggtcagccccgtgtcgctcttcgaggagcctctgccggcggcgagagatcgcaagcgccacatcgcagtcagaacacaatgagctggagtctgcagccgggagccgaactgcgcttgcgcgttgccctgggaacccttgggccgaattcccacaagtctcagggctgctgcagttccgccggccagactccacttcccagagggacaatcggcggagacagtgctgccttgcgcctgcgggaacagggcccggccccggcgctttaggcgcggaaactacctttcccagagacccctccacgccgacctcagcgcgctcattgcaacttacagaatcggttccgttccgttcgctttagaaccaggtctctgccttgcactaaggcgcaggaagatgcagatcagcgaaaagctgaagatggggcaagggaggttagtccaggggagcgacgcccgatcgctgacgagagaggatcgggagggtccggaagacggagtgggaggcgacagggcgcgttcctgactgggaccgcgccgaaaaggcctggaaggcaacagaattgccccttggcctggcaagcgcccgacacttccagcctggcactgcgggcgggccagcgtgtgctggggtggcgacgccacagccactaacgcgtgtgcggtgcgggaggacaaggatgtcgggcagggatgtcctgcttggcacctcaggacagagcccatggtggctggcggcccctggaatgttcgggacgcagaacacttcgtgcttgggaacttctcagaggtggggacgagggagaggaaggcgcctggatgccaggaagtctccatcttggacagctgggtggtatttaagaaggtggtatttatttttgtcgaccatattttgcagagactggcaaggatgagatgatgcctaagaatatccaactggagatacttagttgcttttgaataggtaatttgcatggagctcaggaaggaaagatgagagggttttaactttgttggtcgttaaaaaaaatcaagaatgtgacctgtttgtcacatacggaattgttggccacgttttaggaagcagtgtcagtgactacagcattctgtttggagttttattgaagatttcattccatagacactttggagcacttatgtgtcaagtgcttgacaaggccagggtcagccgctgtgcagcccctgtagcagttcccagggacccggcaaagcaccagagggggaggatgttgtgtgagtatcgctggtaacccttctctctcgcctccctcgtgactccaggtcactcaaactgggctccagagagtaagaaccccgagtccaggggctggagaaatagctgtgaaaaccctgcactcatggagttttaattgtactagaggaggggtcagacaagtagaaagtatttatctggtagtgataacactactgttaggggttagggtgtgatggggcggggaattatttcaagcagcagttttggaagttctctttgaggaggtaacacctgagcagagatttgaatacagtgagggaagaaacgatgtgactgtatgggtaaagtgccttctaaagggagggaacagaaatgctgaccagagagaagtgtgcttggtgaactccaggcttggcaaggtcagtatgactggcgagggcctactgaacaaggaagactgcgagatgctgttgcaggagtaactacaggccttgaaggaaggaaatttggatttatttctgtgcctggaaatgattagatttgaaagagtgacatggctgggcacgttttgatagacgcactggtcagcttcaaagaaggcagacagtggtggggctagaggggatacaggaagaccaatgaggaggcaatgacagcagtccacaattacaagtagcctcccacaattatataacctttccacaaggcatttgctttgagagcctaatgattctaagatattgaagggttttgggtgctatgctcaggagtttggatattattgttttcaggaatttaagaatgataatatgtattgagcactaactacatgttgggagtttttttgtttgagacacagtttcacttttgttgccc

SEQ ID NO: 318722 - DNA, 4001 bp, Homo sapiens
tttcacccatgttgttgaaaatagcagtattttcttcttttttaaggttcaataatattctattgtatgtttataccacattttctttatccatttatctgttgatagataatttgttaccacatatggaccattgttaataatgctgcaatgaacaaggaagtgtagatatctctttaatatactaatttcattttctttggatatatacccagcagtgggattgctagatcagatggtagttctccttttaactttttgaggaacttccatattgttttccataatccataatggctgtattaaattacaatcccacaaacagtgtataagggttcccatttctccacattctcaccaacacttgttatcttttatctttttaacagccattctcacaaatgtatggtaatatctccttgtgatttttatttgcatttccctaatgattagtgatggtgagcatcttcatatacctacctgttgagtgcaataatggttaccatgagtggaggatgagacgaagggaagataggcaaagggtacaaaccttcagctataagatgagtaaatgctagaaacctaatgtacagcattgtgattataattaagaattattataattaataataattgaaatgtgttaagatagtagatctcaagcattctcaccacagccaaaaaaaggtaactatgtgatatgatgaatacttcaattagcttgattgtggtaatcatttcacaatgtctacatatgtcaacacatttcatgagaaaccccaaatacatgtgatttttatttgtcagtcatacctcaataaagctggaaaaaagttagacataaaaaataaaattaggagaaaaatactttgtggaagaatctttatagctgctttagctataagaggaccaaactagaaacaaacaaactaccaatcaatgtaataaacaaatgtaaaataagcatataatgcaattatacttacctttaaaaagaattgtactactgacttaaaaacccacattgaaatgcttgaaaaaacattctgctgagccagagacgtcagtctgacaatataatatatatggtatcattctattcatataaagttcatgaatggccaactattctttgaggacagaaatcaaaacagtggccccctgtggagggaagattggctggaaaggatgtgaggaaacattccagggtgaaataaatgtcccgtgccctgactgaggtgaccatgacatggttgtatatacctgttaaactcattgattttagaaacttgaatttaagaactcaagattggttacaatttactccatgttgattttatctcaaataattaaaaaaaaagccaagacaactgagtaattatagcctttaataccccttttctttcatggataatctggctaataaacatatagttctgaattaatgttaaaacctgacttcatctacttttctttgaagaaagttattttaaaaatcattcttttaaatacaattttattattttttaggtattagaacatctaatccatagttcactcatcattgtcagcatccaaagaagtaaaatgacatttattgttttgtttagtaatacttgagatttttcacttaagaactaattattattattatcgtcatttgtatttcttcccaatagcaaggaaatatttactgaatactggtgagaagccaatggaagagaacaagaatatctaagagaagcagttgttattagttgaaaggtttaagacctaccagacaacagagaatgcacacaccctgcgagagcctcaccttgtgacatttgttctttacctttttattttgccttttagcatggcatgctgagcacctctgagttttcagggaaggagctgacagaaacaggaacagaatagctgggagctccaagattcacattccttgcaggagctggtgtgagtttttgaggctgctgagtaacaggaaccgcagtctttgttgcctggatgtatcctggcaacctgtcaacaaaagggacgggactgagttctctagtaactgatgggaaacagagcaaagtaggtatggatttcagctttcttttaaattgactccaggaactttaccgatggactgagcaaccaacagggacagataaatttaagtcacaggctcttcttgatgtagaaacacagcgttttattttaaagaagaaaagaaaacaatatttactgattatcttattgatcttttctagggactttaaaaaatactgtaacggttaatattgagtgtcaacttgattggattgaaggatgcaaagtattgttcctgggtgtgtctgtgagggtgttgccaaaggagattaacattccagtcagtggactgggaaaggcagacccaccctcaatctgggtgggcaccatctaatcagctgccagtgtggccagaataaagcaggaaaatgtggaaggacttgacttgctgagtcttctggtcttcagctttctcccatgctggatgcttcctgccttagagcattggactccaggtcttcagcttttggactctcggacttacaccagtggtttgccaggggctctcaggcctttggacacagactgaaggctgcactgtcggcttccctacttttgaggttttgggcttccctactcctcagcttgcagatggcctattgtggaactttaccctgtgatcatgtgagtcaatacattttaataaacttcccatcatatacacatctattctattagttctgtccctctagagaaccctgactaatactaataccatctatatagaagagcttgggccagtcgcagtggctcacacctgtaatcccaacactttgggaagctgaggcgggtggatcacctgaggtcaggagttcaagaccagcgtggtcaacatggtgaaacccagtctgtactaacaatacaaaaattagccgggcatggtggcacacacctgtaatccgagctacttgggaggctgaggcaggataatcgcttgaactcgagaggtgtaggttgcagtgagccaagatagcgccgttgcactccagcctgagcaacaagagcgaaactccatctcaaaaaaaaaaaaaaaaaaaaaaaaaaagaagaagaagaagagcttggtctcctctaaaacagggaagatggatagtctccatggctctcaaagcatgttctatgttttggtctaaaaggcaagcaaccacaagatgtagaagctatgcttaatctatttttctaacatgtcctaaaacatagaaaatattttaaaaactaaggccagtatttaaaaatatatctgaagcagtgttttcaagattcgtatttcaaaatactctgagatattaagataattgtagtacaattctacaattaaatattctgcaagcattaaagcttatgaggcaacagtttattgacctgggaaaaagtttacaatatattgctaaatgaaaaagagaagctacaaaacagaataaatagtataatctcatcaaattctttgtgtgtgctcatgtgcacacaaacacacaattaactcaaagaatatacatcccagtgttaacagtggctacctatgagtggtgagattaaggaacatttttactgaatgttccttactggttagcaaaaaaaaaaaaaaaaagaacaaaaacttgacctctaatattccccagccctgctccttgtccccagataatgtaattgggatatggaggtaattcacaggactcttaattctgctgaagtgactcttcaggccacacagtctagagatcccaagggacagtaacgtttcacatcctaacttgcaataacgctctaactattctagatatctaatttatgatataaaatatttctaattaagatgcttctgaaatcatacgatacatatacaaataataatacatgcatacaatgacatagagctgatataatatcagtgagtaaatgtt

SEQ ID NO: 318723 - DNA, 4001 bp, Homo sapiens
cggggcaggcagttcttccaaggcagtgtctaactatagacttgtacaaagaaggggagaagggtccaaatggtctaaatcaaccatccacaccgtttaaatgcagcacataattctatattccaattcactcaaccgtctacatcccctttggctacattttcacatttcacgagtatcagtccagcaagtctgttttattcttcttagcagccgtccagctccccagtcaggtatccaagtgataacactcttaaatctctagctaagaactgggtgagggaacaggggtagagtgctaacagccaccaaaaccatcgagtttttctgcagttatgaaaccaatgacccaacacatcaagcttggggtttcattcaggaccaataacaagaactcattcaaggatatcctttcacagtactattttggagacagtaagaaaaaataaaagggatgaggtctgtagaatgtaaattcgaatcctcgacattcctctccagggagggaacttgaaccttgcacctaaggacacattacccgcaatactaggatgaataaattaaaatagaaaactgttccccttaaggaagaaagcaggacaagagtcaagagggtgcatgagcaggttttctattaaaagcacacggcaacctgctgactagtgaggaaccgatctacagggcaaaaggtacttagaacactcaggccctcccacctgggaacccaaacactagcatcacaagcagcagcagcagcagcagcagcagcaaggacagcagaagcaagagccaaacactgcacccaagtaggctcccccatatcaaattttaatataaaggatgcatatcatagaaatctcacaaagaaccagaaagcataaagtgtaaggcacacagaggcacacccccacacacccacacaaatgcacacagaggagagtaggacatctaggaaggcgactttatcctaccttctcagttttcagtttcttgattcgcctgtggctctcctcctcctcctcttccttctttaccaacatagagtttcccatgagccctgaatccggggcacttttgctaacttcccctgcagcggcgacgctgccactcccagtgcccccgcagtggaaggggctcgcgccacctccattgctcttggccccaaagccatagaggtgccccccggaaggggcctggctgccactgccattctggtggccctgaagcaggtcgtgcttgtccttcctggatttccccgcatccttatcccgcttggcgcctcggctgctctggcttttacctggcttctcctctttgcttttcccacaggagcctgcccccgcggtggcggcagaggtgctggtgctggtactattgctgtttgggttgccgctgccgccgctgctcacactttgacccagcgctgaattcatgccagttgcctctccagggcgcccttggacttcctgcctcttgccagtgctgctgatctcgggaatcccatacaaggcagcagaaggcagagatttattagcatccttagaagttttactccttttcacttttgatttgctggtctctttgtgtgaattcccctggggagcagaggcctgaacagaagcaaattttaggccatcagctaaggctgcggtagcaccagccccactggaggccggacctccacaatccttggagttgctgctactagtggtggtggtggaattattcatctcaaatttctgtctgtccttctccaaatcagcgtccaaatcaattattaaatttccaaccccgatttcccaatcatcgccactgtcataagtatcaactgtatttggatccacaccttttcctgcagtagaaatgttcactgacatcctgaagatgagctctctagaataaaaatccgatgaacttttctttggagatgaggggacattcgtttatctccgctgggctttctctcaaagaaaaaaaaaatcttctaatcttcctcttctttttcctgccccacgaatgtgtccagggattttacaccctcagtccaggtccaccttttcctgtgaagggggggggaaaagtcgaatatttcttgtctgggtgttaccagaataaaaaacgattagtattggggaatcagtaaaggggacagggaaggatggagagtaaggtggctcatgtattgtcctcacagtccaatatcaggtttaaaggaaaataaccaaacccgaaaaataaacctatgacagtaagcatcttacggtagctaaaaagaaaatccctttatcaacaacacaaggataatcacctttttaaaagcattaaattatcttaaggatctgattcaagtccagaaaggtttttgtgttcttttttaaagtttaggatttcagtctggcacatgtgatatctcaaccccagaaacacagcctgaacactcagacaagaaggaagaacacagctttaaacatccctaaacatgtcctagatcttgcaatttagaagaccagaccctggaagttctgaggctagttttcagaatagaatgttgctaaattttccttatttctaatttaggtttcagtacttctttttacaaattgtctgggcaatctgttttttgttcctagtaaggaacagaaaaaacaaccaataactgcccccaacacacacacatacctccctcctatcctcttttcccaaacagcttctacaatttcttttttgaaatatgcatgtcttttaagagcatttctctctagaaaagacagtgttatataaaaagttaaatacctgccttttgagaaaaaaatacatttaaacaattctaccatattcctaggtcagagaattgctcactctcttaaatacggtgctactgactgtacagaaaactgattaagacatacactttaagtgatctgcgccaaggtggcctcaatgaccgcaaatgagtgtgtttgacaaagagcagttaaaacggtttttaaagggatcagcccctttttaacagttgattgtcaagaaaaaaataaataaatatacatacacacacacatacacacacacagacattgcttaccttttaatcctttatcattttttaattaggccagcaaatcaaaatgcctttcccactccactcggcaaacaagcctgtgcctcattttacttaaacaccaaatgatcaagaaggaagaaaccaaataacacatctcagccagaataatcactcgataacattattccacctccccaccccccttttggcaaacgaatcagtccttttctccttaaaaaaaatgtgtcactgtacagctggaaaataatgtttcacattcacaacagaagcaccaaaggtttttttttcctcttaacaagcatcgagaataatagttttttaaaaaacagagagtttagagaaaaaagttttcccaacttctcattccgccttcagttccagacttcagagtcaccgtgatcagtaatgatcccatgtagcaaacctacaggcgtccgctagtaacgagacagaatgtgctaacatcgggataaattagtgaaagggaagaaagaataagaagaaaggactgaaaatctgggctggattccgcctgttagtcgggaagtggcatttttccgcccgtcctgacagatttgatttcttgaactaacttaagagaaaaggagggggggagtagagggaggaggaggagaagaaagggtgggatgagaaactgggcaagaggagaaaaagaaaggtgtggaggaggagacagcagatgattcagtgagctgataaaccagttataacagcattcgctcggggcggggggcggggggcttggggcggtggggtggggaaaataacggcgtttaaaatgggctcagtcttcgaaacctaaaggatgtgatgttttcctgtcttatgttgttttaagaaaaaggaactgagttcctagtatagctcccgaggggagtggaatcctctgtcgctcagg

SEQ ID NO: 318724 - DNA, 4001 bp, Homo sapiens
agcaagcaaagatatcacaaaaattcacgaggtgatacagtcctatatttggagaaacagccacaccccaactcccaaggacaactcctctttcaagatctcaattttagctatttgtttaccacagactcatctgaatggccatgaaactccttagtctttcttttccaggaaacaggaatcttttctttgtttctttcctatgccttacagcacctagcccagtgctgaaaatatagttaggaagtctcctacctgcctggatatttttataaacttctaaaacaatgcctctatctactatttcacaaaagtactatggggtgtgtgtatgtgctggtagggtgctctatgaacggctatggtttgaatgcatgtttccctcccaaaattcaaatgttgaaacttaatcatcaatgaaatggcattaagaggtggggcctttagtgggtgattaggttaggcaagcactaatcctgaataaatggattagtgcgagggaactggctagccccttttttgccttctgcttcttccaccacatgatgacaccatgagaaaacttcatctatagaacaggccctcaccagacactgactctgccagcaccttgattttggacttcccaatttccagaactatgggaaaatacatttatgttgttcataaatcacccagtctctagtacttccttatagcagagtggacagactaagacatgaacacctacaccagcactgttaataggatgtgggatgagggaagtaaggaataaatagctcataaaggcaaagaggtgagggtgctggctccagctccaaatttctggctgagttggttttgatcccctcattctgttttactcaactaaattaagtgcaaaaccatcataactggaaacccactagaatcgcaaattacacggcagctggtatgacgatagcatgtcctcctgtgcatatgttaaaagcctcttcatccaaaacacagaaggcatcaattcattctccaaatatgcattaagcacttctttttccagacaaggttttaggccttggagaatgaattgagtgaactaaacagccaaacctgctggccagataaggcacttcagaaagcgtctaaaccaccttccctcatcatttttacttaaaagctctcaaacacacacacacacccatctcgagtataaatctggaaacttaagggtgggccaagttcctctttaccctccccgcccagacagggccatcaccgtctccatccaggtcctcttcctcctcctcgctgtcctcctcctgctgctttgccaacttcttcgcctgctgttcaaaccactggagccggggtggtttctcactcgggtctcggtcgtgggtcccacggccaccagtacccacggccacgacattcctggcctcctttgcaggcgctgggggcgccttcttgggagacatggacggctgggccttgatggcctgctggatggccgcgttcatggcatccttgtccacactgtccacgcccagtcctttctccaagttcttttcattcatcatctccactttccgattcactgcctgcacggccttcttctccagctcaacgtgacgccgggacttgaggtggttctcgtaggcgttgaaagaggcaaacttcttactgcaaacggtgcagtaggtggccgagcccttgctctcctcctccgcgacggcccgctgcgcccgcactcgctcctggaagccctcggcggtcactggggccatgctggccaccttccgccgcaggttgtagcggtgccagtccgtcttatagtgggcccgctgcatgtccgcgtcgcggaacgccacccggcaagttatgcaggtgtacgtcgccattgccaggcgagaaataagaaccgaccaagccaaacacctggtgatcagcgccgtggccccacaagaccctcagaccttaacccgcctcagcagccaggaagagccactcgacacgccgacttcctgattgtcactgaggaaacttccggcacacgtcggaagttattcacaactggacaggaaacccgcctctcaggctgtggccacgcctccgccgccgtgaggcccaggaagccgagggaacgctgtggctgaaagggacctgggtccgctcagtcagcccgaggtggctgttgattgagggaggtcgcgccctcccagttaccttccctggtggttgtgccgctcggtgtgacgcggtcaaggggacggctacgcgagaatgggggagtggggcgcccgaggctgctcctgggccctgggaagcccccgattaatgaatggtcgggtcagcgacgcgagggtcggggtttctctgaggaccgcgcgctgcacctgcggagccgggtgaatggatgtcgcgaaggcaagggctgcccttacccctcggggccgacctcggagccctcgcccgtggttgcaacgctttcccgggaaaccggagaagccaggccgggggctcggcctttctgaggcggcccttccggcggaggacaccggcggaatttgagtgcacagagtgcgcgagaggagctccctgtagacacacagtccaagccacgtaggtaattctaatagcagccacatttttaaagagtaaagagaaatcggtgaaactgcttttaatgtgtttaatttagcccatcctgtcatttcagcatgtaatcagtctaaaagaattaattagatcttttacgctctgtcgttggttctaagtcttggaaatccagtgtgtgttttagagttaacagcccatctcaatttggactagacccgtgccaggtgcccagttggctgtgtaccctcatgtatataggacagcaaagttctgtagaaaagaacttcaggccaggcgcggtggctcacgcccgtaatcccagcactttgcgaggccgaggcgggcggatcatctgaggtcaggggttcaagaccagcctggccaacatggcgaaacccagtctctgctaaaaaatacaaaaattagtcccggcgcagtggcgcagacctgtaatcccagctacttgggaggttgaggcaggagaatcgcttgaacccgggaggcggaggttgtggtgagccgagatcgcgccactgcactccagcctgggcaacagagcaagattccatctcaaaagaaaaagaaaacatgaacttcaaatgcttggggaggtcgtagatttcatccacacagcctggttgaaccagagtcagccttgttagagtcgaatgttgcatgctcagaatccaggctgccaagagaaaaccaaaagaagatggcgctttaaaaaaccttccagtgccttcccttgactcaatcaaattcaaacaccttactttctattctccgaggctctacccctccctctgaggtcctgccacacccccttctctaccctgctcaccctacttgagtcgcaatgacacatttgatgttcttctaacaagcactttagttggtactaagtcagaaagtcagaaatccattactcttctgcttggaacatccttttgctggcttgcttccttattttttggatctctgcccaaatgcctttgtaagagaggcttatccaaatccacttaccaaaaatagtgcctaccttcctaagtccttaccaggcataacttttctccagtactgtattagttatctactactctgtattaaattacccccaaatttagcatcaagctttatttcagtttctgtatgtcaggtatttgagtgactcagctgggtggttctgactaagatctcctaagaggttgcagtgaacatgctgtccagggctaaaatcatctgaagatctgactgtatttgactgtggctggagagtctcccttaaagatggttcatttacatagctgatagcaagaggttttggttccttgacaagtaggcctctccatagggctgcttgagtgcagcagagagccacatgaaattcatagacctagcat

SEQ ID NO: 318725 - DNA, 4001 bp, Homo sapiens
ctagctaacttctgtatttttagtagagaccgggtttcaccatgttggtcaggctggtcttgaacttctgacctcaagtgatctgcccaccttggcctcccaaggtcctgggaatacagggcctctctttttcaaattccccgtgttaggaaggaattatttaactcctccgtgtctttgtcctccacagggcaaaaacacctggatctttcacaaagctctggtagtggcagtggcctggcattggagccccattaaattctttgtcaaaaagcatgagactgggggccgggcgcggtggctcacgcccatagtcccaacactttaggaggctgaggcgggcagattgcttgaggtcaggagttcaagaccagccttgccaacttgttgaagcctggtctctactaaaaatacaaaaattagctgggtgtggtggcacacatgcctgtagtcccagctaccagggaggttgaggctgcagtgagccatgtccgtgccactgcactccagcctgggtaacagagtgagaccctgtctcaaaaaagggaaagaaaaaaaaaaaaaagcatgagacaggctctgaggcaagggaaacaccttccttccagagtttctcagctaccaagccctctggtccttccctgagcttcactgggtagagaagctcaacaacagatgaagaagtttaccacgtctagaccctgaaggcagttcaagcaaaaagaagccttcactcacctgtacatgggctggcagcaacctccttgccatttctccctccctgctgcctctcttggagaaggcacctggaatggagaaaaaagctgtgaggtcttttcatccagcctgcatgcccaccctcattaggccagaccaggttagaagccataagctgagcacctgcagagaaggagcctggaactgcccaggccagaggggccctaagtccggccacttaaaccagtgtgggaagcaggttcagagtcaccgggcctgctacctttctgccagtgctttacgataaagacgaaaggagcgaagggatgaagaccatctgccgtgccttaacagggtcaagggcagaatcaggcaaggctcattcagataaagtaataggaaatgacacaatattccacacatctgcacttggatgttgttcaatacgaaaaacagcagttgaagaactgatgctcttttttaggaacagccaaccaaaaattagtcctcttttcttcctcttgtaagatttacttcctttatcaaaaacagttatcaaagctgcttaaaggtagcgttacccattctccctggccccaaaaaaacaagggcgcaagaaaacagcatcactagctagaaattgatttaaaatttagagaaatgggaagaaacgtagcaagtggacatggttacggtaaataaaaaaagaaatagttaaatcactctaggactggctgtaggaaaacactgccaaacgtgcaagactgccaaaaacgagtaaatctaaagtttaaactccgggaaacggagtagggggaggcttaaacccacaaacactaagagcgaaaaaccgcccggagggctccggaccctgaaccgaggcggcattttgcagtttctgttctggagccgtttcccccggagtccggcccaggctgcggcccaggagtccagcggcgtcgaagcgccctcccggcctccgccaggcccttcccaggccacgccccctccggggccgggttcacctgccgaggccgccccggctcggacgcccggagccggggactcggcagacacgcgcagaggccagccctcgtcctggtcccgccgcggcagccgcacgccccgggcccgccctcaccggcagcctgtacctgggcccgcctcggcggggggcgcgcagctccacaccgcacaagaggcgagcggaacacctaattcagagacgtttcccgtcgctgccgggcgcaactgcgcctgcgcgccggagagccgacgggtttccctggctgaaccgcagcgtttgtccctccggacttcatttcccagacgtcgctgcggcaccaccacttacggtgtccgagagagaaccacagcgccgagagcggagaacgcggtcgggctgtggagttcgagaaggctgaagccgagtccctcagcttgggctccaactactctccctccgctaaaccacccattgtattcgtaattagaatgacaaaaatagtaagacggaaaagtgagtatgaatttttaaatctggaagactagccgctgctgattattcgcaggtggtgacagaactattacagtccattctgcgattttaattaaaaatgaattatgtctaaattttataatctcggccgggcgcggtggcttatgcctgtaatcgcagcactttgggaggccgaggtgggcggatcacaaggtcaggagaccgagaccatcttggccaacatggtgcaaccctgtctctacgaaaacacgaaaaattagtcgggcgtggtggcacatgcctgtaatcccagctattcgggaggctgaggcaggagaatcgcttgaacctgggaggcgaaggttgcggtgagctcagatcgcgccattgcactccagcctgggtgacagagcaagactctgtctcaaataaataaataaataaataaataaatttttgtaatctttacatatttactggcactcagagtaaaacaaaagcataagcctagtatttccctcttcatggcactcacttcttttgaagtgacttctttaaaacgtaaaataaagcccaactcccagcgctatcatcacaactgcatcctcggtgaccggcactgtacacgccaaatactatgtgctcagaaagtgttgatttttaaaatatcaaacattagcgtttacagagacaaacctaaacacaaagggtacttgaagatagaaaatgcagagagggactaagagatatcaggtagataatatgaaaaagaaatcttggatcacgatgttacaacaatacaaagattattgcaatgtaaaaataattaaatcgaacaaaatggatgttttatattgttaaaagataataatgcacatcactaatcattaggggaatgcagatcaaagcagatcaaacatccactgcgatttcacactcattaggttggctattataaaatttggaaaaaaaagaaaaccagaaaacaatccttgtgccttaatggtgggaatgtaaaatggtagcgctgcgctggaaaacggtatggcagttcctcaaaaaaaaattaaatgtagaattaacacatgggcaattccatttctggaccatatgttatttctatatttaattattattttaaaataataataataaagatatgacagttatagaccattattgacaaaacaacatagcattgagatttacaaagtaaaaggtgccagactgagtacccatgattacctccctttttctcttcatattcttcaaagtaaccccaaacacatataattttcaaaggagcaaatctaatgcaactctagaaaaataccatcagaacaccagaaattgaggaaacatttggaagacatgcaggagacaagtgctctgatacccaaaatctaataaaaagattcagaagaaagcagagaaaatggggagggggaataataacagattgattacatacagaaatagtgatagagatatagcagaaaacacattcaagctgaggaagccctgagtcttcagagtaaataaaatgtagggagtttggcataatgaatgagctagggtagggatggcccataaaaaatacatcctcgatgaaatatcacaactctgaggataaataggaacccctaaaagtggccagaaaagacggaataaaaggttggcatgtgttatttgctacaagtcacagaagatggaactgctcaagttggctgaaatgaataaggaatagcaagaaatcactggggcagactccggctagagaagaatc

SEQ ID NO: 318726 - DNA, 4001 bp, Homo sapiens
ccatcgctatggctgaaaaagatctggacaggggaaaaagaacattttaggggagggggaacaggagacacttttaaactaaggtatttgagaaaactctcaggatctgtcagagaaaggaaggctgtgcagctctaaatcacaagtccttctctcgcctttgtcaaatatattctactttacaagccctgaaaagaaagagactcttttgtttggtttctccttttcggagggtgacagaaaactgaaaggggcacaaaaaaacctgaaaatgagaacaaagtgctgggtcgtgccgggctgccgcgccgcggggacgcgggagcggccgccgagccctctgcctcgcgctcctgcagcccgctcgcccctttggctgcgagcggcaaatccgcaactgccgaccgcggctcgcccggggcaccacgacctgaccacacagcgcaaacaaaactcgggcggcggggcacaagggctgcgccgcggcccgcacaggggtgtctggaggcagcttcagagaaaagggaagcgctagcagctcctcctcaggctcgcgccctttaattagtaagcgtcctacgggcgagatgtccctccggagacggagtccggtccgccgccacctctcctctgcgccgcttggagactgaggaggcgcaaagaaaacgacatttaaaccccgggcggccagtggagctcgcccgggccagacgccacagcgacccgggagcgccgcggccgctcgcccgtcggagccctgggaggagcggcggccgagcggctttaagtgtattcccctcccctcaaatcgcgtggggcgggggccagaaagaaaaaggagcgagcgacaggcagtgggagagggggggagcgccgagcggccgggccgcggccggcattgtctgcggcccgcgccccctcccccgccccgcacagccccgccacacacaccctcgccggaggccggccgtccgcccgcgcctttgtccacatccacccccgaaaccggcgaacagccctccaggatgtgctccccggaggagggcgggtaggggagcgcgggccgggggcgcggagcccacggaggggcgcgtcctgctgattcatttcccactcgcgctggcccgtccggggcgacggggggcagggaagggagggaggaaatgggcgctccgctcaggaggaccgtccgggccagtgaggacacccgcaggggtgcgggcgcgcgcggaactaggggctgtccgcaggagaaaggcgggcaccccccccccacccagggactgacggacggacagacggctcgcggctgccccgtgactcaccgacttgcaggacgttgtctacgcagccgctttccaacagcgcgatgccccggcggaaaggcagccgcgtctcgtcgccgccgtccgccgccccggcagcccccaccgacggggccccggcccccgcggcggcggcggcggcggcggcggcggcggcagcggcggcggcggccgaggttgcggccgccgaggttgcggccggggaagacgaggagccgccgccgccgccgccgcccgcgccgccgccgccaccgctgtcgtcgccggggccgcccgcggcgccgccgccggtgttgaaggacgagtacatgcagatctcccgctcgctgcgggggaaggaccaatagactatgcggcgctgcaccggctccgggatgcgctcaaagcgctcctccacgcgctggaacggccacttctccgccaccctgcgcgccgcgatgtccagcagcgactcggggctctgggtcttgcccggcggcagcaaccccagcgccgcgccgcccccgcacgccgccgccgccgccgcgccacccgcccgcgggcctggccgacaggcagagctgtagccgccacccgcgccgccgccgccgccgctgctgcccccgccgccgccgccgccgcccggccggcagcaaagccgtttcgcgggaggaggctgctgtccgcgctccgccatgaccgcgccgcttctaacccgacagcggaagtgccgggaccctataaacggcactaggaagcgcgacacgcacacgccgtcgcgacgccacgatgccatctagggcccgccgctccttgtatgggcacaagaggtggggcctccgctgtgacgcagaagctggggcggggctctgatagggggaacctagggccgggggcggggcctatgcaaatcgctgggctgaaacataaatagagcgcttggcggacacgggggtggcgggggcgggccgttttggtgcccggtgggttgtgagaatgtcaggctgctgtgacgcgggggagggcggggtcaggcggggttcccgtgggagggggcgggccgccgggccgggcctgaggtgggtgggtctctgcgccccctgcctaccccacttccccctccagttctcagcttctctttgaagtccgagaagtgaggatgcgcctcgtgggtcgcagcgggggaggaaaggggagaagagggggtgagcgaaggggagggttctgagctaaatggagggcggggcccacgggccgatgccccaccccccccgtccccctgcccttcgggggaaaagcctctgggcggaggaggcgctttcaaaacaaagaaatgcggcatggaccccgggggacgcgggtggagaggaaggcggaggaggcgcggccaaacccgagcgcctgccagcttcccctccagccggtccaggggagctctccccaccacccgccgaagctgcagcggggaagggggaggatggctgcgttcggcggcggctttccacttcacttttgcagacctggtgtggaaggagcgcgcccgctctgctaaccccgcgtggctgcagtgcgcccatccccgagccccgcgtccgttctgtctcggctgcagggctgtgcccgaaaacacgcagagcgctcggaacgtgcccagcagccgcgcgacccgcgtccggtgccggctgccaccgtcccgccctcgctgcctcagcccctcgggccaggaaaccgacccgcccgctagaagtcgaggagctccggccgcccttgtcgcccccgcggccgcgcggacaaggccccgctccaggccggggtttctccagctcggggtggaacgcagcccgggctgtggggttagcagacacacctttgtgagtacacacgccgcagggcgcgcgcaagccccacgggctcgcgcacacatcgcccagcaggcggcagacggcgtgccaggcggcggacggcggcttcgggcgcacttgggtctgcggcccggctcccaccccggcacccgggtgcgcggcgcccggctgcgcggagtccaggcgctcgggacgcgcgccgcgctctcagtcgccttggcggcgcccgcagggccagtcccctcgggtccgggcagtgtaggggtggaccagggagagcgagtgcagagtgcagctcgctggtgcctggacgcgggcgaaggcggagaagcgagtccctctctgaacctggagccctgcggacattgttcgcgctccacagagctcggtcaaatctgcttccaagccgcagacttaattaccgcgtcggagacaggcttcctcccagccccaccttctgtttttactgtaaacagtggtgctgatccgctcccattgttggagataaactgtatctcctttgacactttcgcatcttttaaggttattggctgctccccacccgcctgccttgcagcctggatttaaagggatagcgcgcttcggcgttttaaagaaaatcgcccattcggggccgaggccctggaaacctcgagctacacagtgggccttcacaagtcccaggctgcaggtccctggggtcgggacgctggccgactttccgcagctgccttacttgttaggaaaatttttgtggcattatgtttttgtatatccgtccagtatttttctgggcacttcctccatgtctaggaaaaagcctgtgcggaaaact

SEQ ID NO: 318727 - RNA, 19 nt, Artificial Sequence
  Description of Artificial Sequence: Synthetic oligonucleotide
  Sense Strand Starting at position 1 of SEQ ID NO: 315368
aguuuaacauaaguggauu

SEQ ID NO: 318728 - RNA, 19 nt, Artificial Sequence
  Description of Artificial Sequence: Synthetic oligonucleotide
  Antisense Strand to SEQ ID NO: 318727
aauccacuuauguuaaacu

SEQ ID NO: 318729 - RNA, 19 nt, Artificial Sequence
  Description of Artificial Sequence: Synthetic oligonucleotide
  Sense Strand Starting at position 1 of SEQ ID NO: 315404
auaaguguccuauacaccu

SEQ ID NO: 318730 - RNA, 19 nt, Artificial Sequence
  Description of Artificial Sequence: Synthetic oligonucleotide
  Antisense Strand to SEQ ID NO: 318729
agguguauaggacacuuau

SEQ ID NO: 318731 - RNA, 19 nt, Artificial Sequence
  Description of Artificial Sequence: Synthetic oligonucleotide
  Sense Strand Starting at position 1 of SEQ ID NO: 315446
aguuaagaauagucuccaa

SEQ ID NO: 318732 - RNA, 19 nt, Artificial Sequence
  Description of Artificial Sequence: Synthetic oligonucleotide
  Antisense Strand to SEQ ID NO: 318731
uuggagacuauucuuaacu

SEQ ID NO: 318733 - RNA, 19 nt, Artificial Sequence
  Description of Artificial Sequence: Synthetic oligonucleotide
  Sense Strand Starting at position 1 of SEQ ID NO: 315554
aucaguucucaacauggua

SEQ ID NO: 318734 - RNA, 19 nt, Artificial Sequence
  Description of Artificial Sequence: Synthetic oligonucleotide
  Antisense Strand to SEQ ID NO: 318733
uaccauguugagaacugau

SEQ ID NO: 318735 - RNA, 19 nt, Artificial Sequence
  Description of Artificial Sequence: Synthetic oligonucleotide
  Sense Strand Starting at position 1 of SEQ ID NO: 315595
aacccaaauguggguucua

SEQ ID NO: 318736 - RNA, 19 nt, Artificial Sequence
  Description of Artificial Sequence: Synthetic oligonucleotide
  Antisense Strand to SEQ ID NO: 318735
uagaacccacauuuggguu

SEQ ID NO: 318737 - RNA, 19 nt, Artificial Sequence
  Description of Artificial Sequence: Synthetic oligonucleotide
  Sense Strand Starting at position 1 of SEQ ID NO: 315596
acccaaauguggguucuau

SEQ ID NO: 318738 - RNA, 19 nt, Artificial Sequence
  Description of Artificial Sequence: Synthetic oligonucleotide
  Antisense Strand to SEQ ID NO: 318737
auagaacccacauuugggu

SEQ ID NO: 318739 - RNA, 19 nt, Artificial Sequence
  Description of Artificial Sequence: Synthetic oligonucleotide
  Sense Strand Starting at position 1 of SEQ ID NO: 315631
aguccuuacccucaguuua

SEQ ID NO: 318740 - RNA, 19 nt, Artificial Sequence
  Description of Artificial Sequence: Synthetic oligonucleotide
  Antisense Strand to SEQ ID NO: 318739
uaaacugaggguaaggacu

SEQ ID NO: 318741 - RNA, 19 nt, Artificial Sequence
  Description of Artificial Sequence: Synthetic oligonucleotide
  Sense Strand Starting at position 1 of SEQ ID NO: 315655
auauacaauucguugacau

SEQ ID NO: 318742 - RNA, 19 nt, Artificial Sequence
  Description of Artificial Sequence: Synthetic oligonucleotide
  Antisense Strand to SEQ ID NO: 318741
augucaacgaauuguauau

SEQ ID NO: 318743 - RNA, 19 nt, Artificial Sequence
  Description of Artificial Sequence: Synthetic oligonucleotide
  Sense Strand Starting at position 1 of SEQ ID NO: 315767
uugucuauugcugacagga

SEQ ID NO: 318744 - RNA, 19 nt, Artificial Sequence
  Description of Artificial Sequence: Synthetic oligonucleotide
  Antisense Strand to SEQ ID NO: 318743
uccugucagcaauagacaa

SEQ ID NO: 318745 - RNA, 19 nt, Artificial Sequence
  Description of Artificial Sequence: Synthetic oligonucleotide
  Sense Strand Starting at position 1 of SEQ ID NO: 315868
aggauaaaucuuggcagca

SEQ ID NO: 318746 - RNA, 19 nt, Artificial Sequence
  Description of Artificial Sequence: Synthetic oligonucleotide
  Antisense Strand to SEQ ID NO: 318745
ugcugccaagauuuauccu

SEQ ID NO: 318747 - RNA, 19 nt, Artificial Sequence
  Description of Artificial Sequence: Synthetic oligonucleotide
  Sense Strand Starting at position 1 of SEQ ID NO: 315869
ggauaaaucuuggcagcag

SEQ ID NO: 318748 - RNA, 19 nt, Artificial Sequence
  Description of Artificial Sequence: Synthetic oligonucleotide
  Antisense Strand to SEQ ID NO: 318747
cugcugccaagauuuaucc

SEQ ID NO: 318749 - RNA, 19 nt, Artificial Sequence
  Description of Artificial Sequence: Synthetic oligonucleotide
  Sense Strand Starting at position 1 of SEQ ID NO: 315984
ccuggugggacuugaaaga

SEQ ID NO: 318750 - RNA, 19 nt, Artificial Sequence
  Description of Artificial Sequence: Synthetic oligonucleotide
  Antisense Strand to SEQ ID NO: 318749
ucuuucaagucccaccagg

SEQ ID NO: 318751 - RNA, 19 nt, Artificial Sequence
  Description of Artificial Sequence: Synthetic oligonucleotide
  Sense Strand Starting at position 1 of SEQ ID NO: 316254
ugaaaucaaguccagcaau

SEQ ID NO: 318752 - RNA, 19 nt, Artificial Sequence
  Description of Artificial Sequence: Synthetic oligonucleotide
  Antisense Strand to SEQ ID NO: 318751
auugcuggacuugauuuca

SEQ ID NO: 318753 - RNA, 19 nt, Artificial Sequence
  Description of Artificial Sequence: Synthetic oligonucleotide
  Sense Strand Starting at position 1 of SEQ ID NO: 316435
caagaaauaugugagaaag

SEQ ID NO: 318754 - RNA, 19 nt, Artificial Sequence
  Description of Artificial Sequence: Synthetic oligonucleotide
  Antisense Strand to SEQ ID NO: 318753
cuuucucacauauuucuug

SEQ ID NO: 318755 - RNA, 19 nt, Artificial Sequence
  Description of Artificial Sequence: Synthetic oligonucleotide
  Sense Strand Starting at position 1 of SEQ ID NO: 316606
ccaagaaugugacuaacuu

SEQ ID NO: 318756 - RNA, 19 nt, Artificial Sequence
  Description of Artificial Sequence: Synthetic oligonucleotide
  Antisense Strand to SEQ ID NO: 318755
aaguuagucacauucuugg

SEQ ID NO: 318757 - RNA, 19 nt, Artificial Sequence
  Description of Artificial Sequence: Synthetic oligonucleotide
  Sense Strand Starting at position 1 of SEQ ID NO: 316756
auaugauaugaauguccau

SEQ ID NO: 318758 - RNA, 19 nt, Artificial Sequence
  Description of Artificial Sequence: Synthetic oligonucleotide
  Antisense Strand to SEQ ID NO: 318757
auggacauucauaucauau

SEQ ID NO: 318759 - RNA, 19 nt, Artificial Sequence
  Description of Artificial Sequence: Synthetic oligonucleotide
  Sense Strand Starting at position 1 of SEQ ID NO: 316763
augaauguccauugucauu

SEQ ID NO: 318760 - RNA, 19 nt, Artificial Sequence
  Description of Artificial Sequence: Synthetic oligonucleotide
  Antisense Strand to SEQ ID NO: 318759
aaugacaauggacauucau

SEQ ID NO: 318761 - RNA, 19 nt, Artificial Sequence
  Description of Artificial Sequence: Synthetic oligonucleotide
  Sense Strand Starting at position 1 of SEQ ID NO: 316786
cugacaucauugguuacaa

SEQ ID NO: 318762 - RNA, 19 nt, Artificial Sequence
  Description of Artificial Sequence: Synthetic oligonucleotide
  Antisense Strand to SEQ ID NO: 318761
uuguaaccaaugaugucag

SEQ ID NO: 318763 - RNA, 19 nt, Artificial Sequence
  Description of Artificial Sequence: Synthetic oligonucleotide
  Sense Strand Starting at position 1 of SEQ ID NO: 316787
ugacaucauugguuacaau

SEQ ID NO: 318764 - RNA, 19 nt, Artificial Sequence
  Description of Artificial Sequence: Synthetic oligonucleotide
  Antisense Strand to SEQ ID NO: 318763
auuguaaccaaugauguca

SEQ ID NO: 318765 - RNA, 19 nt, Artificial Sequence
  Description of Artificial Sequence: Synthetic oligonucleotide
  Sense Strand Starting at position 1 of SEQ ID NO: 316841
augaauuucuacuacgaau

SEQ ID NO: 318766 - RNA, 19 nt, Artificial Sequence
  Description of Artificial Sequence: Synthetic oligonucleotide
  Antisense Strand to SEQ ID NO: 318765
auucguaguagaaauucau

SEQ ID NO: 318767 - RNA, 19 nt, Artificial Sequence
  Description of Artificial Sequence: Synthetic oligonucleotide
  Sense Strand Starting at position 1 of SEQ ID NO: 317303
uaaguaaaucauuggcaga

SEQ ID NO: 318768 - RNA, 19 nt, Artificial Sequence
  Description of Artificial Sequence: Synthetic oligonucleotide
  Antisense Strand to SEQ ID NO: 318767
ucugccaaugauuuacuua

SEQ ID NO: 318769 - RNA, 19 nt, Artificial Sequence
  Description of Artificial Sequence: Synthetic oligonucleotide
  Sense Strand Starting at position 1 of SEQ ID NO: 317305
aguaaaucauuggcagauu

SEQ ID NO: 318770 - RNA, 19 nt, Artificial Sequence
  Description of Artificial Sequence: Synthetic oligonucleotide
  Antisense Strand to SEQ ID NO: 318769
aaucugccaaugauuuacu

SEQ ID NO: 318771 - RNA, 19 nt, Artificial Sequence
  Description of Artificial Sequence: Synthetic oligonucleotide
  Sense Strand Starting at position 1 of SEQ ID NO: 317531
ccugcacuugaucaguuua

SEQ ID NO: 318772 - RNA, 19 nt, Artificial Sequence
  Description of Artificial Sequence: Synthetic oligonucleotide
  Antisense Strand to SEQ ID NO: 318771
uaaacugaucaagugcagg

SEQ ID NO: 318773 - RNA, 19 nt, Artificial Sequence
  Description of Artificial Sequence: Synthetic oligonucleotide
  Sense Strand Starting at position 1 of SEQ ID NO: 317542
ucaguuuagcuugaaucaa

SEQ ID NO: 318774 - RNA, 19 nt, Artificial Sequence
  Description of Artificial Sequence: Synthetic oligonucleotide
  Antisense Strand to SEQ ID NO: 318773
uugauucaagcuaaacuga

SEQ ID NO: 318775 - RNA, 19 nt, Artificial Sequence
  Description of Artificial Sequence: Synthetic oligonucleotide
  Sense Strand Starting at position 1 of SEQ ID NO: 317679
aaggcccagugaucuagaa

SEQ ID NO: 318776 - RNA, 19 nt, Artificial Sequence
  Description of Artificial Sequence: Synthetic oligonucleotide
  Antisense Strand to SEQ ID NO: 318775
uucuagaucacugggccuu

SEQ ID NO: 318777 - RNA, 19 nt, Artificial Sequence
  Description of Artificial Sequence: Synthetic oligonucleotide
  Sense Strand Starting at position 1 of SEQ ID NO: 317681
ggcccagugaucuagaaug

SEQ ID NO: 318778 - RNA, 19 nt, Artificial Sequence
  Description of Artificial Sequence: Synthetic oligonucleotide
  Antisense Strand to SEQ ID NO: 318777
cauucuagaucacugggcc

SEQ ID NO: 318779 - RNA, 19 nt, Artificial Sequence
  Description of Artificial Sequence: Synthetic oligonucleotide
  Sense Strand Starting at position 1 of SEQ ID NO: 317805
uuuguuguccuccacugau

SEQ ID NO: 318780 - RNA, 19 nt, Artificial Sequence
  Description of Artificial Sequence: Synthetic oligonucleotide
  Antisense Strand to SEQ ID NO: 318779
aucaguggaggacaacaaa

SEQ ID NO: 318781 - RNA, 19 nt, Artificial Sequence
  Description of Artificial Sequence: Synthetic oligonucleotide
  Sense Strand Starting at position 1 of SEQ ID NO: 317898
uuagcaaucuucuuuggag

SEQ ID NO: 318782 - RNA, 19 nt, Artificial Sequence
  Description of Artificial Sequence: Synthetic oligonucleotide
  Antisense Strand to SEQ ID NO: 318781
cuccaaagaagauugcuaa

SEQ ID NO: 318783 - RNA, 19 nt, Artificial Sequence
  Description of Artificial Sequence: Synthetic oligonucleotide
  Sense Strand Starting at position 1 of SEQ ID NO: 318204
uuuccaaaguucucuguaa

SEQ ID NO: 318784 - RNA, 19 nt, Artificial Sequence
  Description of Artificial Sequence: Synthetic oligonucleotide
  Antisense Strand to SEQ ID NO: 318783
uuacagagaacuuuggaaa

SEQ ID NO: 318785 - RNA, 19 nt, Artificial Sequence
  Description of Artificial Sequence: Synthetic oligonucleotide
  Sense Strand Starting at position 1 of SEQ ID NO: 318205
uuccaaaguucucuguaau

SEQ ID NO: 318786 - RNA, 19 nt, Artificial Sequence
  Description of Artificial Sequence: Synthetic oligonucleotide
  Antisense Strand to SEQ ID NO: 318785
auuacagagaacuuuggaa

SEQ ID NO: 318787 - RNA, 19 nt, Artificial Sequence
  Description of Artificial Sequence: Synthetic oligonucleotide
  Sense Strand Starting at position 1 of SEQ ID NO: 318211
aguucucuguaauuggaca

SEQ ID NO: 318788 - RNA, 19 nt, Artificial Sequence
  Description of Artificial Sequence: Synthetic oligonucleotide
  Antisense Strand to SEQ ID NO: 318787
uguccaauuacagagaacu

SEQ ID NO: 318789 - RNA, 19 nt, Artificial Sequence
  Description of Artificial Sequence: Synthetic oligonucleotide
  Sense Strand Starting at position 1 of SEQ ID NO: 318218
uguaauuggacagauuggu

SEQ ID NO: 318790 - RNA, 19 nt, Artificial Sequence
  Description of Artificial Sequence: Synthetic oligonucleotide
  Antisense Strand to SEQ ID NO: 318789
accaaucuguccaauuaca

SEQ ID NO: 318791 - RNA, 19 nt, Artificial Sequence
  Description of Artificial Sequence: Synthetic oligonucleotide
  Sense Strand Starting at position 1 of SEQ ID NO: 318410
ggcagagaucagugaugua

SEQ ID NO: 318792 - RNA, 19 nt, Artificial Sequence
  Description of Artificial Sequence: Synthetic oligonucleotide
  Antisense Strand to SEQ ID NO: 318791
uacaucacugaucucugcc

SEQ ID NO: 318793 - RNA, 19 nt, Artificial Sequence
  Description of Artificial Sequence: Synthetic oligonucleotide
  Sense Strand Starting at position 1 of SEQ ID NO: 318415
agaucagugauguaguuaa

SEQ ID NO: 318794 - RNA, 19 nt, Artificial Sequence
  Description of Artificial Sequence: Synthetic oligonucleotide
  Antisense Strand to SEQ ID NO: 318793
uuaacuacaucacugaucu

SEQ ID NO: 318795 - RNA, 19 nt, Artificial Sequence
  Description of Artificial Sequence: Synthetic oligonucleotide
  Sense Strand Starting at position 1 of SEQ ID NO: 318448
ugaggaugaaugugagcau

SEQ ID NO: 318796 - RNA, 19 nt, Artificial Sequence
  Description of Artificial Sequence: Synthetic oligonucleotide
  Antisense Strand to SEQ ID NO: 318795
augcucacauucauccuca

SEQ ID NO: 318797 - RNA, 19 nt, Artificial Sequence
  Description of Artificial Sequence: Synthetic oligonucleotide
  Sense Strand Starting at position 1 of SEQ ID NO: 318455
gaaugugagcaucagcaau

SEQ ID NO: 318798 - RNA, 19 nt, Artificial Sequence
  Description of Artificial Sequence: Synthetic oligonucleotide
  Antisense Strand to SEQ ID NO: 318797
auugcugaugcucacauuc

SEQ ID NO: 318799 - RNA, 19 nt, Artificial Sequence
  Description of Artificial Sequence: Synthetic oligonucleotide
  Sense Strand Starting at position 1 of SEQ ID NO: 318654
ucaggcucacugugagaau

SEQ ID NO: 318800 - RNA, 19 nt, Artificial Sequence
  Description of Artificial Sequence: Synthetic oligonucleotide
  Antisense Strand to SEQ ID NO: 318799
auucucacagugagccuga

SEQ ID NO: 318801 - RNA, 19 nt, Artificial Sequence
  Description of Artificial Sequence: Synthetic oligonucleotide
  Sense Strand Starting at position 1 of SEQ ID NO: 318745
uaucaauauggaugguauu

SEQ ID NO: 318802 - RNA, 19 nt, Artificial Sequence
  Description of Artificial Sequence: Synthetic oligonucleotide
  Antisense Strand to SEQ ID NO: 318801
aauaccauccauauugaua

SEQ ID NO: 318803 - RNA, 19 nt, Artificial Sequence
  Description of Artificial Sequence: Synthetic oligonucleotide
  Sense Strand Starting at position 1 of SEQ ID NO: 318993
gugccaccauuccuagaua

SEQ ID NO: 318804 - RNA, 19 nt, Artificial Sequence
  Description of Artificial Sequence: Synthetic oligonucleotide
  Antisense Strand to SEQ ID NO: 318803
uaucuaggaaugguggcac

SEQ ID NO: 318805 - RNA, 19 nt, Artificial Sequence
  Description of Artificial Sequence: Synthetic oligonucleotide
  Sense Strand Starting at position 1 of SEQ ID NO: 319179
cuguauaagaguugaugag

SEQ ID NO: 318806 - RNA, 19 nt, Artificial Sequence
  Description of Artificial Sequence: Synthetic oligonucleotide
  Antisense Strand to SEQ ID NO: 318805
cucaucaacucuuauacag

SEQ ID NO: 318807 - RNA, 19 nt, Artificial Sequence
  Description of Artificial Sequence: Synthetic oligonucleotide
  Sense Strand Starting at position 2 of SEQ ID NO: 315416
acucaaagauugccagaca

SEQ ID NO: 318808 - RNA, 19 nt, Artificial Sequence
  Description of Artificial Sequence: Synthetic oligonucleotide
  Antisense Strand to SEQ ID NO: 318807
ugucuggcaaucuuugagu

SEQ ID NO: 318809 - RNA, 19 nt, Artificial Sequence
  Description of Artificial Sequence: Synthetic oligonucleotide
  Sense Strand Starting at position 2 of SEQ ID NO: 315566
gguauaucgacugagagcu

SEQ ID NO: 318810 - RNA, 19 nt, Artificial Sequence
  Description of Artificial Sequence: Synthetic oligonucleotide
  Antisense Strand to SEQ ID NO: 318809
agcucucagucgauauacc

SEQ ID NO: 318811 - RNA, 19 nt, Artificial Sequence
  Description of Artificial Sequence: Synthetic oligonucleotide
  Sense Strand Starting at position 2 of SEQ ID NO: 315939
uggacuugucaauauucug

SEQ ID NO: 318812 - RNA, 19 nt, Artificial Sequence
  Description of Artificial Sequence: Synthetic oligonucleotide
  Antisense Strand to SEQ ID NO: 318811
cagaauauugacaagucca

SEQ ID NO: 318813 - RNA, 19 nt, Artificial Sequence
  Description of Artificial Sequence: Synthetic oligonucleotide
  Sense Strand Starting at position 2 of SEQ ID NO: 316011
cacuuagaaugguugguuu

SEQ ID NO: 318814 - RNA, 19 nt, Artificial Sequence
  Description of Artificial Sequence: Synthetic oligonucleotide
  Antisense Strand to SEQ ID NO: 318813
aaaccaaccauucuaagug

SEQ ID NO: 318815 - RNA, 19 nt, Artificial Sequence
  Description of Artificial Sequence: Synthetic oligonucleotide
  Sense Strand Starting at position 2 of SEQ ID NO: 316239
gggauagacuacuuguuug

SEQ ID NO: 318816 - RNA, 19 nt, Artificial Sequence
  Description of Artificial Sequence: Synthetic oligonucleotide
  Antisense Strand to SEQ ID NO: 318815
caaacaaguagucuauccc

SEQ ID NO: 318817 - RNA, 19 nt, Artificial Sequence
  Description of Artificial Sequence: Synthetic oligonucleotide
  Sense Strand Starting at position 2 of SEQ ID NO: 316274
acaguugaauuguugaaua

SEQ ID NO: 318818 - RNA, 19 nt, Artificial Sequence
  Description of Artificial Sequence: Synthetic oligonucleotide
  Antisense Strand to SEQ ID NO: 318817
uauucaacaauucaacugu

SEQ ID NO: 318819 - RNA, 19 nt, Artificial Sequence
  Description of Artificial Sequence: Synthetic oligonucleotide
  Sense Strand Starting at position 2 of SEQ ID NO: 316492
ccucucauuugugcauauu

SEQ ID NO: 318820 - RNA, 19 nt, Artificial Sequence
  Description of Artificial Sequence: Synthetic oligonucleotide
  Antisense Strand to SEQ ID NO: 318819
aauaugcacaaaugagagg

SEQ ID NO: 318821 - RNA, 19 nt, Artificial Sequence
  Description of Artificial Sequence: Synthetic oligonucleotide
  Sense Strand Starting at position 2 of SEQ ID NO: 316578
uuauuuacguguccuuagu

SEQ ID NO: 318822 - RNA, 19 nt, Artificial Sequence
  Description of Artificial Sequence: Synthetic oligonucleotide
  Antisense Strand to SEQ ID NO: 318821
acuaaggacacguaaauaa

SEQ ID NO: 318823 - RNA, 19 nt, Artificial Sequence
  Description of Artificial Sequence: Synthetic oligonucleotide
  Sense Strand Starting at position 2 of SEQ ID NO: 316609
ucccaaagauaagugcaua

SEQ ID NO: 318824 - RNA, 19 nt, Artificial Sequence
  Description of Artificial Sequence: Synthetic oligonucleotide
  Antisense Strand to SEQ ID NO: 318823
uaugcacuuaucuuuggga

SEQ ID NO: 318825 - RNA, 19 nt, Artificial Sequence
  Description of Artificial Sequence: Synthetic oligonucleotide
  Sense Strand Starting at position 2 of SEQ ID NO: 316652
gcauaaucagaugaucucu

SEQ ID NO: 318826 - RNA, 19 nt, Artificial Sequence
  Description of Artificial Sequence: Synthetic oligonucleotide
  Antisense Strand to SEQ ID NO: 318825
agagaucaucugauuaugc

SEQ ID NO: 318827 - RNA, 19 nt, Artificial Sequence
  Description of Artificial Sequence: Synthetic oligonucleotide
  Sense Strand Starting at position 2 of SEQ ID NO: 316728
agccacuaucgugauauua

SEQ ID NO: 318828 - RNA, 19 nt, Artificial Sequence
  Description of Artificial Sequence: Synthetic oligonucleotide
  Antisense Strand to SEQ ID NO: 318827
uaauaucacgauaguggcu

SEQ ID NO: 318829 - RNA, 19 nt, Artificial Sequence
  Description of Artificial Sequence: Synthetic oligonucleotide
  Sense Strand Starting at position 2 of SEQ ID NO: 316947
cuuaauucucugggucaaa

SEQ ID NO: 318830 - RNA, 19 nt, Artificial Sequence
  Description of Artificial Sequence: Synthetic oligonucleotide
  Antisense Strand to SEQ ID NO: 318829
uuugacccagagaauuaag

SEQ ID NO: 318831 - RNA, 19 nt, Artificial Sequence
  Description of Artificial Sequence: Synthetic oligonucleotide
  Sense Strand Starting at position 2 of SEQ ID NO: 316948
uuaauucucugggucaaau

SEQ ID NO: 318832 - RNA, 19 nt, Artificial Sequence
  Description of Artificial Sequence: Synthetic oligonucleotide
  Antisense Strand to SEQ ID NO: 318831
auuugacccagagaauuaa

SEQ ID NO: 318833 - RNA, 19 nt, Artificial Sequence
  Description of Artificial Sequence: Synthetic oligonucleotide
  Sense Strand Starting at position 2 of SEQ ID NO: 317308
uuuaucuguuauccagaua

SEQ ID NO: 318834 - RNA, 19 nt, Artificial Sequence
  Description of Artificial Sequence: Synthetic oligonucleotide
  Antisense Strand to SEQ ID NO: 318833
uaucuggauaacagauaaa

SEQ ID NO: 318835 - RNA, 19 nt, Artificial Sequence
  Description of Artificial Sequence: Synthetic oligonucleotide
  Sense Strand Starting at position 2 of SEQ ID NO: 317349
aagguuuaaugaguaauag

SEQ ID NO: 318836 - RNA, 19 nt, Artificial Sequence
  Description of Artificial Sequence: Synthetic oligonucleotide
  Antisense Strand to SEQ ID NO: 318835
cuauuacucauuaaaccuu

SEQ ID NO: 318837 - RNA, 19 nt, Artificial Sequence
  Description of Artificial Sequence: Synthetic oligonucleotide
  Sense Strand Starting at position 2 of SEQ ID NO: 317375
gggcaaaguuugucaauga

SEQ ID NO: 318838 - RNA, 19 nt, Artificial Sequence
  Description of Artificial Sequence: Synthetic oligonucleotide
  Antisense Strand to SEQ ID NO: 318837
ucauugacaaacuuugccc

SEQ ID NO: 318839 - RNA, 19 nt, Artificial Sequence
  Description of Artificial Sequence: Synthetic oligonucleotide
  Sense Strand Starting at position 2 of SEQ ID NO: 317423
gcauguauugaguaauaac

SEQ ID NO: 318840 - RNA, 19 nt, Artificial Sequence
  Description of Artificial Sequence: Synthetic oligonucleotide
  Antisense Strand to SEQ ID NO: 318839
guuauuacucaauacaugc

SEQ ID NO: 318841 - RNA, 19 nt, Artificial Sequence
  Description of Artificial Sequence: Synthetic oligonucleotide
  Sense Strand Starting at position 2 of SEQ ID NO: 317431
ugaguaauaacucgggaac

SEQ ID NO: 318842 - RNA, 19 nt, Artificial Sequence
  Description of Artificial Sequence: Synthetic oligonucleotide
  Antisense Strand to SEQ ID NO: 318841
guucccgaguuauuacuca

SEQ ID NO: 318843 - RNA, 19 nt, Artificial Sequence
  Description of Artificial Sequence: Synthetic oligonucleotide
  Sense Strand Starting at position 2 of SEQ ID NO: 317432
gaguaauaacucgggaaca

SEQ ID NO: 318844 - RNA, 19 nt, Artificial Sequence
  Description of Artificial Sequence: Synthetic oligonucleotide
  Antisense Strand to SEQ ID NO: 318843
uguucccgaguuauuacuc

SEQ ID NO: 318845 - RNA, 19 nt, Artificial Sequence
  Description of Artificial Sequence: Synthetic oligonucleotide
  Sense Strand Starting at position 2 of SEQ ID NO: 317627
ccaggcugaguccauaaga

SEQ ID NO: 318846 - RNA, 19 nt, Artificial Sequence
  Description of Artificial Sequence: Synthetic oligonucleotide
  Antisense Strand to SEQ ID NO: 318845
ucuuauggacucagccugg

SEQ ID NO: 318847 - RNA, 19 nt, Artificial Sequence
  Description of Artificial Sequence: Synthetic oligonucleotide
  Sense Strand Starting at position 2 of SEQ ID NO: 317770
ucaguuauugcagaauccu

SEQ ID NO: 318848 - RNA, 19 nt, Artificial Sequence
  Description of Artificial Sequence: Synthetic oligonucleotide
  Antisense Strand to SEQ ID NO: 318847
aggauucugcaauaacuga

SEQ ID NO: 318849 - RNA, 19 nt, Artificial Sequence
  Description of Artificial Sequence: Synthetic oligonucleotide
  Sense Strand Starting at position 2 of SEQ ID NO: 318104
agggucauauugcugagaa

SEQ ID NO: 318850 - RNA, 19 nt, Artificial Sequence
  Description of Artificial Sequence: Synthetic oligonucleotide
  Antisense Strand to SEQ ID NO: 318849
uucucagcaauaugacccu

SEQ ID NO: 318851 - RNA, 19 nt, Artificial Sequence
  Description of Artificial Sequence: Synthetic oligonucleotide
  Sense Strand Starting at position 2 of SEQ ID NO: 318106
ggucauauugcugagaacc

SEQ ID NO: 318852 - RNA, 19 nt, Artificial Sequence
  Description of Artificial Sequence: Synthetic oligonucleotide
  Antisense Strand to SEQ ID NO: 318851
gguucucagcaauaugacc

SEQ ID NO: 318853 - RNA, 19 nt, Artificial Sequence
  Description of Artificial Sequence: Synthetic oligonucleotide
  Sense Strand Starting at position 2 of SEQ ID NO: 318204
guuaguuugacugaguauc

SEQ ID NO: 318854 - RNA, 19 nt, Artificial Sequence
  Description of Artificial Sequence: Synthetic oligonucleotide
  Antisense Strand to SEQ ID NO: 318853
gauacucagucaaacuaac

SEQ ID NO: 318855 - RNA, 19 nt, Artificial Sequence
  Description of Artificial Sequence: Synthetic oligonucleotide
  Sense Strand Starting at position 2 of SEQ ID NO: 318206
uaguuugacugaguaucau

SEQ ID NO: 318856 - RNA, 19 nt, Artificial Sequence
  Description of Artificial Sequence: Synthetic oligonucleotide
  Antisense Strand to SEQ ID NO: 318855
augauacucagucaaacua

SEQ ID NO: 318857 - RNA, 19 nt, Artificial Sequence
  Description of Artificial Sequence: Synthetic oligonucleotide
  Sense Strand Starting at position 2 of SEQ ID NO: 318366
uaagauuggugauccaauc

SEQ ID NO: 318858 - RNA, 19 nt, Artificial Sequence
  Description of Artificial Sequence: Synthetic oligonucleotide
  Antisense Strand to SEQ ID NO: 318857
gauuggaucaccaaucuua

SEQ ID NO: 318859 - RNA, 19 nt, Artificial Sequence
  Description of Artificial Sequence: Synthetic oligonucleotide
  Sense Strand Starting at position 2 of SEQ ID NO: 318384
caaggaaugcugugagggu

SEQ ID NO: 318860 - RNA, 19 nt, Artificial Sequence
  Description of Artificial Sequence: Synthetic oligonucleotide
  Antisense Strand to SEQ ID NO: 318859
acccucacagcauuccuug

SEQ ID NO: 318861 - RNA, 19 nt, Artificial Sequence
  Description of Artificial Sequence: Synthetic oligonucleotide
  Sense Strand Starting at position 2 of SEQ ID NO: 318548
gaggcaagagguuacgaau

SEQ ID NO: 318862 - RNA, 19 nt, Artificial Sequence
  Description of Artificial Sequence: Synthetic oligonucleotide
  Antisense Strand to SEQ ID NO: 318861
auucguaaccucuugccuc

SEQ ID NO: 318863 - RNA, 19 nt, Artificial Sequence
  Description of Artificial Sequence: Synthetic oligonucleotide
  Sense Strand Starting at position 2 of SEQ ID NO: 318669
auggaugauuuccauuaau

SEQ ID NO: 318864 - RNA, 19 nt, Artificial Sequence
  Description of Artificial Sequence: Synthetic oligonucleotide
  Antisense Strand to SEQ ID NO: 318863
auuaauggaaaucauccau

SEQ ID NO: 318865 - RNA, 19 nt, Artificial Sequence
  Description of Artificial Sequence: Synthetic oligonucleotide
  Sense Strand Starting at position 2 of SEQ ID NO: 318769
gcguuaggcggagucgaau

SEQ ID NO: 318866 - RNA, 19 nt, Artificial Sequence
  Description of Artificial Sequence: Synthetic oligonucleotide
  Antisense Strand to SEQ ID NO: 318865
auucgacuccgccuaacgc

SEQ ID NO: 318867 - RNA, 19 nt, Artificial Sequence
  Description of Artificial Sequence: Synthetic oligonucleotide
  Sense Strand Starting at position 2 of SEQ ID NO: 318770
cguuaggcggagucgaauu

SEQ ID NO: 318868 - RNA, 19 nt, Artificial Sequence
  Description of Artificial Sequence: Synthetic oligonucleotide
  Antisense Strand to SEQ ID NO: 318867
aauucgacuccgccuaacg

SEQ ID NO: 318869 - RNA, 19 nt, Artificial Sequence
  Description of Artificial Sequence: Synthetic oligonucleotide
  Sense Strand Starting at position 2 of SEQ ID NO: 318781
gucgaauuggucugagaag

SEQ ID NO: 318870 - RNA, 19 nt, Artificial Sequence
  Description of Artificial Sequence: Synthetic oligonucleotide
  Antisense Strand to SEQ ID NO: 318869
cuucucagaccaauucgac

SEQ ID NO: 318871 - RNA, 19 nt, Artificial Sequence
  Description of Artificial Sequence: Synthetic oligonucleotide
  Sense Strand Starting at position 2 of SEQ ID NO: 318927
gcgagaaggacuuggaaag

SEQ ID NO: 318872 - RNA, 19 nt, Artificial Sequence
  Description of Artificial Sequence: Synthetic oligonucleotide
  Antisense Strand to SEQ ID NO: 318871
cuuuccaaguccuucucgc

SEQ ID NO: 318873 - RNA, 19 nt, Artificial Sequence
  Description of Artificial Sequence: Synthetic oligonucleotide
  Sense Strand Starting at position 2 of SEQ ID NO: 318953
gcacuuuggcaugagacuu

SEQ ID NO: 318874 - RNA, 19 nt, Artificial Sequence
  Description of Artificial Sequence: Synthetic oligonucleotide
  Antisense Strand to SEQ ID NO: 318873
aagucucaugccaaagugc

SEQ ID NO: 318875 - RNA, 19 nt, Artificial Sequence
  Description of Artificial Sequence: Synthetic oligonucleotide
  Sense Strand Starting at position 2 of SEQ ID NO: 319005
gaguguuuggucaguggug

SEQ ID NO: 318876 - RNA, 19 nt, Artificial Sequence
  Description of Artificial Sequence: Synthetic oligonucleotide
  Antisense Strand to SEQ ID NO: 318875
caccacugaccaaacacuc

SEQ ID NO: 318877 - RNA, 19 nt, Artificial Sequence
  Description of Artificial Sequence: Synthetic oligonucleotide
  Sense Strand Starting at position 2 of SEQ ID NO: 319054
gcuuguucgcagaggagau

SEQ ID NO: 318878 - RNA, 19 nt, Artificial Sequence
  Description of Artificial Sequence: Synthetic oligonucleotide
  Antisense Strand to SEQ ID NO: 318877
aucuccucugcgaacaagc

SEQ ID NO: 318879 - RNA, 19 nt, Artificial Sequence
  Description of Artificial Sequence: Synthetic oligonucleotide
  Sense Strand Starting at position 2 of SEQ ID NO: 319087
aguguugggagguauucua

SEQ ID NO: 318880 - RNA, 19 nt, Artificial Sequence
  Description of Artificial Sequence: Synthetic oligonucleotide
  Antisense Strand to SEQ ID NO: 318879
uagaauaccucccaacacu

SEQ ID NO: 318881 - RNA, 19 nt, Artificial Sequence
  Description of Artificial Sequence: Synthetic oligonucleotide
  Sense Strand Starting at position 2 of SEQ ID NO: 319095
gagguauucuaauugauac

SEQ ID NO: 318882 - RNA, 19 nt, Artificial Sequence
  Description of Artificial Sequence: Synthetic oligonucleotide
  Antisense Strand to SEQ ID NO: 318881
guaucaauuagaauaccuc

SEQ ID NO: 318883 - RNA, 19 nt, Artificial Sequence
  Description of Artificial Sequence: Synthetic oligonucleotide
  Sense Strand Starting at position 2 of SEQ ID NO: 319149
uccauacauuaagucgaau

SEQ ID NO: 318884 - RNA, 19 nt, Artificial Sequence
  Description of Artificial Sequence: Synthetic oligonucleotide
  Antisense Strand to SEQ ID NO: 318883
auucgacuuaauguaugga

SEQ ID NO: 318885 - RNA, 19 nt, Artificial Sequence
  Description of Artificial Sequence: Synthetic oligonucleotide
  Sense Strand Starting at position 2 of SEQ ID NO: 319160
agucgaauggacugaggaa

SEQ ID NO: 318886 - RNA, 19 nt, Artificial Sequence
  Description of Artificial Sequence: Synthetic oligonucleotide
  Antisense Strand to SEQ ID NO: 318885
uuccucaguccauucgacu

SEQ ID NO: 318887 - RNA, 19 nt, Artificial Sequence
  Description of Artificial Sequence: Synthetic oligonucleotide
  Sense Strand Starting at position 3 of SEQ ID NO: 315823
uuuccuugucuauaugaca

SEQ ID NO: 318888 - RNA, 19 nt, Artificial Sequence
  Description of Artificial Sequence: Synthetic oligonucleotide
  Antisense Strand to SEQ ID NO: 318887
ugucauauagacaaggaaa

SEQ ID NO: 318889 - RNA, 19 nt, Artificial Sequence
  Description of Artificial Sequence: Synthetic oligonucleotide
  Sense Strand Starting at position 3 of SEQ ID NO: 315865
uguaguaggguuuaaacaa

SEQ ID NO: 318890 - RNA, 19 nt, Artificial Sequence
  Description of Artificial Sequence: Synthetic oligonucleotide
  Antisense Strand to SEQ ID NO: 318889
uuguuuaaacccuacuaca

SEQ ID NO: 318891 - RNA, 19 nt, Artificial Sequence
  Description of Artificial Sequence: Synthetic oligonucleotide
  Sense Strand Starting at position 3 of SEQ ID NO: 315880
acaaguuaaugcccugaga

SEQ ID NO: 318892 - RNA, 19 nt, Artificial Sequence
  Description of Artificial Sequence: Synthetic oligonucleotide
  Antisense Strand to SEQ ID NO: 318891
ucucagggcauuaacuugu

SEQ ID NO: 318893 - RNA, 19 nt, Artificial Sequence
  Description of Artificial Sequence: Synthetic oligonucleotide
  Sense Strand Starting at position 3 of SEQ ID NO: 315882
aaguuaaugcccugagaua

SEQ ID NO: 318894 - RNA, 19 nt, Artificial Sequence
  Description of Artificial Sequence: Synthetic oligonucleotide
  Antisense Strand to SEQ ID NO: 318893
uaucucagggcauuaacuu

SEQ ID NO: 318895 - RNA, 19 nt, Artificial Sequence
  Description of Artificial Sequence: Synthetic oligonucleotide
  Sense Strand Starting at position 3 of SEQ ID NO: 315883
aguuaaugcccugagauac

SEQ ID NO: 318896 - RNA, 19 nt, Artificial Sequence
  Description of Artificial Sequence: Synthetic oligonucleotide
  Antisense Strand to SEQ ID NO: 318895
guaucucagggcauuaacu

SEQ ID NO: 318897 - RNA, 19 nt, Artificial Sequence
  Description of Artificial Sequence: Synthetic oligonucleotide
  Sense Strand Starting at position 3 of SEQ ID NO: 315943
ggaagugacacuugcuuac

SEQ ID NO: 318898 - RNA, 19 nt, Artificial Sequence
  Description of Artificial Sequence: Synthetic oligonucleotide
  Antisense Strand to SEQ ID NO: 318897
guaagcaagugucacuucc

SEQ ID NO: 318899 - RNA, 19 nt, Artificial Sequence
  Description of Artificial Sequence: Synthetic oligonucleotide
  Sense Strand Starting at position 3 of SEQ ID NO: 315968
augcuuacucaagaaguaa

SEQ ID NO: 318900 - RNA, 19 nt, Artificial Sequence
  Description of Artificial Sequence: Synthetic oligonucleotide
  Antisense Strand to SEQ ID NO: 318899
uuacuucuugaguaagcau

SEQ ID NO: 318901 - RNA, 19 nt, Artificial Sequence
  Description of Artificial Sequence: Synthetic oligonucleotide
  Sense Strand Starting at position 3 of SEQ ID NO: 316011
aagguaagccucuagaagu

SEQ ID NO: 318902 - RNA, 19 nt, Artificial Sequence
  Description of Artificial Sequence: Synthetic oligonucleotide
  Antisense Strand to SEQ ID NO: 318901
acuucuagaggcuuaccuu

SEQ ID NO: 318903 - RNA, 19 nt, Artificial Sequence
  Description of Artificial Sequence: Synthetic oligonucleotide
  Sense Strand Starting at position 3 of SEQ ID NO: 316060
gaaggaguugacugugguu

SEQ ID NO: 318904 - RNA, 19 nt, Artificial Sequence
  Description of Artificial Sequence: Synthetic oligonucleotide
  Antisense Strand to SEQ ID NO: 318903
aaccacagucaacuccuuc

SEQ ID NO: 318905 - RNA, 19 nt, Artificial Sequence
  Description of Artificial Sequence: Synthetic oligonucleotide
  Sense Strand Starting at position 3 of SEQ ID NO: 316093
uacuguuugcuguacaaag

SEQ ID NO: 318906 - RNA, 19 nt, Artificial Sequence
  Description of Artificial Sequence: Synthetic oligonucleotide
  Antisense Strand to SEQ ID NO: 318905
cuuuguacagcaaacagua

SEQ ID NO: 318907 - RNA, 19 nt, Artificial Sequence
  Description of Artificial Sequence: Synthetic oligonucleotide
  Sense Strand Starting at position 3 of SEQ ID NO: 316231
gcagaaagaguauggguuu

SEQ ID NO: 318908 - RNA, 19 nt, Artificial Sequence
  Description of Artificial Sequence: Synthetic oligonucleotide
  Antisense Strand to SEQ ID NO: 318907
aaacccauacucuuucugc

SEQ ID NO: 318909 - RNA, 19 nt, Artificial Sequence
  Description of Artificial Sequence: Synthetic oligonucleotide
  Sense Strand Starting at position 3 of SEQ ID NO: 316516
accagcaauuuagaauuga

SEQ ID NO: 318910 - RNA, 19 nt, Artificial Sequence
  Description of Artificial Sequence: Synthetic oligonucleotide
  Antisense Strand to SEQ ID NO: 318909
ucaauucuaaauugcuggu

SEQ ID NO: 318911 - RNA, 19 nt, Artificial Sequence
  Description of Artificial Sequence: Synthetic oligonucleotide
  Sense Strand Starting at position 3 of SEQ ID NO: 316636
ggacuagguugucccugaa

SEQ ID NO: 318912 - RNA, 19 nt, Artificial Sequence
  Description of Artificial Sequence: Synthetic oligonucleotide
  Antisense Strand to SEQ ID NO: 318911
uucagggacaaccuagucc

SEQ ID NO: 318913 - RNA, 19 nt, Artificial Sequence
  Description of Artificial Sequence: Synthetic oligonucleotide
  Sense Strand Starting at position 3 of SEQ ID NO: 316640
uagguugucccugaaaguu

SEQ ID NO: 318914 - RNA, 19 nt, Artificial Sequence
  Description of Artificial Sequence: Synthetic oligonucleotide
  Antisense Strand to SEQ ID NO: 318913
aacuuucagggacaaccua

SEQ ID NO: 318915 - RNA, 19 nt, Artificial Sequence
  Description of Artificial Sequence: Synthetic oligonucleotide
  Sense Strand Starting at position 3 of SEQ ID NO: 316750
acaugucacguuuagacau

SEQ ID NO: 318916 - RNA, 19 nt, Artificial Sequence
  Description of Artificial Sequence: Synthetic oligonucleotide
  Antisense Strand to SEQ ID NO: 318915
augucuaaacgugacaugu

SEQ ID NO: 318917 - RNA, 19 nt, Artificial Sequence
  Description of Artificial Sequence: Synthetic oligonucleotide
  Sense Strand Starting at position 3 of SEQ ID NO: 316782
ugagaauucugucucacug

SEQ ID NO: 318918 - RNA, 19 nt, Artificial Sequence
  Description of Artificial Sequence: Synthetic oligonucleotide
  Antisense Strand to SEQ ID NO: 318917
cagugagacagaauucuca

SEQ ID NO: 318919 - RNA, 19 nt, Artificial Sequence
  Description of Artificial Sequence: Synthetic oligonucleotide
  Sense Strand Starting at position 3 of SEQ ID NO: 316793
ucucacuguuacucacaga

SEQ ID NO: 318920 - RNA, 19 nt, Artificial Sequence
  Description of Artificial Sequence: Synthetic oligonucleotide
  Antisense Strand to SEQ ID NO: 318919
ucugugaguaacagugaga

SEQ ID NO: 318921 - RNA, 19 nt, Artificial Sequence
  Description of Artificial Sequence: Synthetic oligonucleotide
  Sense Strand Starting at position 3 of SEQ ID NO: 316966
auguuaaccuuaccguaaa

SEQ ID NO: 318922 - RNA, 19 nt, Artificial Sequence
  Description of Artificial Sequence: Synthetic oligonucleotide
  Antisense Strand to SEQ ID NO: 318921
uuuacgguaagguuaacau

SEQ ID NO: 318923 - RNA, 19 nt, Artificial Sequence
  Description of Artificial Sequence: Synthetic oligonucleotide
  Sense Strand Starting at position 3 of SEQ ID NO: 316969
uuaaccuuaccguaaaugu

SEQ ID NO: 318924 - RNA, 19 nt, Artificial Sequence
  Description of Artificial Sequence: Synthetic oligonucleotide
  Antisense Strand to SEQ ID NO: 318923
acauuuacgguaagguuaa

SEQ ID NO: 318925 - RNA, 19 nt, Artificial Sequence
  Description of Artificial Sequence: Synthetic oligonucleotide
  Sense Strand Starting at position 3 of SEQ ID NO: 317219
gugauaugaucaucuuaac

SEQ ID NO: 318926 - RNA, 19 nt, Artificial Sequence
  Description of Artificial Sequence: Synthetic oligonucleotide
  Antisense Strand to SEQ ID NO: 318925
guuaagaugaucauaucac

SEQ ID NO: 318927 - RNA, 19 nt, Artificial Sequence
  Description of Artificial Sequence: Synthetic oligonucleotide
  Sense Strand Starting at position 3 of SEQ ID NO: 317571
ggcuaaugccauuaucaug

SEQ ID NO: 318928 - RNA, 19 nt, Artificial Sequence
  Description of Artificial Sequence: Synthetic oligonucleotide
  Antisense Strand to SEQ ID NO: 318927
caugauaauggcauuagcc

SEQ ID NO: 318929 - RNA, 19 nt, Artificial Sequence
  Description of Artificial Sequence: Synthetic oligonucleotide
  Sense Strand Starting at position 3 of SEQ ID NO: 317577
ugccauuaucauggauuau

SEQ ID NO: 318930 - RNA, 19 nt, Artificial Sequence
  Description of Artificial Sequence: Synthetic oligonucleotide
  Antisense Strand to SEQ ID NO: 318929
auaauccaugauaauggca

SEQ ID NO: 318931 - RNA, 19 nt, Artificial Sequence
  Description of Artificial Sequence: Synthetic oligonucleotide
  Sense Strand Starting at position 3 of SEQ ID NO: 317716
ggaagcucagugcaauuau

SEQ ID NO: 318932 - RNA, 19 nt, Artificial Sequence
  Description of Artificial Sequence: Synthetic oligonucleotide
  Antisense Strand to SEQ ID NO: 318931
auaauugcacugagcuucc

SEQ ID NO: 318933 - RNA, 19 nt, Artificial Sequence
  Description of Artificial Sequence: Synthetic oligonucleotide
  Sense Strand Starting at position 3 of SEQ ID NO: 317749
gauuacauaguaugaugau

SEQ ID NO: 318934 - RNA, 19 nt, Artificial Sequence
  Description of Artificial Sequence: Synthetic oligonucleotide
  Antisense Strand to SEQ ID NO: 318933
aucaucauacuauguaauc

SEQ ID NO: 318935 - RNA, 19 nt, Artificial Sequence
  Description of Artificial Sequence: Synthetic oligonucleotide
  Sense Strand Starting at position 3 of SEQ ID NO: 317800
gaugcuugugaacaguaaa

SEQ ID NO: 318936 - RNA, 19 nt, Artificial Sequence
  Description of Artificial Sequence: Synthetic oligonucleotide
  Antisense Strand to SEQ ID NO: 318935
uuuacuguucacaagcauc

SEQ ID NO: 318937 - RNA, 19 nt, Artificial Sequence
  Description of Artificial Sequence: Synthetic oligonucleotide
  Sense Strand Starting at position 3 of SEQ ID NO: 317803
gcuugugaacaguaaauag

SEQ ID NO: 318938 - RNA, 19 nt, Artificial Sequence
  Description of Artificial Sequence: Synthetic oligonucleotide
  Antisense Strand to SEQ ID NO: 318937
cuauuuacuguucacaagc

SEQ ID NO: 318939 - RNA, 19 nt, Artificial Sequence
  Description of Artificial Sequence: Synthetic oligonucleotide
  Sense Strand Starting at position 3 of SEQ ID NO: 317839
cuagguaugucuuugagag

SEQ ID NO: 318940 - RNA, 19 nt, Artificial Sequence
  Description of Artificial Sequence: Synthetic oligonucleotide
  Antisense Strand to SEQ ID NO: 318939
cucucaaagacauaccuag

SEQ ID NO: 318941 - RNA, 19 nt, Artificial Sequence
  Description of Artificial Sequence: Synthetic oligonucleotide
  Sense Strand Starting at position 3 of SEQ ID NO: 318256
ccaucuagguaauccugaa

SEQ ID NO: 318942 - RNA, 19 nt, Artificial Sequence
  Description of Artificial Sequence: Synthetic oligonucleotide
  Antisense Strand to SEQ ID NO: 318941
uucaggauuaccuagaugg

SEQ ID NO: 318943 - RNA, 19 nt, Artificial Sequence
  Description of Artificial Sequence: Synthetic oligonucleotide
  Sense Strand Starting at position 3 of SEQ ID NO: 318324
ucaucugcugggugagaga

SEQ ID NO: 318944 - RNA, 19 nt, Artificial Sequence
  Description of Artificial Sequence: Synthetic oligonucleotide
  Antisense Strand to SEQ ID NO: 318943
ucucucacccagcagauga

SEQ ID NO: 318945 - RNA, 19 nt, Artificial Sequence
  Description of Artificial Sequence: Synthetic oligonucleotide
  Sense Strand Starting at position 3 of SEQ ID NO: 318339
gagacaguguccuugacug

SEQ ID NO: 318946 - RNA, 19 nt, Artificial Sequence
  Description of Artificial Sequence: Synthetic oligonucleotide
  Antisense Strand to SEQ ID NO: 318945
cagucaaggacacugucuc

SEQ ID NO: 318947 - RNA, 19 nt, Artificial Sequence
  Description of Artificial Sequence: Synthetic oligonucleotide
  Sense Strand Starting at position 3 of SEQ ID NO: 318406
ggaaucugcaaguaauugu

SEQ ID NO: 318948 - RNA, 19 nt, Artificial Sequence
  Description of Artificial Sequence: Synthetic oligonucleotide
  Antisense Strand to SEQ ID NO: 318947
acaauuacuugcagauucc

SEQ ID NO: 318949 - RNA, 19 nt, Artificial Sequence
  Description of Artificial Sequence: Synthetic oligonucleotide
  Sense Strand Starting at position 3 of SEQ ID NO: 318543
gcccuuagacucugaaacu

SEQ ID NO: 318950 - RNA, 19 nt, Artificial Sequence
  Description of Artificial Sequence: Synthetic oligonucleotide
  Antisense Strand to SEQ ID NO: 318949
aguuucagagucuaagggc

SEQ ID NO: 318951 - RNA, 19 nt, Artificial Sequence
  Description of Artificial Sequence: Synthetic oligonucleotide
  Sense Strand Starting at position 3 of SEQ ID NO: 318674
ugggacuucuuugccuaga

SEQ ID NO: 318952 - RNA, 19 nt, Artificial Sequence
  Description of Artificial Sequence: Synthetic oligonucleotide
  Antisense Strand to SEQ ID NO: 318951
ucuaggcaaagaaguccca

SEQ ID NO: 318953 - RNA, 19 nt, Artificial Sequence
  Description of Artificial Sequence: Synthetic oligonucleotide
  Sense Strand Starting at position 3 of SEQ ID NO: 318675
gggacuucuuugccuagau

SEQ ID NO: 318954 - RNA, 19 nt, Artificial Sequence
  Description of Artificial Sequence: Synthetic oligonucleotide
  Antisense Strand to SEQ ID NO: 318953
aucuaggcaaagaaguccc

SEQ ID NO: 318955 - RNA, 19 nt, Artificial Sequence
  Description of Artificial Sequence: Synthetic oligonucleotide
  Sense Strand Starting at position 3 of SEQ ID NO: 318676
ggacuucuuugccuagaua

SEQ ID NO: 318956 - RNA, 19 nt, Artificial Sequence
  Description of Artificial Sequence: Synthetic oligonucleotide
  Antisense Strand to SEQ ID NO: 318955
uaucuaggcaaagaagucc

SEQ ID NO: 318957 - RNA, 19 nt, Artificial Sequence
  Description of Artificial Sequence: Synthetic oligonucleotide
  Sense Strand Starting at position 3 of SEQ ID NO: 318690
agauaauugcaugggccaa

SEQ ID NO: 318958 - RNA, 19 nt, Artificial Sequence
  Description of Artificial Sequence: Synthetic oligonucleotide
  Antisense Strand to SEQ ID NO: 318957
uuggcccaugcaauuaucu

SEQ ID NO: 318959 - RNA, 19 nt, Artificial Sequence
  Description of Artificial Sequence: Synthetic oligonucleotide
  Sense Strand Starting at position 3 of SEQ ID NO: 319007
uguaucuauccauauguua

SEQ ID NO: 318960 - RNA, 19 nt, Artificial Sequence
  Description of Artificial Sequence: Synthetic oligonucleotide
  Antisense Strand to SEQ ID NO: 318959
uaacauauggauagauaca

SEQ ID NO: 318961 - RNA, 19 nt, Artificial Sequence
  Description of Artificial Sequence: Synthetic oligonucleotide
  Sense Strand Starting at position 3 of SEQ ID NO: 319119
auguaugaucgauaucuau

SEQ ID NO: 318962 - RNA, 19 nt, Artificial Sequence
  Description of Artificial Sequence: Synthetic oligonucleotide
  Antisense Strand to SEQ ID NO: 318961
auagauaucgaucauacau

SEQ ID NO: 318963 - RNA, 19 nt, Artificial Sequence
  Description of Artificial Sequence: Synthetic oligonucleotide
  Sense Strand Starting at position 3 of SEQ ID NO: 319173
uguggaugugucuaucuau

SEQ ID NO: 318964 - RNA, 19 nt, Artificial Sequence
  Description of Artificial Sequence: Synthetic oligonucleotide
  Antisense Strand to SEQ ID NO: 318963
auagauagacacauccaca

SEQ ID NO: 318965 - RNA, 19 nt, Artificial Sequence
  Description of Artificial Sequence: Synthetic oligonucleotide
  Sense Strand Starting at position 3 of SEQ ID NO: 319176
ggaugugucuaucuaucua

SEQ ID NO: 318966 - RNA, 19 nt, Artificial Sequence
  Description of Artificial Sequence: Synthetic oligonucleotide
  Antisense Strand to SEQ ID NO: 318965
uagauagauagacacaucc

SEQ ID NO: 318967 - RNA, 19 nt, Artificial Sequence
  Description of Artificial Sequence: Synthetic oligonucleotide
  Sense Strand Starting at position 4 of SEQ ID NO: 315274
cggugagcaguuugaaaca

SEQ ID NO: 318968 - RNA, 19 nt, Artificial Sequence
  Description of Artificial Sequence: Synthetic oligonucleotide
  Antisense Strand to SEQ ID NO: 318967
uguuucaaacugcucaccg

SEQ ID NO: 318969 - RNA, 19 nt, Artificial Sequence
  Description of Artificial Sequence: Synthetic oligonucleotide
  Sense Strand Starting at position 4 of SEQ ID NO: 315421
guagaaucaguggagcaca

SEQ ID NO: 318970 - RNA, 19 nt, Artificial Sequence
  Description of Artificial Sequence: Synthetic oligonucleotide
  Antisense Strand to SEQ ID NO: 318969
ugugcuccacugauucuac

SEQ ID NO: 318971 - RNA, 19 nt, Artificial Sequence
  Description of Artificial Sequence: Synthetic oligonucleotide
  Sense Strand Starting at position 4 of SEQ ID NO: 315462
aaacgacuucccuguuaug

SEQ ID NO: 318972 - RNA, 19 nt, Artificial Sequence
  Description of Artificial Sequence: Synthetic oligonucleotide
  Antisense Strand to SEQ ID NO: 318971
cauaacagggaagucguuu

SEQ ID NO: 318973 - RNA, 19 nt, Artificial Sequence
  Description of Artificial Sequence: Synthetic oligonucleotide
  Sense Strand Starting at position 4 of SEQ ID NO: 315518
ugugguagacacugcuaaa

SEQ ID NO: 318974 - RNA, 19 nt, Artificial Sequence
  Description of Artificial Sequence: Synthetic oligonucleotide
  Antisense Strand to SEQ ID NO: 318973
uuuagcagugucuaccaca

SEQ ID NO: 318975 - RNA, 19 nt, Artificial Sequence
  Description of Artificial Sequence: Synthetic oligonucleotide
  Sense Strand Starting at position 4 of SEQ ID NO: 315546
gggacuaaguuauucuaug

SEQ ID NO: 318976 - RNA, 19 nt, Artificial Sequence
  Description of Artificial Sequence: Synthetic oligonucleotide
  Antisense Strand to SEQ ID NO: 318975
cauagaauaacuuaguccc

SEQ ID NO: 318977 - RNA, 19 nt, Artificial Sequence
  Description of Artificial Sequence: Synthetic oligonucleotide
  Sense Strand Starting at position 4 of SEQ ID NO: 315547
ggacuaaguuauucuaugu

SEQ ID NO: 318978 - RNA, 19 nt, Artificial Sequence
  Description of Artificial Sequence: Synthetic oligonucleotide
  Antisense Strand to SEQ ID NO: 318977
acauagaauaacuuagucc

SEQ ID NO: 318979 - RNA, 19 nt, Artificial Sequence
  Description of Artificial Sequence: Synthetic oligonucleotide
  Sense Strand Starting at position 4 of SEQ ID NO: 315584
aguguuccauuaucucuaa

SEQ ID NO: 318980 - RNA, 19 nt, Artificial Sequence
  Description of Artificial Sequence: Synthetic oligonucleotide
  Antisense Strand to SEQ ID NO: 318979
uuagagauaauggaacacu

SEQ ID NO: 318981 - RNA, 19 nt, Artificial Sequence
  Description of Artificial Sequence: Synthetic oligonucleotide
  Sense Strand Starting at position 4 of SEQ ID NO: 315680
gucuguggccuugaacaua

SEQ ID NO: 318982 - RNA, 19 nt, Artificial Sequence
  Description of Artificial Sequence: Synthetic oligonucleotide
  Antisense Strand to SEQ ID NO: 318981
uauguucaaggccacagac

SEQ ID NO: 318983 - RNA, 19 nt, Artificial Sequence
  Description of Artificial Sequence: Synthetic oligonucleotide
  Sense Strand Starting at position 4 of SEQ ID NO: 315985
accuguuguccagacaugu

SEQ ID NO: 318984 - RNA, 19 nt, Artificial Sequence
  Description of Artificial Sequence: Synthetic oligonucleotide
  Antisense Strand to SEQ ID NO: 318983
acaugucuggacaacaggu

SEQ ID NO: 318985 - RNA, 19 nt, Artificial Sequence
  Description of Artificial Sequence: Synthetic oligonucleotide
  Sense Strand Starting at position 4 of SEQ ID NO: 315989
guuguccagacauguacaa

SEQ ID NO: 318986 - RNA, 19 nt, Artificial Sequence
  Description of Artificial Sequence: Synthetic oligonucleotide
  Antisense Strand to SEQ ID NO: 318985
uuguacaugucuggacaac

SEQ ID NO: 318987 - RNA, 19 nt, Artificial Sequence
  Description of Artificial Sequence: Synthetic oligonucleotide
  Sense Strand Starting at position 4 of SEQ ID NO: 316017
cagaauaaucaacguggga

SEQ ID NO: 318988 - RNA, 19 nt, Artificial Sequence
  Description of Artificial Sequence: Synthetic oligonucleotide
  Antisense Strand to SEQ ID NO: 318987
ucccacguugauuauucug

SEQ ID NO: 318989 - RNA, 19 nt, Artificial Sequence
  Description of Artificial Sequence: Synthetic oligonucleotide
  Sense Strand Starting at position 4 of SEQ ID NO: 316168
aggagaguugcacgggauu

SEQ ID NO: 318990 - RNA, 19 nt, Artificial Sequence
  Description of Artificial Sequence: Synthetic oligonucleotide
  Antisense Strand to SEQ ID NO: 318989
aaucccgugcaacucuccu

SEQ ID NO: 318991 - RNA, 19 nt, Artificial Sequence
  Description of Artificial Sequence: Synthetic oligonucleotide
  Sense Strand Starting at position 4 of SEQ ID NO: 316170
gagaguugcacgggauuac

SEQ ID NO: 318992 - RNA, 19 nt, Artificial Sequence
  Description of Artificial Sequence: Synthetic oligonucleotide
  Antisense Strand to SEQ ID NO: 318991
guaaucccgugcaacucuc

SEQ ID NO: 318993 - RNA, 19 nt, Artificial Sequence
  Description of Artificial Sequence: Synthetic oligonucleotide
  Sense Strand Starting at position 4 of SEQ ID NO: 316179
acgggauuaccagacuggu

SEQ ID NO: 318994 - RNA, 19 nt, Artificial Sequence
  Description of Artificial Sequence: Synthetic oligonucleotide
  Antisense Strand to SEQ ID NO: 318993
accagucugguaaucccgu

SEQ ID NO: 318995 - RNA, 19 nt, Artificial Sequence
  Description of Artificial Sequence: Synthetic oligonucleotide
  Sense Strand Starting at position 4 of SEQ ID NO: 316279
acgcuaaagggauacguau

SEQ ID NO: 318996 - RNA, 19 nt, Artificial Sequence
  Description of Artificial Sequence: Synthetic oligonucleotide
  Antisense Strand to SEQ ID NO: 318995
auacguaucccuuuagcgu

SEQ ID NO: 318997 - RNA, 19 nt, Artificial Sequence
  Description of Artificial Sequence: Synthetic oligonucleotide
  Sense Strand Starting at position 4 of SEQ ID NO: 316533
ggaugaccguggagagauc

SEQ ID NO: 318998 - RNA, 19 nt, Artificial Sequence
  Description of Artificial Sequence: Synthetic oligonucleotide
  Antisense Strand to SEQ ID NO: 318997
gaucucuccacggucaucc

SEQ ID NO: 318999 - RNA, 19 nt, Artificial Sequence
  Description of Artificial Sequence: Synthetic oligonucleotide
  Sense Strand Starting at position 4 of SEQ ID NO: 316637
gaugacuuacuucgaaggu

SEQ ID NO: 319000 - RNA, 19 nt, Artificial Sequence
  Description of Artificial Sequence: Synthetic oligonucleotide
  Antisense Strand to SEQ ID NO: 318999
accuucgaaguaagucauc

SEQ ID NO: 319001 - RNA, 19 nt, Artificial Sequence
  Description of Artificial Sequence: Synthetic oligonucleotide
  Sense Strand Starting at position 4 of SEQ ID NO: 317415
cugcgagacugucuggaau

SEQ ID NO: 319002 - RNA, 19 nt, Artificial Sequence
  Description of Artificial Sequence: Synthetic oligonucleotide
  Antisense Strand to SEQ ID NO: 319001
auuccagacagucucgcag

SEQ ID NO: 319003 - RNA, 19 nt, Artificial Sequence
  Description of Artificial Sequence: Synthetic oligonucleotide
  Sense Strand Starting at position 4 of SEQ ID NO: 317418
cgagacugucuggaaucuu

SEQ ID NO: 319004 - RNA, 19 nt, Artificial Sequence
  Description of Artificial Sequence: Synthetic oligonucleotide
  Antisense Strand to SEQ ID NO: 319003
aagauuccagacagucucg

SEQ ID NO: 319005 - RNA, 19 nt, Artificial Sequence
  Description of Artificial Sequence: Synthetic oligonucleotide
  Sense Strand Starting at position 4 of SEQ ID NO: 317502
agugcuguucguaggcaga

SEQ ID NO: 319006 - RNA, 19 nt, Artificial Sequence
  Description of Artificial Sequence: Synthetic oligonucleotide
  Antisense Strand to SEQ ID NO: 319005
ucugccuacgaacagcacu

SEQ ID NO: 319007 - RNA, 19 nt, Artificial Sequence
  Description of Artificial Sequence: Synthetic oligonucleotide
  Sense Strand Starting at position 4 of SEQ ID NO: 317559
gaucgugaaggucaucgua

SEQ ID NO: 319008 - RNA, 19 nt, Artificial Sequence
  Description of Artificial Sequence: Synthetic oligonucleotide
  Antisense Strand to SEQ ID NO: 319007
uacgaugaccuucacgauc

SEQ ID NO: 319009 - RNA, 19 nt, Artificial Sequence
  Description of Artificial Sequence: Synthetic oligonucleotide
  Sense Strand Starting at position 4 of SEQ ID NO: 317581
cgcgucuaacccguugaga

SEQ ID NO: 319010 - RNA, 19 nt, Artificial Sequence
  Description of Artificial Sequence: Synthetic oligonucleotide
  Antisense Strand to SEQ ID NO: 319009
ucucaacggguuagacgcg

SEQ ID NO: 319011 - RNA, 19 nt, Artificial Sequence
  Description of Artificial Sequence: Synthetic oligonucleotide
  Sense Strand Starting at position 4 of SEQ ID NO: 317631
uguuguggcagauacgauu

SEQ ID NO: 319012 - RNA, 19 nt, Artificial Sequence
  Description of Artificial Sequence: Synthetic oligonucleotide
  Antisense Strand to SEQ ID NO: 319011
aaucguaucugccacaaca

SEQ ID NO: 319013 - RNA, 19 nt, Artificial Sequence
  Description of Artificial Sequence: Synthetic oligonucleotide
  Sense Strand Starting at position 4 of SEQ ID NO: 317729
cugccuggucucuagauaa

SEQ ID NO: 319014 - RNA, 19 nt, Artificial Sequence
  Description of Artificial Sequence: Synthetic oligonucleotide
  Antisense Strand to SEQ ID NO: 319013
uuaucuagagaccaggcag

SEQ ID NO: 319015 - RNA, 19 nt, Artificial Sequence
  Description of Artificial Sequence: Synthetic oligonucleotide
  Sense Strand Starting at position 4 of SEQ ID NO: 317765
agucuuagaaguggcaaga

SEQ ID NO: 319016 - RNA, 19 nt, Artificial Sequence
  Description of Artificial Sequence: Synthetic oligonucleotide
  Antisense Strand to SEQ ID NO: 319015
ucuugccacuucuaagacu

SEQ ID NO: 319017 - RNA, 19 nt, Artificial Sequence
  Description of Artificial Sequence: Synthetic oligonucleotide
  Sense Strand Starting at position 4 of SEQ ID NO: 317776
uggcaagagccuuagaaau

SEQ ID NO: 319018 - RNA, 19 nt, Artificial Sequence
  Description of Artificial Sequence: Synthetic oligonucleotide
  Antisense Strand to SEQ ID NO: 319017
auuucuaaggcucuugcca

SEQ ID NO: 319019 - RNA, 19 nt, Artificial Sequence
  Description of Artificial Sequence: Synthetic oligonucleotide
  Sense Strand Starting at position 4 of SEQ ID NO: 317910
uugaguucuucccuaccuu

SEQ ID NO: 319020 - RNA, 19 nt, Artificial Sequence
  Description of Artificial Sequence: Synthetic oligonucleotide
  Antisense Strand to SEQ ID NO: 319019
aagguagggaagaacucaa

SEQ ID NO: 319021 - RNA, 19 nt, Artificial Sequence
  Description of Artificial Sequence: Synthetic oligonucleotide
  Sense Strand Starting at position 4 of SEQ ID NO: 317970
ccauuacagcccuaugagu

SEQ ID NO: 319022 - RNA, 19 nt, Artificial Sequence
  Description of Artificial Sequence: Synthetic oligonucleotide
  Antisense Strand to SEQ ID NO: 319021
acucauagggcuguaaugg

SEQ ID NO: 319023 - RNA, 19 nt, Artificial Sequence
  Description of Artificial Sequence: Synthetic oligonucleotide
  Sense Strand Starting at position 4 of SEQ ID NO: 317978
gcccuaugaguagguauua

SEQ ID NO: 319024 - RNA, 19 nt, Artificial Sequence
  Description of Artificial Sequence: Synthetic oligonucleotide
  Antisense Strand to SEQ ID NO: 319023
uaauaccuacucauagggc

SEQ ID NO: 319025 - RNA, 19 nt, Artificial Sequence
  Description of Artificial Sequence: Synthetic oligonucleotide
  Sense Strand Starting at position 4 of SEQ ID NO: 317979
cccuaugaguagguauuau

SEQ ID NO: 319026 - RNA, 19 nt, Artificial Sequence
  Description of Artificial Sequence: Synthetic oligonucleotide
  Antisense Strand to SEQ ID NO: 319025
auaauaccuacucauaggg

SEQ ID NO: 319027 - RNA, 19 nt, Artificial Sequence
  Description of Artificial Sequence: Synthetic oligonucleotide
  Sense Strand Starting at position 4 of SEQ ID NO: 318361
gguaaagugacuuguccau

SEQ ID NO: 319028 - RNA, 19 nt, Artificial Sequence
  Description of Artificial Sequence: Synthetic oligonucleotide
  Antisense Strand to SEQ ID NO: 319027
auggacaagucacuuuacc

SEQ ID NO: 319029 - RNA, 19 nt, Artificial Sequence
  Description of Artificial Sequence: Synthetic oligonucleotide
  Sense Strand Starting at position 4 of SEQ ID NO: 318454
uugauagaccaaugcaaua

SEQ ID NO: 319030 - RNA, 19 nt, Artificial Sequence
  Description of Artificial Sequence: Synthetic oligonucleotide
  Antisense Strand to SEQ ID NO: 319029
uauugcauuggucuaucaa

SEQ ID NO: 319031 - RNA, 19 nt, Artificial Sequence
  Description of Artificial Sequence: Synthetic oligonucleotide
  Sense Strand Starting at position 4 of SEQ ID NO: 318497
ggugcauccauguaacuug

SEQ ID NO: 319032 - RNA, 19 nt, Artificial Sequence
  Description of Artificial Sequence: Synthetic oligonucleotide
  Antisense Strand to SEQ ID NO: 319031
caaguuacauggaugcacc

SEQ ID NO: 319033 - RNA, 19 nt, Artificial Sequence
  Description of Artificial Sequence: Synthetic oligonucleotide
  Sense Strand Starting at position 4 of SEQ ID NO: 318505
cauguaacuugaucuguga

SEQ ID NO: 319034 - RNA, 19 nt, Artificial Sequence
  Description of Artificial Sequence: Synthetic oligonucleotide
  Antisense Strand to SEQ ID NO: 319033
ucacagaucaaguuacaug

SEQ ID NO: 319035 - RNA, 19 nt, Artificial Sequence
  Description of Artificial Sequence: Synthetic oligonucleotide
  Sense Strand Starting at position 4 of SEQ ID NO: 318508
guaacuugaucugugacag

SEQ ID NO: 319036 - RNA, 19 nt, Artificial Sequence
  Description of Artificial Sequence: Synthetic oligonucleotide
  Antisense Strand to SEQ ID NO: 319035
cugucacagaucaaguuac

SEQ ID NO: 319037 - RNA, 19 nt, Artificial Sequence
  Description of Artificial Sequence: Synthetic oligonucleotide
  Sense Strand Starting at position 4 of SEQ ID NO: 318509
uaacuugaucugugacaga

SEQ ID NO: 319038 - RNA, 19 nt, Artificial Sequence
  Description of Artificial Sequence: Synthetic oligonucleotide
  Antisense Strand to SEQ ID NO: 319037
ucugucacagaucaaguua

SEQ ID NO: 319039 - RNA, 19 nt, Artificial Sequence
  Description of Artificial Sequence: Synthetic oligonucleotide
  Sense Strand Starting at position 4 of SEQ ID NO: 318576
uggaacaauugguuauaca

SEQ ID NO: 319040 - RNA, 19 nt, Artificial Sequence
  Description of Artificial Sequence: Synthetic oligonucleotide
  Antisense Strand to SEQ ID NO: 319039
uguauaaccaauuguucca

SEQ ID NO: 319041 - RNA, 19 nt, Artificial Sequence
  Description of Artificial Sequence: Synthetic oligonucleotide
  Sense Strand Starting at position 4 of SEQ ID NO: 318654
agaucaaacgcuuaaaugu

SEQ ID NO: 319042 - RNA, 19 nt, Artificial Sequence
  Description of Artificial Sequence: Synthetic oligonucleotide
  Antisense Strand to SEQ ID NO: 319041
acauuuaagcguuugaucu

SEQ ID NO: 319043 - RNA, 19 nt, Artificial Sequence
  Description of Artificial Sequence: Synthetic oligonucleotide
  Sense Strand Starting at position 4 of SEQ ID NO: 318715
ucuuuaugaacuugggagu

SEQ ID NO: 319044 - RNA, 19 nt, Artificial Sequence
  Description of Artificial Sequence: Synthetic oligonucleotide
  Antisense Strand to SEQ ID NO: 319043
acucccaaguucauaaaga

SEQ ID NO: 319045 - RNA, 19 nt, Artificial Sequence
  Description of Artificial Sequence: Synthetic oligonucleotide
  Sense Strand Starting at position 4 of SEQ ID NO: 318716
cuuuaugaacuugggagua

SEQ ID NO: 319046 - RNA, 19 nt, Artificial Sequence
  Description of Artificial Sequence: Synthetic oligonucleotide
  Antisense Strand to SEQ ID NO: 319045
uacucccaaguucauaaag

SEQ ID NO: 319047 - RNA, 19 nt, Artificial Sequence
  Description of Artificial Sequence: Synthetic oligonucleotide
  Sense Strand Starting at position 5 of SEQ ID NO: 315680
gguguaggcucagaaagga

SEQ ID NO: 319048 - RNA, 19 nt, Artificial Sequence
  Description of Artificial Sequence: Synthetic oligonucleotide
  Antisense Strand to SEQ ID NO: 319047
uccuuucugagccuacacc

SEQ ID NO: 319049 - RNA, 19 nt, Artificial Sequence
  Description of Artificial Sequence: Synthetic oligonucleotide
  Sense Strand Starting at position 5 of SEQ ID NO: 315706
gagagaacaucucgaguaa

SEQ ID NO: 319050 - RNA, 19 nt, Artificial Sequence
  Description of Artificial Sequence: Synthetic oligonucleotide
  Antisense Strand to SEQ ID NO: 319049
uuacucgagauguucucuc

SEQ ID NO: 319051 - RNA, 19 nt, Artificial Sequence
  Description of Artificial Sequence: Synthetic oligonucleotide
  Sense Strand Starting at position 5 of SEQ ID NO: 315909
cacagucuguaagcgauaa

SEQ ID NO: 319052 - RNA, 19 nt, Artificial Sequence
  Description of Artificial Sequence: Synthetic oligonucleotide
  Antisense Strand to SEQ ID NO: 319051
uuaucgcuuacagacugug

SEQ ID NO: 319053 - RNA, 19 nt, Artificial Sequence
  Description of Artificial Sequence: Synthetic oligonucleotide
  Sense Strand Starting at position 5 of SEQ ID NO: 315913
gucuguaagcgauaagaaa

SEQ ID NO: 319054 - RNA, 19 nt, Artificial Sequence
  Description of Artificial Sequence: Synthetic oligonucleotide
  Antisense Strand to SEQ ID NO: 319053
uuucuuaucgcuuacagac

SEQ ID NO: 319055 - RNA, 19 nt, Artificial Sequence
  Description of Artificial Sequence: Synthetic oligonucleotide
  Sense Strand Starting at position 5 of SEQ ID NO: 315937
ucaccuucucccugaggga

SEQ ID NO: 319056 - RNA, 19 nt, Artificial Sequence
  Description of Artificial Sequence: Synthetic oligonucleotide
  Antisense Strand to SEQ ID NO: 319055
ucccucagggagaagguga

SEQ ID NO: 319057 - RNA, 19 nt, Artificial Sequence
  Description of Artificial Sequence: Synthetic oligonucleotide
  Sense Strand Starting at position 5 of SEQ ID NO: 316032
gcagauagauggcuauuau

SEQ ID NO: 319058 - RNA, 19 nt, Artificial Sequence
  Description of Artificial Sequence: Synthetic oligonucleotide
  Antisense Strand to SEQ ID NO: 319057
auaauagccaucuaucugc

SEQ ID NO: 319059 - RNA, 19 nt, Artificial Sequence
  Description of Artificial Sequence: Synthetic oligonucleotide
  Sense Strand Starting at position 5 of SEQ ID NO: 316288
gcucuucugcccucgguaa

SEQ ID NO: 319060 - RNA, 19 nt, Artificial Sequence
  Description of Artificial Sequence: Synthetic oligonucleotide
  Antisense Strand to SEQ ID NO: 319059
uuaccgagggcagaagagc

SEQ ID NO: 319061 - RNA, 19 nt, Artificial Sequence
  Description of Artificial Sequence: Synthetic oligonucleotide
  Sense Strand Starting at position 5 of SEQ ID NO: 316289
cucuucugcccucgguaaa

SEQ ID NO: 319062 - RNA, 19 nt, Artificial Sequence
  Description of Artificial Sequence: Synthetic oligonucleotide
  Antisense Strand to SEQ ID NO: 319061
uuuaccgagggcagaagag

SEQ ID NO: 319063 - RNA, 19 nt, Artificial Sequence
  Description of Artificial Sequence: Synthetic oligonucleotide
  Sense Strand Starting at position 5 of SEQ ID NO: 316433
caccguaguucuccguuau

SEQ ID NO: 319064 - RNA, 19 nt, Artificial Sequence
  Description of Artificial Sequence: Synthetic oligonucleotide
  Antisense Strand to SEQ ID NO: 319063
auaacggagaacuacggug

SEQ ID NO: 319065 - RNA, 19 nt, Artificial Sequence
  Description of Artificial Sequence: Synthetic oligonucleotide
  Sense Strand Starting at position 5 of SEQ ID NO: 316434
accguaguucuccguuauc

SEQ ID NO: 319066 - RNA, 19 nt, Artificial Sequence
  Description of Artificial Sequence: Synthetic oligonucleotide
  Antisense Strand to SEQ ID NO: 319065
gauaacggagaacuacggu

SEQ ID NO: 319067 - RNA, 19 nt, Artificial Sequence
  Description of Artificial Sequence: Synthetic oligonucleotide
  Sense Strand Starting at position 5 of SEQ ID NO: 316513
gcccuauguggguagggau

SEQ ID NO: 319068 - RNA, 19 nt, Artificial Sequence
  Description of Artificial Sequence: Synthetic oligonucleotide
  Antisense Strand to SEQ ID NO: 319067
aucccuacccacauagggc

SEQ ID NO: 319069 - RNA, 19 nt, Artificial Sequence
  Description of Artificial Sequence: Synthetic oligonucleotide
  Sense Strand Starting at position 5 of SEQ ID NO: 317022
ucugcuuaccggucacgua

SEQ ID NO: 319070 - RNA, 19 nt, Artificial Sequence
  Description of Artificial Sequence: Synthetic oligonucleotide
  Antisense Strand to SEQ ID NO: 319069
uacgugaccgguaagcaga

SEQ ID NO: 319071 - RNA, 19 nt, Artificial Sequence
  Description of Artificial Sequence: Synthetic oligonucleotide
  Sense Strand Starting at position 5 of SEQ ID NO: 317331
gcugaaagauuagccacau

SEQ ID NO: 319072 - RNA, 19 nt, Artificial Sequence
  Description of Artificial Sequence: Synthetic oligonucleotide
  Antisense Strand to SEQ ID NO: 319071
auguggcuaaucuuucagc

SEQ ID NO: 319073 - RNA, 19 nt, Artificial Sequence
  Description of Artificial Sequence: Synthetic oligonucleotide
  Sense Strand Starting at position 5 of SEQ ID NO: 317409
cugggagcucaagguuuau

SEQ ID NO: 319074 - RNA, 19 nt, Artificial Sequence
  Description of Artificial Sequence: Synthetic oligonucleotide
  Antisense Strand to SEQ ID NO: 319073
auaaaccuugagcucccag

SEQ ID NO: 319075 - RNA, 19 nt, Artificial Sequence
  Description of Artificial Sequence: Synthetic oligonucleotide
  Sense Strand Starting at position 5 of SEQ ID NO: 317730
ucagccgaccuuugugaau

SEQ ID NO: 319076 - RNA, 19 nt, Artificial Sequence
  Description of Artificial Sequence: Synthetic oligonucleotide
  Antisense Strand to SEQ ID NO: 319075
auucacaaaggucggcuga

SEQ ID NO: 319077 - RNA, 19 nt, Artificial Sequence
  Description of Artificial Sequence: Synthetic oligonucleotide
  Sense Strand Starting at position 5 of SEQ ID NO: 317818
gacaacguggccuguauaa

SEQ ID NO: 319078 - RNA, 19 nt, Artificial Sequence
  Description of Artificial Sequence: Synthetic oligonucleotide
  Antisense Strand to SEQ ID NO: 319077
uuauacaggccacguuguc

SEQ ID NO: 319079 - RNA, 19 nt, Artificial Sequence
  Description of Artificial Sequence: Synthetic oligonucleotide
  Sense Strand Starting at position 5 of SEQ ID NO: 317820
caacguggccuguauaaau

SEQ ID NO: 319080 - RNA, 19 nt, Artificial Sequence
  Description of Artificial Sequence: Synthetic oligonucleotide
  Antisense Strand to SEQ ID NO: 319079
auuuauacaggccacguug

SEQ ID NO: 319081 - RNA, 19 nt, Artificial Sequence
  Description of Artificial Sequence: Synthetic oligonucleotide
  Sense Strand Starting at position 5 of SEQ ID NO: 317860
gcagacuucucugcacuca

SEQ ID NO: 319082 - RNA, 19 nt, Artificial Sequence
  Description of Artificial Sequence: Synthetic oligonucleotide
  Antisense Strand to SEQ ID NO: 319081
ugagugcagagaagucugc

SEQ ID NO: 319083 - RNA, 19 nt, Artificial Sequence
  Description of Artificial Sequence: Synthetic oligonucleotide
  Sense Strand Starting at position 5 of SEQ ID NO: 317908
caccgauucccucgggaag

SEQ ID NO: 319084 - RNA, 19 nt, Artificial Sequence
  Description of Artificial Sequence: Synthetic oligonucleotide
  Antisense Strand to SEQ ID NO: 319083
cuucccgagggaaucggug

SEQ ID NO: 319085 - RNA, 19 nt, Artificial Sequence
  Description of Artificial Sequence: Synthetic oligonucleotide
  Sense Strand Starting at position 5 of SEQ ID NO: 317909
accgauucccucgggaagu

SEQ ID NO: 319086 - RNA, 19 nt, Artificial Sequence
  Description of Artificial Sequence: Synthetic oligonucleotide
  Antisense Strand to SEQ ID NO: 319085
acuucccgagggaaucggu

SEQ ID NO: 319087 - RNA, 19 nt, Artificial Sequence
  Description of Artificial Sequence: Synthetic oligonucleotide
  Sense Strand Starting at position 5 of SEQ ID NO: 317911
cgauucccucgggaaguua

SEQ ID NO: 319088 - RNA, 19 nt, Artificial Sequence
  Description of Artificial Sequence: Synthetic oligonucleotide
  Antisense Strand to SEQ ID NO: 319087
uaacuucccgagggaaucg

SEQ ID NO: 319089 - RNA, 19 nt, Artificial Sequence
  Description of Artificial Sequence: Synthetic oligonucleotide
  Sense Strand Starting at position 5 of SEQ ID NO: 317946
ugaugcuacugcuuuauau

SEQ ID NO: 319090 - RNA, 19 nt, Artificial Sequence
  Description of Artificial Sequence: Synthetic oligonucleotide
  Antisense Strand to SEQ ID NO: 319089
auauaaagcaguagcauca

SEQ ID NO: 319091 - RNA, 19 nt, Artificial Sequence
  Description of Artificial Sequence: Synthetic oligonucleotide
  Sense Strand Starting at position 5 of SEQ ID NO: 317968
acgugaauauuccuccaau

SEQ ID NO: 319092 - RNA, 19 nt, Artificial Sequence
  Description of Artificial Sequence: Synthetic oligonucleotide
  Antisense Strand to SEQ ID NO: 319091
auuggaggaauauucacgu

SEQ ID NO: 319093 - RNA, 19 nt, Artificial Sequence
  Description of Artificial Sequence: Synthetic oligonucleotide
  Sense Strand Starting at position 5 of SEQ ID NO: 317969
cgugaauauuccuccaauu

SEQ ID NO: 319094 - RNA, 19 nt, Artificial Sequence
  Description of Artificial Sequence: Synthetic oligonucleotide
  Antisense Strand to SEQ ID NO: 319093
aauuggaggaauauucacg

SEQ ID NO: 319095 - RNA, 19 nt, Artificial Sequence
  Description of Artificial Sequence: Synthetic oligonucleotide
  Sense Strand Starting at position 5 of SEQ ID NO: 318060
ggcaucaaucccgauauug

SEQ ID NO: 319096 - RNA, 19 nt, Artificial Sequence
  Description of Artificial Sequence: Synthetic oligonucleotide
  Antisense Strand to SEQ ID NO: 319095
caauaucgggauugaugcc

SEQ ID NO: 319097 - RNA, 19 nt, Artificial Sequence
  Description of Artificial Sequence: Synthetic oligonucleotide
  Sense Strand Starting at position 5 of SEQ ID NO: 318105
agaggaauauguuaaguga

SEQ ID NO: 319098 - RNA, 19 nt, Artificial Sequence
  Description of Artificial Sequence: Synthetic oligonucleotide
  Antisense Strand to SEQ ID NO: 319097
ucacuuaacauauuccucu

SEQ ID NO: 319099 - RNA, 19 nt, Artificial Sequence
  Description of Artificial Sequence: Synthetic oligonucleotide
  Sense Strand Starting at position 5 of SEQ ID NO: 318108
ggaauauguuaagugacuu

SEQ ID NO: 319100 - RNA, 19 nt, Artificial Sequence
  Description of Artificial Sequence: Synthetic oligonucleotide
  Antisense Strand to SEQ ID NO: 319099
aagucacuuaacauauucc

SEQ ID NO: 319101 - RNA, 19 nt, Artificial Sequence
  Description of Artificial Sequence: Synthetic oligonucleotide
  Sense Strand Starting at position 5 of SEQ ID NO: 318296
caaacuggaugugauauua

SEQ ID NO: 319102 - RNA, 19 nt, Artificial Sequence
  Description of Artificial Sequence: Synthetic oligonucleotide
  Antisense Strand to SEQ ID NO: 319101
uaauaucacauccaguuug

SEQ ID NO: 319103 - RNA, 19 nt, Artificial Sequence
  Description of Artificial Sequence: Synthetic oligonucleotide
  Sense Strand Starting at position 5 of SEQ ID NO: 318304
augugauauuaaggaacug

SEQ ID NO: 319104 - RNA, 19 nt, Artificial Sequence
  Description of Artificial Sequence: Synthetic oligonucleotide
  Antisense Strand to SEQ ID NO: 319103
caguuccuuaauaucacau

SEQ ID NO: 319105 - RNA, 19 nt, Artificial Sequence
  Description of Artificial Sequence: Synthetic oligonucleotide
  Sense Strand Starting at position 5 of SEQ ID NO: 318321
uggccacgcauugaucaua

SEQ ID NO: 319106 - RNA, 19 nt, Artificial Sequence
  Description of Artificial Sequence: Synthetic oligonucleotide
  Antisense Strand to SEQ ID NO: 319105
uaugaucaaugcguggcca

SEQ ID NO: 319107 - RNA, 19 nt, Artificial Sequence
  Description of Artificial Sequence: Synthetic oligonucleotide
  Sense Strand Starting at position 5 of SEQ ID NO: 318324
ccacgcauugaucauaguu

SEQ ID NO: 319108 - RNA, 19 nt, Artificial Sequence
  Description of Artificial Sequence: Synthetic oligonucleotide
  Antisense Strand to SEQ ID NO: 319107
aacuaugaucaaugcgugg

SEQ ID NO: 319109 - RNA, 19 nt, Artificial Sequence
  Description of Artificial Sequence: Synthetic oligonucleotide
  Sense Strand Starting at position 5 of SEQ ID NO: 318672
gcgcccaguccauuauguu

SEQ ID NO: 319110 - RNA, 19 nt, Artificial Sequence
  Description of Artificial Sequence: Synthetic oligonucleotide
  Antisense Strand to SEQ ID NO: 319109
aacauaauggacugggcgc

SEQ ID NO: 319111 - RNA, 19 nt, Artificial Sequence
  Description of Artificial Sequence: Synthetic oligonucleotide
  Sense Strand Starting at position 5 of SEQ ID NO: 318673
cgcccaguccauuauguua

SEQ ID NO: 319112 - RNA, 19 nt, Artificial Sequence
  Description of Artificial Sequence: Synthetic oligonucleotide
  Antisense Strand to SEQ ID NO: 319111
uaacauaauggacugggcg

SEQ ID NO: 319113 - RNA, 19 nt, Artificial Sequence
  Description of Artificial Sequence: Synthetic oligonucleotide
  Sense Strand Starting at position 5 of SEQ ID NO: 318684
uuauguuauucuccuugca

SEQ ID NO: 319114 - RNA, 19 nt, Artificial Sequence
  Description of Artificial Sequence: Synthetic oligonucleotide
  Antisense Strand to SEQ ID NO: 319113
ugcaaggagaauaacauaa

SEQ ID NO: 319115 - RNA, 19 nt, Artificial Sequence
  Description of Artificial Sequence: Synthetic oligonucleotide
  Sense Strand Starting at position 5 of SEQ ID NO: 318717
ccacccagucagcaagauu

SEQ ID NO: 319116 - RNA, 19 nt, Artificial Sequence
  Description of Artificial Sequence: Synthetic oligonucleotide
  Antisense Strand to SEQ ID NO: 319115
aaucuugcugacugggugg

SEQ ID NO: 319117 - RNA, 19 nt, Artificial Sequence
  Description of Artificial Sequence: Synthetic oligonucleotide
  Sense Strand Starting at position 5 of SEQ ID NO: 318744
uuggguaaaugauggaauu

SEQ ID NO: 319118 - RNA, 19 nt, Artificial Sequence
  Description of Artificial Sequence: Synthetic oligonucleotide
  Antisense Strand to SEQ ID NO: 319117
aauuccaucauuuacccaa

SEQ ID NO: 319119 - RNA, 19 nt, Artificial Sequence
  Description of Artificial Sequence: Synthetic oligonucleotide
  Sense Strand Starting at position 5 of SEQ ID NO: 318766
aggucaauuucuuaggaug

SEQ ID NO: 319120 - RNA, 19 nt, Artificial Sequence
  Description of Artificial Sequence: Synthetic oligonucleotide
  Antisense Strand to SEQ ID NO: 319119
cauccuaagaaauugaccu

SEQ ID NO: 319121 - RNA, 19 nt, Artificial Sequence
  Description of Artificial Sequence: Synthetic oligonucleotide
  Sense Strand Starting at position 5 of SEQ ID NO: 318846
gccuaagaauuagagaaag

SEQ ID NO: 319122 - RNA, 19 nt, Artificial Sequence
  Description of Artificial Sequence: Synthetic oligonucleotide
  Antisense Strand to SEQ ID NO: 319121
cuuucucuaauucuuaggc

SEQ ID NO: 319123 - RNA, 19 nt, Artificial Sequence
  Description of Artificial Sequence: Synthetic oligonucleotide
  Sense Strand Starting at position 5 of SEQ ID NO: 318923
guaagaucucuugagccua

SEQ ID NO: 319124 - RNA, 19 nt, Artificial Sequence
  Description of Artificial Sequence: Synthetic oligonucleotide
  Antisense Strand to SEQ ID NO: 319123
uaggcucaagagaucuuac

SEQ ID NO: 319125 - RNA, 19 nt, Artificial Sequence
  Description of Artificial Sequence: Synthetic oligonucleotide
  Sense Strand Starting at position 5 of SEQ ID NO: 319025
ccuugaggcuuucuaagag

SEQ ID NO: 319126 - RNA, 19 nt, Artificial Sequence
  Description of Artificial Sequence: Synthetic oligonucleotide
  Antisense Strand to SEQ ID NO: 319125
cucuuagaaagccucaagg

SEQ ID NO: 319127 - RNA, 19 nt, Artificial Sequence
  Description of Artificial Sequence: Synthetic oligonucleotide
  Sense Strand Starting at position 6 of SEQ ID NO: 315333
agagauuucuuauagaccu

SEQ ID NO: 319128 - RNA, 19 nt, Artificial Sequence
  Description of Artificial Sequence: Synthetic oligonucleotide
  Antisense Strand to SEQ ID NO: 319127
aggucuauaagaaaucucu

SEQ ID NO: 319129 - RNA, 19 nt, Artificial Sequence
  Description of Artificial Sequence: Synthetic oligonucleotide
  Sense Strand Starting at position 6 of SEQ ID NO: 315590
uccuuagagucuuuggacu

SEQ ID NO: 319130 - RNA, 19 nt, Artificial Sequence
  Description of Artificial Sequence: Synthetic oligonucleotide
  Antisense Strand to SEQ ID NO: 319129
aguccaaagacucuaagga

SEQ ID NO: 319131 - RNA, 19 nt, Artificial Sequence
  Description of Artificial Sequence: Synthetic oligonucleotide
  Sense Strand Starting at position 6 of SEQ ID NO: 315682
ccaugugugcugcuaaagu

SEQ ID NO: 319132 - RNA, 19 nt, Artificial Sequence
  Description of Artificial Sequence: Synthetic oligonucleotide
  Antisense Strand to SEQ ID NO: 319131
acuuuagcagcacacaugg

SEQ ID NO: 319133 - RNA, 19 nt, Artificial Sequence
  Description of Artificial Sequence: Synthetic oligonucleotide
  Sense Strand Starting at position 6 of SEQ ID NO: 315795
agagaaauaugccaaauuu

SEQ ID NO: 319134 - RNA, 19 nt, Artificial Sequence
  Description of Artificial Sequence: Synthetic oligonucleotide
  Antisense Strand to SEQ ID NO: 319133
aaauuuggcauauuucucu

SEQ ID NO: 319135 - RNA, 19 nt, Artificial Sequence
  Description of Artificial Sequence: Synthetic oligonucleotide
  Sense Strand Starting at position 6 of SEQ ID NO: 315820
uuugguaaggaccaguuau

SEQ ID NO: 319136 - RNA, 19 nt, Artificial Sequence
  Description of Artificial Sequence: Synthetic oligonucleotide
  Antisense Strand to SEQ ID NO: 319135
auaacugguccuuaccaaa

SEQ ID NO: 319137 - RNA, 19 nt, Artificial Sequence
  Description of Artificial Sequence: Synthetic oligonucleotide
  Sense Strand Starting at position 6 of SEQ ID NO: 315937
ccgagaugauuauaauuua

SEQ ID NO: 319138 - RNA, 19 nt, Artificial Sequence
  Description of Artificial Sequence: Synthetic oligonucleotide
  Antisense Strand to SEQ ID NO: 319137
uaaauuauaaucaucucgg

SEQ ID NO: 319139 - RNA, 19 nt, Artificial Sequence
  Description of Artificial Sequence: Synthetic oligonucleotide
  Sense Strand Starting at position 6 of SEQ ID NO: 315962
guaaguucuaaguagacag

SEQ ID NO: 319140 - RNA, 19 nt, Artificial Sequence
  Description of Artificial Sequence: Synthetic oligonucleotide
  Antisense Strand to SEQ ID NO: 319139
cugucuacuuagaacuuac

SEQ ID NO: 319141 - RNA, 19 nt, Artificial Sequence
  Description of Artificial Sequence: Synthetic oligonucleotide
  Sense Strand Starting at position 6 of SEQ ID NO: 316039
ugcauaagugcucaaugaa

SEQ ID NO: 319142 - RNA, 19 nt, Artificial Sequence
  Description of Artificial Sequence: Synthetic oligonucleotide
  Antisense Strand to SEQ ID NO: 319141
uucauugagcacuuaugca

SEQ ID NO: 319143 - RNA, 19 nt, Artificial Sequence
  Description of Artificial Sequence: Synthetic oligonucleotide
  Sense Strand Starting at position 6 of SEQ ID NO: 316042
auaagugcucaaugaauaa

SEQ ID NO: 319144 - RNA, 19 nt, Artificial Sequence
  Description of Artificial Sequence: Synthetic oligonucleotide
  Antisense Strand to SEQ ID NO: 319143
uuauucauugagcacuuau

SEQ ID NO: 319145 - RNA, 19 nt, Artificial Sequence
  Description of Artificial Sequence: Synthetic oligonucleotide
  Sense Strand Starting at position 6 of SEQ ID NO: 316082
auuauacucugguuaauga

SEQ ID NO: 319146 - RNA, 19 nt, Artificial Sequence
  Description of Artificial Sequence: Synthetic oligonucleotide
  Antisense Strand to SEQ ID NO: 319145
ucauuaaccagaguauaau

SEQ ID NO: 319147 - RNA, 19 nt, Artificial Sequence
  Description of Artificial Sequence: Synthetic oligonucleotide
  Sense Strand Starting at position 6 of SEQ ID NO: 316123
ggaguauuugcauguguaa

SEQ ID NO: 319148 - RNA, 19 nt, Artificial Sequence
  Description of Artificial Sequence: Synthetic oligonucleotide
  Antisense Strand to SEQ ID NO: 319147
uuacacaugcaaauacucc

SEQ ID NO: 319149 - RNA, 19 nt, Artificial Sequence
  Description of Artificial Sequence: Synthetic oligonucleotide
  Sense Strand Starting at position 6 of SEQ ID NO: 316125
aguauuugcauguguaaca

SEQ ID NO: 319150 - RNA, 19 nt, Artificial Sequence
  Description of Artificial Sequence: Synthetic oligonucleotide
  Antisense Strand to SEQ ID NO: 319149
uguuacacaugcaaauacu

SEQ ID NO: 319151 - RNA, 19 nt, Artificial Sequence
  Description of Artificial Sequence: Synthetic oligonucleotide
  Sense Strand Starting at position 6 of SEQ ID NO: 316126
guauuugcauguguaacau

SEQ ID NO: 319152 - RNA, 19 nt, Artificial Sequence
  Description of Artificial Sequence: Synthetic oligonucleotide
  Antisense Strand to SEQ ID NO: 319151
auguuacacaugcaaauac

SEQ ID NO: 319153 - RNA, 19 nt, Artificial Sequence
  Description of Artificial Sequence: Synthetic oligonucleotide
  Sense Strand Starting at position 6 of SEQ ID NO: 316391
uccuuugugcaauaaugau

SEQ ID NO: 319154 - RNA, 19 nt, Artificial Sequence
  Description of Artificial Sequence: Synthetic oligonucleotide
  Antisense Strand to SEQ ID NO: 319153
aucauuauugcacaaagga

SEQ ID NO: 319155 - RNA, 19 nt, Artificial Sequence
  Description of Artificial Sequence: Synthetic oligonucleotide
  Sense Strand Starting at position 6 of SEQ ID NO: 316398
ugcaauaaugauuaugguu

SEQ ID NO: 319156 - RNA, 19 nt, Artificial Sequence
  Description of Artificial Sequence: Synthetic oligonucleotide
  Antisense Strand to SEQ ID NO: 319155
aaccauaaucauuauugca

SEQ ID NO: 319157 - RNA, 19 nt, Artificial Sequence
  Description of Artificial Sequence: Synthetic oligonucleotide
  Sense Strand Starting at position 6 of SEQ ID NO: 316449
acuagaaauuaggcuuaug

SEQ ID NO: 319158 - RNA, 19 nt, Artificial Sequence
  Description of Artificial Sequence: Synthetic oligonucleotide
  Antisense Strand to SEQ ID NO: 319157
cauaagccuaauuucuagu

SEQ ID NO: 319159 - RNA, 19 nt, Artificial Sequence
  Description of Artificial Sequence: Synthetic oligonucleotide
  Sense Strand Starting at position 6 of SEQ ID NO: 316503
auuguuagguucccuaaac

SEQ ID NO: 319160 - RNA, 19 nt, Artificial Sequence
  Description of Artificial Sequence: Synthetic oligonucleotide
  Antisense Strand to SEQ ID NO: 319159
guuuagggaaccuaacaau

SEQ ID NO: 319161 - RNA, 19 nt, Artificial Sequence
  Description of Artificial Sequence: Synthetic oligonucleotide
  Sense Strand Starting at position 6 of SEQ ID NO: 316656
gcaggagcucuuuaaacug

SEQ ID NO: 319162 - RNA, 19 nt, Artificial Sequence
  Description of Artificial Sequence: Synthetic oligonucleotide
  Antisense Strand to SEQ ID NO: 319161
caguuuaaagagcuccugc

SEQ ID NO: 319163 - RNA, 19 nt, Artificial Sequence
  Description of Artificial Sequence: Synthetic oligonucleotide
  Sense Strand Starting at position 6 of SEQ ID NO: 317305
cgggcugauagauacuaca

SEQ ID NO: 319164 - RNA, 19 nt, Artificial Sequence
  Description of Artificial Sequence: Synthetic oligonucleotide
  Antisense Strand to SEQ ID NO: 319163
uguaguaucuaucagcccg

SEQ ID NO: 319165 - RNA, 19 nt, Artificial Sequence
  Description of Artificial Sequence: Synthetic oligonucleotide
  Sense Strand Starting at position 6 of SEQ ID NO: 317354
aacgguccuagaugggaaa

SEQ ID NO: 319166 - RNA, 19 nt, Artificial Sequence
  Description of Artificial Sequence: Synthetic oligonucleotide
  Antisense Strand to SEQ ID NO: 319165
uuucccaucuaggaccguu

SEQ ID NO: 319167 - RNA, 19 nt, Artificial Sequence
  Description of Artificial Sequence: Synthetic oligonucleotide
  Sense Strand Starting at position 6 of SEQ ID NO: 317480
gccuguauaaccuggaaug

SEQ ID NO: 319168 - RNA, 19 nt, Artificial Sequence
  Description of Artificial Sequence: Synthetic oligonucleotide
  Antisense Strand to SEQ ID NO: 319167
cauuccagguuauacaggc

SEQ ID NO: 319169 - RNA, 19 nt, Artificial Sequence
  Description of Artificial Sequence: Synthetic oligonucleotide
  Sense Strand Starting at position 6 of SEQ ID NO: 317482
cuguauaaccuggaauggu

SEQ ID NO: 319170 - RNA, 19 nt, Artificial Sequence
  Description of Artificial Sequence: Synthetic oligonucleotide
  Antisense Strand to SEQ ID NO: 319169
accauuccagguuauacag

SEQ ID NO: 319171 - RNA, 19 nt, Artificial Sequence
  Description of Artificial Sequence: Synthetic oligonucleotide
  Sense Strand Starting at position 6 of SEQ ID NO: 317492
uggaaugguaucggacauu

SEQ ID NO: 319172 - RNA, 19 nt, Artificial Sequence
  Description of Artificial Sequence: Synthetic oligonucleotide
  Antisense Strand to SEQ ID NO: 319171
aauguccgauaccauucca

SEQ ID NO: 319173 - RNA, 19 nt, Artificial Sequence
  Description of Artificial Sequence: Synthetic oligonucleotide
  Sense Strand Starting at position 6 of SEQ ID NO: 317515
gcucuagaucuauaugccu

SEQ ID NO: 319174 - RNA, 19 nt, Artificial Sequence
  Description of Artificial Sequence: Synthetic oligonucleotide
  Antisense Strand to SEQ ID NO: 319173
aggcauauagaucuagagc

SEQ ID NO: 319175 - RNA, 19 nt, Artificial Sequence
  Description of Artificial Sequence: Synthetic oligonucleotide
  Sense Strand Starting at position 6 of SEQ ID NO: 317520
agaucuauaugccugauua

SEQ ID NO: 319176 - RNA, 19 nt, Artificial Sequence
  Description of Artificial Sequence: Synthetic oligonucleotide
  Antisense Strand to SEQ ID NO: 319175
uaaucaggcauauagaucu

SEQ ID NO: 319177 - RNA, 19 nt, Artificial Sequence
  Description of Artificial Sequence: Synthetic oligonucleotide
  Sense Strand Starting at position 6 of SEQ ID NO: 317524
cuauaugccugauuaacga

SEQ ID NO: 319178 - RNA, 19 nt, Artificial Sequence
  Description of Artificial Sequence: Synthetic oligonucleotide
  Antisense Strand to SEQ ID NO: 319177
ucguuaaucaggcauauag

SEQ ID NO: 319179 - RNA, 19 nt, Artificial Sequence
  Description of Artificial Sequence: Synthetic oligonucleotide
  Sense Strand Starting at position 6 of SEQ ID NO: 318024
uauguaugauugcuaggaa

SEQ ID NO: 319180 - RNA, 19 nt, Artificial Sequence
  Description of Artificial Sequence: Synthetic oligonucleotide
  Antisense Strand to SEQ ID NO: 319179
uuccuagcaaucauacaua

SEQ ID NO: 319181 - RNA, 19 nt, Artificial Sequence
  Description of Artificial Sequence: Synthetic oligonucleotide
  Sense Strand Starting at position 6 of SEQ ID NO: 318031
gauugcuaggaaggugaau

SEQ ID NO: 319182 - RNA, 19 nt, Artificial Sequence
  Description of Artificial Sequence: Synthetic oligonucleotide
  Antisense Strand to SEQ ID NO: 319181
auucaccuuccuagcaauc

SEQ ID NO: 319183 - RNA, 19 nt, Artificial Sequence
  Description of Artificial Sequence: Synthetic oligonucleotide
  Sense Strand Starting at position 6 of SEQ ID NO: 318033
uugcuaggaaggugaauua

SEQ ID NO: 319184 - RNA, 19 nt, Artificial Sequence
  Description of Artificial Sequence: Synthetic oligonucleotide
  Antisense Strand to SEQ ID NO: 319183
uaauucaccuuccuagcaa

SEQ ID NO: 319185 - RNA, 19 nt, Artificial Sequence
  Description of Artificial Sequence: Synthetic oligonucleotide
  Sense Strand Starting at position 6 of SEQ ID NO: 318058
uuuguugugaaguaauaug

SEQ ID NO: 319186 - RNA, 19 nt, Artificial Sequence
  Description of Artificial Sequence: Synthetic oligonucleotide
  Antisense Strand to SEQ ID NO: 319185
cauauuacuucacaacaaa

SEQ ID NO: 319187 - RNA, 19 nt, Artificial Sequence
  Description of Artificial Sequence: Synthetic oligonucleotide
  Sense Strand Starting at position 6 of SEQ ID NO: 318066
gaaguaauauggccacauc

SEQ ID NO: 319188 - RNA, 19 nt, Artificial Sequence
  Description of Artificial Sequence: Synthetic oligonucleotide
  Antisense Strand to SEQ ID NO: 319187
gauguggccauauuacuuc

SEQ ID NO: 319189 - RNA, 19 nt, Artificial Sequence
  Description of Artificial Sequence: Synthetic oligonucleotide
  Sense Strand Starting at position 6 of SEQ ID NO: 318069
guaauauggccacaucuau

SEQ ID NO: 319190 - RNA, 19 nt, Artificial Sequence
  Description of Artificial Sequence: Synthetic oligonucleotide
  Antisense Strand to SEQ ID NO: 319189
auagauguggccauauuac

SEQ ID NO: 319191 - RNA, 19 nt, Artificial Sequence
  Description of Artificial Sequence: Synthetic oligonucleotide
  Sense Strand Starting at position 6 of SEQ ID NO: 318131
guggcaccaauuugugauu

SEQ ID NO: 319192 - RNA, 19 nt, Artificial Sequence
  Description of Artificial Sequence: Synthetic oligonucleotide
  Antisense Strand to SEQ ID NO: 319191
aaucacaaauuggugccac

SEQ ID NO: 319193 - RNA, 19 nt, Artificial Sequence
  Description of Artificial Sequence: Synthetic oligonucleotide
  Sense Strand Starting at position 6 of SEQ ID NO: 318171
aguucuuaagacugcauau

SEQ ID NO: 319194 - RNA, 19 nt, Artificial Sequence
  Description of Artificial Sequence: Synthetic oligonucleotide
  Antisense Strand to SEQ ID NO: 319193
auaugcagucuuaagaacu

SEQ ID NO: 319195 - RNA, 19 nt, Artificial Sequence
  Description of Artificial Sequence: Synthetic oligonucleotide
  Sense Strand Starting at position 6 of SEQ ID NO: 318332
aagcaucaaccauggaguu

SEQ ID NO: 319196 - RNA, 19 nt, Artificial Sequence
  Description of Artificial Sequence: Synthetic oligonucleotide
  Antisense Strand to SEQ ID NO: 319195
aacuccaugguugaugcuu

SEQ ID NO: 319197 - RNA, 19 nt, Artificial Sequence
  Description of Artificial Sequence: Synthetic oligonucleotide
  Sense Strand Starting at position 6 of SEQ ID NO: 318354
cguaguaguuuccuauuua

SEQ ID NO: 319198 - RNA, 19 nt, Artificial Sequence
  Description of Artificial Sequence: Synthetic oligonucleotide
  Antisense Strand to SEQ ID NO: 319197
uaaauaggaaacuacuacg

SEQ ID NO: 319199 - RNA, 19 nt, Artificial Sequence
  Description of Artificial Sequence: Synthetic oligonucleotide
  Sense Strand Starting at position 6 of SEQ ID NO: 318495
uagugaauccagcaugucu

SEQ ID NO: 319200 - RNA, 19 nt, Artificial Sequence
  Description of Artificial Sequence: Synthetic oligonucleotide
  Antisense Strand to SEQ ID NO: 319199
agacaugcuggauucacua

SEQ ID NO: 319201 - RNA, 19 nt, Artificial Sequence
  Description of Artificial Sequence: Synthetic oligonucleotide
  Sense Strand Starting at position 6 of SEQ ID NO: 318537
guuggaacagucuggaaca

SEQ ID NO: 319202 - RNA, 19 nt, Artificial Sequence
  Description of Artificial Sequence: Synthetic oligonucleotide
  Antisense Strand to SEQ ID NO: 319201
uguuccagacuguuccaac

SEQ ID NO: 319203 - RNA, 19 nt, Artificial Sequence
  Description of Artificial Sequence: Synthetic oligonucleotide
  Sense Strand Starting at position 6 of SEQ ID NO: 318579
gaucucuuucuugagaggu

SEQ ID NO: 319204 - RNA, 19 nt, Artificial Sequence
  Description of Artificial Sequence: Synthetic oligonucleotide
  Antisense Strand to SEQ ID NO: 319203
accucucaagaaagagauc

SEQ ID NO: 319205 - RNA, 19 nt, Artificial Sequence
  Description of Artificial Sequence: Synthetic oligonucleotide
  Sense Strand Starting at position 6 of SEQ ID NO: 318701
uguuguagacucuaaggga

SEQ ID NO: 319206 - RNA, 19 nt, Artificial Sequence
  Description of Artificial Sequence: Synthetic oligonucleotide
  Antisense Strand to SEQ ID NO: 319205
ucccuuagagucuacaaca

SEQ ID NO: 319207 - RNA, 19 nt, Artificial Sequence
  Description of Artificial Sequence: Synthetic oligonucleotide
  Sense Strand Starting at position 7 of SEQ ID NO: 315277
acagcuucuggccaaauga

SEQ ID NO: 319208 - RNA, 19 nt, Artificial Sequence
  Description of Artificial Sequence: Synthetic oligonucleotide
  Antisense Strand to SEQ ID NO: 319207
ucauuuggccagaagcugu

SEQ ID NO: 319209 - RNA, 19 nt, Artificial Sequence
  Description of Artificial Sequence: Synthetic oligonucleotide
  Sense Strand Starting at position 7 of SEQ ID NO: 315369
aggacaggccuuugagacu

SEQ ID NO: 319210 - RNA, 19 nt, Artificial Sequence
  Description of Artificial Sequence: Synthetic oligonucleotide
  Antisense Strand to SEQ ID NO: 319209
agucucaaaggccuguccu

SEQ ID NO: 319211 - RNA, 19 nt, Artificial Sequence
  Description of Artificial Sequence: Synthetic oligonucleotide
  Sense Strand Starting at position 7 of SEQ ID NO: 315404
gugucuucaguuugucagu

SEQ ID NO: 319212 - RNA, 19 nt, Artificial Sequence
  Description of Artificial Sequence: Synthetic oligonucleotide
  Antisense Strand to SEQ ID NO: 319211
acugacaaacugaagacac

SEQ ID NO: 319213 - RNA, 19 nt, Artificial Sequence
  Description of Artificial Sequence: Synthetic oligonucleotide
  Sense Strand Starting at position 7 of SEQ ID NO: 315451
cuaagcuuccugugagauu

SEQ ID NO: 319214 - RNA, 19 nt, Artificial Sequence
  Description of Artificial Sequence: Synthetic oligonucleotide
  Antisense Strand to SEQ ID NO: 319213
aaucucacaggaagcuuag

SEQ ID NO: 319215 - RNA, 19 nt, Artificial Sequence
  Description of Artificial Sequence: Synthetic oligonucleotide
  Sense Strand Starting at position 7 of SEQ ID NO: 315452
uaagcuuccugugagauuu

SEQ ID NO: 319216 - RNA, 19 nt, Artificial Sequence
  Description of Artificial Sequence: Synthetic oligonucleotide
  Antisense Strand to SEQ ID NO: 319215
aaaucucacaggaagcuua

SEQ ID NO: 319217 - RNA, 19 nt, Artificial Sequence
  Description of Artificial Sequence: Synthetic oligonucleotide
  Sense Strand Starting at position 7 of SEQ ID NO: 315492
cagggcugucccugucauu

SEQ ID NO: 319218 - RNA, 19 nt, Artificial Sequence
  Description of Artificial Sequence: Synthetic oligonucleotide
  Antisense Strand to SEQ ID NO: 319217
aaugacagggacagcccug

SEQ ID NO: 319219 - RNA, 19 nt, Artificial Sequence
  Description of Artificial Sequence: Synthetic oligonucleotide
  Sense Strand Starting at position 7 of SEQ ID NO: 315503
cugucauuucuugggccua

SEQ ID NO: 319220 - RNA, 19 nt, Artificial Sequence
  Description of Artificial Sequence: Synthetic oligonucleotide
  Antisense Strand to SEQ ID NO: 319219
uaggcccaagaaaugacag

SEQ ID NO: 319221 - RNA, 19 nt, Artificial Sequence
  Description of Artificial Sequence: Synthetic oligonucleotide
  Sense Strand Starting at position 7 of SEQ ID NO: 316065
ggaagagcgcguuccucuu

SEQ ID NO: 319222 - RNA, 19 nt, Artificial Sequence
  Description of Artificial Sequence: Synthetic oligonucleotide
  Antisense Strand to SEQ ID NO: 319221
aagaggaacgcgcucuucc

SEQ ID NO: 319223 - RNA, 19 nt, Artificial Sequence
  Description of Artificial Sequence: Synthetic oligonucleotide
  Sense Strand Starting at position 7 of SEQ ID NO: 316250
cccgcaguacuaggaaauu

SEQ ID NO: 319224 - RNA, 19 nt, Artificial Sequence
  Description of Artificial Sequence: Synthetic oligonucleotide
  Antisense Strand to SEQ ID NO: 319223
aauuuccuaguacugcggg

SEQ ID NO: 319225 - RNA, 19 nt, Artificial Sequence
  Description of Artificial Sequence: Synthetic oligonucleotide
  Sense Strand Starting at position 7 of SEQ ID NO: 316316
guaaacugugcccggguua

SEQ ID NO: 319226 - RNA, 19 nt, Artificial Sequence
  Description of Artificial Sequence: Synthetic oligonucleotide
  Antisense Strand to SEQ ID NO: 319225
uaacccgggcacaguuuac

SEQ ID NO: 319227 - RNA, 19 nt, Artificial Sequence
  Description of Artificial Sequence: Synthetic oligonucleotide
  Sense Strand Starting at position 7 of SEQ ID NO: 316328
cggguuaggucauuggaau

SEQ ID NO: 319228 - RNA, 19 nt, Artificial Sequence
  Description of Artificial Sequence: Synthetic oligonucleotide
  Antisense Strand to SEQ ID NO: 319227
auuccaaugaccuaacccg

SEQ ID NO: 319229 - RNA, 19 nt, Artificial Sequence
  Description of Artificial Sequence: Synthetic oligonucleotide
  Sense Strand Starting at position 7 of SEQ ID NO: 316329
ggguuaggucauuggaaua

SEQ ID NO: 319230 - RNA, 19 nt, Artificial Sequence
  Description of Artificial Sequence: Synthetic oligonucleotide
  Antisense Strand to SEQ ID NO: 319229
uauuccaaugaccuaaccc

SEQ ID NO: 319231 - RNA, 19 nt, Artificial Sequence
  Description of Artificial Sequence: Synthetic oligonucleotide
  Sense Strand Starting at position 7 of SEQ ID NO: 316339
auuggaauaugcguugaca

SEQ ID NO: 319232 - RNA, 19 nt, Artificial Sequence
  Description of Artificial Sequence: Synthetic oligonucleotide
  Antisense Strand to SEQ ID NO: 319231
ugucaacgcauauuccaau

SEQ ID NO: 319233 - RNA, 19 nt, Artificial Sequence
  Description of Artificial Sequence: Synthetic oligonucleotide
  Sense Strand Starting at position 7 of SEQ ID NO: 316341
uggaauaugcguugacaau

SEQ ID NO: 319234 - RNA, 19 nt, Artificial Sequence
  Description of Artificial Sequence: Synthetic oligonucleotide
  Antisense Strand to SEQ ID NO: 319233
auugucaacgcauauucca

SEQ ID NO: 319235 - RNA, 19 nt, Artificial Sequence
  Description of Artificial Sequence: Synthetic oligonucleotide
  Sense Strand Starting at position 7 of SEQ ID NO: 316342
ggaauaugcguugacaaug

SEQ ID NO: 319236 - RNA, 19 nt, Artificial Sequence
  Description of Artificial Sequence: Synthetic oligonucleotide
  Antisense Strand to SEQ ID NO: 319235
cauugucaacgcauauucc

SEQ ID NO: 319237 - RNA, 19 nt, Artificial Sequence
  Description of Artificial Sequence: Synthetic oligonucleotide
  Sense Strand Starting at position 7 of SEQ ID NO: 316347
augcguugacaaugacaca

SEQ ID NO: 319238 - RNA, 19 nt, Artificial Sequence
  Description of Artificial Sequence: Synthetic oligonucleotide
  Antisense Strand to SEQ ID NO: 319237
ugugucauugucaacgcau

SEQ ID NO: 319239 - RNA, 19 nt, Artificial Sequence
  Description of Artificial Sequence: Synthetic oligonucleotide
  Sense Strand Starting at position 7 of SEQ ID NO: 316534
cagagagacugauggagau

SEQ ID NO: 319240 - RNA, 19 nt, Artificial Sequence
  Description of Artificial Sequence: Synthetic oligonucleotide
  Antisense Strand to SEQ ID NO: 319239
aucuccaucagucucucug

SEQ ID NO: 319241 - RNA, 19 nt, Artificial Sequence
  Description of Artificial Sequence: Synthetic oligonucleotide
  Sense Strand Starting at position 7 of SEQ ID NO: 316569
acaggcugauccucagaaa

SEQ ID NO: 319242 - RNA, 19 nt, Artificial Sequence
  Description of Artificial Sequence: Synthetic oligonucleotide
  Antisense Strand to SEQ ID NO: 319241
uuucugaggaucagccugu

SEQ ID NO: 319243 - RNA, 19 nt, Artificial Sequence
  Description of Artificial Sequence: Synthetic oligonucleotide
  Sense Strand Starting at position 7 of SEQ ID NO: 316572
ggcugauccucagaaauac

SEQ ID NO: 319244 - RNA, 19 nt, Artificial Sequence
  Description of Artificial Sequence: Synthetic oligonucleotide
  Antisense Strand to SEQ ID NO: 319243
guauuucugaggaucagcc

SEQ ID NO: 319245 - RNA, 19 nt, Artificial Sequence
  Description of Artificial Sequence: Synthetic oligonucleotide
  Sense Strand Starting at position 7 of SEQ ID NO: 317346
ggcuucuucucaguggaac

SEQ ID NO: 319246 - RNA, 19 nt, Artificial Sequence
  Description of Artificial Sequence: Synthetic oligonucleotide
  Antisense Strand to SEQ ID NO: 319245
guuccacugagaagaagcc

SEQ ID NO: 319247 - RNA, 19 nt, Artificial Sequence
  Description of Artificial Sequence: Synthetic oligonucleotide
  Sense Strand Starting at position 7 of SEQ ID NO: 317347
gcuucuucucaguggaaca

SEQ ID NO: 319248 - RNA, 19 nt, Artificial Sequence
  Description of Artificial Sequence: Synthetic oligonucleotide
  Antisense Strand to SEQ ID NO: 319247
uguuccacugagaagaagc

SEQ ID NO: 319249 - RNA, 19 nt, Artificial Sequence
  Description of Artificial Sequence: Synthetic oligonucleotide
  Sense Strand Starting at position 7 of SEQ ID NO: 317379
ucaguucucuggccuguau

SEQ ID NO: 319250 - RNA, 19 nt, Artificial Sequence
  Description of Artificial Sequence: Synthetic oligonucleotide
  Antisense Strand to SEQ ID NO: 319249
auacaggccagagaacuga

SEQ ID NO: 319251 - RNA, 19 nt, Artificial Sequence
  Description of Artificial Sequence: Synthetic oligonucleotide
  Sense Strand Starting at position 7 of SEQ ID NO: 317381
aguucucuggccuguauaa

SEQ ID NO: 319252 - RNA, 19 nt, Artificial Sequence
  Description of Artificial Sequence: Synthetic oligonucleotide
  Antisense Strand to SEQ ID NO: 319251
uuauacaggccagagaacu

SEQ ID NO: 319253 - RNA, 19 nt, Artificial Sequence
  Description of Artificial Sequence: Synthetic oligonucleotide
  Sense Strand Starting at position 7 of SEQ ID NO: 317383
uucucuggccuguauaaug

SEQ ID NO: 319254 - RNA, 19 nt, Artificial Sequence
  Description of Artificial Sequence: Synthetic oligonucleotide
  Antisense Strand to SEQ ID NO: 319253
cauuauacaggccagagaa

SEQ ID NO: 319255 - RNA, 19 nt, Artificial Sequence
  Description of Artificial Sequence: Synthetic oligonucleotide
  Sense Strand Starting at position 7 of SEQ ID NO: 317390
gccuguauaauggaguuaa

SEQ ID NO: 319256 - RNA, 19 nt, Artificial Sequence
  Description of Artificial Sequence: Synthetic oligonucleotide
  Antisense Strand to SEQ ID NO: 319255
uuaacuccauuauacaggc

SEQ ID NO: 319257 - RNA, 19 nt, Artificial Sequence
  Description of Artificial Sequence: Synthetic oligonucleotide
  Sense Strand Starting at position 7 of SEQ ID NO: 317432
uguccuagguucuuaagga

SEQ ID NO: 319258 - RNA, 19 nt, Artificial Sequence
  Description of Artificial Sequence: Synthetic oligonucleotide
  Antisense Strand to SEQ ID NO: 319257
uccuuaagaaccuaggaca

SEQ ID NO: 319259 - RNA, 19 nt, Artificial Sequence
  Description of Artificial Sequence: Synthetic oligonucleotide
  Sense Strand Starting at position 7 of SEQ ID NO: 317433
guccuagguucuuaaggac

SEQ ID NO: 319260 - RNA, 19 nt, Artificial Sequence
  Description of Artificial Sequence: Synthetic oligonucleotide
  Antisense Strand to SEQ ID NO: 319259
guccuuaagaaccuaggac

SEQ ID NO: 319261 - RNA, 19 nt, Artificial Sequence
  Description of Artificial Sequence: Synthetic oligonucleotide
  Sense Strand Starting at position 7 of SEQ ID NO: 317491
uuguguaaaugccagauau

SEQ ID NO: 319262 - RNA, 19 nt, Artificial Sequence
  Description of Artificial Sequence: Synthetic oligonucleotide
  Antisense Strand to SEQ ID NO: 319261
auaucuggcauuuacacaa

SEQ ID NO: 319263 - RNA, 19 nt, Artificial Sequence
  Description of Artificial Sequence: Synthetic oligonucleotide
  Sense Strand Starting at position 7 of SEQ ID NO: 317493
guguaaaugccagauauug

SEQ ID NO: 319264 - RNA, 19 nt, Artificial Sequence
  Description of Artificial Sequence: Synthetic oligonucleotide
  Antisense Strand to SEQ ID NO: 319263
caauaucuggcauuuacac

SEQ ID NO: 319265 - RNA, 19 nt, Artificial Sequence
  Description of Artificial Sequence: Synthetic oligonucleotide
  Sense Strand Starting at position 7 of SEQ ID NO: 317501
gccagauauuguuaugcag

SEQ ID NO: 319266 - RNA, 19 nt, Artificial Sequence
  Description of Artificial Sequence: Synthetic oligonucleotide
  Antisense Strand to SEQ ID NO: 319265
cugcauaacaauaucuggc

SEQ ID NO: 319267 - RNA, 19 nt, Artificial Sequence
  Description of Artificial Sequence: Synthetic oligonucleotide
  Sense Strand Starting at position 7 of SEQ ID NO: 317649
ccugguuggcgauguguua

SEQ ID NO: 319268 - RNA, 19 nt, Artificial Sequence
  Description of Artificial Sequence: Synthetic oligonucleotide
  Antisense Strand to SEQ ID NO: 319267
uaacacaucgccaaccagg

SEQ ID NO: 319269 - RNA, 19 nt, Artificial Sequence
  Description of Artificial Sequence: Synthetic oligonucleotide
  Sense Strand Starting at position 7 of SEQ ID NO: 317656
ggcgauguguuaccaacgu

SEQ ID NO: 319270 - RNA, 19 nt, Artificial Sequence
  Description of Artificial Sequence: Synthetic oligonucleotide
  Antisense Strand to SEQ ID NO: 319269
acguugguaacacaucgcc

SEQ ID NO: 319271 - RNA, 19 nt, Artificial Sequence
  Description of Artificial Sequence: Synthetic oligonucleotide
  Sense Strand Starting at position 7 of SEQ ID NO: 317971
ggaugcgaucccgaaggaa

SEQ ID NO: 319272 - RNA, 19 nt, Artificial Sequence
  Description of Artificial Sequence: Synthetic oligonucleotide
  Antisense Strand to SEQ ID NO: 319271
uuccuucgggaucgcaucc

SEQ ID NO: 319273 - RNA, 19 nt, Artificial Sequence
  Description of Artificial Sequence: Synthetic oligonucleotide
  Sense Strand Starting at position 7 of SEQ ID NO: 318105
cgcugugagaacgaguuua

SEQ ID NO: 319274 - RNA, 19 nt, Artificial Sequence
  Description of Artificial Sequence: Synthetic oligonucleotide
  Antisense Strand to SEQ ID NO: 319273
uaaacucguucucacagcg

SEQ ID NO: 319275 - RNA, 19 nt, Artificial Sequence
  Description of Artificial Sequence: Synthetic oligonucleotide
  Sense Strand Starting at position 7 of SEQ ID NO: 318115
acgaguuuagcggagucua

SEQ ID NO: 319276 - RNA, 19 nt, Artificial Sequence
  Description of Artificial Sequence: Synthetic oligonucleotide
  Antisense Strand to SEQ ID NO: 319275
uagacuccgcuaaacucgu

SEQ ID NO: 319277 - RNA, 19 nt, Artificial Sequence
  Description of Artificial Sequence: Synthetic oligonucleotide
  Sense Strand Starting at position 7 of SEQ ID NO: 318116
cgaguuuagcggagucuau

SEQ ID NO: 319278 - RNA, 19 nt, Artificial Sequence
  Description of Artificial Sequence: Synthetic oligonucleotide
  Antisense Strand to SEQ ID NO: 319277
auagacuccgcuaaacucg

SEQ ID NO: 319279 - RNA, 19 nt, Artificial Sequence
  Description of Artificial Sequence: Synthetic oligonucleotide
  Sense Strand Starting at position 7 of SEQ ID NO: 318143
cgagcuuguggccacaaga

SEQ ID NO: 319280 - RNA, 19 nt, Artificial Sequence
  Description of Artificial Sequence: Synthetic oligonucleotide
  Antisense Strand to SEQ ID NO: 319279
ucuuguggccacaagcucg

SEQ ID NO: 319281 - RNA, 19 nt, Artificial Sequence
  Description of Artificial Sequence: Synthetic oligonucleotide
  Sense Strand Starting at position 7 of SEQ ID NO: 318557
uucgguuuccgccucuaga

SEQ ID NO: 319282 - RNA, 19 nt, Artificial Sequence
  Description of Artificial Sequence: Synthetic oligonucleotide
  Antisense Strand to SEQ ID NO: 319281
ucuagaggcggaaaccgaa

SEQ ID NO: 319283 - RNA, 19 nt, Artificial Sequence
  Description of Artificial Sequence: Synthetic oligonucleotide
  Sense Strand Starting at position 7 of SEQ ID NO: 318579
ugggcuuuccgguguggaa

SEQ ID NO: 319284 - RNA, 19 nt, Artificial Sequence
  Description of Artificial Sequence: Synthetic oligonucleotide
  Antisense Strand to SEQ ID NO: 319283
uuccacaccggaaagccca

SEQ ID NO: 319285 - RNA, 19 nt, Artificial Sequence
  Description of Artificial Sequence: Synthetic oligonucleotide
  Sense Strand Starting at position 7 of SEQ ID NO: 318713
cgagacaucuucucuuaaa

SEQ ID NO: 319286 - RNA, 19 nt, Artificial Sequence
  Description of Artificial Sequence: Synthetic oligonucleotide
  Antisense Strand to SEQ ID NO: 319285
uuuaagagaagaugucucg

SEQ ID NO: 319287 - RNA, 19 nt, Artificial Sequence
  Description of Artificial Sequence: Synthetic oligonucleotide
  Sense Strand Starting at position 8 of SEQ ID NO: 315263
uucuuauucucaucguuau

SEQ ID NO: 319288 - RNA, 19 nt, Artificial Sequence
  Description of Artificial Sequence: Synthetic oligonucleotide
  Antisense Strand to SEQ ID NO: 319287
auaacgaugagaauaagaa

SEQ ID NO: 319289 - RNA, 19 nt, Artificial Sequence
  Description of Artificial Sequence: Synthetic oligonucleotide
  Sense Strand Starting at position 8 of SEQ ID NO: 315264
ucuuauucucaucguuauu

SEQ ID NO: 319290 - RNA, 19 nt, Artificial Sequence
  Description of Artificial Sequence: Synthetic oligonucleotide
  Antisense Strand to SEQ ID NO: 319289
aauaacgaugagaauaaga

SEQ ID NO: 319291 - RNA, 19 nt, Artificial Sequence
  Description of Artificial Sequence: Synthetic oligonucleotide
  Sense Strand Starting at position 8 of SEQ ID NO: 315327
ggugguugauaggauuaaa

SEQ ID NO: 319292 - RNA, 19 nt, Artificial Sequence
  Description of Artificial Sequence: Synthetic oligonucleotide
  Antisense Strand to SEQ ID NO: 319291
uuuaauccuaucaaccacc

SEQ ID NO: 319293 - RNA, 19 nt, Artificial Sequence
  Description of Artificial Sequence: Synthetic oligonucleotide
  Sense Strand Starting at position 8 of SEQ ID NO: 315381
agggcucagugcucaauca

SEQ ID NO: 319294 - RNA, 19 nt, Artificial Sequence
  Description of Artificial Sequence: Synthetic oligonucleotide
  Antisense Strand to SEQ ID NO: 319293
ugauugagcacugagcccu

SEQ ID NO: 319295 - RNA, 19 nt, Artificial Sequence
  Description of Artificial Sequence: Synthetic oligonucleotide
  Sense Strand Starting at position 8 of SEQ ID NO: 315382
gggcucagugcucaaucaa

SEQ ID NO: 319296 - RNA, 19 nt, Artificial Sequence
  Description of Artificial Sequence: Synthetic oligonucleotide
  Antisense Strand to SEQ ID NO: 319295
uugauugagcacugagccc

SEQ ID NO: 319297 - RNA, 19 nt, Artificial Sequence
  Description of Artificial Sequence: Synthetic oligonucleotide
  Sense Strand Starting at position 8 of SEQ ID NO: 315390
ugcucaaucaacgguaagu

SEQ ID NO: 319298 - RNA, 19 nt, Artificial Sequence
  Description of Artificial Sequence: Synthetic oligonucleotide
  Antisense Strand to SEQ ID NO: 319297
acuuaccguugauugagca

SEQ ID NO: 319299 - RNA, 19 nt, Artificial Sequence
  Description of Artificial Sequence: Synthetic oligonucleotide
  Sense Strand Starting at position 8 of SEQ ID NO: 315392
cucaaucaacgguaaguua

SEQ ID NO: 319300 - RNA, 19 nt, Artificial Sequence
  Description of Artificial Sequence: Synthetic oligonucleotide
  Antisense Strand to SEQ ID NO: 319299
uaacuuaccguugauugag

SEQ ID NO: 319301 - RNA, 19 nt, Artificial Sequence
  Description of Artificial Sequence: Synthetic oligonucleotide
  Sense Strand Starting at position 8 of SEQ ID NO: 315401
cgguaaguuacaggucaug

SEQ ID NO: 319302 - RNA, 19 nt, Artificial Sequence
  Description of Artificial Sequence: Synthetic oligonucleotide
  Antisense Strand to SEQ ID NO: 319301
caugaccuguaacuuaccg

SEQ ID NO: 319303 - RNA, 19 nt, Artificial Sequence
  Description of Artificial Sequence: Synthetic oligonucleotide
  Sense Strand Starting at position 8 of SEQ ID NO: 315404
uaaguuacaggucaugagu

SEQ ID NO: 319304 - RNA, 19 nt, Artificial Sequence
  Description of Artificial Sequence: Synthetic oligonucleotide
  Antisense Strand to SEQ ID NO: 319303
acucaugaccuguaacuua

SEQ ID NO: 319305 - RNA, 19 nt, Artificial Sequence
  Description of Artificial Sequence: Synthetic oligonucleotide
  Sense Strand Starting at position 8 of SEQ ID NO: 315413
ggucaugaguugucaaugc

SEQ ID NO: 319306 - RNA, 19 nt, Artificial Sequence
  Description of Artificial Sequence: Synthetic oligonucleotide
  Antisense Strand to SEQ ID NO: 319305
gcauugacaacucaugacc

SEQ ID NO: 319307 - RNA, 19 nt, Artificial Sequence
  Description of Artificial Sequence: Synthetic oligonucleotide
  Sense Strand Starting at position 8 of SEQ ID NO: 316729
guccauagacuccgcuaaa

SEQ ID NO: 319308 - RNA, 19 nt, Artificial Sequence
  Description of Artificial Sequence: Synthetic oligonucleotide
  Antisense Strand to SEQ ID NO: 319307
uuuagcggagucuauggac

SEQ ID NO: 319309 - RNA, 19 nt, Artificial Sequence
  Description of Artificial Sequence: Synthetic oligonucleotide
  Sense Strand Starting at position 8 of SEQ ID NO: 316870
gaggaaaguuccuucggga

SEQ ID NO: 319310 - RNA, 19 nt, Artificial Sequence
  Description of Artificial Sequence: Synthetic oligonucleotide
  Antisense Strand to SEQ ID NO: 319309
ucccgaaggaacuuuccuc

SEQ ID NO: 319311 - RNA, 19 nt, Artificial Sequence
  Description of Artificial Sequence: Synthetic oligonucleotide
  Sense Strand Starting at position 8 of SEQ ID NO: 317224
cgccaugaguagacgugaa

SEQ ID NO: 319312 - RNA, 19 nt, Artificial Sequence
  Description of Artificial Sequence: Synthetic oligonucleotide
  Antisense Strand to SEQ ID NO: 319311
uucacgucuacucauggcg

SEQ ID NO: 319313 - RNA, 19 nt, Artificial Sequence
  Description of Artificial Sequence: Synthetic oligonucleotide
  Sense Strand Starting at position 8 of SEQ ID NO: 317341
ggagcugcugcauaacaau

SEQ ID NO: 319314 - RNA, 19 nt, Artificial Sequence
  Description of Artificial Sequence: Synthetic oligonucleotide
  Antisense Strand to SEQ ID NO: 319313
auuguuaugcagcagcucc

SEQ ID NO: 319315 - RNA, 19 nt, Artificial Sequence
  Description of Artificial Sequence: Synthetic oligonucleotide
  Sense Strand Starting at position 8 of SEQ ID NO: 317408
cuugacccguccuuaagaa

SEQ ID NO: 319316 - RNA, 19 nt, Artificial Sequence
  Description of Artificial Sequence: Synthetic oligonucleotide
  Antisense Strand to SEQ ID NO: 319315
uucuuaaggacgggucaag

SEQ ID NO: 319317 - RNA, 19 nt, Artificial Sequence
  Description of Artificial Sequence: Synthetic oligonucleotide
  Sense Strand Starting at position 8 of SEQ ID NO: 318037
ggguuucugcgcgcuuaua

SEQ ID NO: 319318 - RNA, 19 nt, Artificial Sequence
  Description of Artificial Sequence: Synthetic oligonucleotide
  Antisense Strand to SEQ ID NO: 319317
uauaagcgcgcagaaaccc

SEQ ID NO: 319319 - RNA, 19 nt, Artificial Sequence
  Description of Artificial Sequence: Synthetic oligonucleotide
  Sense Strand Starting at position 8 of SEQ ID NO: 318038
gguuucugcgcgcuuauau

SEQ ID NO: 319320 - RNA, 19 nt, Artificial Sequence
  Description of Artificial Sequence: Synthetic oligonucleotide
  Antisense Strand to SEQ ID NO: 319319
auauaagcgcgcagaaacc

SEQ ID NO: 319321 - RNA, 19 nt, Artificial Sequence
  Description of Artificial Sequence: Synthetic oligonucleotide
  Sense Strand Starting at position 8 of SEQ ID NO: 318039
guuucugcgcgcuuauauu

SEQ ID NO: 319322 - RNA, 19 nt, Artificial Sequence
  Description of Artificial Sequence: Synthetic oligonucleotide
  Antisense Strand to SEQ ID NO: 319321
aauauaagcgcgcagaaac

SEQ ID NO: 319323 - RNA, 19 nt, Artificial Sequence
  Description of Artificial Sequence: Synthetic oligonucleotide
  Sense Strand Starting at position 8 of SEQ ID NO: 318077
cguugaugucugccugcuu

SEQ ID NO: 319324 - RNA, 19 nt, Artificial Sequence
  Description of Artificial Sequence: Synthetic oligonucleotide
  Antisense Strand to SEQ ID NO: 319323
aagcaggcagacaucaacg

SEQ ID NO: 319325 - RNA, 19 nt, Artificial Sequence
  Description of Artificial Sequence: Synthetic oligonucleotide
  Sense Strand Starting at position 8 of SEQ ID NO: 318092
gcuugugucagcguuaugu

SEQ ID NO: 319326 - RNA, 19 nt, Artificial Sequence
  Description of Artificial Sequence: Synthetic oligonucleotide
  Antisense Strand to SEQ ID NO: 319325
acauaacgcugacacaagc

SEQ ID NO: 319327 - RNA, 19 nt, Artificial Sequence
  Description of Artificial Sequence: Synthetic oligonucleotide
  Sense Strand Starting at position 8 of SEQ ID NO: 318102
gcguuaugucuuccgagug

SEQ ID NO: 319328 - RNA, 19 nt, Artificial Sequence
  Description of Artificial Sequence: Synthetic oligonucleotide
  Antisense Strand to SEQ ID NO: 319327
cacucggaagacauaacgc

SEQ ID NO: 319329 - RNA, 19 nt, Artificial Sequence
  Description of Artificial Sequence: Synthetic oligonucleotide
  Sense Strand Starting at position 8 of SEQ ID NO: 318107
augucuuccgaguguauuu

SEQ ID NO: 319330 - RNA, 19 nt, Artificial Sequence
  Description of Artificial Sequence: Synthetic oligonucleotide
  Antisense Strand to SEQ ID NO: 319329
aaauacacucggaagacau

SEQ ID NO: 319331 - RNA, 19 nt, Artificial Sequence
  Description of Artificial Sequence: Synthetic oligonucleotide
  Sense Strand Starting at position 8 of SEQ ID NO: 318117
aguguauuucugugugcgu

SEQ ID NO: 319332 - RNA, 19 nt, Artificial Sequence
  Description of Artificial Sequence: Synthetic oligonucleotide
  Antisense Strand to SEQ ID NO: 319331
acgcacacagaaauacacu

SEQ ID NO: 319333 - RNA, 19 nt, Artificial Sequence
  Description of Artificial Sequence: Synthetic oligonucleotide
  Sense Strand Starting at position 8 of SEQ ID NO: 318122
auuucugugugcgugugau

SEQ ID NO: 319334 - RNA, 19 nt, Artificial Sequence
  Description of Artificial Sequence: Synthetic oligonucleotide
  Antisense Strand to SEQ ID NO: 319333
aucacacgcacacagaaau

SEQ ID NO: 319335 - RNA, 19 nt, Artificial Sequence
  Description of Artificial Sequence: Synthetic oligonucleotide
  Sense Strand Starting at position 8 of SEQ ID NO: 318223
ugccuuucuugugugaaug

SEQ ID NO: 319336 - RNA, 19 nt, Artificial Sequence
  Description of Artificial Sequence: Synthetic oligonucleotide
  Antisense Strand to SEQ ID NO: 319335
cauucacacaagaaaggca

SEQ ID NO: 319337 - RNA, 19 nt, Artificial Sequence
  Description of Artificial Sequence: Synthetic oligonucleotide
  Sense Strand Starting at position 8 of SEQ ID NO: 318245
agucuuacgguugugugua

SEQ ID NO: 319338 - RNA, 19 nt, Artificial Sequence
  Description of Artificial Sequence: Synthetic oligonucleotide
  Antisense Strand to SEQ ID NO: 319337
uacacacaaccguaagacu

SEQ ID NO: 319339 - RNA, 19 nt, Artificial Sequence
  Description of Artificial Sequence: Synthetic oligonucleotide
  Sense Strand Starting at position 8 of SEQ ID NO: 318263
augaccgugcuugaguauu

SEQ ID NO: 319340 - RNA, 19 nt, Artificial Sequence
  Description of Artificial Sequence: Synthetic oligonucleotide
  Antisense Strand to SEQ ID NO: 319339
aauacucaagcacggucau

SEQ ID NO: 319341 - RNA, 19 nt, Artificial Sequence
  Description of Artificial Sequence: Synthetic oligonucleotide
  Sense Strand Starting at position 8 of SEQ ID NO: 318269
gugcuugaguauuucugag

SEQ ID NO: 319342 - RNA, 19 nt, Artificial Sequence
  Description of Artificial Sequence: Synthetic oligonucleotide
  Antisense Strand to SEQ ID NO: 319341
cucagaaauacucaagcac

SEQ ID NO: 319343 - RNA, 19 nt, Artificial Sequence
  Description of Artificial Sequence: Synthetic oligonucleotide
  Sense Strand Starting at position 8 of SEQ ID NO: 318273
uugaguauuucugaggauc

SEQ ID NO: 319344 - RNA, 19 nt, Artificial Sequence
  Description of Artificial Sequence: Synthetic oligonucleotide
  Antisense Strand to SEQ ID NO: 319343
gauccucagaaauacucaa

SEQ ID NO: 319345 - RNA, 19 nt, Artificial Sequence
  Description of Artificial Sequence: Synthetic oligonucleotide
  Sense Strand Starting at position 8 of SEQ ID NO: 318275
gaguauuucugaggaucag

SEQ ID NO: 319346 - RNA, 19 nt, Artificial Sequence
  Description of Artificial Sequence: Synthetic oligonucleotide
  Antisense Strand to SEQ ID NO: 319345
cugauccucagaaauacuc

SEQ ID NO: 319347 - RNA, 19 nt, Artificial Sequence
  Description of Artificial Sequence: Synthetic oligonucleotide
  Sense Strand Starting at position 8 of SEQ ID NO: 318284
ugaggaucagccugugguu

SEQ ID NO: 319348 - RNA, 19 nt, Artificial Sequence
  Description of Artificial Sequence: Synthetic oligonucleotide
  Antisense Strand to SEQ ID NO: 319347
aaccacaggcugauccuca

SEQ ID NO: 319349 - RNA, 19 nt, Artificial Sequence
  Description of Artificial Sequence: Synthetic oligonucleotide
  Sense Strand Starting at position 8 of SEQ ID NO: 318354
gugcgugauguagagggua

SEQ ID NO: 319350 - RNA, 19 nt, Artificial Sequence
  Description of Artificial Sequence: Synthetic oligonucleotide
  Antisense Strand to SEQ ID NO: 319349
uacccucuacaucacgcac

SEQ ID NO: 319351 - RNA, 19 nt, Artificial Sequence
  Description of Artificial Sequence: Synthetic oligonucleotide
  Sense Strand Starting at position 8 of SEQ ID NO: 318370
guaccauuacaagggauua

SEQ ID NO: 319352 - RNA, 19 nt, Artificial Sequence
  Description of Artificial Sequence: Synthetic oligonucleotide
  Antisense Strand to SEQ ID NO: 319351
uaaucccuuguaaugguac

SEQ ID NO: 319353 - RNA, 19 nt, Artificial Sequence
  Description of Artificial Sequence: Synthetic oligonucleotide
  Sense Strand Starting at position 8 of SEQ ID NO: 318434
cagggaauagcuugugcaa

SEQ ID NO: 319354 - RNA, 19 nt, Artificial Sequence
  Description of Artificial Sequence: Synthetic oligonucleotide
  Antisense Strand to SEQ ID NO: 319353
uugcacaagcuauucccug

SEQ ID NO: 319355 - RNA, 19 nt, Artificial Sequence
  Description of Artificial Sequence: Synthetic oligonucleotide
  Sense Strand Starting at position 8 of SEQ ID NO: 318497
accugugugucauugucaa

SEQ ID NO: 319356 - RNA, 19 nt, Artificial Sequence
  Description of Artificial Sequence: Synthetic oligonucleotide
  Antisense Strand to SEQ ID NO: 319355
uugacaaugacacacaggu

SEQ ID NO: 319357 - RNA, 19 nt, Artificial Sequence
  Description of Artificial Sequence: Synthetic oligonucleotide
  Sense Strand Starting at position 8 of SEQ ID NO: 318504
ugucauugucaacgcauau

SEQ ID NO: 319358 - RNA, 19 nt, Artificial Sequence
  Description of Artificial Sequence: Synthetic oligonucleotide
  Antisense Strand to SEQ ID NO: 319357
auaugcguugacaaugaca

SEQ ID NO: 319359 - RNA, 19 nt, Artificial Sequence
  Description of Artificial Sequence: Synthetic oligonucleotide
  Sense Strand Starting at position 8 of SEQ ID NO: 318516
cgcauauuccaaugaccua

SEQ ID NO: 319360 - RNA, 19 nt, Artificial Sequence
  Description of Artificial Sequence: Synthetic oligonucleotide
  Antisense Strand to SEQ ID NO: 319359
uaggucauuggaauaugcg

SEQ ID NO: 319361 - RNA, 19 nt, Artificial Sequence
  Description of Artificial Sequence: Synthetic oligonucleotide
  Sense Strand Starting at position 8 of SEQ ID NO: 318762
gguuguuaguggucuggaa

SEQ ID NO: 319362 - RNA, 19 nt, Artificial Sequence
  Description of Artificial Sequence: Synthetic oligonucleotide
  Antisense Strand to SEQ ID NO: 319361
uuccagaccacuaacaacc

SEQ ID NO: 319363 - RNA, 19 nt, Artificial Sequence
  Description of Artificial Sequence: Synthetic oligonucleotide
  Sense Strand Starting at position 8 of SEQ ID NO: 318764
uuguuaguggucuggaaga

SEQ ID NO: 319364 - RNA, 19 nt, Artificial Sequence
  Description of Artificial Sequence: Synthetic oligonucleotide
  Antisense Strand to SEQ ID NO: 319363
ucuuccagaccacuaacaa

SEQ ID NO: 319365 - RNA, 19 nt, Artificial Sequence
  Description of Artificial Sequence: Synthetic oligonucleotide
  Sense Strand Starting at position 8 of SEQ ID NO: 318766
guuaguggucuggaagaaa

SEQ ID NO: 319366 - RNA, 19 nt, Artificial Sequence
  Description of Artificial Sequence: Synthetic oligonucleotide
  Antisense Strand to SEQ ID NO: 319365
uuucuuccagaccacuaac

SEQ ID NO: 319367 - RNA, 19 nt, Artificial Sequence
  Description of Artificial Sequence: Synthetic oligonucleotide
  Sense Strand Starting at position 9 of SEQ ID NO: 315317
ggguaagcaccuuagauua

SEQ ID NO: 319368 - RNA, 19 nt, Artificial Sequence
  Description of Artificial Sequence: Synthetic oligonucleotide
  Antisense Strand to SEQ ID NO: 319367
uaaucuaaggugcuuaccc

SEQ ID NO: 319369 - RNA, 19 nt, Artificial Sequence
  Description of Artificial Sequence: Synthetic oligonucleotide
  Sense Strand Starting at position 9 of SEQ ID NO: 315496
gggauagucacuggacacu

SEQ ID NO: 319370 - RNA, 19 nt, Artificial Sequence
  Description of Artificial Sequence: Synthetic oligonucleotide
  Antisense Strand to SEQ ID NO: 319369
aguguccagugacuauccc

SEQ ID NO: 319371 - RNA, 19 nt, Artificial Sequence
  Description of Artificial Sequence: Synthetic oligonucleotide
  Sense Strand Starting at position 9 of SEQ ID NO: 315502
gucacuggacacugcuaaa

SEQ ID NO: 319372 - RNA, 19 nt, Artificial Sequence
  Description of Artificial Sequence: Synthetic oligonucleotide
  Antisense Strand to SEQ ID NO: 319371
uuuagcaguguccagugac

SEQ ID NO: 319373 - RNA, 19 nt, Artificial Sequence
  Description of Artificial Sequence: Synthetic oligonucleotide
  Sense Strand Starting at position 9 of SEQ ID NO: 315521
gcauauugccaagaauacc

SEQ ID NO: 319374 - RNA, 19 nt, Artificial Sequence
  Description of Artificial Sequence: Synthetic oligonucleotide
  Antisense Strand to SEQ ID NO: 319373
gguauucuuggcaauaugc

SEQ ID NO: 319375 - RNA, 19 nt, Artificial Sequence
  Description of Artificial Sequence: Synthetic oligonucleotide
  Sense Strand Starting at position 9 of SEQ ID NO: 315546
gcccacuucugucuagaaa

SEQ ID NO: 319376 - RNA, 19 nt, Artificial Sequence
  Description of Artificial Sequence: Synthetic oligonucleotide
  Antisense Strand to SEQ ID NO: 319375
uuucuagacagaagugggc

SEQ ID NO: 319377 - RNA, 19 nt, Artificial Sequence
  Description of Artificial Sequence: Synthetic oligonucleotide
  Sense Strand Starting at position 9 of SEQ ID NO: 315651
gauuguguccuggacucca

SEQ ID NO: 319378 - RNA, 19 nt, Artificial Sequence
  Description of Artificial Sequence: Synthetic oligonucleotide
  Antisense Strand to SEQ ID NO: 319377
uggaguccaggacacaauc

SEQ ID NO: 319379 - RNA, 19 nt, Artificial Sequence
  Description of Artificial Sequence: Synthetic oligonucleotide
  Sense Strand Starting at position 9 of SEQ ID NO: 315954
uuauguuuccuaggcaaau

SEQ ID NO: 319380 - RNA, 19 nt, Artificial Sequence
  Description of Artificial Sequence: Synthetic oligonucleotide
  Antisense Strand to SEQ ID NO: 319379
auuugccuaggaaacauaa

SEQ ID NO: 319381 - RNA, 19 nt, Artificial Sequence
  Description of Artificial Sequence: Synthetic oligonucleotide
  Sense Strand Starting at position 9 of SEQ ID NO: 315974
ucuccagacgucugaagua

SEQ ID NO: 319382 - RNA, 19 nt, Artificial Sequence
  Description of Artificial Sequence: Synthetic oligonucleotide
  Antisense Strand to SEQ ID NO: 319381
uacuucagacgucuggaga

SEQ ID NO: 319383 - RNA, 19 nt, Artificial Sequence
  Description of Artificial Sequence: Synthetic oligonucleotide
  Sense Strand Starting at position 9 of SEQ ID NO: 316046
aacgacaggccuugagaaa

SEQ ID NO: 319384 - RNA, 19 nt, Artificial Sequence
  Description of Artificial Sequence: Synthetic oligonucleotide
  Antisense Strand to SEQ ID NO: 319383
uuucucaaggccugucguu

SEQ ID NO: 319385 - RNA, 19 nt, Artificial Sequence
  Description of Artificial Sequence: Synthetic oligonucleotide
  Sense Strand Starting at position 9 of SEQ ID NO: 316393
agggcuaacuuucuuucua

SEQ ID NO: 319386 - RNA, 19 nt, Artificial Sequence
  Description of Artificial Sequence: Synthetic oligonucleotide
  Antisense Strand to SEQ ID NO: 319385
uagaaagaaaguuagcccu

SEQ ID NO: 319387 - RNA, 19 nt, Artificial Sequence
  Description of Artificial Sequence: Synthetic oligonucleotide
  Sense Strand Starting at position 9 of SEQ ID NO: 316394
gggcuaacuuucuuucuau

SEQ ID NO: 319388 - RNA, 19 nt, Artificial Sequence
  Description of Artificial Sequence: Synthetic oligonucleotide
  Antisense Strand to SEQ ID NO: 319387
auagaaagaaaguuagccc

SEQ ID NO: 319389 - RNA, 19 nt, Artificial Sequence
  Description of Artificial Sequence: Synthetic oligonucleotide
  Sense Strand Starting at position 9 of SEQ ID NO: 316395
ggcuaacuuucuuucuaug

SEQ ID NO: 319390 - RNA, 19 nt, Artificial Sequence
  Description of Artificial Sequence: Synthetic oligonucleotide
  Antisense Strand to SEQ ID NO: 319389
cauagaaagaaaguuagcc

SEQ ID NO: 319391 - RNA, 19 nt, Artificial Sequence
  Description of Artificial Sequence: Synthetic oligonucleotide
  Sense Strand Starting at position 9 of SEQ ID NO: 316494
gccgcuucccgggcgaauu

SEQ ID NO: 319392 - RNA, 19 nt, Artificial Sequence
  Description of Artificial Sequence: Synthetic oligonucleotide
  Antisense Strand to SEQ ID NO: 319391
aauucgcccgggaagcggc

SEQ ID NO: 319393 - RNA, 19 nt, Artificial Sequence
  Description of Artificial Sequence: Synthetic oligonucleotide
  Sense Strand Starting at position 9 of SEQ ID NO: 317396
uggcgagacucacccgaau

SEQ ID NO: 319394 - RNA, 19 nt, Artificial Sequence
  Description of Artificial Sequence: Synthetic oligonucleotide
  Antisense Strand to SEQ ID NO: 319393
auucgggugagucucgcca

SEQ ID NO: 319395 - RNA, 19 nt, Artificial Sequence
  Description of Artificial Sequence: Synthetic oligonucleotide
  Sense Strand Starting at position 9 of SEQ ID NO: 317398
gcgagacucacccgaauga

SEQ ID NO: 319396 - RNA, 19 nt, Artificial Sequence
  Description of Artificial Sequence: Synthetic oligonucleotide
  Antisense Strand to SEQ ID NO: 319395
ucauucgggugagucucgc

SEQ ID NO: 319397 - RNA, 19 nt, Artificial Sequence
  Description of Artificial Sequence: Synthetic oligonucleotide
  Sense Strand Starting at position 9 of SEQ ID NO: 317402
gacucacccgaaugaguua

SEQ ID NO: 319398 - RNA, 19 nt, Artificial Sequence
  Description of Artificial Sequence: Synthetic oligonucleotide
  Antisense Strand to SEQ ID NO: 319397
uaacucauucgggugaguc

SEQ ID NO: 319399 - RNA, 19 nt, Artificial Sequence
  Description of Artificial Sequence: Synthetic oligonucleotide
  Sense Strand Starting at position 9 of SEQ ID NO: 317407
acccgaaugaguuaggugu

SEQ ID NO: 319400 - RNA, 19 nt, Artificial Sequence
  Description of Artificial Sequence: Synthetic oligonucleotide
  Antisense Strand to SEQ ID NO: 319399
acaccuaacucauucgggu

SEQ ID NO: 319401 - RNA, 19 nt, Artificial Sequence
  Description of Artificial Sequence: Synthetic oligonucleotide
  Sense Strand Starting at position 9 of SEQ ID NO: 317436
uugaauaaugacuguauuc

SEQ ID NO: 319402 - RNA, 19 nt, Artificial Sequence
  Description of Artificial Sequence: Synthetic oligonucleotide
  Antisense Strand to SEQ ID NO: 319401
gaauacagucauuauucaa

SEQ ID NO: 319403 - RNA, 19 nt, Artificial Sequence
  Description of Artificial Sequence: Synthetic oligonucleotide
  Sense Strand Starting at position 9 of SEQ ID NO: 317530
gcuaguguccgauagaugg

SEQ ID NO: 319404 - RNA, 19 nt, Artificial Sequence
  Description of Artificial Sequence: Synthetic oligonucleotide
  Antisense Strand to SEQ ID NO: 319403
ccaucuaucggacacuagc

SEQ ID NO: 319405 - RNA, 19 nt, Artificial Sequence
  Description of Artificial Sequence: Synthetic oligonucleotide
  Sense Strand Starting at position 9 of SEQ ID NO: 317559
aaugaaauggcguaaucga

SEQ ID NO: 319406 - RNA, 19 nt, Artificial Sequence
  Description of Artificial Sequence: Synthetic oligonucleotide
  Antisense Strand to SEQ ID NO: 319405
ucgauuacgccauuucauu

SEQ ID NO: 319407 - RNA, 19 nt, Artificial Sequence
  Description of Artificial Sequence: Synthetic oligonucleotide
  Sense Strand Starting at position 9 of SEQ ID NO: 317567
ggcguaaucgaggugcugu

SEQ ID NO: 319408 - RNA, 19 nt, Artificial Sequence
  Description of Artificial Sequence: Synthetic oligonucleotide
  Antisense Strand to SEQ ID NO: 319407
acagcaccucgauuacgcc

SEQ ID NO: 319409 - RNA, 19 nt, Artificial Sequence
  Description of Artificial Sequence: Synthetic oligonucleotide
  Sense Strand Starting at position 9 of SEQ ID NO: 317719
ccacucgacucucuagaua

SEQ ID NO: 319410 - RNA, 19 nt, Artificial Sequence
  Description of Artificial Sequence: Synthetic oligonucleotide
  Antisense Strand to SEQ ID NO: 319409
uaucuagagagucgagugg

SEQ ID NO: 319411 - RNA, 19 nt, Artificial Sequence
  Description of Artificial Sequence: Synthetic oligonucleotide
  Sense Strand Starting at position 9 of SEQ ID NO: 317849
ccagccugagcugaagaaa

SEQ ID NO: 319412 - RNA, 19 nt, Artificial Sequence
  Description of Artificial Sequence: Synthetic oligonucleotide
  Antisense Strand to SEQ ID NO: 319411
uuucuucagcucaggcugg

SEQ ID NO: 319413 - RNA, 19 nt, Artificial Sequence
  Description of Artificial Sequence: Synthetic oligonucleotide
  Sense Strand Starting at position 9 of SEQ ID NO: 318070
gguacuucgaguuauugag

SEQ ID NO: 319414 - RNA, 19 nt, Artificial Sequence
  Description of Artificial Sequence: Synthetic oligonucleotide
  Antisense Strand to SEQ ID NO: 319413
cucaauaacucgaaguacc

SEQ ID NO: 319415 - RNA, 19 nt, Artificial Sequence
  Description of Artificial Sequence: Synthetic oligonucleotide
  Sense Strand Starting at position 9 of SEQ ID NO: 318074
cuucgaguuauugagguga

SEQ ID NO: 319416 - RNA, 19 nt, Artificial Sequence
  Description of Artificial Sequence: Synthetic oligonucleotide
  Antisense Strand to SEQ ID NO: 319415
ucaccucaauaacucgaag

SEQ ID NO: 319417 - RNA, 19 nt, Artificial Sequence
  Description of Artificial Sequence: Synthetic oligonucleotide
  Sense Strand Starting at position 9 of SEQ ID NO: 318078
gaguuauugaggugaaaug

SEQ ID NO: 319418 - RNA, 19 nt, Artificial Sequence
  Description of Artificial Sequence: Synthetic oligonucleotide
  Antisense Strand to SEQ ID NO: 319417
cauuucaccucaauaacuc

SEQ ID NO: 319419 - RNA, 19 nt, Artificial Sequence
  Description of Artificial Sequence: Synthetic oligonucleotide
  Sense Strand Starting at position 9 of SEQ ID NO: 318278
gauagauccuacgcgaaua

SEQ ID NO: 319420 - RNA, 19 nt, Artificial Sequence
  Description of Artificial Sequence: Synthetic oligonucleotide
  Antisense Strand to SEQ ID NO: 319419
uauucgcguaggaucuauc

SEQ ID NO: 319421 - RNA, 19 nt, Artificial Sequence
  Description of Artificial Sequence: Synthetic oligonucleotide
  Sense Strand Starting at position 9 of SEQ ID NO: 318279
auagauccuacgcgaauau

SEQ ID NO: 319422 - RNA, 19 nt, Artificial Sequence
  Description of Artificial Sequence: Synthetic oligonucleotide
  Antisense Strand to SEQ ID NO: 319421
auauucgcguaggaucuau

SEQ ID NO: 319423 - RNA, 19 nt, Artificial Sequence
  Description of Artificial Sequence: Synthetic oligonucleotide
  Sense Strand Starting at position 9 of SEQ ID NO: 318280
uagauccuacgcgaauaua

SEQ ID NO: 319424 - RNA, 19 nt, Artificial Sequence
  Description of Artificial Sequence: Synthetic oligonucleotide
  Antisense Strand to SEQ ID NO: 319423
uauauucgcguaggaucua

SEQ ID NO: 319425 - RNA, 19 nt, Artificial Sequence
  Description of Artificial Sequence: Synthetic oligonucleotide
  Sense Strand Starting at position 9 of SEQ ID NO: 318283
auccuacgcgaauauauua

SEQ ID NO: 319426 - RNA, 19 nt, Artificial Sequence
  Description of Artificial Sequence: Synthetic oligonucleotide
  Antisense Strand to SEQ ID NO: 319425
uaauauauucgcguaggau

SEQ ID NO: 319427 - RNA, 19 nt, Artificial Sequence
  Description of Artificial Sequence: Synthetic oligonucleotide
  Sense Strand Starting at position 9 of SEQ ID NO: 318476
acgagaaaguccucuagga

SEQ ID NO: 319428 - RNA, 19 nt, Artificial Sequence
  Description of Artificial Sequence: Synthetic oligonucleotide
  Antisense Strand to SEQ ID NO: 319427
uccuagaggacuuucucgu

SEQ ID NO: 319429 - RNA, 19 nt, Artificial Sequence
  Description of Artificial Sequence: Synthetic oligonucleotide
  Sense Strand Starting at position 9 of SEQ ID NO: 318538
auaaucucuuaggcauagu

SEQ ID NO: 319430 - RNA, 19 nt, Artificial Sequence
  Description of Artificial Sequence: Synthetic oligonucleotide
  Antisense Strand to SEQ ID NO: 319429
acuaugccuaagagauuau

SEQ ID NO: 319431 - RNA, 19 nt, Artificial Sequence
  Description of Artificial Sequence: Synthetic oligonucleotide
  Sense Strand Starting at position 9 of SEQ ID NO: 318541
aucucuuaggcauaguaau

SEQ ID NO: 319432 - RNA, 19 nt, Artificial Sequence
  Description of Artificial Sequence: Synthetic oligonucleotide
  Antisense Strand to SEQ ID NO: 319431
auuacuaugccuaagagau

SEQ ID NO: 319433 - RNA, 19 nt, Artificial Sequence
  Description of Artificial Sequence: Synthetic oligonucleotide
  Sense Strand Starting at position 9 of SEQ ID NO: 318639
acaggaauuccugguuguu

SEQ ID NO: 319434 - RNA, 19 nt, Artificial Sequence
  Description of Artificial Sequence: Synthetic oligonucleotide
  Antisense Strand to SEQ ID NO: 319433
aacaaccaggaauuccugu

SEQ ID NO: 319435 - RNA, 19 nt, Artificial Sequence
  Description of Artificial Sequence: Synthetic oligonucleotide
  Sense Strand Starting at position 9 of SEQ ID NO: 318658
ucaugaaagggccguauau

SEQ ID NO: 319436 - RNA, 19 nt, Artificial Sequence
  Description of Artificial Sequence: Synthetic oligonucleotide
  Antisense Strand to SEQ ID NO: 319435
auauacggcccuuucauga

SEQ ID NO: 319437 - RNA, 19 nt, Artificial Sequence
  Description of Artificial Sequence: Synthetic oligonucleotide
  Sense Strand Starting at position 9 of SEQ ID NO: 318660
augaaagggccguauauuc

SEQ ID NO: 319438 - RNA, 19 nt, Artificial Sequence
  Description of Artificial Sequence: Synthetic oligonucleotide
  Antisense Strand to SEQ ID NO: 319437
gaauauacggcccuuucau

SEQ ID NO: 319439 - RNA, 19 nt, Artificial Sequence
  Description of Artificial Sequence: Synthetic oligonucleotide
  Sense Strand Starting at position 9 of SEQ ID NO: 318870
aaguaugugcucugauaca

SEQ ID NO: 319440 - RNA, 19 nt, Artificial Sequence
  Description of Artificial Sequence: Synthetic oligonucleotide
  Antisense Strand to SEQ ID NO: 319439
uguaucagagcacauacuu

SEQ ID NO: 319441 - RNA, 19 nt, Artificial Sequence
  Description of Artificial Sequence: Synthetic oligonucleotide
  Sense Strand Starting at position 9 of SEQ ID NO: 318948
ggguuugauggguggugau

SEQ ID NO: 319442 - RNA, 19 nt, Artificial Sequence
  Description of Artificial Sequence: Synthetic oligonucleotide
  Antisense Strand to SEQ ID NO: 319441
aucaccacccaucaaaccc

SEQ ID NO: 319443 - RNA, 19 nt, Artificial Sequence
  Description of Artificial Sequence: Synthetic oligonucleotide
  Sense Strand Starting at position 9 of SEQ ID NO: 318949
gguuugauggguggugauu

SEQ ID NO: 319444 - RNA, 19 nt, Artificial Sequence
  Description of Artificial Sequence: Synthetic oligonucleotide
  Antisense Strand to SEQ ID NO: 319443
aaucaccacccaucaaacc

SEQ ID NO: 319445 - RNA, 19 nt, Artificial Sequence
  Description of Artificial Sequence: Synthetic oligonucleotide
  Sense Strand Starting at position 9 of SEQ ID NO: 319098
gcucuagucauguaagaug

SEQ ID NO: 319446 - RNA, 19 nt, Artificial Sequence
  Description of Artificial Sequence: Synthetic oligonucleotide
  Antisense Strand to SEQ ID NO: 319445
caucuuacaugacuagagc

SEQ ID NO: 319447 - RNA, 19 nt, Artificial Sequence
  Description of Artificial Sequence: Synthetic oligonucleotide
  Sense Strand Starting at position 10 of SEQ ID NO: 315275
aggccuuucugagcacaca

SEQ ID NO: 319448 - RNA, 19 nt, Artificial Sequence
  Description of Artificial Sequence: Synthetic oligonucleotide
  Antisense Strand to SEQ ID NO: 319447
ugugugcucagaaaggccu

SEQ ID NO: 319449 - RNA, 19 nt, Artificial Sequence
  Description of Artificial Sequence: Synthetic oligonucleotide
  Sense Strand Starting at position 10 of SEQ ID NO: 315276
ggccuuucugagcacacaa

SEQ ID NO: 319450 - RNA, 19 nt, Artificial Sequence
  Description of Artificial Sequence: Synthetic oligonucleotide
  Antisense Strand to SEQ ID NO: 319449
uugugugcucagaaaggcc

SEQ ID NO: 319451 - RNA, 19 nt, Artificial Sequence
  Description of Artificial Sequence: Synthetic oligonucleotide
  Sense Strand Starting at position 10 of SEQ ID NO: 315296
augguuaauuucuguagag

SEQ ID NO: 319452 - RNA, 19 nt, Artificial Sequence
  Description of Artificial Sequence: Synthetic oligonucleotide
  Antisense Strand to SEQ ID NO: 319451
cucuacagaaauuaaccau

SEQ ID NO: 319453 - RNA, 19 nt, Artificial Sequence
  Description of Artificial Sequence: Synthetic oligonucleotide
  Sense Strand Starting at position 10 of SEQ ID NO: 315312
gagucagugugagccauuu

SEQ ID NO: 319454 - RNA, 19 nt, Artificial Sequence
  Description of Artificial Sequence: Synthetic oligonucleotide
  Antisense Strand to SEQ ID NO: 319453
aaauggcucacacugacuc

SEQ ID NO: 319455 - RNA, 19 nt, Artificial Sequence
  Description of Artificial Sequence: Synthetic oligonucleotide
  Sense Strand Starting at position 10 of SEQ ID NO: 315314
gucagugugagccauuuau

SEQ ID NO: 319456 - RNA, 19 nt, Artificial Sequence
  Description of Artificial Sequence: Synthetic oligonucleotide
  Antisense Strand to SEQ ID NO: 319455
auaaauggcucacacugac

SEQ ID NO: 319457 - RNA, 19 nt, Artificial Sequence
  Description of Artificial Sequence: Synthetic oligonucleotide
  Sense Strand Starting at position 10 of SEQ ID NO: 315395
cugcuuucugagugcuuaa

SEQ ID NO: 319458 - RNA, 19 nt, Artificial Sequence
  Description of Artificial Sequence: Synthetic oligonucleotide
  Antisense Strand to SEQ ID NO: 319457
uuaagcacucagaaagcag

SEQ ID NO: 319459 - RNA, 19 nt, Artificial Sequence
  Description of Artificial Sequence: Synthetic oligonucleotide
  Sense Strand Starting at position 10 of SEQ ID NO: 315460
ccuuuaaaguggguacuau

SEQ ID NO: 319460 - RNA, 19 nt, Artificial Sequence
  Description of Artificial Sequence: Synthetic oligonucleotide
  Antisense Strand to SEQ ID NO: 319459
auaguacccacuuuaaagg

SEQ ID NO: 319461 - RNA, 19 nt, Artificial Sequence
  Description of Artificial Sequence: Synthetic oligonucleotide
  Sense Strand Starting at position 10 of SEQ ID NO: 315461
cuuuaaaguggguacuauu

SEQ ID NO: 319462 - RNA, 19 nt, Artificial Sequence
  Description of Artificial Sequence: Synthetic oligonucleotide
  Antisense Strand to SEQ ID NO: 319461
aauaguacccacuuuaaag

SEQ ID NO: 319463 - RNA, 19 nt, Artificial Sequence
  Description of Artificial Sequence: Synthetic oligonucleotide
  Sense Strand Starting at position 10 of SEQ ID NO: 315472
guacuauuaccagaagcug

SEQ ID NO: 319464 - RNA, 19 nt, Artificial Sequence
  Description of Artificial Sequence: Synthetic oligonucleotide
  Antisense Strand to SEQ ID NO: 319463
cagcuucugguaauaguac

SEQ ID NO: 319465 - RNA, 19 nt, Artificial Sequence
  Description of Artificial Sequence: Synthetic oligonucleotide
  Sense Strand Starting at position 10 of SEQ ID NO: 315494
ggcccuugcuggucugaga

SEQ ID NO: 319466 - RNA, 19 nt, Artificial Sequence
  Description of Artificial Sequence: Synthetic oligonucleotide
  Antisense Strand to SEQ ID NO: 319465
ucucagaccagcaagggcc

SEQ ID NO: 319467 - RNA, 19 nt, Artificial Sequence
  Description of Artificial Sequence: Synthetic oligonucleotide
  Sense Strand Starting at position 10 of SEQ ID NO: 315516
acaaauuagugcuagaaac

SEQ ID NO: 319468 - RNA, 19 nt, Artificial Sequence
  Description of Artificial Sequence: Synthetic oligonucleotide
  Antisense Strand to SEQ ID NO: 319467
guuucuagcacuaauuugu

SEQ ID NO: 319469 - RNA, 19 nt, Artificial Sequence
  Description of Artificial Sequence: Synthetic oligonucleotide
  Sense Strand Starting at position 10 of SEQ ID NO: 315526
gcuagaaacacaggugauu

SEQ ID NO: 319470 - RNA, 19 nt, Artificial Sequence
  Description of Artificial Sequence: Synthetic oligonucleotide
  Antisense Strand to SEQ ID NO: 319469
aaucaccuguguuucuagc

SEQ ID NO: 319471 - RNA, 19 nt, Artificial Sequence
  Description of Artificial Sequence: Synthetic oligonucleotide
  Sense Strand Starting at position 10 of SEQ ID NO: 315779
gaaaguauggcagguaauu

SEQ ID NO: 319472 - RNA, 19 nt, Artificial Sequence
  Description of Artificial Sequence: Synthetic oligonucleotide
  Antisense Strand to SEQ ID NO: 319471
aauuaccugccauacuuuc

SEQ ID NO: 319473 - RNA, 19 nt, Artificial Sequence
  Description of Artificial Sequence: Synthetic oligonucleotide
  Sense Strand Starting at position 10 of SEQ ID NO: 315818
gggccuggcacacaagauu

SEQ ID NO: 319474 - RNA, 19 nt, Artificial Sequence
  Description of Artificial Sequence: Synthetic oligonucleotide
  Antisense Strand to SEQ ID NO: 319473
aaucuugugugccaggccc

SEQ ID NO: 319475 - RNA, 19 nt, Artificial Sequence
  Description of Artificial Sequence: Synthetic oligonucleotide
  Sense Strand Starting at position 10 of SEQ ID NO: 315832
agauuugcuuauucuaugu

SEQ ID NO: 319476 - RNA, 19 nt, Artificial Sequence
  Description of Artificial Sequence: Synthetic oligonucleotide
  Antisense Strand to SEQ ID NO: 319475
acauagaauaagcaaaucu

SEQ ID NO: 319477 - RNA, 19 nt, Artificial Sequence
  Description of Artificial Sequence: Synthetic oligonucleotide
  Sense Strand Starting at position 10 of SEQ ID NO: 315834
auuugcuuauucuauguca

SEQ ID NO: 319478 - RNA, 19 nt, Artificial Sequence
  Description of Artificial Sequence: Synthetic oligonucleotide
  Antisense Strand to SEQ ID NO: 319477
ugacauagaauaagcaaau

SEQ ID NO: 319479 - RNA, 19 nt, Artificial Sequence
  Description of Artificial Sequence: Synthetic oligonucleotide
  Sense Strand Starting at position 10 of SEQ ID NO: 316199
uucuaaggcagccgugaaa

SEQ ID NO: 319480 - RNA, 19 nt, Artificial Sequence
  Description of Artificial Sequence: Synthetic oligonucleotide
  Antisense Strand to SEQ ID NO: 319479
uuucacggcugccuuagaa

SEQ ID NO: 319481 - RNA, 19 nt, Artificial Sequence
  Description of Artificial Sequence: Synthetic oligonucleotide
  Sense Strand Starting at position 10 of SEQ ID NO: 316449
gcaguccuucuccaggaaa

SEQ ID NO: 319482 - RNA, 19 nt, Artificial Sequence
  Description of Artificial Sequence: Synthetic oligonucleotide
  Antisense Strand to SEQ ID NO: 319481
uuuccuggagaaggacugc

SEQ ID NO: 319483 - RNA, 19 nt, Artificial Sequence
  Description of Artificial Sequence: Synthetic oligonucleotide
  Sense Strand Starting at position 10 of SEQ ID NO: 316451
aguccuucuccaggaaaug

SEQ ID NO: 319484 - RNA, 19 nt, Artificial Sequence
  Description of Artificial Sequence: Synthetic oligonucleotide
  Antisense Strand to SEQ ID NO: 319483
cauuuccuggagaaggacu

SEQ ID NO: 319485 - RNA, 19 nt, Artificial Sequence
  Description of Artificial Sequence: Synthetic oligonucleotide
  Sense Strand Starting at position 10 of SEQ ID NO: 317378
gcccgaauucuucccggca

SEQ ID NO: 319486 - RNA, 19 nt, Artificial Sequence
  Description of Artificial Sequence: Synthetic oligonucleotide
  Antisense Strand to SEQ ID NO: 319485
ugccgggaagaauucgggc

SEQ ID NO: 319487 - RNA, 19 nt, Artificial Sequence
  Description of Artificial Sequence: Synthetic oligonucleotide
  Sense Strand Starting at position 10 of SEQ ID NO: 317467
gcaggaucucuggaucucu

SEQ ID NO: 319488 - RNA, 19 nt, Artificial Sequence
  Description of Artificial Sequence: Synthetic oligonucleotide
  Antisense Strand to SEQ ID NO: 319487
agagauccagagauccugc

SEQ ID NO: 319489 - RNA, 19 nt, Artificial Sequence
  Description of Artificial Sequence: Synthetic oligonucleotide
  Sense Strand Starting at position 10 of SEQ ID NO: 317548
cuugacaucgguugucuca

SEQ ID NO: 319490 - RNA, 19 nt, Artificial Sequence
  Description of Artificial Sequence: Synthetic oligonucleotide
  Antisense Strand to SEQ ID NO: 319489
ugagacaaccgaugucaag

SEQ ID NO: 319491 - RNA, 19 nt, Artificial Sequence
  Description of Artificial Sequence: Synthetic oligonucleotide
  Sense Strand Starting at position 10 of SEQ ID NO: 317557
gguugucucacguaauccu

SEQ ID NO: 319492 - RNA, 19 nt, Artificial Sequence
  Description of Artificial Sequence: Synthetic oligonucleotide
  Antisense Strand to SEQ ID NO: 319491
aggauuacgugagacaacc

SEQ ID NO: 319493 - RNA, 19 nt, Artificial Sequence
  Description of Artificial Sequence: Synthetic oligonucleotide
  Sense Strand Starting at position 10 of SEQ ID NO: 317565
cacguaauccuaugaggua

SEQ ID NO: 319494 - RNA, 19 nt, Artificial Sequence
  Description of Artificial Sequence: Synthetic oligonucleotide
  Antisense Strand to SEQ ID NO: 319493
uaccucauaggauuacgug

SEQ ID NO: 319495 - RNA, 19 nt, Artificial Sequence
  Description of Artificial Sequence: Synthetic oligonucleotide
  Sense Strand Starting at position 10 of SEQ ID NO: 317762
cggguguuuggagacaguu

SEQ ID NO: 319496 - RNA, 19 nt, Artificial Sequence
  Description of Artificial Sequence: Synthetic oligonucleotide
  Antisense Strand to SEQ ID NO: 319495
aacugucuccaaacacccg

SEQ ID NO: 319497 - RNA, 19 nt, Artificial Sequence
  Description of Artificial Sequence: Synthetic oligonucleotide
  Sense Strand Starting at position 10 of SEQ ID NO: 317840
aggaucgucugacuccaaa

SEQ ID NO: 319498 - RNA, 19 nt, Artificial Sequence
  Description of Artificial Sequence: Synthetic oligonucleotide
  Antisense Strand to SEQ ID NO: 319497
uuuggagucagacgauccu

SEQ ID NO: 319499 - RNA, 19 nt, Artificial Sequence
  Description of Artificial Sequence: Synthetic oligonucleotide
  Sense Strand Starting at position 10 of SEQ ID NO: 318201
gacucucuuggccguuuaa

SEQ ID NO: 319500 - RNA, 19 nt, Artificial Sequence
  Description of Artificial Sequence: Synthetic oligonucleotide
  Antisense Strand to SEQ ID NO: 319499
uuaaacggccaagagaguc

SEQ ID NO: 319501 - RNA, 19 nt, Artificial Sequence
  Description of Artificial Sequence: Synthetic oligonucleotide
  Sense Strand Starting at position 10 of SEQ ID NO: 318323
ucaagaagucccggagaag

SEQ ID NO: 319502 - RNA, 19 nt, Artificial Sequence
  Description of Artificial Sequence: Synthetic oligonucleotide
  Antisense Strand to SEQ ID NO: 319501
cuucuccgggacuucuuga

SEQ ID NO: 319503 - RNA, 19 nt, Artificial Sequence
  Description of Artificial Sequence: Synthetic oligonucleotide
  Sense Strand Starting at position 10 of SEQ ID NO: 318324
caagaagucccggagaagu

SEQ ID NO: 319504 - RNA, 19 nt, Artificial Sequence
  Description of Artificial Sequence: Synthetic oligonucleotide
  Antisense Strand to SEQ ID NO: 319503
acuucuccgggacuucuug

SEQ ID NO: 319505 - RNA, 19 nt, Artificial Sequence
  Description of Artificial Sequence: Synthetic oligonucleotide
  Sense Strand Starting at position 10 of SEQ ID NO: 318356
cucugaagccacuagugau

SEQ ID NO: 319506 - RNA, 19 nt, Artificial Sequence
  Description of Artificial Sequence: Synthetic oligonucleotide
  Antisense Strand to SEQ ID NO: 319505
aucacuaguggcuucagag

SEQ ID NO: 319507 - RNA, 19 nt, Artificial Sequence
  Description of Artificial Sequence: Synthetic oligonucleotide
  Sense Strand Starting at position 10 of SEQ ID NO: 318410
ggaauucauccggaguuug

SEQ ID NO: 319508 - RNA, 19 nt, Artificial Sequence
  Description of Artificial Sequence: Synthetic oligonucleotide
  Antisense Strand to SEQ ID NO: 319507
caaacuccggaugaauucc

SEQ ID NO: 319509 - RNA, 19 nt, Artificial Sequence
  Description of Artificial Sequence: Synthetic oligonucleotide
  Sense Strand Starting at position 10 of SEQ ID NO: 318466
uaaauuguuggcugccuua

SEQ ID NO: 319510 - RNA, 19 nt, Artificial Sequence
  Description of Artificial Sequence: Synthetic oligonucleotide
  Antisense Strand to SEQ ID NO: 319509
uaaggcagccaacaauuua

SEQ ID NO: 319511 - RNA, 19 nt, Artificial Sequence
  Description of Artificial Sequence: Synthetic oligonucleotide
  Sense Strand Starting at position 10 of SEQ ID NO: 318473
uuggcugccuuaucacuua

SEQ ID NO: 319512 - RNA, 19 nt, Artificial Sequence
  Description of Artificial Sequence: Synthetic oligonucleotide
  Antisense Strand to SEQ ID NO: 319511
uaagugauaaggcagccaa

SEQ ID NO: 319513 - RNA, 19 nt, Artificial Sequence
  Description of Artificial Sequence: Synthetic oligonucleotide
  Sense Strand Starting at position 10 of SEQ ID NO: 318910
gguaguucaucaguuuggu

SEQ ID NO: 319514 - RNA, 19 nt, Artificial Sequence
  Description of Artificial Sequence: Synthetic oligonucleotide
  Antisense Strand to SEQ ID NO: 319513
accaaacugaugaacuacc

SEQ ID NO: 319515 - RNA, 19 nt, Artificial Sequence
  Description of Artificial Sequence: Synthetic oligonucleotide
  Sense Strand Starting at position 10 of SEQ ID NO: 318983
auuucuauaucccgagggu

SEQ ID NO: 319516 - RNA, 19 nt, Artificial Sequence
  Description of Artificial Sequence: Synthetic oligonucleotide
  Antisense Strand to SEQ ID NO: 319515
acccucgggauauagaaau

SEQ ID NO: 319517 - RNA, 19 nt, Artificial Sequence
  Description of Artificial Sequence: Synthetic oligonucleotide
  Sense Strand Starting at position 10 of SEQ ID NO: 318984
uuucuauaucccgaggguu

SEQ ID NO: 319518 - RNA, 19 nt, Artificial Sequence
  Description of Artificial Sequence: Synthetic oligonucleotide
  Antisense Strand to SEQ ID NO: 319517
aacccucgggauauagaaa

SEQ ID NO: 319519 - RNA, 19 nt, Artificial Sequence
  Description of Artificial Sequence: Synthetic oligonucleotide
  Sense Strand Starting at position 10 of SEQ ID NO: 319057
ucacauucugggugacuua

SEQ ID NO: 319520 - RNA, 19 nt, Artificial Sequence
  Description of Artificial Sequence: Synthetic oligonucleotide
  Antisense Strand to SEQ ID NO: 319519
uaagucacccagaauguga

SEQ ID NO: 319521 - RNA, 19 nt, Artificial Sequence
  Description of Artificial Sequence: Synthetic oligonucleotide
  Sense Strand Starting at position 10 of SEQ ID NO: 319058
cacauucugggugacuuau

SEQ ID NO: 319522 - RNA, 19 nt, Artificial Sequence
  Description of Artificial Sequence: Synthetic oligonucleotide
  Antisense Strand to SEQ ID NO: 319521
auaagucacccagaaugug

SEQ ID NO: 319523 - RNA, 19 nt, Artificial Sequence
  Description of Artificial Sequence: Synthetic oligonucleotide
  Sense Strand Starting at position 10 of SEQ ID NO: 319068
gugacuuaucuccacugga

SEQ ID NO: 319524 - RNA, 19 nt, Artificial Sequence
  Description of Artificial Sequence: Synthetic oligonucleotide
  Antisense Strand to SEQ ID NO: 319523
uccaguggagauaagucac

SEQ ID NO: 319525 - RNA, 19 nt, Artificial Sequence
  Description of Artificial Sequence: Synthetic oligonucleotide
  Sense Strand Starting at position 10 of SEQ ID NO: 319192
gagugcugucacugaggaa

SEQ ID NO: 319526 - RNA, 19 nt, Artificial Sequence
  Description of Artificial Sequence: Synthetic oligonucleotide
  Antisense Strand to SEQ ID NO: 319525
uuccucagugacagcacuc

SEQ ID NO: 319527 - RNA, 19 nt, Artificial Sequence
  Description of Artificial Sequence: Synthetic oligonucleotide
  Sense Strand Starting at position 11 of SEQ ID NO: 315558
ugucaagagauuugugucu

SEQ ID NO: 319528 - RNA, 19 nt, Artificial Sequence
  Description of Artificial Sequence: Synthetic oligonucleotide
  Antisense Strand to SEQ ID NO: 319527
agacacaaaucucuugaca

SEQ ID NO: 319529 - RNA, 19 nt, Artificial Sequence
  Description of Artificial Sequence: Synthetic oligonucleotide
  Sense Strand Starting at position 11 of SEQ ID NO: 315576
uagugauugcaacacgaua

SEQ ID NO: 319530 - RNA, 19 nt, Artificial Sequence
  Description of Artificial Sequence: Synthetic oligonucleotide
  Antisense Strand to SEQ ID NO: 319529
uaucguguugcaaucacua

SEQ ID NO: 319531 - RNA, 19 nt, Artificial Sequence
  Description of Artificial Sequence: Synthetic oligonucleotide
  Sense Strand Starting at position 11 of SEQ ID NO: 315605
ugggauuguccagaaguuu

SEQ ID NO: 319532 - RNA, 19 nt, Artificial Sequence
  Description of Artificial Sequence: Synthetic oligonucleotide
  Antisense Strand to SEQ ID NO: 319531
aaacuucuggacaauccca

SEQ ID NO: 319533 - RNA, 19 nt, Artificial Sequence
  Description of Artificial Sequence: Synthetic oligonucleotide
  Sense Strand Starting at position 11 of SEQ ID NO: 315616
agaaguuugcaguaacaaa

SEQ ID NO: 319534 - RNA, 19 nt, Artificial Sequence
  Description of Artificial Sequence: Synthetic oligonucleotide
  Antisense Strand to SEQ ID NO: 319533
uuuguuacugcaaacuucu

SEQ ID NO: 319535 - RNA, 19 nt, Artificial Sequence
  Description of Artificial Sequence: Synthetic oligonucleotide
  Sense Strand Starting at position 11 of SEQ ID NO: 315682
gucuucuguagguauuaag

SEQ ID NO: 319536 - RNA, 19 nt, Artificial Sequence
  Description of Artificial Sequence: Synthetic oligonucleotide
  Antisense Strand to SEQ ID NO: 319535
cuuaauaccuacagaagac

SEQ ID NO: 319537 - RNA, 19 nt, Artificial Sequence
  Description of Artificial Sequence: Synthetic oligonucleotide
  Sense Strand Starting at position 11 of SEQ ID NO: 315749
auuccauuaguagguacaa

SEQ ID NO: 319538 - RNA, 19 nt, Artificial Sequence
  Description of Artificial Sequence: Synthetic oligonucleotide
  Antisense Strand to SEQ ID NO: 319537
uuguaccuacuaauggaau

SEQ ID NO: 319539 - RNA, 19 nt, Artificial Sequence
  Description of Artificial Sequence: Synthetic oligonucleotide
  Sense Strand Starting at position 11 of SEQ ID NO: 315750
uuccauuaguagguacaau

SEQ ID NO: 319540 - RNA, 19 nt, Artificial Sequence
  Description of Artificial Sequence: Synthetic oligonucleotide
  Antisense Strand to SEQ ID NO: 319539
auuguaccuacuaauggaa

SEQ ID NO: 319541 - RNA, 19 nt, Artificial Sequence
  Description of Artificial Sequence: Synthetic oligonucleotide
  Sense Strand Starting at position 11 of SEQ ID NO: 315818
uauugugaucaaggagcaa

SEQ ID NO: 319542 - RNA, 19 nt, Artificial Sequence
  Description of Artificial Sequence: Synthetic oligonucleotide
  Antisense Strand to SEQ ID NO: 319541
uugcuccuugaucacaaua

SEQ ID NO: 319543 - RNA, 19 nt, Artificial Sequence
  Description of Artificial Sequence: Synthetic oligonucleotide
  Sense Strand Starting at position 11 of SEQ ID NO: 315903
ugagaaaguuuacuuaguc

SEQ ID NO: 319544 - RNA, 19 nt, Artificial Sequence
  Description of Artificial Sequence: Synthetic oligonucleotide
  Antisense Strand to SEQ ID NO: 319543
gacuaaguaaacuuucuca

SEQ ID NO: 319545 - RNA, 19 nt, Artificial Sequence
  Description of Artificial Sequence: Synthetic oligonucleotide
  Sense Strand Starting at position 11 of SEQ ID NO: 315904
gagaaaguuuacuuagucu

SEQ ID NO: 319546 - RNA, 19 nt, Artificial Sequence
  Description of Artificial Sequence: Synthetic oligonucleotide
  Antisense Strand to SEQ ID NO: 319545
agacuaaguaaacuuucuc

SEQ ID NO: 319547 - RNA, 19 nt, Artificial Sequence
  Description of Artificial Sequence: Synthetic oligonucleotide
  Sense Strand Starting at position 11 of SEQ ID NO: 316183
ccaucaugacuguauggua

SEQ ID NO: 319548 - RNA, 19 nt, Artificial Sequence
  Description of Artificial Sequence: Synthetic oligonucleotide
  Antisense Strand to SEQ ID NO: 319547
uaccauacagucaugaugg

SEQ ID NO: 319549 - RNA, 19 nt, Artificial Sequence
  Description of Artificial Sequence: Synthetic oligonucleotide
  Sense Strand Starting at position 11 of SEQ ID NO: 316267
gaccuagaguuggcuuaga

SEQ ID NO: 319550 - RNA, 19 nt, Artificial Sequence
  Description of Artificial Sequence: Synthetic oligonucleotide
  Antisense Strand to SEQ ID NO: 319549
ucuaagccaacucuagguc

SEQ ID NO: 319551 - RNA, 19 nt, Artificial Sequence
  Description of Artificial Sequence: Synthetic oligonucleotide
  Sense Strand Starting at position 11 of SEQ ID NO: 316365
gguuucugaugggcucaaa

SEQ ID NO: 319552 - RNA, 19 nt, Artificial Sequence
  Description of Artificial Sequence: Synthetic oligonucleotide
  Antisense Strand to SEQ ID NO: 319551
uuugagcccaucagaaacc

SEQ ID NO: 319553 - RNA, 19 nt, Artificial Sequence
  Description of Artificial Sequence: Synthetic oligonucleotide
  Sense Strand Starting at position 11 of SEQ ID NO: 316661
uuugaaucuuaagcuagua

SEQ ID NO: 319554 - RNA, 19 nt, Artificial Sequence
  Description of Artificial Sequence: Synthetic oligonucleotide
  Antisense Strand to SEQ ID NO: 319553
uacuagcuuaagauucaaa

SEQ ID NO: 319555 - RNA, 19 nt, Artificial Sequence
  Description of Artificial Sequence: Synthetic oligonucleotide
  Sense Strand Starting at position 11 of SEQ ID NO: 316809
ugaacagcugcucaaugua

SEQ ID NO: 319556 - RNA, 19 nt, Artificial Sequence
  Description of Artificial Sequence: Synthetic oligonucleotide
  Antisense Strand to SEQ ID NO: 319555
uacauugagcagcuguuca

SEQ ID NO: 319557 - RNA, 19 nt, Artificial Sequence
  Description of Artificial Sequence: Synthetic oligonucleotide
  Sense Strand Starting at position 11 of SEQ ID NO: 316926
cuuugaaucucugcagaau

SEQ ID NO: 319558 - RNA, 19 nt, Artificial Sequence
  Description of Artificial Sequence: Synthetic oligonucleotide
  Antisense Strand to SEQ ID NO: 319557
auucugcagagauucaaag

SEQ ID NO: 319559 - RNA, 19 nt, Artificial Sequence
  Description of Artificial Sequence: Synthetic oligonucleotide
  Sense Strand Starting at position 11 of SEQ ID NO: 316927
uuugaaucucugcagaaua

SEQ ID NO: 319560 - RNA, 19 nt, Artificial Sequence
  Description of Artificial Sequence: Synthetic oligonucleotide
  Antisense Strand to SEQ ID NO: 319559
uauucugcagagauucaaa

SEQ ID NO: 319561 - RNA, 19 nt, Artificial Sequence
  Description of Artificial Sequence: Synthetic oligonucleotide
  Sense Strand Starting at position 11 of SEQ ID NO: 317054
uuggcaauuucugugcauu

SEQ ID NO: 319562 - RNA, 19 nt, Artificial Sequence
  Description of Artificial Sequence: Synthetic oligonucleotide
  Antisense Strand to SEQ ID NO: 319561
aaugcacagaaauugccaa

SEQ ID NO: 319563 - RNA, 19 nt, Artificial Sequence
  Description of Artificial Sequence: Synthetic oligonucleotide
  Sense Strand Starting at position 11 of SEQ ID NO: 317407
caaauuauggcagaucugu

SEQ ID NO: 319564 - RNA, 19 nt, Artificial Sequence
  Description of Artificial Sequence: Synthetic oligonucleotide
  Antisense Strand to SEQ ID NO: 319563
acagaucugccauaauuug

SEQ ID NO: 319565 - RNA, 19 nt, Artificial Sequence
  Description of Artificial Sequence: Synthetic oligonucleotide
  Sense Strand Starting at position 11 of SEQ ID NO: 317420
aucuguauuugugaaagaa

SEQ ID NO: 319566 - RNA, 19 nt, Artificial Sequence
  Description of Artificial Sequence: Synthetic oligonucleotide
  Antisense Strand to SEQ ID NO: 319565
uucuuucacaaauacagau

SEQ ID NO: 319567 - RNA, 19 nt, Artificial Sequence
  Description of Artificial Sequence: Synthetic oligonucleotide
  Sense Strand Starting at position 11 of SEQ ID NO: 317785
gacugaguucuguaaucga

SEQ ID NO: 319568 - RNA, 19 nt, Artificial Sequence
  Description of Artificial Sequence: Synthetic oligonucleotide
  Antisense Strand to SEQ ID NO: 319567
ucgauuacagaacucaguc

SEQ ID NO: 319569 - RNA, 19 nt, Artificial Sequence
  Description of Artificial Sequence: Synthetic oligonucleotide
  Sense Strand Starting at position 11 of SEQ ID NO: 317899
aagguuaaguguccugaca

SEQ ID NO: 319570 - RNA, 19 nt, Artificial Sequence
  Description of Artificial Sequence: Synthetic oligonucleotide
  Antisense Strand to SEQ ID NO: 319569
ugucaggacacuuaaccuu

SEQ ID NO: 319571 - RNA, 19 nt, Artificial Sequence
  Description of Artificial Sequence: Synthetic oligonucleotide
  Sense Strand Starting at position 11 of SEQ ID NO: 317946
ggaugccacuuacuaauga

SEQ ID NO: 319572 - RNA, 19 nt, Artificial Sequence
  Description of Artificial Sequence: Synthetic oligonucleotide
  Antisense Strand to SEQ ID NO: 319571
ucauuaguaaguggcaucc

SEQ ID NO: 319573 - RNA, 19 nt, Artificial Sequence
  Description of Artificial Sequence: Synthetic oligonucleotide
  Sense Strand Starting at position 11 of SEQ ID NO: 317957
acuaaugaauuguccuuga

SEQ ID NO: 319574 - RNA, 19 nt, Artificial Sequence
  Description of Artificial Sequence: Synthetic oligonucleotide
  Antisense Strand to SEQ ID NO: 319573
ucaaggacaauucauuagu

SEQ ID NO: 319575 - RNA, 19 nt, Artificial Sequence
  Description of Artificial Sequence: Synthetic oligonucleotide
  Sense Strand Starting at position 11 of SEQ ID NO: 317960
aaugaauuguccuugagca

SEQ ID NO: 319576 - RNA, 19 nt, Artificial Sequence
  Description of Artificial Sequence: Synthetic oligonucleotide
  Antisense Strand to SEQ ID NO: 319575
ugcucaaggacaauucauu

SEQ ID NO: 319577 - RNA, 19 nt, Artificial Sequence
  Description of Artificial Sequence: Synthetic oligonucleotide
  Sense Strand Starting at position 11 of SEQ ID NO: 317961
augaauuguccuugagcaa

SEQ ID NO: 319578 - RNA, 19 nt, Artificial Sequence
  Description of Artificial Sequence: Synthetic oligonucleotide
  Antisense Strand to SEQ ID NO: 319577
uugcucaaggacaauucau

SEQ ID NO: 319579 - RNA, 19 nt, Artificial Sequence
  Description of Artificial Sequence: Synthetic oligonucleotide
  Sense Strand Starting at position 11 of SEQ ID NO: 317962
ugaauuguccuugagcaaa

SEQ ID NO: 319580 - RNA, 19 nt, Artificial Sequence
  Description of Artificial Sequence: Synthetic oligonucleotide
  Antisense Strand to SEQ ID NO: 319579
uuugcucaaggacaauuca

SEQ ID NO: 319581 - RNA, 19 nt, Artificial Sequence
  Description of Artificial Sequence: Synthetic oligonucleotide
  Sense Strand Starting at position 11 of SEQ ID NO: 318019
gcuugcuccguguuaggca

SEQ ID NO: 319582 - RNA, 19 nt, Artificial Sequence
  Description of Artificial Sequence: Synthetic oligonucleotide
  Antisense Strand to SEQ ID NO: 319581
ugccuaacacggagcaagc

SEQ ID NO: 319583 - RNA, 19 nt, Artificial Sequence
  Description of Artificial Sequence: Synthetic oligonucleotide
  Sense Strand Starting at position 11 of SEQ ID NO: 318038
cugaucgaaucaguuuaca

SEQ ID NO: 319584 - RNA, 19 nt, Artificial Sequence
  Description of Artificial Sequence: Synthetic oligonucleotide
  Antisense Strand to SEQ ID NO: 319583
uguaaacugauucgaucag

SEQ ID NO: 319585 - RNA, 19 nt, Artificial Sequence
  Description of Artificial Sequence: Synthetic oligonucleotide
  Sense Strand Starting at position 11 of SEQ ID NO: 318041
aucgaaucaguuuacacau

SEQ ID NO: 319586 - RNA, 19 nt, Artificial Sequence
  Description of Artificial Sequence: Synthetic oligonucleotide
  Antisense Strand to SEQ ID NO: 319585
auguguaaacugauucgau

SEQ ID NO: 319587 - RNA, 19 nt, Artificial Sequence
  Description of Artificial Sequence: Synthetic oligonucleotide
  Sense Strand Starting at position 11 of SEQ ID NO: 318152
gugaaaguccaaggucaca

SEQ ID NO: 319588 - RNA, 19 nt, Artificial Sequence
  Description of Artificial Sequence: Synthetic oligonucleotide
  Antisense Strand to SEQ ID NO: 319587
ugugaccuuggacuuucac

SEQ ID NO: 319589 - RNA, 19 nt, Artificial Sequence
  Description of Artificial Sequence: Synthetic oligonucleotide
  Sense Strand Starting at position 11 of SEQ ID NO: 318373
cccaguuaaguagaacuau

SEQ ID NO: 319590 - RNA, 19 nt, Artificial Sequence
  Description of Artificial Sequence: Synthetic oligonucleotide
  Antisense Strand to SEQ ID NO: 319589
auaguucuacuuaacuggg

SEQ ID NO: 319591 - RNA, 19 nt, Artificial Sequence
  Description of Artificial Sequence: Synthetic oligonucleotide
  Sense Strand Starting at position 11 of SEQ ID NO: 318393
auucuaaccugggcauauu

SEQ ID NO: 319592 - RNA, 19 nt, Artificial Sequence
  Description of Artificial Sequence: Synthetic oligonucleotide
  Antisense Strand to SEQ ID NO: 319591
aauaugcccagguuagaau

SEQ ID NO: 319593 - RNA, 19 nt, Artificial Sequence
  Description of Artificial Sequence: Synthetic oligonucleotide
  Sense Strand Starting at position 11 of SEQ ID NO: 318481
uggaauggcuggguuaaua

SEQ ID NO: 319594 - RNA, 19 nt, Artificial Sequence
  Description of Artificial Sequence: Synthetic oligonucleotide
  Antisense Strand to SEQ ID NO: 319593
uauuaacccagccauucca

SEQ ID NO: 319595 - RNA, 19 nt, Artificial Sequence
  Description of Artificial Sequence: Synthetic oligonucleotide
  Sense Strand Starting at position 11 of SEQ ID NO: 318895
ugucauugccaucacauua

SEQ ID NO: 319596 - RNA, 19 nt, Artificial Sequence
  Description of Artificial Sequence: Synthetic oligonucleotide
  Antisense Strand to SEQ ID NO: 319595
uaaugugauggcaaugaca

SEQ ID NO: 319597 - RNA, 19 nt, Artificial Sequence
  Description of Artificial Sequence: Synthetic oligonucleotide
  Sense Strand Starting at position 11 of SEQ ID NO: 318928
cuguguuagcaggaaauga

SEQ ID NO: 319598 - RNA, 19 nt, Artificial Sequence
  Description of Artificial Sequence: Synthetic oligonucleotide
  Antisense Strand to SEQ ID NO: 319597
ucauuuccugcuaacacag

SEQ ID NO: 319599 - RNA, 19 nt, Artificial Sequence
  Description of Artificial Sequence: Synthetic oligonucleotide
  Sense Strand Starting at position 11 of SEQ ID NO: 319022
uggugcaagaguuaggaau

SEQ ID NO: 319600 - RNA, 19 nt, Artificial Sequence
  Description of Artificial Sequence: Synthetic oligonucleotide
  Antisense Strand to SEQ ID NO: 319599
auuccuaacucuugcacca

SEQ ID NO: 319601 - RNA, 19 nt, Artificial Sequence
  Description of Artificial Sequence: Synthetic oligonucleotide
  Sense Strand Starting at position 11 of SEQ ID NO: 319140
cugacuguaggcuaauuaa

SEQ ID NO: 319602 - RNA, 19 nt, Artificial Sequence
  Description of Artificial Sequence: Synthetic oligonucleotide
  Antisense Strand to SEQ ID NO: 319601
uuaauuagccuacagucag

SEQ ID NO: 319603 - RNA, 19 nt, Artificial Sequence
  Description of Artificial Sequence: Synthetic oligonucleotide
  Sense Strand Starting at position 11 of SEQ ID NO: 319143
acuguaggcuaauuaaaug

SEQ ID NO: 319604 - RNA, 19 nt, Artificial Sequence
  Description of Artificial Sequence: Synthetic oligonucleotide
  Antisense Strand to SEQ ID NO: 319603
cauuuaauuagccuacagu

SEQ ID NO: 319605 - RNA, 19 nt, Artificial Sequence
  Description of Artificial Sequence: Synthetic oligonucleotide
  Sense Strand Starting at position 11 of SEQ ID NO: 319172
ucuaauuauugugucagaa

SEQ ID NO: 319606 - RNA, 19 nt, Artificial Sequence
  Description of Artificial Sequence: Synthetic oligonucleotide
  Antisense Strand to SEQ ID NO: 319605
uucugacacaauaauuaga

SEQ ID NO: 319607 - RNA, 19 nt, Artificial Sequence
  Description of Artificial Sequence: Synthetic oligonucleotide
  Sense Strand Starting at position 12 of SEQ ID NO: 315244
ugggaacuugcuggaggau

SEQ ID NO: 319608 - RNA, 19 nt, Artificial Sequence
  Description of Artificial Sequence: Synthetic oligonucleotide
  Antisense Strand to SEQ ID NO: 319607
auccuccagcaaguuccca

SEQ ID NO: 319609 - RNA, 19 nt, Artificial Sequence
  Description of Artificial Sequence: Synthetic oligonucleotide
  Sense Strand Starting at position 12 of SEQ ID NO: 315357
ggcccaggucguagaagua

SEQ ID NO: 319610 - RNA, 19 nt, Artificial Sequence
  Description of Artificial Sequence: Synthetic oligonucleotide
  Antisense Strand to SEQ ID NO: 319609
uacuucuacgaccugggcc

SEQ ID NO: 319611 - RNA, 19 nt, Artificial Sequence
  Description of Artificial Sequence: Synthetic oligonucleotide
  Sense Strand Starting at position 12 of SEQ ID NO: 315431
ugauucgacugggugguaa

SEQ ID NO: 319612 - RNA, 19 nt, Artificial Sequence
  Description of Artificial Sequence: Synthetic oligonucleotide
  Antisense Strand to SEQ ID NO: 319611
uuaccacccagucgaauca

SEQ ID NO: 319613 - RNA, 19 nt, Artificial Sequence
  Description of Artificial Sequence: Synthetic oligonucleotide
  Sense Strand Starting at position 12 of SEQ ID NO: 315452
gaggaaucguggugcuuug

SEQ ID NO: 319614 - RNA, 19 nt, Artificial Sequence
  Description of Artificial Sequence: Synthetic oligonucleotide
  Antisense Strand to SEQ ID NO: 319613
caaagcaccacgauuccuc

SEQ ID NO: 319615 - RNA, 19 nt, Artificial Sequence
  Description of Artificial Sequence: Synthetic oligonucleotide
  Sense Strand Starting at position 12 of SEQ ID NO: 315459
cguggugcuuugcaaaugu

SEQ ID NO: 319616 - RNA, 19 nt, Artificial Sequence
  Description of Artificial Sequence: Synthetic oligonucleotide
  Antisense Strand to SEQ ID NO: 319615
acauuugcaaagcaccacg

SEQ ID NO: 319617 - RNA, 19 nt, Artificial Sequence
  Description of Artificial Sequence: Synthetic oligonucleotide
  Sense Strand Starting at position 12 of SEQ ID NO: 315463
gugcuuugcaaauguguau

SEQ ID NO: 319618 - RNA, 19 nt, Artificial Sequence
  Description of Artificial Sequence: Synthetic oligonucleotide
  Antisense Strand to SEQ ID NO: 319617
auacacauuugcaaagcac

SEQ ID NO: 319619 - RNA, 19 nt, Artificial Sequence
  Description of Artificial Sequence: Synthetic oligonucleotide
  Sense Strand Starting at position 12 of SEQ ID NO: 315467
uuugcaaauguguaucaag

SEQ ID NO: 319620 - RNA, 19 nt, Artificial Sequence
  Description of Artificial Sequence: Synthetic oligonucleotide
  Antisense Strand to SEQ ID NO: 319619
cuugauacacauuugcaaa

SEQ ID NO: 319621 - RNA, 19 nt, Artificial Sequence
  Description of Artificial Sequence: Synthetic oligonucleotide
  Sense Strand Starting at position 12 of SEQ ID NO: 315817
acggguucauggucugaga

SEQ ID NO: 319622 - RNA, 19 nt, Artificial Sequence
  Description of Artificial Sequence: Synthetic oligonucleotide
  Antisense Strand to SEQ ID NO: 319621
ucucagaccaugaacccgu

SEQ ID NO: 319623 - RNA, 19 nt, Artificial Sequence
  Description of Artificial Sequence: Synthetic oligonucleotide
  Sense Strand Starting at position 12 of SEQ ID NO: 315819
ggguucauggucugagaaa

SEQ ID NO: 319624 - RNA, 19 nt, Artificial Sequence
  Description of Artificial Sequence: Synthetic oligonucleotide
  Antisense Strand to SEQ ID NO: 319623
uuucucagaccaugaaccc

SEQ ID NO: 319625 - RNA, 19 nt, Artificial Sequence
  Description of Artificial Sequence: Synthetic oligonucleotide
  Sense Strand Starting at position 12 of SEQ ID NO: 315820
gguucauggucugagaaag

SEQ ID NO: 319626 - RNA, 19 nt, Artificial Sequence
  Description of Artificial Sequence: Synthetic oligonucleotide
  Antisense Strand to SEQ ID NO: 319625
cuuucucagaccaugaacc

SEQ ID NO: 319627 - RNA, 19 nt, Artificial Sequence
  Description of Artificial Sequence: Synthetic oligonucleotide
  Sense Strand Starting at position 12 of SEQ ID NO: 315983
ggcagacacugugugcuau

SEQ ID NO: 319628 - RNA, 19 nt, Artificial Sequence
  Description of Artificial Sequence: Synthetic oligonucleotide
  Antisense Strand to SEQ ID NO: 319627
auagcacacagugucugcc

SEQ ID NO: 319629 - RNA, 19 nt, Artificial Sequence
  Description of Artificial Sequence: Synthetic oligonucleotide
  Sense Strand Starting at position 12 of SEQ ID NO: 315987
gacacugugugcuaucagu

SEQ ID NO: 319630 - RNA, 19 nt, Artificial Sequence
  Description of Artificial Sequence: Synthetic oligonucleotide
  Antisense Strand to SEQ ID NO: 319629
acugauagcacacaguguc

SEQ ID NO: 319631 - RNA, 19 nt, Artificial Sequence
  Description of Artificial Sequence: Synthetic oligonucleotide
  Sense Strand Starting at position 12 of SEQ ID NO: 316067
ccuuucagcguuugggaga

SEQ ID NO: 319632 - RNA, 19 nt, Artificial Sequence
  Description of Artificial Sequence: Synthetic oligonucleotide
  Antisense Strand to SEQ ID NO: 319631
ucucccaaacgcugaaagg

SEQ ID NO: 319633 - RNA, 19 nt, Artificial Sequence
  Description of Artificial Sequence: Synthetic oligonucleotide
  Sense Strand Starting at position 12 of SEQ ID NO: 316117
cucucuacugcaggaagaa

SEQ ID NO: 319634 - RNA, 19 nt, Artificial Sequence
  Description of Artificial Sequence: Synthetic oligonucleotide
  Antisense Strand to SEQ ID NO: 319633
uucuuccugcaguagagag

SEQ ID NO: 319635 - RNA, 19 nt, Artificial Sequence
  Description of Artificial Sequence: Synthetic oligonucleotide
  Sense Strand Starting at position 12 of SEQ ID NO: 316132
agaagcuggcccuguuaga

SEQ ID NO: 319636 - RNA, 19 nt, Artificial Sequence
  Description of Artificial Sequence: Synthetic oligonucleotide
  Antisense Strand to SEQ ID NO: 319635
ucuaacagggccagcuucu

SEQ ID NO: 319637 - RNA, 19 nt, Artificial Sequence
  Description of Artificial Sequence: Synthetic oligonucleotide
  Sense Strand Starting at position 12 of SEQ ID NO: 316218
gcaggagucgcgggauaca

SEQ ID NO: 319638 - RNA, 19 nt, Artificial Sequence
  Description of Artificial Sequence: Synthetic oligonucleotide
  Antisense Strand to SEQ ID NO: 319637
uguaucccgcgacuccugc

SEQ ID NO: 319639 - RNA, 19 nt, Artificial Sequence
  Description of Artificial Sequence: Synthetic oligonucleotide
  Sense Strand Starting at position 12 of SEQ ID NO: 316267
gggagucgccaaugcuaau

SEQ ID NO: 319640 - RNA, 19 nt, Artificial Sequence
  Description of Artificial Sequence: Synthetic oligonucleotide
  Antisense Strand to SEQ ID NO: 319639
auuagcauuggcgacuccc

SEQ ID NO: 319641 - RNA, 19 nt, Artificial Sequence
  Description of Artificial Sequence: Synthetic oligonucleotide
  Sense Strand Starting at position 12 of SEQ ID NO: 316635
ucaggaguuuccgaauccu

SEQ ID NO: 319642 - RNA, 19 nt, Artificial Sequence
  Description of Artificial Sequence: Synthetic oligonucleotide
  Antisense Strand to SEQ ID NO: 319641
aggauucggaaacuccuga

SEQ ID NO: 319643 - RNA, 19 nt, Artificial Sequence
  Description of Artificial Sequence: Synthetic oligonucleotide
  Sense Strand Starting at position 12 of SEQ ID NO: 318073
cuacuagucguuggcacua

SEQ ID NO: 319644 - RNA, 19 nt, Artificial Sequence
  Description of Artificial Sequence: Synthetic oligonucleotide
  Antisense Strand to SEQ ID NO: 319643
uagugccaacgacuaguag

SEQ ID NO: 319645 - RNA, 19 nt, Artificial Sequence
  Description of Artificial Sequence: Synthetic oligonucleotide
  Sense Strand Starting at position 12 of SEQ ID NO: 318218
gcuggagccucuccuugau

SEQ ID NO: 319646 - RNA, 19 nt, Artificial Sequence
  Description of Artificial Sequence: Synthetic oligonucleotide
  Antisense Strand to SEQ ID NO: 319645
aucaaggagaggcuccagc

SEQ ID NO: 319647 - RNA, 19 nt, Artificial Sequence
  Description of Artificial Sequence: Synthetic oligonucleotide
  Sense Strand Starting at position 12 of SEQ ID NO: 318910
ucccguuugccucaguaca

SEQ ID NO: 319648 - RNA, 19 nt, Artificial Sequence
  Description of Artificial Sequence: Synthetic oligonucleotide
  Antisense Strand to SEQ ID NO: 319647
uguacugaggcaaacggga

SEQ ID NO: 319649 - RNA, 19 nt, Artificial Sequence
  Description of Artificial Sequence: Synthetic oligonucleotide
  Sense Strand Starting at position 13 of SEQ ID NO: 315342
gggacuggugcucagcaau

SEQ ID NO: 319650 - RNA, 19 nt, Artificial Sequence
  Description of Artificial Sequence: Synthetic oligonucleotide
  Antisense Strand to SEQ ID NO: 319649
auugcugagcaccaguccc

SEQ ID NO: 319651 - RNA, 19 nt, Artificial Sequence
  Description of Artificial Sequence: Synthetic oligonucleotide
  Sense Strand Starting at position 13 of SEQ ID NO: 315345
acuggugcucagcaauuga

SEQ ID NO: 319652 - RNA, 19 nt, Artificial Sequence
  Description of Artificial Sequence: Synthetic oligonucleotide
  Antisense Strand to SEQ ID NO: 319651
ucaauugcugagcaccagu

SEQ ID NO: 319653 - RNA, 19 nt, Artificial Sequence
  Description of Artificial Sequence: Synthetic oligonucleotide
  Sense Strand Starting at position 13 of SEQ ID NO: 315417
cucuacuaucuuggcaaga

SEQ ID NO: 319654 - RNA, 19 nt, Artificial Sequence
  Description of Artificial Sequence: Synthetic oligonucleotide
  Antisense Strand to SEQ ID NO: 319653
ucuugccaagauaguagag

SEQ ID NO: 319655 - RNA, 19 nt, Artificial Sequence
  Description of Artificial Sequence: Synthetic oligonucleotide
  Sense Strand Starting at position 13 of SEQ ID NO: 315418
ucuacuaucuuggcaagag

SEQ ID NO: 319656 - RNA, 19 nt, Artificial Sequence
  Description of Artificial Sequence: Synthetic oligonucleotide
  Antisense Strand to SEQ ID NO: 319655
cucuugccaagauaguaga

SEQ ID NO: 319657 - RNA, 19 nt, Artificial Sequence
  Description of Artificial Sequence: Synthetic oligonucleotide
  Sense Strand Starting at position 13 of SEQ ID NO: 315430
gcaagagggauguggcauu

SEQ ID NO: 319658 - RNA, 19 nt, Artificial Sequence
  Description of Artificial Sequence: Synthetic oligonucleotide
  Antisense Strand to SEQ ID NO: 319657
aaugccacaucccucuugc

SEQ ID NO: 319659 - RNA, 19 nt, Artificial Sequence
  Description of Artificial Sequence: Synthetic oligonucleotide
  Sense Strand Starting at position 13 of SEQ ID NO: 315508
aggacucagugucauaagu

SEQ ID NO: 319660 - RNA, 19 nt, Artificial Sequence
  Description of Artificial Sequence: Synthetic oligonucleotide
  Antisense Strand to SEQ ID NO: 319659
acuuaugacacugaguccu

SEQ ID NO: 319661 - RNA, 19 nt, Artificial Sequence
  Description of Artificial Sequence: Synthetic oligonucleotide
  Sense Strand Starting at position 13 of SEQ ID NO: 315510
gacucagugucauaaguaa

SEQ ID NO: 319662 - RNA, 19 nt, Artificial Sequence
  Description of Artificial Sequence: Synthetic oligonucleotide
  Antisense Strand to SEQ ID NO: 319661
uuacuuaugacacugaguc

SEQ ID NO: 319663 - RNA, 19 nt, Artificial Sequence
  Description of Artificial Sequence: Synthetic oligonucleotide
  Sense Strand Starting at position 13 of SEQ ID NO: 315911
ggccauaucucagacaauc

SEQ ID NO: 319664 - RNA, 19 nt, Artificial Sequence
  Description of Artificial Sequence: Synthetic oligonucleotide
  Antisense Strand to SEQ ID NO: 319663
gauugucugagauauggcc

SEQ ID NO: 319665 - RNA, 19 nt, Artificial Sequence
  Description of Artificial Sequence: Synthetic oligonucleotide
  Sense Strand Starting at position 13 of SEQ ID NO: 315998
cacuguguaccugguuaau

SEQ ID NO: 319666 - RNA, 19 nt, Artificial Sequence
  Description of Artificial Sequence: Synthetic oligonucleotide
  Antisense Strand to SEQ ID NO: 319665
auuaaccagguacacagug

SEQ ID NO: 319667 - RNA, 19 nt, Artificial Sequence
  Description of Artificial Sequence: Synthetic oligonucleotide
  Sense Strand Starting at position 13 of SEQ ID NO: 316004
guaccugguuaaucgagaa

SEQ ID NO: 319668 - RNA, 19 nt, Artificial Sequence
  Description of Artificial Sequence: Synthetic oligonucleotide
  Antisense Strand to SEQ ID NO: 319667
uucucgauuaaccagguac

SEQ ID NO: 319669 - RNA, 19 nt, Artificial Sequence
  Description of Artificial Sequence: Synthetic oligonucleotide
  Sense Strand Starting at position 13 of SEQ ID NO: 316060
gcaaacaaaugguuaacaa

SEQ ID NO: 319670 - RNA, 19 nt, Artificial Sequence
  Description of Artificial Sequence: Synthetic oligonucleotide
  Antisense Strand to SEQ ID NO: 319669
uuguuaaccauuuguuugc

SEQ ID NO: 319671 - RNA, 19 nt, Artificial Sequence
  Description of Artificial Sequence: Synthetic oligonucleotide
  Sense Strand Starting at position 13 of SEQ ID NO: 316153
gggcuaaggcuacagauua

SEQ ID NO: 319672 - RNA, 19 nt, Artificial Sequence
  Description of Artificial Sequence: Synthetic oligonucleotide
  Antisense Strand to SEQ ID NO: 319671
uaaucuguagccuuagccc

SEQ ID NO: 319673 - RNA, 19 nt, Artificial Sequence
  Description of Artificial Sequence: Synthetic oligonucleotide
  Sense Strand Starting at position 13 of SEQ ID NO: 316214
aauggaguuucuucugucu

SEQ ID NO: 319674 - RNA, 19 nt, Artificial Sequence
  Description of Artificial Sequence: Synthetic oligonucleotide
  Antisense Strand to SEQ ID NO: 319673
agacagaagaaacuccauu

SEQ ID NO: 319675 - RNA, 19 nt, Artificial Sequence
  Description of Artificial Sequence: Synthetic oligonucleotide
  Sense Strand Starting at position 13 of SEQ ID NO: 316216
uggaguuucuucugucuuc

SEQ ID NO: 319676 - RNA, 19 nt, Artificial Sequence
  Description of Artificial Sequence: Synthetic oligonucleotide
  Antisense Strand to SEQ ID NO: 319675
gaagacagaagaaacucca

SEQ ID NO: 319677 - RNA, 19 nt, Artificial Sequence
  Description of Artificial Sequence: Synthetic oligonucleotide
  Sense Strand Starting at position 13 of SEQ ID NO: 316417
ccucccaucugacgagaaa

SEQ ID NO: 319678 - RNA, 19 nt, Artificial Sequence
  Description of Artificial Sequence: Synthetic oligonucleotide
  Antisense Strand to SEQ ID NO: 319677
uuucucgucagaugggagg

SEQ ID NO: 319679 - RNA, 19 nt, Artificial Sequence
  Description of Artificial Sequence: Synthetic oligonucleotide
  Sense Strand Starting at position 13 of SEQ ID NO: 316603
gcuguuccggccucagauu

SEQ ID NO: 319680 - RNA, 19 nt, Artificial Sequence
  Description of Artificial Sequence: Synthetic oligonucleotide
  Antisense Strand to SEQ ID NO: 319679
aaucugaggccggaacagc

SEQ ID NO: 319681 - RNA, 19 nt, Artificial Sequence
  Description of Artificial Sequence: Synthetic oligonucleotide
  Sense Strand Starting at position 13 of SEQ ID NO: 316627
ccuugagaaccgcggucau

SEQ ID NO: 319682 - RNA, 19 nt, Artificial Sequence
  Description of Artificial Sequence: Synthetic oligonucleotide
  Antisense Strand to SEQ ID NO: 319681
augaccgcgguucucaagg

SEQ ID NO: 319683 - RNA, 19 nt, Artificial Sequence
  Description of Artificial Sequence: Synthetic oligonucleotide
  Sense Strand Starting at position 13 of SEQ ID NO: 316640
ggucaugacugccgagaga

SEQ ID NO: 319684 - RNA, 19 nt, Artificial Sequence
  Description of Artificial Sequence: Synthetic oligonucleotide
  Antisense Strand to SEQ ID NO: 319683
ucucucggcagucaugacc

SEQ ID NO: 319685 - RNA, 19 nt, Artificial Sequence
  Description of Artificial Sequence: Synthetic oligonucleotide
  Sense Strand Starting at position 13 of SEQ ID NO: 317065
ggaacugaccgcggaguua

SEQ ID NO: 319686 - RNA, 19 nt, Artificial Sequence
  Description of Artificial Sequence: Synthetic oligonucleotide
  Antisense Strand to SEQ ID NO: 319685
uaacuccgcggucaguucc

SEQ ID NO: 319687 - RNA, 19 nt, Artificial Sequence
  Description of Artificial Sequence: Synthetic oligonucleotide
  Sense Strand Starting at position 13 of SEQ ID NO: 317293
agccgagcuuuccacucaa

SEQ ID NO: 319688 - RNA, 19 nt, Artificial Sequence
  Description of Artificial Sequence: Synthetic oligonucleotide
  Antisense Strand to SEQ ID NO: 319687
uugaguggaaagcucggcu

SEQ ID NO: 319689 - RNA, 19 nt, Artificial Sequence
  Description of Artificial Sequence: Synthetic oligonucleotide
  Sense Strand Starting at position 13 of SEQ ID NO: 317346
gaagguguaucuuuacgaa

SEQ ID NO: 319690 - RNA, 19 nt, Artificial Sequence
  Description of Artificial Sequence: Synthetic oligonucleotide
  Antisense Strand to SEQ ID NO: 319689
uucguaaagauacaccuuc

SEQ ID NO: 319691 - RNA, 19 nt, Artificial Sequence
  Description of Artificial Sequence: Synthetic oligonucleotide
  Sense Strand Starting at position 13 of SEQ ID NO: 317385
ccggaagucuuuccaccuu

SEQ ID NO: 319692 - RNA, 19 nt, Artificial Sequence
  Description of Artificial Sequence: Synthetic oligonucleotide
  Antisense Strand to SEQ ID NO: 319691
aagguggaaagacuuccgg

SEQ ID NO: 319693 - RNA, 19 nt, Artificial Sequence
  Description of Artificial Sequence: Synthetic oligonucleotide
  Sense Strand Starting at position 13 of SEQ ID NO: 317633
cuuucccauucuuucgaga

SEQ ID NO: 319694 - RNA, 19 nt, Artificial Sequence
  Description of Artificial Sequence: Synthetic oligonucleotide
  Antisense Strand to SEQ ID NO: 319693
ucucgaaagaaugggaaag

SEQ ID NO: 319695 - RNA, 19 nt, Artificial Sequence
  Description of Artificial Sequence: Synthetic oligonucleotide
  Sense Strand Starting at position 13 of SEQ ID NO: 317635
uucccauucuuucgagaag

SEQ ID NO: 319696 - RNA, 19 nt, Artificial Sequence
  Description of Artificial Sequence: Synthetic oligonucleotide
  Antisense Strand to SEQ ID NO: 319695
cuucucgaaagaaugggaa

SEQ ID NO: 319697 - RNA, 19 nt, Artificial Sequence
  Description of Artificial Sequence: Synthetic oligonucleotide
  Sense Strand Starting at position 13 of SEQ ID NO: 317636
ucccauucuuucgagaaga

SEQ ID NO: 319698 - RNA, 19 nt, Artificial Sequence
  Description of Artificial Sequence: Synthetic oligonucleotide
  Antisense Strand to SEQ ID NO: 319697
ucuucucgaaagaauggga

SEQ ID NO: 319699 - RNA, 19 nt, Artificial Sequence
  Description of Artificial Sequence: Synthetic oligonucleotide
  Sense Strand Starting at position 13 of SEQ ID NO: 317712
gugacaagcucucuaacug

SEQ ID NO: 319700 - RNA, 19 nt, Artificial Sequence
  Description of Artificial Sequence: Synthetic oligonucleotide
  Antisense Strand to SEQ ID NO: 319699
caguuagagagcuugucac

SEQ ID NO: 319701 - RNA, 19 nt, Artificial Sequence
  Description of Artificial Sequence: Synthetic oligonucleotide
  Sense Strand Starting at position 13 of SEQ ID NO: 317863
ccuugacacuuaguagaug

SEQ ID NO: 319702 - RNA, 19 nt, Artificial Sequence
  Description of Artificial Sequence: Synthetic oligonucleotide
  Antisense Strand to SEQ ID NO: 319701
caucuacuaagugucaagg

SEQ ID NO: 319703 - RNA, 19 nt, Artificial Sequence
  Description of Artificial Sequence: Synthetic oligonucleotide
  Sense Strand Starting at position 13 of SEQ ID NO: 317886
auaaguacuugucgaauga

SEQ ID NO: 319704 - RNA, 19 nt, Artificial Sequence
  Description of Artificial Sequence: Synthetic oligonucleotide
  Antisense Strand to SEQ ID NO: 319703
ucauucgacaaguacuuau

SEQ ID NO: 319705 - RNA, 19 nt, Artificial Sequence
  Description of Artificial Sequence: Synthetic oligonucleotide
  Sense Strand Starting at position 13 of SEQ ID NO: 317887
uaaguacuugucgaaugag

SEQ ID NO: 319706 - RNA, 19 nt, Artificial Sequence
  Description of Artificial Sequence: Synthetic oligonucleotide
  Antisense Strand to SEQ ID NO: 319705
cucauucgacaaguacuua

SEQ ID NO: 319707 - RNA, 19 nt, Artificial Sequence
  Description of Artificial Sequence: Synthetic oligonucleotide
  Sense Strand Starting at position 13 of SEQ ID NO: 317890
guacuugucgaaugaguaa

SEQ ID NO: 319708 - RNA, 19 nt, Artificial Sequence
  Description of Artificial Sequence: Synthetic oligonucleotide
  Antisense Strand to SEQ ID NO: 319707
uuacucauucgacaaguac

SEQ ID NO: 319709 - RNA, 19 nt, Artificial Sequence
  Description of Artificial Sequence: Synthetic oligonucleotide
  Sense Strand Starting at position 13 of SEQ ID NO: 318019
ggagaguagugcugggcuu

SEQ ID NO: 319710 - RNA, 19 nt, Artificial Sequence
  Description of Artificial Sequence: Synthetic oligonucleotide
  Antisense Strand to SEQ ID NO: 319709
aagcccagcacuacucucc

SEQ ID NO: 319711 - RNA, 19 nt, Artificial Sequence
  Description of Artificial Sequence: Synthetic oligonucleotide
  Sense Strand Starting at position 13 of SEQ ID NO: 318020
gagaguagugcugggcuuu

SEQ ID NO: 319712 - RNA, 19 nt, Artificial Sequence
  Description of Artificial Sequence: Synthetic oligonucleotide
  Antisense Strand to SEQ ID NO: 319711
aaagcccagcacuacucuc

SEQ ID NO: 319713 - RNA, 19 nt, Artificial Sequence
  Description of Artificial Sequence: Synthetic oligonucleotide
  Sense Strand Starting at position 13 of SEQ ID NO: 318305
cucagauuccuccguggaa

SEQ ID NO: 319714 - RNA, 19 nt, Artificial Sequence
  Description of Artificial Sequence: Synthetic oligonucleotide
  Antisense Strand to SEQ ID NO: 319713
uuccacggaggaaucugag

SEQ ID NO: 319715 - RNA, 19 nt, Artificial Sequence
  Description of Artificial Sequence: Synthetic oligonucleotide
  Sense Strand Starting at position 13 of SEQ ID NO: 318306
ucagauuccuccguggaag

SEQ ID NO: 319716 - RNA, 19 nt, Artificial Sequence
  Description of Artificial Sequence: Synthetic oligonucleotide
  Antisense Strand to SEQ ID NO: 319715
cuuccacggaggaaucuga

SEQ ID NO: 319717 - RNA, 19 nt, Artificial Sequence
  Description of Artificial Sequence: Synthetic oligonucleotide
  Sense Strand Starting at position 13 of SEQ ID NO: 318307
cagauuccuccguggaaga

SEQ ID NO: 319718 - RNA, 19 nt, Artificial Sequence
  Description of Artificial Sequence: Synthetic oligonucleotide
  Antisense Strand to SEQ ID NO: 319717
ucuuccacggaggaaucug

SEQ ID NO: 319719 - RNA, 19 nt, Artificial Sequence
  Description of Artificial Sequence: Synthetic oligonucleotide
  Sense Strand Starting at position 13 of SEQ ID NO: 318308
agauuccuccguggaagaa

SEQ ID NO: 319720 - RNA, 19 nt, Artificial Sequence
  Description of Artificial Sequence: Synthetic oligonucleotide
  Antisense Strand to SEQ ID NO: 319719
uucuuccacggaggaaucu

SEQ ID NO: 319721 - RNA, 19 nt, Artificial Sequence
  Description of Artificial Sequence: Synthetic oligonucleotide
  Sense Strand Starting at position 13 of SEQ ID NO: 319090
ccugucucccauggagaga

SEQ ID NO: 319722 - RNA, 19 nt, Artificial Sequence
  Description of Artificial Sequence: Synthetic oligonucleotide
  Antisense Strand to SEQ ID NO: 319721
ucucuccaugggagacagg

SEQ ID NO: 319723 - RNA, 19 nt, Artificial Sequence
  Description of Artificial Sequence: Synthetic oligonucleotide
  Sense Strand Starting at position 14 of SEQ ID NO: 315359
ucauguguccuagaaauga

SEQ ID NO: 319724 - RNA, 19 nt, Artificial Sequence
  Description of Artificial Sequence: Synthetic oligonucleotide
  Antisense Strand to SEQ ID NO: 319723
ucauuucuaggacacauga

SEQ ID NO: 319725 - RNA, 19 nt, Artificial Sequence
  Description of Artificial Sequence: Synthetic oligonucleotide
  Sense Strand Starting at position 14 of SEQ ID NO: 315363
guguccuagaaaugaaugu

SEQ ID NO: 319726 - RNA, 19 nt, Artificial Sequence
  Description of Artificial Sequence: Synthetic oligonucleotide
  Antisense Strand to SEQ ID NO: 319725
acauucauuucuaggacac

SEQ ID NO: 319727 - RNA, 19 nt, Artificial Sequence
  Description of Artificial Sequence: Synthetic oligonucleotide
  Sense Strand Starting at position 14 of SEQ ID NO: 315387
cucugugggauccagaguu

SEQ ID NO: 319728 - RNA, 19 nt, Artificial Sequence
  Description of Artificial Sequence: Synthetic oligonucleotide
  Antisense Strand to SEQ ID NO: 319727
aacucuggaucccacagag

SEQ ID NO: 319729 - RNA, 19 nt, Artificial Sequence
  Description of Artificial Sequence: Synthetic oligonucleotide
  Sense Strand Starting at position 14 of SEQ ID NO: 315497
acgguuaugguuuaacauu

SEQ ID NO: 319730 - RNA, 19 nt, Artificial Sequence
  Description of Artificial Sequence: Synthetic oligonucleotide
  Antisense Strand to SEQ ID NO: 319729
aauguuaaaccauaaccgu

SEQ ID NO: 319731 - RNA, 19 nt, Artificial Sequence
  Description of Artificial Sequence: Synthetic oligonucleotide
  Sense Strand Starting at position 14 of SEQ ID NO: 315567
cuacaauaugaacguuacu

SEQ ID NO: 319732 - RNA, 19 nt, Artificial Sequence
  Description of Artificial Sequence: Synthetic oligonucleotide
  Antisense Strand to SEQ ID NO: 319731
aguaacguucauauuguag

SEQ ID NO: 319733 - RNA, 19 nt, Artificial Sequence
  Description of Artificial Sequence: Synthetic oligonucleotide
  Sense Strand Starting at position 14 of SEQ ID NO: 315620
aaggguaacuuguccaaau

SEQ ID NO: 319734 - RNA, 19 nt, Artificial Sequence
  Description of Artificial Sequence: Synthetic oligonucleotide
  Antisense Strand to SEQ ID NO: 319733
auuuggacaaguuacccuu

SEQ ID NO: 319735 - RNA, 19 nt, Artificial Sequence
  Description of Artificial Sequence: Synthetic oligonucleotide
  Sense Strand Starting at position 14 of SEQ ID NO: 315621
aggguaacuuguccaaauu

SEQ ID NO: 319736 - RNA, 19 nt, Artificial Sequence
  Description of Artificial Sequence: Synthetic oligonucleotide
  Antisense Strand to SEQ ID NO: 319735
aauuuggacaaguuacccu

SEQ ID NO: 319737 - RNA, 19 nt, Artificial Sequence
  Description of Artificial Sequence: Synthetic oligonucleotide
  Sense Strand Starting at position 14 of SEQ ID NO: 315622
ggguaacuuguccaaauuc

SEQ ID NO: 319738 - RNA, 19 nt, Artificial Sequence
  Description of Artificial Sequence: Synthetic oligonucleotide
  Antisense Strand to SEQ ID NO: 319737
gaauuuggacaaguuaccc

SEQ ID NO: 319739 - RNA, 19 nt, Artificial Sequence
  Description of Artificial Sequence: Synthetic oligonucleotide
  Sense Strand Starting at position 14 of SEQ ID NO: 315700
aggcuucuagccuagaaau

SEQ ID NO: 319740 - RNA, 19 nt, Artificial Sequence
  Description of Artificial Sequence: Synthetic oligonucleotide
  Antisense Strand to SEQ ID NO: 319739
auuucuaggcuagaagccu

SEQ ID NO: 319741 - RNA, 19 nt, Artificial Sequence
  Description of Artificial Sequence: Synthetic oligonucleotide
  Sense Strand Starting at position 14 of SEQ ID NO: 315702
gcuucuagccuagaaaucu

SEQ ID NO: 319742 - RNA, 19 nt, Artificial Sequence
  Description of Artificial Sequence: Synthetic oligonucleotide
  Antisense Strand to SEQ ID NO: 319741
agauuucuaggcuagaagc

SEQ ID NO: 319743 - RNA, 19 nt, Artificial Sequence
  Description of Artificial Sequence: Synthetic oligonucleotide
  Sense Strand Starting at position 14 of SEQ ID NO: 315985
ggaaacuaguucucagagu

SEQ ID NO: 319744 - RNA, 19 nt, Artificial Sequence
  Description of Artificial Sequence: Synthetic oligonucleotide
  Antisense Strand to SEQ ID NO: 319743
acucugagaacuaguuucc

SEQ ID NO: 319745 - RNA, 19 nt, Artificial Sequence
  Description of Artificial Sequence: Synthetic oligonucleotide
  Sense Strand Starting at position 14 of SEQ ID NO: 316247
gugaccuccuaaguggaaa

SEQ ID NO: 319746 - RNA, 19 nt, Artificial Sequence
  Description of Artificial Sequence: Synthetic oligonucleotide
  Antisense Strand to SEQ ID NO: 319745
uuuccacuuaggaggucac

SEQ ID NO: 319747 - RNA, 19 nt, Artificial Sequence
  Description of Artificial Sequence: Synthetic oligonucleotide
  Sense Strand Starting at position 14 of SEQ ID NO: 316316
ccggaauacggccaaucaa

SEQ ID NO: 319748 - RNA, 19 nt, Artificial Sequence
  Description of Artificial Sequence: Synthetic oligonucleotide
  Antisense Strand to SEQ ID NO: 319747
uugauuggccguauuccgg

SEQ ID NO: 319749 - RNA, 19 nt, Artificial Sequence
  Description of Artificial Sequence: Synthetic oligonucleotide
  Sense Strand Starting at position 14 of SEQ ID NO: 316362
agaucuaauggcuguauca

SEQ ID NO: 319750 - RNA, 19 nt, Artificial Sequence
  Description of Artificial Sequence: Synthetic oligonucleotide
  Antisense Strand to SEQ ID NO: 319749
ugauacagccauuagaucu

SEQ ID NO: 319751 - RNA, 19 nt, Artificial Sequence
  Description of Artificial Sequence: Synthetic oligonucleotide
  Sense Strand Starting at position 14 of SEQ ID NO: 316364
aucuaauggcuguaucaca

SEQ ID NO: 319752 - RNA, 19 nt, Artificial Sequence
  Description of Artificial Sequence: Synthetic oligonucleotide
  Antisense Strand to SEQ ID NO: 319751
ugugauacagccauuagau

SEQ ID NO: 319753 - RNA, 19 nt, Artificial Sequence
  Description of Artificial Sequence: Synthetic oligonucleotide
  Sense Strand Starting at position 14 of SEQ ID NO: 316428
gugaauccucaagggacau

SEQ ID NO: 319754 - RNA, 19 nt, Artificial Sequence
  Description of Artificial Sequence: Synthetic oligonucleotide
  Antisense Strand to SEQ ID NO: 319753
augucccuugaggauucac

SEQ ID NO: 319755 - RNA, 19 nt, Artificial Sequence
  Description of Artificial Sequence: Synthetic oligonucleotide
  Sense Strand Starting at position 14 of SEQ ID NO: 316474
uggauaguagaauggugaa

SEQ ID NO: 319756 - RNA, 19 nt, Artificial Sequence
  Description of Artificial Sequence: Synthetic oligonucleotide
  Antisense Strand to SEQ ID NO: 319755
uucaccauucuacuaucca

SEQ ID NO: 319757 - RNA, 19 nt, Artificial Sequence
  Description of Artificial Sequence: Synthetic oligonucleotide
  Sense Strand Starting at position 14 of SEQ ID NO: 316491
aacguuauugcgcuuccau

SEQ ID NO: 319758 - RNA, 19 nt, Artificial Sequence
  Description of Artificial Sequence: Synthetic oligonucleotide
  Antisense Strand to SEQ ID NO: 319757
auggaagcgcaauaacguu

SEQ ID NO: 319759 - RNA, 19 nt, Artificial Sequence
  Description of Artificial Sequence: Synthetic oligonucleotide
  Sense Strand Starting at position 14 of SEQ ID NO: 316492
acguuauugcgcuuccauu

SEQ ID NO: 319760 - RNA, 19 nt, Artificial Sequence
  Description of Artificial Sequence: Synthetic oligonucleotide
  Antisense Strand to SEQ ID NO: 319759
aauggaagcgcaauaacgu

SEQ ID NO: 319761 - RNA, 19 nt, Artificial Sequence
  Description of Artificial Sequence: Synthetic oligonucleotide
  Sense Strand Starting at position 14 of SEQ ID NO: 316493
cguuauugcgcuuccauua

SEQ ID NO: 319762 - RNA, 19 nt, Artificial Sequence
  Description of Artificial Sequence: Synthetic oligonucleotide
  Antisense Strand to SEQ ID NO: 319761
uaauggaagcgcaauaacg

SEQ ID NO: 319763 - RNA, 19 nt, Artificial Sequence
  Description of Artificial Sequence: Synthetic oligonucleotide
  Sense Strand Starting at position 14 of SEQ ID NO: 316692
ggcugacauccauaccugu

SEQ ID NO: 319764 - RNA, 19 nt, Artificial Sequence
  Description of Artificial Sequence: Synthetic oligonucleotide
  Antisense Strand to SEQ ID NO: 319763
acagguauggaugucagcc

SEQ ID NO: 319765 - RNA, 19 nt, Artificial Sequence
  Description of Artificial Sequence: Synthetic oligonucleotide
  Sense Strand Starting at position 14 of SEQ ID NO: 317010
caacgcuugcccgcugaau

SEQ ID NO: 319766 - RNA, 19 nt, Artificial Sequence
  Description of Artificial Sequence: Synthetic oligonucleotide
  Antisense Strand to SEQ ID NO: 319765
auucagcgggcaagcguug

SEQ ID NO: 319767 - RNA, 19 nt, Artificial Sequence
  Description of Artificial Sequence: Synthetic oligonucleotide
  Sense Strand Starting at position 14 of SEQ ID NO: 317070
guguguucggguuucaauu

SEQ ID NO: 319768 - RNA, 19 nt, Artificial Sequence
  Description of Artificial Sequence: Synthetic oligonucleotide
  Antisense Strand to SEQ ID NO: 319767
aauugaaacccgaacacac

SEQ ID NO: 319769 - RNA, 19 nt, Artificial Sequence
  Description of Artificial Sequence: Synthetic oligonucleotide
  Sense Strand Starting at position 14 of SEQ ID NO: 317248
gacugucgagccuaagaau

SEQ ID NO: 319770 - RNA, 19 nt, Artificial Sequence
  Description of Artificial Sequence: Synthetic oligonucleotide
  Antisense Strand to SEQ ID NO: 319769
auucuuaggcucgacaguc

SEQ ID NO: 319771 - RNA, 19 nt, Artificial Sequence
  Description of Artificial Sequence: Synthetic oligonucleotide
  Sense Strand Starting at position 14 of SEQ ID NO: 317271
agacccuguuucucuuaga

SEQ ID NO: 319772 - RNA, 19 nt, Artificial Sequence
  Description of Artificial Sequence: Synthetic oligonucleotide
  Antisense Strand to SEQ ID NO: 319771
ucuaagagaaacagggucu

SEQ ID NO: 319773 - RNA, 19 nt, Artificial Sequence
  Description of Artificial Sequence: Synthetic oligonucleotide
  Sense Strand Starting at position 14 of SEQ ID NO: 317788
uucgaaucccuacagguaa

SEQ ID NO: 319774 - RNA, 19 nt, Artificial Sequence
  Description of Artificial Sequence: Synthetic oligonucleotide
  Antisense Strand to SEQ ID NO: 319773
uuaccuguagggauucgaa

SEQ ID NO: 319775 - RNA, 19 nt, Artificial Sequence
  Description of Artificial Sequence: Synthetic oligonucleotide
  Sense Strand Starting at position 14 of SEQ ID NO: 317955
cuuaguacugaucggaaga

SEQ ID NO: 319776 - RNA, 19 nt, Artificial Sequence
  Description of Artificial Sequence: Synthetic oligonucleotide
  Antisense Strand to SEQ ID NO: 319775
ucuuccgaucaguacuaag

SEQ ID NO: 319777 - RNA, 19 nt, Artificial Sequence
  Description of Artificial Sequence: Synthetic oligonucleotide
  Sense Strand Starting at position 14 of SEQ ID NO: 317956
uuaguacugaucggaagau

SEQ ID NO: 319778 - RNA, 19 nt, Artificial Sequence
  Description of Artificial Sequence: Synthetic oligonucleotide
  Antisense Strand to SEQ ID NO: 319777
aucuuccgaucaguacuaa

SEQ ID NO: 319779 - RNA, 19 nt, Artificial Sequence
  Description of Artificial Sequence: Synthetic oligonucleotide
  Sense Strand Starting at position 14 of SEQ ID NO: 318042
acguguguccaguuuccua

SEQ ID NO: 319780 - RNA, 19 nt, Artificial Sequence
  Description of Artificial Sequence: Synthetic oligonucleotide
  Antisense Strand to SEQ ID NO: 319779
uaggaaacuggacacacgu

SEQ ID NO: 319781 - RNA, 19 nt, Artificial Sequence
  Description of Artificial Sequence: Synthetic oligonucleotide
  Sense Strand Starting at position 14 of SEQ ID NO: 318092
uguguauaagacugauagu

SEQ ID NO: 319782 - RNA, 19 nt, Artificial Sequence
  Description of Artificial Sequence: Synthetic oligonucleotide
  Antisense Strand to SEQ ID NO: 319781
acuaucagucuuauacaca

SEQ ID NO: 319783 - RNA, 19 nt, Artificial Sequence
  Description of Artificial Sequence: Synthetic oligonucleotide
  Sense Strand Starting at position 14 of SEQ ID NO: 318093
guguauaagacugauagua

SEQ ID NO: 319784 - RNA, 19 nt, Artificial Sequence
  Description of Artificial Sequence: Synthetic oligonucleotide
  Antisense Strand to SEQ ID NO: 319783
uacuaucagucuuauacac

SEQ ID NO: 319785 - RNA, 19 nt, Artificial Sequence
  Description of Artificial Sequence: Synthetic oligonucleotide
  Sense Strand Starting at position 14 of SEQ ID NO: 318149
uaagguaaacuuugaguuu

SEQ ID NO: 319786 - RNA, 19 nt, Artificial Sequence
  Description of Artificial Sequence: Synthetic oligonucleotide
  Antisense Strand to SEQ ID NO: 319785
aaacucaaaguuuaccuua

SEQ ID NO: 319787 - RNA, 19 nt, Artificial Sequence
  Description of Artificial Sequence: Synthetic oligonucleotide
  Sense Strand Starting at position 14 of SEQ ID NO: 318341
aauauagugcaaugguuaa

SEQ ID NO: 319788 - RNA, 19 nt, Artificial Sequence
  Description of Artificial Sequence: Synthetic oligonucleotide
  Antisense Strand to SEQ ID NO: 319787
uuaaccauugcacuauauu

SEQ ID NO: 319789 - RNA, 19 nt, Artificial Sequence
  Description of Artificial Sequence: Synthetic oligonucleotide
  Sense Strand Starting at position 14 of SEQ ID NO: 318457
gcuucucaccuguacaaug

SEQ ID NO: 319790 - RNA, 19 nt, Artificial Sequence
  Description of Artificial Sequence: Synthetic oligonucleotide
  Antisense Strand to SEQ ID NO: 319789
cauuguacaggugagaagc

SEQ ID NO: 319791 - RNA, 19 nt, Artificial Sequence
  Description of Artificial Sequence: Synthetic oligonucleotide
  Sense Strand Starting at position 14 of SEQ ID NO: 318488
auaucuaucucugucauag

SEQ ID NO: 319792 - RNA, 19 nt, Artificial Sequence
  Description of Artificial Sequence: Synthetic oligonucleotide
  Antisense Strand to SEQ ID NO: 319791
cuaugacagagauagauau

SEQ ID NO: 319793 - RNA, 19 nt, Artificial Sequence
  Description of Artificial Sequence: Synthetic oligonucleotide
  Sense Strand Starting at position 14 of SEQ ID NO: 318667
acccuaugagauugcuacu

SEQ ID NO: 319794 - RNA, 19 nt, Artificial Sequence
  Description of Artificial Sequence: Synthetic oligonucleotide
  Antisense Strand to SEQ ID NO: 319793
aguagcaaucucauagggu

SEQ ID NO: 319795 - RNA, 19 nt, Artificial Sequence
  Description of Artificial Sequence: Synthetic oligonucleotide
  Sense Strand Starting at position 14 of SEQ ID NO: 318899
cuuuaaagagcauaacagu

SEQ ID NO: 319796 - RNA, 19 nt, Artificial Sequence
  Description of Artificial Sequence: Synthetic oligonucleotide
  Antisense Strand to SEQ ID NO: 319795
acuguuaugcucuuuaaag

SEQ ID NO: 319797 - RNA, 19 nt, Artificial Sequence
  Description of Artificial Sequence: Synthetic oligonucleotide
  Sense Strand Starting at position 14 of SEQ ID NO: 318998
gccaaauaugaacgguuaa

SEQ ID NO: 319798 - RNA, 19 nt, Artificial Sequence
  Description of Artificial Sequence: Synthetic oligonucleotide
  Antisense Strand to SEQ ID NO: 319797
uuaaccguucauauuuggc

SEQ ID NO: 319799 - RNA, 19 nt, Artificial Sequence
  Description of Artificial Sequence: Synthetic oligonucleotide
  Sense Strand Starting at position 14 of SEQ ID NO: 319008
aacgguuaaugguccagaa

SEQ ID NO: 319800 - RNA, 19 nt, Artificial Sequence
  Description of Artificial Sequence: Synthetic oligonucleotide
  Antisense Strand to SEQ ID NO: 319799
uucuggaccauuaaccguu

SEQ ID NO: 319801 - RNA, 19 nt, Artificial Sequence
  Description of Artificial Sequence: Synthetic oligonucleotide
  Sense Strand Starting at position 14 of SEQ ID NO: 319010
cgguuaaugguccagaauu

SEQ ID NO: 319802 - RNA, 19 nt, Artificial Sequence
  Description of Artificial Sequence: Synthetic oligonucleotide
  Antisense Strand to SEQ ID NO: 319801
aauucuggaccauuaaccg

SEQ ID NO: 319803 - RNA, 19 nt, Artificial Sequence
  Description of Artificial Sequence: Synthetic oligonucleotide
  Sense Strand Starting at position 15 of SEQ ID NO: 315267
acaguaacagaauguagau

SEQ ID NO: 319804 - RNA, 19 nt, Artificial Sequence
  Description of Artificial Sequence: Synthetic oligonucleotide
  Antisense Strand to SEQ ID NO: 319803
aucuacauucuguuacugu

SEQ ID NO: 319805 - RNA, 19 nt, Artificial Sequence
  Description of Artificial Sequence: Synthetic oligonucleotide
  Sense Strand Starting at position 15 of SEQ ID NO: 315280
guagauaauaccggcacau

SEQ ID NO: 319806 - RNA, 19 nt, Artificial Sequence
  Description of Artificial Sequence: Synthetic oligonucleotide
  Antisense Strand to SEQ ID NO: 319805
augugccgguauuaucuac

SEQ ID NO: 319807 - RNA, 19 nt, Artificial Sequence
  Description of Artificial Sequence: Synthetic oligonucleotide
  Sense Strand Starting at position 15 of SEQ ID NO: 315282
agauaauaccggcacauau

SEQ ID NO: 319808 - RNA, 19 nt, Artificial Sequence
  Description of Artificial Sequence: Synthetic oligonucleotide
  Antisense Strand to SEQ ID NO: 319807
auaugugccgguauuaucu

SEQ ID NO: 319809 - RNA, 19 nt, Artificial Sequence
  Description of Artificial Sequence: Synthetic oligonucleotide
  Sense Strand Starting at position 15 of SEQ ID NO: 315326
gugaacuucucauccgacu

SEQ ID NO: 319810 - RNA, 19 nt, Artificial Sequence
  Description of Artificial Sequence: Synthetic oligonucleotide
  Antisense Strand to SEQ ID NO: 319809
agucggaugagaaguucac

SEQ ID NO: 319811 - RNA, 19 nt, Artificial Sequence
  Description of Artificial Sequence: Synthetic oligonucleotide
  Sense Strand Starting at position 15 of SEQ ID NO: 315407
gcagguagugccagagguu

SEQ ID NO: 319812 - RNA, 19 nt, Artificial Sequence
  Description of Artificial Sequence: Synthetic oligonucleotide
  Antisense Strand to SEQ ID NO: 319811
aaccucuggcacuaccugc

SEQ ID NO: 319813 - RNA, 19 nt, Artificial Sequence
  Description of Artificial Sequence: Synthetic oligonucleotide
  Sense Strand Starting at position 15 of SEQ ID NO: 315408
cagguagugccagagguuu

SEQ ID NO: 319814 - RNA, 19 nt, Artificial Sequence
  Description of Artificial Sequence: Synthetic oligonucleotide
  Antisense Strand to SEQ ID NO: 319813
aaaccucuggcacuaccug

SEQ ID NO: 319815 - RNA, 19 nt, Artificial Sequence
  Description of Artificial Sequence: Synthetic oligonucleotide
  Sense Strand Starting at position 15 of SEQ ID NO: 315414
gugccagagguuuaaagau

SEQ ID NO: 319816 - RNA, 19 nt, Artificial Sequence
  Description of Artificial Sequence: Synthetic oligonucleotide
  Antisense Strand to SEQ ID NO: 319815
aucuuuaaaccucuggcac

SEQ ID NO: 319817 - RNA, 19 nt, Artificial Sequence
  Description of Artificial Sequence: Synthetic oligonucleotide
  Sense Strand Starting at position 15 of SEQ ID NO: 315433
ggaaacagaucugaaagau

SEQ ID NO: 319818 - RNA, 19 nt, Artificial Sequence
  Description of Artificial Sequence: Synthetic oligonucleotide
  Antisense Strand to SEQ ID NO: 319817
aucuuucagaucuguuucc

SEQ ID NO: 319819 - RNA, 19 nt, Artificial Sequence
  Description of Artificial Sequence: Synthetic oligonucleotide
  Sense Strand Starting at position 15 of SEQ ID NO: 315634
aagguaucagccugacaac

SEQ ID NO: 319820 - RNA, 19 nt, Artificial Sequence
  Description of Artificial Sequence: Synthetic oligonucleotide
  Antisense Strand to SEQ ID NO: 319819
guugucaggcugauaccuu

SEQ ID NO: 319821 - RNA, 19 nt, Artificial Sequence
  Description of Artificial Sequence: Synthetic oligonucleotide
  Sense Strand Starting at position 15 of SEQ ID NO: 315733
agggcaccucgacgaaaua

SEQ ID NO: 319822 - RNA, 19 nt, Artificial Sequence
  Description of Artificial Sequence: Synthetic oligonucleotide
  Antisense Strand to SEQ ID NO: 319821
uauuucgucgaggugcccu

SEQ ID NO: 319823 - RNA, 19 nt, Artificial Sequence
  Description of Artificial Sequence: Synthetic oligonucleotide
  Sense Strand Starting at position 15 of SEQ ID NO: 315760
acuguugguuuccuuagaa

SEQ ID NO: 319824 - RNA, 19 nt, Artificial Sequence
  Description of Artificial Sequence: Synthetic oligonucleotide
  Antisense Strand to SEQ ID NO: 319823
uucuaaggaaaccaacagu

SEQ ID NO: 319825 - RNA, 19 nt, Artificial Sequence
  Description of Artificial Sequence: Synthetic oligonucleotide
  Sense Strand Starting at position 15 of SEQ ID NO: 315832
agaugaaugcacugaggca

SEQ ID NO: 319826 - RNA, 19 nt, Artificial Sequence
  Description of Artificial Sequence: Synthetic oligonucleotide
  Antisense Strand to SEQ ID NO: 319825
ugccucagugcauucaucu

SEQ ID NO: 319827 - RNA, 19 nt, Artificial Sequence
  Description of Artificial Sequence: Synthetic oligonucleotide
  Sense Strand Starting at position 15 of SEQ ID NO: 315917
ugcacaguacucuacaguu

SEQ ID NO: 319828 - RNA, 19 nt, Artificial Sequence
  Description of Artificial Sequence: Synthetic oligonucleotide
  Antisense Strand to SEQ ID NO: 319827
aacuguagaguacugugca

SEQ ID NO: 319829 - RNA, 19 nt, Artificial Sequence
  Description of Artificial Sequence: Synthetic oligonucleotide
  Sense Strand Starting at position 15 of SEQ ID NO: 316020
ggcugaaagaacugagucu

SEQ ID NO: 319830 - RNA, 19 nt, Artificial Sequence
  Description of Artificial Sequence: Synthetic oligonucleotide
  Antisense Strand to SEQ ID NO: 319829
agacucaguucuuucagcc

SEQ ID NO: 319831 - RNA, 19 nt, Artificial Sequence
  Description of Artificial Sequence: Synthetic oligonucleotide
  Sense Strand Starting at position 15 of SEQ ID NO: 316021
gcugaaagaacugagucuu

SEQ ID NO: 319832 - RNA, 19 nt, Artificial Sequence
  Description of Artificial Sequence: Synthetic oligonucleotide
  Antisense Strand to SEQ ID NO: 319831
aagacucaguucuuucagc

SEQ ID NO: 319833 - RNA, 19 nt, Artificial Sequence
  Description of Artificial Sequence: Synthetic oligonucleotide
  Sense Strand Starting at position 15 of SEQ ID NO: 316432
gagccagauuucugaggaa

SEQ ID NO: 319834 - RNA, 19 nt, Artificial Sequence
  Description of Artificial Sequence: Synthetic oligonucleotide
  Antisense Strand to SEQ ID NO: 319833
uuccucagaaaucuggcuc

SEQ ID NO: 319835 - RNA, 19 nt, Artificial Sequence
  Description of Artificial Sequence: Synthetic oligonucleotide
  Sense Strand Starting at position 15 of SEQ ID NO: 316435
ccagauuucugaggaaccu

SEQ ID NO: 319836 - RNA, 19 nt, Artificial Sequence
  Description of Artificial Sequence: Synthetic oligonucleotide
  Antisense Strand to SEQ ID NO: 319835
agguuccucagaaaucugg

SEQ ID NO: 319837 - RNA, 19 nt, Artificial Sequence
  Description of Artificial Sequence: Synthetic oligonucleotide
  Sense Strand Starting at position 15 of SEQ ID NO: 316531
guguaagcuguuuaggaau

SEQ ID NO: 319838 - RNA, 19 nt, Artificial Sequence
  Description of Artificial Sequence: Synthetic oligonucleotide
  Antisense Strand to SEQ ID NO: 319837
auuccuaaacagcuuacac

SEQ ID NO: 319839 - RNA, 19 nt, Artificial Sequence
  Description of Artificial Sequence: Synthetic oligonucleotide
  Sense Strand Starting at position 15 of SEQ ID NO: 316696
ggaaaugucucacccuuuc

SEQ ID NO: 319840 - RNA, 19 nt, Artificial Sequence
  Description of Artificial Sequence: Synthetic oligonucleotide
  Antisense Strand to SEQ ID NO: 319839
gaaagggugagacauuucc

SEQ ID NO: 319841 - RNA, 19 nt, Artificial Sequence
  Description of Artificial Sequence: Synthetic oligonucleotide
  Sense Strand Starting at position 15 of SEQ ID NO: 316707
acccuuucucugggaaggu

SEQ ID NO: 319842 - RNA, 19 nt, Artificial Sequence
  Description of Artificial Sequence: Synthetic oligonucleotide
  Antisense Strand to SEQ ID NO: 319841
accuucccagagaaagggu

SEQ ID NO: 319843 - RNA, 19 nt, Artificial Sequence
  Description of Artificial Sequence: Synthetic oligonucleotide
  Sense Strand Starting at position 15 of SEQ ID NO: 317439
ugggaaaucucccugugua

SEQ ID NO: 319844 - RNA, 19 nt, Artificial Sequence
  Description of Artificial Sequence: Synthetic oligonucleotide
  Antisense Strand to SEQ ID NO: 319843
uacacagggagauuuccca

SEQ ID NO: 319845 - RNA, 19 nt, Artificial Sequence
  Description of Artificial Sequence: Synthetic oligonucleotide
  Sense Strand Starting at position 15 of SEQ ID NO: 317440
gggaaaucucccuguguac

SEQ ID NO: 319846 - RNA, 19 nt, Artificial Sequence
  Description of Artificial Sequence: Synthetic oligonucleotide
  Antisense Strand to SEQ ID NO: 319845
guacacagggagauuuccc

SEQ ID NO: 319847 - RNA, 19 nt, Artificial Sequence
  Description of Artificial Sequence: Synthetic oligonucleotide
  Sense Strand Starting at position 15 of SEQ ID NO: 317442
gaaaucucccuguguacag

SEQ ID NO: 319848 - RNA, 19 nt, Artificial Sequence
  Description of Artificial Sequence: Synthetic oligonucleotide
  Antisense Strand to SEQ ID NO: 319847
cuguacacagggagauuuc

SEQ ID NO: 319849 - RNA, 19 nt, Artificial Sequence
  Description of Artificial Sequence: Synthetic oligonucleotide
  Sense Strand Starting at position 15 of SEQ ID NO: 317618
gaugguggauuccugagau

SEQ ID NO: 319850 - RNA, 19 nt, Artificial Sequence
  Description of Artificial Sequence: Synthetic oligonucleotide
  Antisense Strand to SEQ ID NO: 319849
aucucaggaauccaccauc

SEQ ID NO: 319851 - RNA, 19 nt, Artificial Sequence
  Description of Artificial Sequence: Synthetic oligonucleotide
  Sense Strand Starting at position 15 of SEQ ID NO: 317649
cuaguugacauguauguua

SEQ ID NO: 319852 - RNA, 19 nt, Artificial Sequence
  Description of Artificial Sequence: Synthetic oligonucleotide
  Antisense Strand to SEQ ID NO: 319851
uaacauacaugucaacuag

SEQ ID NO: 319853 - RNA, 19 nt, Artificial Sequence
  Description of Artificial Sequence: Synthetic oligonucleotide
  Sense Strand Starting at position 15 of SEQ ID NO: 317651
aguugacauguauguuaca

SEQ ID NO: 319854 - RNA, 19 nt, Artificial Sequence
  Description of Artificial Sequence: Synthetic oligonucleotide
  Antisense Strand to SEQ ID NO: 319853
uguaacauacaugucaacu

SEQ ID NO: 319855 - RNA, 19 nt, Artificial Sequence
  Description of Artificial Sequence: Synthetic oligonucleotide
  Sense Strand Starting at position 15 of SEQ ID NO: 317652
guugacauguauguuacau

SEQ ID NO: 319856 - RNA, 19 nt, Artificial Sequence
  Description of Artificial Sequence: Synthetic oligonucleotide
  Antisense Strand to SEQ ID NO: 319855
auguaacauacaugucaac

SEQ ID NO: 319857 - RNA, 19 nt, Artificial Sequence
  Description of Artificial Sequence: Synthetic oligonucleotide
  Sense Strand Starting at position 15 of SEQ ID NO: 317692
gaaaguggguguucaguca

SEQ ID NO: 319858 - RNA, 19 nt, Artificial Sequence
  Description of Artificial Sequence: Synthetic oligonucleotide
  Antisense Strand to SEQ ID NO: 319857
ugacugaacacccacuuuc

SEQ ID NO: 319859 - RNA, 19 nt, Artificial Sequence
  Description of Artificial Sequence: Synthetic oligonucleotide
  Sense Strand Starting at position 15 of SEQ ID NO: 317711
cagagcggucuggauacaa

SEQ ID NO: 319860 - RNA, 19 nt, Artificial Sequence
  Description of Artificial Sequence: Synthetic oligonucleotide
  Antisense Strand to SEQ ID NO: 319859
uuguauccagaccgcucug

SEQ ID NO: 319861 - RNA, 19 nt, Artificial Sequence
  Description of Artificial Sequence: Synthetic oligonucleotide
  Sense Strand Starting at position 15 of SEQ ID NO: 317737
accucuguccugggaaaca

SEQ ID NO: 319862 - RNA, 19 nt, Artificial Sequence
  Description of Artificial Sequence: Synthetic oligonucleotide
  Antisense Strand to SEQ ID NO: 319861
uguuucccaggacagaggu

SEQ ID NO: 319863 - RNA, 19 nt, Artificial Sequence
  Description of Artificial Sequence: Synthetic oligonucleotide
  Sense Strand Starting at position 15 of SEQ ID NO: 318100
ucuguuccugaaugggauu

SEQ ID NO: 319864 - RNA, 19 nt, Artificial Sequence
  Description of Artificial Sequence: Synthetic oligonucleotide
  Antisense Strand to SEQ ID NO: 319863
aaucccauucaggaacaga

SEQ ID NO: 319865 - RNA, 19 nt, Artificial Sequence
  Description of Artificial Sequence: Synthetic oligonucleotide
  Sense Strand Starting at position 15 of SEQ ID NO: 318106
ccugaaugggauugcagaa

SEQ ID NO: 319866 - RNA, 19 nt, Artificial Sequence
  Description of Artificial Sequence: Synthetic oligonucleotide
  Antisense Strand to SEQ ID NO: 319865
uucugcaaucccauucagg

SEQ ID NO: 319867 - RNA, 19 nt, Artificial Sequence
  Description of Artificial Sequence: Synthetic oligonucleotide
  Sense Strand Starting at position 15 of SEQ ID NO: 318481
cauugucucgguuauaauu

SEQ ID NO: 319868 - RNA, 19 nt, Artificial Sequence
  Description of Artificial Sequence: Synthetic oligonucleotide
  Antisense Strand to SEQ ID NO: 319867
aauuauaaccgagacaaug

SEQ ID NO: 319869 - RNA, 19 nt, Artificial Sequence
  Description of Artificial Sequence: Synthetic oligonucleotide
  Sense Strand Starting at position 15 of SEQ ID NO: 318857
uagcauugaccacaguguu

SEQ ID NO: 319870 - RNA, 19 nt, Artificial Sequence
  Description of Artificial Sequence: Synthetic oligonucleotide
  Antisense Strand to SEQ ID NO: 319869
aacacuguggucaaugcua

SEQ ID NO: 319871 - RNA, 19 nt, Artificial Sequence
  Description of Artificial Sequence: Synthetic oligonucleotide
  Sense Strand Starting at position 15 of SEQ ID NO: 318864
gaccacaguguugggaaau

SEQ ID NO: 319872 - RNA, 19 nt, Artificial Sequence
  Description of Artificial Sequence: Synthetic oligonucleotide
  Antisense Strand to SEQ ID NO: 319871
auuucccaacacugugguc

SEQ ID NO: 319873 - RNA, 19 nt, Artificial Sequence
  Description of Artificial Sequence: Synthetic oligonucleotide
  Sense Strand Starting at position 15 of SEQ ID NO: 318898
ugugucaacuccuugagaa

SEQ ID NO: 319874 - RNA, 19 nt, Artificial Sequence
  Description of Artificial Sequence: Synthetic oligonucleotide
  Antisense Strand to SEQ ID NO: 319873
uucucaaggaguugacaca

SEQ ID NO: 319875 - RNA, 19 nt, Artificial Sequence
  Description of Artificial Sequence: Synthetic oligonucleotide
  Sense Strand Starting at position 15 of SEQ ID NO: 318899
gugucaacuccuugagaag

SEQ ID NO: 319876 - RNA, 19 nt, Artificial Sequence
  Description of Artificial Sequence: Synthetic oligonucleotide
  Antisense Strand to SEQ ID NO: 319875
cuucucaaggaguugacac

SEQ ID NO: 319877 - RNA, 19 nt, Artificial Sequence
  Description of Artificial Sequence: Synthetic oligonucleotide
  Sense Strand Starting at position 15 of SEQ ID NO: 319106
gguugauauuuacuugcuu

SEQ ID NO: 319878 - RNA, 19 nt, Artificial Sequence
  Description of Artificial Sequence: Synthetic oligonucleotide
  Antisense Strand to SEQ ID NO: 319877
aagcaaguaaauaucaacc

SEQ ID NO: 319879 - RNA, 19 nt, Artificial Sequence
  Description of Artificial Sequence: Synthetic oligonucleotide
  Sense Strand Starting at position 15 of SEQ ID NO: 319107
guugauauuuacuugcuua

SEQ ID NO: 319880 - RNA, 19 nt, Artificial Sequence
  Description of Artificial Sequence: Synthetic oligonucleotide
  Antisense Strand to SEQ ID NO: 319879
uaagcaaguaaauaucaac

SEQ ID NO: 319881 - RNA, 19 nt, Artificial Sequence
  Description of Artificial Sequence: Synthetic oligonucleotide
  Sense Strand Starting at position 15 of SEQ ID NO: 319152
ggaaacaacugccuuugua

SEQ ID NO: 319882 - RNA, 19 nt, Artificial Sequence
  Description of Artificial Sequence: Synthetic oligonucleotide
  Antisense Strand to SEQ ID NO: 319881
uacaaaggcaguuguuucc

SEQ ID NO: 319883 - RNA, 19 nt, Artificial Sequence
  Description of Artificial Sequence: Synthetic oligonucleotide
  Sense Strand Starting at position 16 of SEQ ID NO: 315485
aucuauuugugucucuuga

SEQ ID NO: 319884 - RNA, 19 nt, Artificial Sequence
  Description of Artificial Sequence: Synthetic oligonucleotide
  Antisense Strand to SEQ ID NO: 319883
ucaagagacacaaauagau

SEQ ID NO: 319885 - RNA, 19 nt, Artificial Sequence
  Description of Artificial Sequence: Synthetic oligonucleotide
  Sense Strand Starting at position 16 of SEQ ID NO: 315487
cuauuugugucucuugagu

SEQ ID NO: 319886 - RNA, 19 nt, Artificial Sequence
  Description of Artificial Sequence: Synthetic oligonucleotide
  Antisense Strand to SEQ ID NO: 319885
acucaagagacacaaauag

SEQ ID NO: 319887 - RNA, 19 nt, Artificial Sequence
  Description of Artificial Sequence: Synthetic oligonucleotide
  Sense Strand Starting at position 16 of SEQ ID NO: 315587
agcccuaggcuccaauaaa

SEQ ID NO: 319888 - RNA, 19 nt, Artificial Sequence
  Description of Artificial Sequence: Synthetic oligonucleotide
  Antisense Strand to SEQ ID NO: 319887
uuuauuggagccuagggcu

SEQ ID NO: 319889 - RNA, 19 nt, Artificial Sequence
  Description of Artificial Sequence: Synthetic oligonucleotide
  Sense Strand Starting at position 16 of SEQ ID NO: 315722
uccaauuaacaguguuaag

SEQ ID NO: 319890 - RNA, 19 nt, Artificial Sequence
  Description of Artificial Sequence: Synthetic oligonucleotide
  Antisense Strand to SEQ ID NO: 319889
cuuaacacuguuaauugga

SEQ ID NO: 319891 - RNA, 19 nt, Artificial Sequence
  Description of Artificial Sequence: Synthetic oligonucleotide
  Sense Strand Starting at position 16 of SEQ ID NO: 315731
caguguuaaggaugagaac

SEQ ID NO: 319892 - RNA, 19 nt, Artificial Sequence
  Description of Artificial Sequence: Synthetic oligonucleotide
  Antisense Strand to SEQ ID NO: 319891
guucucauccuuaacacug

SEQ ID NO: 319893 - RNA, 19 nt, Artificial Sequence
  Description of Artificial Sequence: Synthetic oligonucleotide
  Sense Strand Starting at position 16 of SEQ ID NO: 315784
ccaggcuuggcccagacau

SEQ ID NO: 319894 - RNA, 19 nt, Artificial Sequence
  Description of Artificial Sequence: Synthetic oligonucleotide
  Antisense Strand to SEQ ID NO: 319893
augucugggccaagccugg

SEQ ID NO: 319895 - RNA, 19 nt, Artificial Sequence
  Description of Artificial Sequence: Synthetic oligonucleotide
  Sense Strand Starting at position 16 of SEQ ID NO: 315786
aggcuuggcccagacauua

SEQ ID NO: 319896 - RNA, 19 nt, Artificial Sequence
  Description of Artificial Sequence: Synthetic oligonucleotide
  Antisense Strand to SEQ ID NO: 319895
uaaugucugggccaagccu

SEQ ID NO: 319897 - RNA, 19 nt, Artificial Sequence
  Description of Artificial Sequence: Synthetic oligonucleotide
  Sense Strand Starting at position 16 of SEQ ID NO: 315894
ugaccagcccuguaaauaa

SEQ ID NO: 319898 - RNA, 19 nt, Artificial Sequence
  Description of Artificial Sequence: Synthetic oligonucleotide
  Antisense Strand to SEQ ID NO: 319897
uuauuuacagggcugguca

SEQ ID NO: 319899 - RNA, 19 nt, Artificial Sequence
  Description of Artificial Sequence: Synthetic oligonucleotide
  Sense Strand Starting at position 16 of SEQ ID NO: 316041
aagggcaacccaugugaau

SEQ ID NO: 319900 - RNA, 19 nt, Artificial Sequence
  Description of Artificial Sequence: Synthetic oligonucleotide
  Antisense Strand to SEQ ID NO: 319899
auucacauggguugcccuu

SEQ ID NO: 319901 - RNA, 19 nt, Artificial Sequence
  Description of Artificial Sequence: Synthetic oligonucleotide
  Sense Strand Starting at position 16 of SEQ ID NO: 316070
ccaugucaacucugugaca

SEQ ID NO: 319902 - RNA, 19 nt, Artificial Sequence
  Description of Artificial Sequence: Synthetic oligonucleotide
  Antisense Strand to SEQ ID NO: 319901
ugucacagaguugacaugg

SEQ ID NO: 319903 - RNA, 19 nt, Artificial Sequence
  Description of Artificial Sequence: Synthetic oligonucleotide
  Sense Strand Starting at position 16 of SEQ ID NO: 316072
augucaacucugugacaga

SEQ ID NO: 319904 - RNA, 19 nt, Artificial Sequence
  Description of Artificial Sequence: Synthetic oligonucleotide
  Antisense Strand to SEQ ID NO: 319903
ucugucacagaguugacau

SEQ ID NO: 319905 - RNA, 19 nt, Artificial Sequence
  Description of Artificial Sequence: Synthetic oligonucleotide
  Sense Strand Starting at position 16 of SEQ ID NO: 316261
caacgagcuuaaguggaaa

SEQ ID NO: 319906 - RNA, 19 nt, Artificial Sequence
  Description of Artificial Sequence: Synthetic oligonucleotide
  Antisense Strand to SEQ ID NO: 319905
uuuccacuuaagcucguug

SEQ ID NO: 319907 - RNA, 19 nt, Artificial Sequence
  Description of Artificial Sequence: Synthetic oligonucleotide
  Sense Strand Starting at position 16 of SEQ ID NO: 316263
acgagcuuaaguggaaaga

SEQ ID NO: 319908 - RNA, 19 nt, Artificial Sequence
  Description of Artificial Sequence: Synthetic oligonucleotide
  Antisense Strand to SEQ ID NO: 319907
ucuuuccacuuaagcucgu

SEQ ID NO: 319909 - RNA, 19 nt, Artificial Sequence
  Description of Artificial Sequence: Synthetic oligonucleotide
  Sense Strand Starting at position 16 of SEQ ID NO: 316493
gcaagaggaugcccugaaa

SEQ ID NO: 319910 - RNA, 19 nt, Artificial Sequence
  Description of Artificial Sequence: Synthetic oligonucleotide
  Antisense Strand to SEQ ID NO: 319909
uuucagggcauccucuugc

SEQ ID NO: 319911 - RNA, 19 nt, Artificial Sequence
  Description of Artificial Sequence: Synthetic oligonucleotide
  Sense Strand Starting at position 16 of SEQ ID NO: 316496
agaggaugcccugaaagcu

SEQ ID NO: 319912 - RNA, 19 nt, Artificial Sequence
  Description of Artificial Sequence: Synthetic oligonucleotide
  Antisense Strand to SEQ ID NO: 319911
agcuuucagggcauccucu

SEQ ID NO: 319913 - RNA, 19 nt, Artificial Sequence
  Description of Artificial Sequence: Synthetic oligonucleotide
  Sense Strand Starting at position 16 of SEQ ID NO: 316505
ccugaaagcucccucaaag

SEQ ID NO: 319914 - RNA, 19 nt, Artificial Sequence
  Description of Artificial Sequence: Synthetic oligonucleotide
  Antisense Strand to SEQ ID NO: 319913
cuuugagggagcuuucagg

SEQ ID NO: 319915 - RNA, 19 nt, Artificial Sequence
  Description of Artificial Sequence: Synthetic oligonucleotide
  Sense Strand Starting at position 16 of SEQ ID NO: 316950
gggcgaguccuucagacac

SEQ ID NO: 319916 - RNA, 19 nt, Artificial Sequence
  Description of Artificial Sequence: Synthetic oligonucleotide
  Antisense Strand to SEQ ID NO: 319915
gugucugaaggacucgccc

SEQ ID NO: 319917 - RNA, 19 nt, Artificial Sequence
  Description of Artificial Sequence: Synthetic oligonucleotide
  Sense Strand Starting at position 16 of SEQ ID NO: 316961
ucagacacuccucgaaauc

SEQ ID NO: 319918 - RNA, 19 nt, Artificial Sequence
  Description of Artificial Sequence: Synthetic oligonucleotide
  Antisense Strand to SEQ ID NO: 319917
gauuucgaggagugucuga

SEQ ID NO: 319919 - RNA, 19 nt, Artificial Sequence
  Description of Artificial Sequence: Synthetic oligonucleotide
  Sense Strand Starting at position 16 of SEQ ID NO: 316970
ccucgaaauccacagucau

SEQ ID NO: 319920 - RNA, 19 nt, Artificial Sequence
  Description of Artificial Sequence: Synthetic oligonucleotide
  Antisense Strand to SEQ ID NO: 319919
augacuguggauuucgagg

SEQ ID NO: 319921 - RNA, 19 nt, Artificial Sequence
  Description of Artificial Sequence: Synthetic oligonucleotide
  Sense Strand Starting at position 16 of SEQ ID NO: 317451
agcugagguuccuugggaa

SEQ ID NO: 319922 - RNA, 19 nt, Artificial Sequence
  Description of Artificial Sequence: Synthetic oligonucleotide
  Antisense Strand to SEQ ID NO: 319921
uucccaaggaaccucagcu

SEQ ID NO: 319923 - RNA, 19 nt, Artificial Sequence
  Description of Artificial Sequence: Synthetic oligonucleotide
  Sense Strand Starting at position 16 of SEQ ID NO: 317605
agcagauuggcagaaaucu

SEQ ID NO: 319924 - RNA, 19 nt, Artificial Sequence
  Description of Artificial Sequence: Synthetic oligonucleotide
  Antisense Strand to SEQ ID NO: 319923
agauuucugccaaucugcu

SEQ ID NO: 319925 - RNA, 19 nt, Artificial Sequence
  Description of Artificial Sequence: Synthetic oligonucleotide
  Sense Strand Starting at position 16 of SEQ ID NO: 317749
guauuuguuccauagcuuc

SEQ ID NO: 319926 - RNA, 19 nt, Artificial Sequence
  Description of Artificial Sequence: Synthetic oligonucleotide
  Antisense Strand to SEQ ID NO: 319925
gaagcuauggaacaaauac

SEQ ID NO: 319927 - RNA, 19 nt, Artificial Sequence
  Description of Artificial Sequence: Synthetic oligonucleotide
  Sense Strand Starting at position 16 of SEQ ID NO: 318106
uuaagaugccauugauugu

SEQ ID NO: 319928 - RNA, 19 nt, Artificial Sequence
  Description of Artificial Sequence: Synthetic oligonucleotide
  Antisense Strand to SEQ ID NO: 319927
acaaucaauggcaucuuaa

SEQ ID NO: 319929 - RNA, 19 nt, Artificial Sequence
  Description of Artificial Sequence: Synthetic oligonucleotide
  Sense Strand Starting at position 16 of SEQ ID NO: 318130
guacaaagaugucuuauau

SEQ ID NO: 319930 - RNA, 19 nt, Artificial Sequence
  Description of Artificial Sequence: Synthetic oligonucleotide
  Antisense Strand to SEQ ID NO: 319929
auauaagacaucuuuguac

SEQ ID NO: 319931 - RNA, 19 nt, Artificial Sequence
  Description of Artificial Sequence: Synthetic oligonucleotide
  Sense Strand Starting at position 16 of SEQ ID NO: 318137
gaugucuuauauguaauga

SEQ ID NO: 319932 - RNA, 19 nt, Artificial Sequence
  Description of Artificial Sequence: Synthetic oligonucleotide
  Antisense Strand to SEQ ID NO: 319931
ucauuacauauaagacauc

SEQ ID NO: 319933 - RNA, 19 nt, Artificial Sequence
  Description of Artificial Sequence: Synthetic oligonucleotide
  Sense Strand Starting at position 16 of SEQ ID NO: 318202
gaauauacaggguguucua

SEQ ID NO: 319934 - RNA, 19 nt, Artificial Sequence
  Description of Artificial Sequence: Synthetic oligonucleotide
  Antisense Strand to SEQ ID NO: 319933
uagaacacccuguauauuc

SEQ ID NO: 319935 - RNA, 19 nt, Artificial Sequence
  Description of Artificial Sequence: Synthetic oligonucleotide
  Sense Strand Starting at position 16 of SEQ ID NO: 318205
uauacaggguguucuaaca

SEQ ID NO: 319936 - RNA, 19 nt, Artificial Sequence
  Description of Artificial Sequence: Synthetic oligonucleotide
  Antisense Strand to SEQ ID NO: 319935
uguuagaacacccuguaua

SEQ ID NO: 319937 - RNA, 19 nt, Artificial Sequence
  Description of Artificial Sequence: Synthetic oligonucleotide
  Sense Strand Starting at position 16 of SEQ ID NO: 318228
aguggcucugagugagaau

SEQ ID NO: 319938 - RNA, 19 nt, Artificial Sequence
  Description of Artificial Sequence: Synthetic oligonucleotide
  Antisense Strand to SEQ ID NO: 319937
auucucacucagagccacu

SEQ ID NO: 319939 - RNA, 19 nt, Artificial Sequence
  Description of Artificial Sequence: Synthetic oligonucleotide
  Sense Strand Starting at position 16 of SEQ ID NO: 318229
guggcucugagugagaauc

SEQ ID NO: 319940 - RNA, 19 nt, Artificial Sequence
  Description of Artificial Sequence: Synthetic oligonucleotide
  Antisense Strand to SEQ ID NO: 319939
gauucucacucagagccac

SEQ ID NO: 319941 - RNA, 19 nt, Artificial Sequence
  Description of Artificial Sequence: Synthetic oligonucleotide
  Sense Strand Starting at position 16 of SEQ ID NO: 318250
gaggcaaacuuccuggauu

SEQ ID NO: 319942 - RNA, 19 nt, Artificial Sequence
  Description of Artificial Sequence: Synthetic oligonucleotide
  Antisense Strand to SEQ ID NO: 319941
aauccaggaaguuugccuc

SEQ ID NO: 319943 - RNA, 19 nt, Artificial Sequence
  Description of Artificial Sequence: Synthetic oligonucleotide
  Sense Strand Starting at position 16 of SEQ ID NO: 318357
caguaaauguuggcuauuu

SEQ ID NO: 319944 - RNA, 19 nt, Artificial Sequence
  Description of Artificial Sequence: Synthetic oligonucleotide
  Antisense Strand to SEQ ID NO: 319943
aaauagccaacauuuacug

SEQ ID NO: 319945 - RNA, 19 nt, Artificial Sequence
  Description of Artificial Sequence: Synthetic oligonucleotide
  Sense Strand Starting at position 16 of SEQ ID NO: 318475
caaacaauuucguuccguu

SEQ ID NO: 319946 - RNA, 19 nt, Artificial Sequence
  Description of Artificial Sequence: Synthetic oligonucleotide
  Antisense Strand to SEQ ID NO: 319945
aacggaacgaaauuguuug

SEQ ID NO: 319947 - RNA, 19 nt, Artificial Sequence
  Description of Artificial Sequence: Synthetic oligonucleotide
  Sense Strand Starting at position 16 of SEQ ID NO: 318624
uaaguauagcgugaugaca

SEQ ID NO: 319948 - RNA, 19 nt, Artificial Sequence
  Description of Artificial Sequence: Synthetic oligonucleotide
  Antisense Strand to SEQ ID NO: 319947
ugucaucacgcuauacuua

SEQ ID NO: 319949 - RNA, 19 nt, Artificial Sequence
  Description of Artificial Sequence: Synthetic oligonucleotide
  Sense Strand Starting at position 16 of SEQ ID NO: 318651
uucguaacccaucaagaga

SEQ ID NO: 319950 - RNA, 19 nt, Artificial Sequence
  Description of Artificial Sequence: Synthetic oligonucleotide
  Antisense Strand to SEQ ID NO: 319949
ucucuugauggguuacgaa

SEQ ID NO: 319951 - RNA, 19 nt, Artificial Sequence
  Description of Artificial Sequence: Synthetic oligonucleotide
  Sense Strand Starting at position 16 of SEQ ID NO: 318766
cagauuccuugcuccagga

SEQ ID NO: 319952 - RNA, 19 nt, Artificial Sequence
  Description of Artificial Sequence: Synthetic oligonucleotide
  Antisense Strand to SEQ ID NO: 319951
uccuggagcaaggaaucug

SEQ ID NO: 319953 - RNA, 19 nt, Artificial Sequence
  Description of Artificial Sequence: Synthetic oligonucleotide
  Sense Strand Starting at position 16 of SEQ ID NO: 318768
gauuccuugcuccaggagu

SEQ ID NO: 319954 - RNA, 19 nt, Artificial Sequence
  Description of Artificial Sequence: Synthetic oligonucleotide
  Antisense Strand to SEQ ID NO: 319953
acuccuggagcaaggaauc

SEQ ID NO: 319955 - RNA, 19 nt, Artificial Sequence
  Description of Artificial Sequence: Synthetic oligonucleotide
  Sense Strand Starting at position 16 of SEQ ID NO: 319104
uuaauuguguauuccugga

SEQ ID NO: 319956 - RNA, 19 nt, Artificial Sequence
  Description of Artificial Sequence: Synthetic oligonucleotide
  Antisense Strand to SEQ ID NO: 319955
uccaggaauacacaauuaa

SEQ ID NO: 319957 - RNA, 19 nt, Artificial Sequence
  Description of Artificial Sequence: Synthetic oligonucleotide
  Sense Strand Starting at position 16 of SEQ ID NO: 319106
aauuguguauuccuggaaa

SEQ ID NO: 319958 - RNA, 19 nt, Artificial Sequence
  Description of Artificial Sequence: Synthetic oligonucleotide
  Antisense Strand to SEQ ID NO: 319957
uuuccaggaauacacaauu

SEQ ID NO: 319959 - RNA, 19 nt, Artificial Sequence
  Description of Artificial Sequence: Synthetic oligonucleotide
  Sense Strand Starting at position 16 of SEQ ID NO: 319109
uguguauuccuggaaacca

SEQ ID NO: 319960 - RNA, 19 nt, Artificial Sequence
  Description of Artificial Sequence: Synthetic oligonucleotide
  Antisense Strand to SEQ ID NO: 319959
ugguuuccaggaauacaca

SEQ ID NO: 319961 - RNA, 19 nt, Artificial Sequence
  Description of Artificial Sequence: Synthetic oligonucleotide
  Sense Strand Starting at position 16 of SEQ ID NO: 319152
acagacuauugacuguuaa

SEQ ID NO: 319962 - RNA, 19 nt, Artificial Sequence
  Description of Artificial Sequence: Synthetic oligonucleotide
  Antisense Strand to SEQ ID NO: 319961
uuaacagucaauagucugu

SEQ ID NO: 319963 - RNA, 19 nt, Artificial Sequence
  Description of Artificial Sequence: Synthetic oligonucleotide
  Sense Strand Starting at position 17 of SEQ ID NO: 315520
aaauguaugugccuuguuu

SEQ ID NO: 319964 - RNA, 19 nt, Artificial Sequence
  Description of Artificial Sequence: Synthetic oligonucleotide
  Antisense Strand to SEQ ID NO: 319963
aaacaaggcacauacauuu

SEQ ID NO: 319965 - RNA, 19 nt, Artificial Sequence
  Description of Artificial Sequence: Synthetic oligonucleotide
  Sense Strand Starting at position 17 of SEQ ID NO: 315725
cggcuacucacaugagaau

SEQ ID NO: 319966 - RNA, 19 nt, Artificial Sequence
  Description of Artificial Sequence: Synthetic oligonucleotide
  Antisense Strand to SEQ ID NO: 319965
auucucaugugaguagccg

SEQ ID NO: 319967 - RNA, 19 nt, Artificial Sequence
  Description of Artificial Sequence: Synthetic oligonucleotide
  Sense Strand Starting at position 17 of SEQ ID NO: 315843
ggaaaugaagucgguguua

SEQ ID NO: 319968 - RNA, 19 nt, Artificial Sequence
  Description of Artificial Sequence: Synthetic oligonucleotide
  Antisense Strand to SEQ ID NO: 319967
uaacaccgacuucauuucc

SEQ ID NO: 319969 - RNA, 19 nt, Artificial Sequence
  Description of Artificial Sequence: Synthetic oligonucleotide
  Sense Strand Starting at position 17 of SEQ ID NO: 316012
gcaagucuugccuuuguau

SEQ ID NO: 319970 - RNA, 19 nt, Artificial Sequence
  Description of Artificial Sequence: Synthetic oligonucleotide
  Antisense Strand to SEQ ID NO: 319969
auacaaaggcaagacuugc

SEQ ID NO: 319971 - RNA, 19 nt, Artificial Sequence
  Description of Artificial Sequence: Synthetic oligonucleotide
  Sense Strand Starting at position 17 of SEQ ID NO: 316044
guaguggucgggucguaca

SEQ ID NO: 319972 - RNA, 19 nt, Artificial Sequence
  Description of Artificial Sequence: Synthetic oligonucleotide
  Antisense Strand to SEQ ID NO: 319971
uguacgacccgaccacuac

SEQ ID NO: 319973 - RNA, 19 nt, Artificial Sequence
  Description of Artificial Sequence: Synthetic oligonucleotide
  Sense Strand Starting at position 17 of SEQ ID NO: 316143
gggaaaggguguuuguaau

SEQ ID NO: 319974 - RNA, 19 nt, Artificial Sequence
  Description of Artificial Sequence: Synthetic oligonucleotide
  Antisense Strand to SEQ ID NO: 319973
auuacaaacacccuuuccc

SEQ ID NO: 319975 - RNA, 19 nt, Artificial Sequence
  Description of Artificial Sequence: Synthetic oligonucleotide
  Sense Strand Starting at position 17 of SEQ ID NO: 316194
aaaggaauguaaguuggua

SEQ ID NO: 319976 - RNA, 19 nt, Artificial Sequence
  Description of Artificial Sequence: Synthetic oligonucleotide
  Antisense Strand to SEQ ID NO: 319975
uaccaacuuacauuccuuu

SEQ ID NO: 319977 - RNA, 19 nt, Artificial Sequence
  Description of Artificial Sequence: Synthetic oligonucleotide
  Sense Strand Starting at position 17 of SEQ ID NO: 316198
gaauguaaguugguauuga

SEQ ID NO: 319978 - RNA, 19 nt, Artificial Sequence
  Description of Artificial Sequence: Synthetic oligonucleotide
  Antisense Strand to SEQ ID NO: 319977
ucaauaccaacuuacauuc

SEQ ID NO: 319979 - RNA, 19 nt, Artificial Sequence
  Description of Artificial Sequence: Synthetic oligonucleotide
  Sense Strand Starting at position 17 of SEQ ID NO: 316417
uuuguuugaaaugguuagu

SEQ ID NO: 319980 - RNA, 19 nt, Artificial Sequence
  Description of Artificial Sequence: Synthetic oligonucleotide
  Antisense Strand to SEQ ID NO: 319979
acuaaccauuucaaacaaa

SEQ ID NO: 319981 - RNA, 19 nt, Artificial Sequence
  Description of Artificial Sequence: Synthetic oligonucleotide
  Sense Strand Starting at position 17 of SEQ ID NO: 316420
guuugaaaugguuaguuga

SEQ ID NO: 319982 - RNA, 19 nt, Artificial Sequence
  Description of Artificial Sequence: Synthetic oligonucleotide
  Antisense Strand to SEQ ID NO: 319981
ucaacuaaccauuucaaac

SEQ ID NO: 319983 - RNA, 19 nt, Artificial Sequence
  Description of Artificial Sequence: Synthetic oligonucleotide
  Sense Strand Starting at position 17 of SEQ ID NO: 316422
uugaaaugguuaguugacu

SEQ ID NO: 319984 - RNA, 19 nt, Artificial Sequence
  Description of Artificial Sequence: Synthetic oligonucleotide
  Antisense Strand to SEQ ID NO: 319983
agucaacuaaccauuucaa

SEQ ID NO: 319985 - RNA, 19 nt, Artificial Sequence
  Description of Artificial Sequence: Synthetic oligonucleotide
  Sense Strand Starting at position 17 of SEQ ID NO: 316427
augguuaguugacuccuaa

SEQ ID NO: 319986 - RNA, 19 nt, Artificial Sequence
  Description of Artificial Sequence: Synthetic oligonucleotide
  Antisense Strand to SEQ ID NO: 319985
uuaggagucaacuaaccau

SEQ ID NO: 319987 - RNA, 19 nt, Artificial Sequence
  Description of Artificial Sequence: Synthetic oligonucleotide
  Sense Strand Starting at position 17 of SEQ ID NO: 316513
acugaaagauauucugcaa

SEQ ID NO: 319988 - RNA, 19 nt, Artificial Sequence
  Description of Artificial Sequence: Synthetic oligonucleotide
  Antisense Strand to SEQ ID NO: 319987
uugcagaauaucuuucagu

SEQ ID NO: 319989 - RNA, 19 nt, Artificial Sequence
  Description of Artificial Sequence: Synthetic oligonucleotide
  Sense Strand Starting at position 17 of SEQ ID NO: 317143
gucuaagaauuggccauaa

SEQ ID NO: 319990 - RNA, 19 nt, Artificial Sequence
  Description of Artificial Sequence: Synthetic oligonucleotide
  Antisense Strand to SEQ ID NO: 319989
uuauggccaauucuuagac

SEQ ID NO: 319991 - RNA, 19 nt, Artificial Sequence
  Description of Artificial Sequence: Synthetic oligonucleotide
  Sense Strand Starting at position 17 of SEQ ID NO: 317223
cccguacuguauccugaaa

SEQ ID NO: 319992 - RNA, 19 nt, Artificial Sequence
  Description of Artificial Sequence: Synthetic oligonucleotide
  Antisense Strand to SEQ ID NO: 319991
uuucaggauacaguacggg

SEQ ID NO: 319993 - RNA, 19 nt, Artificial Sequence
  Description of Artificial Sequence: Synthetic oligonucleotide
  Sense Strand Starting at position 17 of SEQ ID NO: 317322
auccuuuguuguccaauca

SEQ ID NO: 319994 - RNA, 19 nt, Artificial Sequence
  Description of Artificial Sequence: Synthetic oligonucleotide
  Antisense Strand to SEQ ID NO: 319993
ugauuggacaacaaaggau

SEQ ID NO: 319995 - RNA, 19 nt, Artificial Sequence
  Description of Artificial Sequence: Synthetic oligonucleotide
  Sense Strand Starting at position 17 of SEQ ID NO: 317387
gagacagagucaccuguau

SEQ ID NO: 319996 - RNA, 19 nt, Artificial Sequence
  Description of Artificial Sequence: Synthetic oligonucleotide
  Antisense Strand to SEQ ID NO: 319995
auacaggugacucugucuc

SEQ ID NO: 319997 - RNA, 19 nt, Artificial Sequence
  Description of Artificial Sequence: Synthetic oligonucleotide
  Sense Strand Starting at position 17 of SEQ ID NO: 317970
uguuguccaggcuaguaau

SEQ ID NO: 319998 - RNA, 19 nt, Artificial Sequence
  Description of Artificial Sequence: Synthetic oligonucleotide
  Antisense Strand to SEQ ID NO: 319997
auuacuagccuggacaaca

SEQ ID NO: 319999 - RNA, 19 nt, Artificial Sequence
  Description of Artificial Sequence: Synthetic oligonucleotide
  Sense Strand Starting at position 17 of SEQ ID NO: 318015
auaggaguguuagcuguaa

SEQ ID NO: 320000 - RNA, 19 nt, Artificial Sequence
  Description of Artificial Sequence: Synthetic oligonucleotide
  Antisense Strand to SEQ ID NO: 319999
uuacagcuaacacuccuau

SEQ ID NO: 320001 - RNA, 19 nt, Artificial Sequence
  Description of Artificial Sequence: Synthetic oligonucleotide
  Sense Strand Starting at position 17 of SEQ ID NO: 318026
agcuguaacgcuuaugaug

SEQ ID NO: 320002 - RNA, 19 nt, Artificial Sequence
  Description of Artificial Sequence: Synthetic oligonucleotide
  Antisense Strand to SEQ ID NO: 320001
caucauaagcguuacagcu

SEQ ID NO: 320003 - RNA, 19 nt, Artificial Sequence
  Description of Artificial Sequence: Synthetic oligonucleotide
  Sense Strand Starting at position 17 of SEQ ID NO: 318033
acgcuuaugaugggaaaga

SEQ ID NO: 320004 - RNA, 19 nt, Artificial Sequence
  Description of Artificial Sequence: Synthetic oligonucleotide
  Antisense Strand to SEQ ID NO: 320003
ucuuucccaucauaagcgu

SEQ ID NO: 320005 - RNA, 19 nt, Artificial Sequence
  Description of Artificial Sequence: Synthetic oligonucleotide
  Sense Strand Starting at position 17 of SEQ ID NO: 318034
cgcuuaugaugggaaagaa

SEQ ID NO: 320006 - RNA, 19 nt, Artificial Sequence
  Description of Artificial Sequence: Synthetic oligonucleotide
  Antisense Strand to SEQ ID NO: 320005
uucuuucccaucauaagcg

SEQ ID NO: 320007 - RNA, 19 nt, Artificial Sequence
  Description of Artificial Sequence: Synthetic oligonucleotide
  Sense Strand Starting at position 17 of SEQ ID NO: 318075
cuacacugccucuguuuau

SEQ ID NO: 320008 - RNA, 19 nt, Artificial Sequence
  Description of Artificial Sequence: Synthetic oligonucleotide
  Antisense Strand to SEQ ID NO: 320007
auaaacagaggcaguguag

SEQ ID NO: 320009 - RNA, 19 nt, Artificial Sequence
  Description of Artificial Sequence: Synthetic oligonucleotide
  Sense Strand Starting at position 17 of SEQ ID NO: 318130
ugucgaaagaugggacuuu

SEQ ID NO: 320010 - RNA, 19 nt, Artificial Sequence
  Description of Artificial Sequence: Synthetic oligonucleotide
  Antisense Strand to SEQ ID NO: 320009
aaagucccaucuuucgaca

SEQ ID NO: 320011 - RNA, 19 nt, Artificial Sequence
  Description of Artificial Sequence: Synthetic oligonucleotide
  Sense Strand Starting at position 17 of SEQ ID NO: 318173
caaacugggucagacuaau

SEQ ID NO: 320012 - RNA, 19 nt, Artificial Sequence
  Description of Artificial Sequence: Synthetic oligonucleotide
  Antisense Strand to SEQ ID NO: 320011
auuagucugacccaguuug

SEQ ID NO: 320013 - RNA, 19 nt, Artificial Sequence
  Description of Artificial Sequence: Synthetic oligonucleotide
  Sense Strand Starting at position 17 of SEQ ID NO: 318191
ugacaauucuaccaaguag

SEQ ID NO: 320014 - RNA, 19 nt, Artificial Sequence
  Description of Artificial Sequence: Synthetic oligonucleotide
  Antisense Strand to SEQ ID NO: 320013
cuacuugguagaauuguca

SEQ ID NO: 320015 - RNA, 19 nt, Artificial Sequence
  Description of Artificial Sequence: Synthetic oligonucleotide
  Sense Strand Starting at position 17 of SEQ ID NO: 318202
ccaaguaguguauaccagu

SEQ ID NO: 320016 - RNA, 19 nt, Artificial Sequence
  Description of Artificial Sequence: Synthetic oligonucleotide
  Antisense Strand to SEQ ID NO: 320015
acugguauacacuacuugg

SEQ ID NO: 320017 - RNA, 19 nt, Artificial Sequence
  Description of Artificial Sequence: Synthetic oligonucleotide
  Sense Strand Starting at position 17 of SEQ ID NO: 318252
gugcaucuuccacacaguu

SEQ ID NO: 320018 - RNA, 19 nt, Artificial Sequence
  Description of Artificial Sequence: Synthetic oligonucleotide
  Antisense Strand to SEQ ID NO: 320017
aacuguguggaagaugcac

SEQ ID NO: 320019 - RNA, 19 nt, Artificial Sequence
  Description of Artificial Sequence: Synthetic oligonucleotide
  Sense Strand Starting at position 17 of SEQ ID NO: 318271
guagccauagagugcauau

SEQ ID NO: 320020 - RNA, 19 nt, Artificial Sequence
  Description of Artificial Sequence: Synthetic oligonucleotide
  Antisense Strand to SEQ ID NO: 320019
auaugcacucuauggcuac

SEQ ID NO: 320021 - RNA, 19 nt, Artificial Sequence
  Description of Artificial Sequence: Synthetic oligonucleotide
  Sense Strand Starting at position 17 of SEQ ID NO: 318312
guggaucugucauccuaua

SEQ ID NO: 320022 - RNA, 19 nt, Artificial Sequence
  Description of Artificial Sequence: Synthetic oligonucleotide
  Antisense Strand to SEQ ID NO: 320021
uauaggaugacagauccac

SEQ ID NO: 320023 - RNA, 19 nt, Artificial Sequence
  Description of Artificial Sequence: Synthetic oligonucleotide
  Sense Strand Starting at position 17 of SEQ ID NO: 318360
augaauagaguccagcuua

SEQ ID NO: 320024 - RNA, 19 nt, Artificial Sequence
  Description of Artificial Sequence: Synthetic oligonucleotide
  Antisense Strand to SEQ ID NO: 320023
uaagcuggacucuauucau

SEQ ID NO: 320025 - RNA, 19 nt, Artificial Sequence
  Description of Artificial Sequence: Synthetic oligonucleotide
  Sense Strand Starting at position 17 of SEQ ID NO: 318421
gcuguugagcgauacuaua

SEQ ID NO: 320026 - RNA, 19 nt, Artificial Sequence
  Description of Artificial Sequence: Synthetic oligonucleotide
  Antisense Strand to SEQ ID NO: 320025
uauaguaucgcucaacagc

SEQ ID NO: 320027 - RNA, 19 nt, Artificial Sequence
  Description of Artificial Sequence: Synthetic oligonucleotide
  Sense Strand Starting at position 17 of SEQ ID NO: 318429
gcgauacuauauuccuaaa

SEQ ID NO: 320028 - RNA, 19 nt, Artificial Sequence
  Description of Artificial Sequence: Synthetic oligonucleotide
  Antisense Strand to SEQ ID NO: 320027
uuuaggaauauaguaucgc

SEQ ID NO: 320029 - RNA, 19 nt, Artificial Sequence
  Description of Artificial Sequence: Synthetic oligonucleotide
  Sense Strand Starting at position 17 of SEQ ID NO: 318960
ggguauucugccuauagag

SEQ ID NO: 320030 - RNA, 19 nt, Artificial Sequence
  Description of Artificial Sequence: Synthetic oligonucleotide
  Antisense Strand to SEQ ID NO: 320029
cucuauaggcagaauaccc

SEQ ID NO: 320031 - RNA, 19 nt, Artificial Sequence
  Description of Artificial Sequence: Synthetic oligonucleotide
  Sense Strand Starting at position 17 of SEQ ID NO: 318962
guauucugccuauagagua

SEQ ID NO: 320032 - RNA, 19 nt, Artificial Sequence
  Description of Artificial Sequence: Synthetic oligonucleotide
  Antisense Strand to SEQ ID NO: 320031
uacucuauaggcagaauac

SEQ ID NO: 320033 - RNA, 19 nt, Artificial Sequence
  Description of Artificial Sequence: Synthetic oligonucleotide
  Sense Strand Starting at position 17 of SEQ ID NO: 319029
cucuauggauucgucuaga

SEQ ID NO: 320034 - RNA, 19 nt, Artificial Sequence
  Description of Artificial Sequence: Synthetic oligonucleotide
  Antisense Strand to SEQ ID NO: 320033
ucuagacgaauccauagag

SEQ ID NO: 320035 - RNA, 19 nt, Artificial Sequence
  Description of Artificial Sequence: Synthetic oligonucleotide
  Sense Strand Starting at position 17 of SEQ ID NO: 319032
uauggauucgucuagaauu

SEQ ID NO: 320036 - RNA, 19 nt, Artificial Sequence
  Description of Artificial Sequence: Synthetic oligonucleotide
  Antisense Strand to SEQ ID NO: 320035
aauucuagacgaauccaua

SEQ ID NO: 320037 - RNA, 19 nt, Artificial Sequence
  Description of Artificial Sequence: Synthetic oligonucleotide
  Sense Strand Starting at position 17 of SEQ ID NO: 319034
uggauucgucuagaauuac

SEQ ID NO: 320038 - RNA, 19 nt, Artificial Sequence
  Description of Artificial Sequence: Synthetic oligonucleotide
  Antisense Strand to SEQ ID NO: 320037
guaauucuagacgaaucca

SEQ ID NO: 320039 - RNA, 19 nt, Artificial Sequence
  Description of Artificial Sequence: Synthetic oligonucleotide
  Sense Strand Starting at position 17 of SEQ ID NO: 319049
uuacuucuugcaggagauc

SEQ ID NO: 320040 - RNA, 19 nt, Artificial Sequence
  Description of Artificial Sequence: Synthetic oligonucleotide
  Antisense Strand to SEQ ID NO: 320039
gaucuccugcaagaaguaa

SEQ ID NO: 320041 - RNA, 19 nt, Artificial Sequence
  Description of Artificial Sequence: Synthetic oligonucleotide
  Sense Strand Starting at position 17 of SEQ ID NO: 319100
cccuaauaguaauugguuu

SEQ ID NO: 320042 - RNA, 19 nt, Artificial Sequence
  Description of Artificial Sequence: Synthetic oligonucleotide
  Antisense Strand to SEQ ID NO: 320041
aaaccaauuacuauuaggg

SEQ ID NO: 320043 - RNA, 19 nt, Artificial Sequence
  Description of Artificial Sequence: Synthetic oligonucleotide
  Sense Strand Starting at position 18 of SEQ ID NO: 315282
uauugaccagguuaugagu

SEQ ID NO: 320044 - RNA, 19 nt, Artificial Sequence
  Description of Artificial Sequence: Synthetic oligonucleotide
  Antisense Strand to SEQ ID NO: 320043
acucauaaccuggucaaua

SEQ ID NO: 320045 - RNA, 19 nt, Artificial Sequence
  Description of Artificial Sequence: Synthetic oligonucleotide
  Sense Strand Starting at position 18 of SEQ ID NO: 315290
agguuaugagucuguauaa

SEQ ID NO: 320046 - RNA, 19 nt, Artificial Sequence
  Description of Artificial Sequence: Synthetic oligonucleotide
  Antisense Strand to SEQ ID NO: 320045
uuauacagacucauaaccu

SEQ ID NO: 320047 - RNA, 19 nt, Artificial Sequence
  Description of Artificial Sequence: Synthetic oligonucleotide
  Sense Strand Starting at position 18 of SEQ ID NO: 315291
gguuaugagucuguauaac

SEQ ID NO: 320048 - RNA, 19 nt, Artificial Sequence
  Description of Artificial Sequence: Synthetic oligonucleotide
  Antisense Strand to SEQ ID NO: 320047
guuauacagacucauaacc

SEQ ID NO: 320049 - RNA, 19 nt, Artificial Sequence
  Description of Artificial Sequence: Synthetic oligonucleotide
  Sense Strand Starting at position 18 of SEQ ID NO: 315448
guaucuuucuaacugauag

SEQ ID NO: 320050 - RNA, 19 nt, Artificial Sequence
  Description of Artificial Sequence: Synthetic oligonucleotide
  Antisense Strand to SEQ ID NO: 320049
cuaucaguuagaaagauac

SEQ ID NO: 320051 - RNA, 19 nt, Artificial Sequence
  Description of Artificial Sequence: Synthetic oligonucleotide
  Sense Strand Starting at position 18 of SEQ ID NO: 315511
ucuuacuuccaccagagua

SEQ ID NO: 320052 - RNA, 19 nt, Artificial Sequence
  Description of Artificial Sequence: Synthetic oligonucleotide
  Antisense Strand to SEQ ID NO: 320051
uacucugguggaaguaaga

SEQ ID NO: 320053 - RNA, 19 nt, Artificial Sequence
  Description of Artificial Sequence: Synthetic oligonucleotide
  Sense Strand Starting at position 18 of SEQ ID NO: 315513
uuacuuccaccagaguauu

SEQ ID NO: 320054 - RNA, 19 nt, Artificial Sequence
  Description of Artificial Sequence: Synthetic oligonucleotide
  Antisense Strand to SEQ ID NO: 320053
aauacucugguggaaguaa

SEQ ID NO: 320055 - RNA, 19 nt, Artificial Sequence
  Description of Artificial Sequence: Synthetic oligonucleotide
  Sense Strand Starting at position 18 of SEQ ID NO: 315757
agcaucugucuacaucauu

SEQ ID NO: 320056 - RNA, 19 nt, Artificial Sequence
  Description of Artificial Sequence: Synthetic oligonucleotide
  Antisense Strand to SEQ ID NO: 320055
aaugauguagacagaugcu

SEQ ID NO: 320057 - RNA, 19 nt, Artificial Sequence
  Description of Artificial Sequence: Synthetic oligonucleotide
  Sense Strand Starting at position 18 of SEQ ID NO: 315864
ccagaagacuuuccugaug

SEQ ID NO: 320058 - RNA, 19 nt, Artificial Sequence
  Description of Artificial Sequence: Synthetic oligonucleotide
  Antisense Strand to SEQ ID NO: 320057
caucaggaaagucuucugg

SEQ ID NO: 320059 - RNA, 19 nt, Artificial Sequence
  Description of Artificial Sequence: Synthetic oligonucleotide
  Sense Strand Starting at position 18 of SEQ ID NO: 315914
cugauccauucuguggaaa

SEQ ID NO: 320060 - RNA, 19 nt, Artificial Sequence
  Description of Artificial Sequence: Synthetic oligonucleotide
  Antisense Strand to SEQ ID NO: 320059
uuuccacagaauggaucag

SEQ ID NO: 320061 - RNA, 19 nt, Artificial Sequence
  Description of Artificial Sequence: Synthetic oligonucleotide
  Sense Strand Starting at position 18 of SEQ ID NO: 315915
ugauccauucuguggaaag

SEQ ID NO: 320062 - RNA, 19 nt, Artificial Sequence
  Description of Artificial Sequence: Synthetic oligonucleotide
  Antisense Strand to SEQ ID NO: 320061
cuuuccacagaauggauca

SEQ ID NO: 320063 - RNA, 19 nt, Artificial Sequence
  Description of Artificial Sequence: Synthetic oligonucleotide
  Sense Strand Starting at position 18 of SEQ ID NO: 316094
gcuguuacucuagaaugga

SEQ ID NO: 320064 - RNA, 19 nt, Artificial Sequence
  Description of Artificial Sequence: Synthetic oligonucleotide
  Antisense Strand to SEQ ID NO: 320063
uccauucuagaguaacagc

SEQ ID NO: 320065 - RNA, 19 nt, Artificial Sequence
  Description of Artificial Sequence: Synthetic oligonucleotide
  Sense Strand Starting at position 18 of SEQ ID NO: 316111
gauagauaguaugccagaa

SEQ ID NO: 320066 - RNA, 19 nt, Artificial Sequence
  Description of Artificial Sequence: Synthetic oligonucleotide
  Antisense Strand to SEQ ID NO: 320065
uucuggcauacuaucuauc

SEQ ID NO: 320067 - RNA, 19 nt, Artificial Sequence
  Description of Artificial Sequence: Synthetic oligonucleotide
  Sense Strand Starting at position 18 of SEQ ID NO: 316115
gauaguaugccagaaaucu

SEQ ID NO: 320068 - RNA, 19 nt, Artificial Sequence
  Description of Artificial Sequence: Synthetic oligonucleotide
  Antisense Strand to SEQ ID NO: 320067
agauuucuggcauacuauc

SEQ ID NO: 320069 - RNA, 19 nt, Artificial Sequence
  Description of Artificial Sequence: Synthetic oligonucleotide
  Sense Strand Starting at position 18 of SEQ ID NO: 316132
cuucuaugucaacauuguu

SEQ ID NO: 320070 - RNA, 19 nt, Artificial Sequence
  Description of Artificial Sequence: Synthetic oligonucleotide
  Antisense Strand to SEQ ID NO: 320069
aacaauguugacauagaag

SEQ ID NO: 320071 - RNA, 19 nt, Artificial Sequence
  Description of Artificial Sequence: Synthetic oligonucleotide
  Sense Strand Starting at position 18 of SEQ ID NO: 316571
ggaagacuacucuggucuu

SEQ ID NO: 320072 - RNA, 19 nt, Artificial Sequence
  Description of Artificial Sequence: Synthetic oligonucleotide
  Antisense Strand to SEQ ID NO: 320071
aagaccagaguagucuucc

SEQ ID NO: 320073 - RNA, 19 nt, Artificial Sequence
  Description of Artificial Sequence: Synthetic oligonucleotide
  Sense Strand Starting at position 18 of SEQ ID NO: 316660
ugaaccugaugauaagaaa

SEQ ID NO: 320074 - RNA, 19 nt, Artificial Sequence
  Description of Artificial Sequence: Synthetic oligonucleotide
  Antisense Strand to SEQ ID NO: 320073
uuucuuaucaucagguuca

SEQ ID NO: 320075 - RNA, 19 nt, Artificial Sequence
  Description of Artificial Sequence: Synthetic oligonucleotide
  Sense Strand Starting at position 18 of SEQ ID NO: 316663
accugaugauaagaaauaa

SEQ ID NO: 320076 - RNA, 19 nt, Artificial Sequence
  Description of Artificial Sequence: Synthetic oligonucleotide
  Antisense Strand to SEQ ID NO: 320075
uuauuucuuaucaucaggu

SEQ ID NO: 320077 - RNA, 19 nt, Artificial Sequence
  Description of Artificial Sequence: Synthetic oligonucleotide
  Sense Strand Starting at position 18 of SEQ ID NO: 316769
uggaauuauuugcagaaau

SEQ ID NO: 320078 - RNA, 19 nt, Artificial Sequence
  Description of Artificial Sequence: Synthetic oligonucleotide
  Antisense Strand to SEQ ID NO: 320077
auuucugcaaauaauucca

SEQ ID NO: 320079 - RNA, 19 nt, Artificial Sequence
  Description of Artificial Sequence: Synthetic oligonucleotide
  Sense Strand Starting at position 18 of SEQ ID NO: 316787
ugauccuuccggcagauau

SEQ ID NO: 320080 - RNA, 19 nt, Artificial Sequence
  Description of Artificial Sequence: Synthetic oligonucleotide
  Antisense Strand to SEQ ID NO: 320079
auaucugccggaaggauca

SEQ ID NO: 320081 - RNA, 19 nt, Artificial Sequence
  Description of Artificial Sequence: Synthetic oligonucleotide
  Sense Strand Starting at position 18 of SEQ ID NO: 316789
auccuuccggcagauauau

SEQ ID NO: 320082 - RNA, 19 nt, Artificial Sequence
  Description of Artificial Sequence: Synthetic oligonucleotide
  Antisense Strand to SEQ ID NO: 320081
auauaucugccggaaggau

SEQ ID NO: 320083 - RNA, 19 nt, Artificial Sequence
  Description of Artificial Sequence: Synthetic oligonucleotide
  Sense Strand Starting at position 18 of SEQ ID NO: 316822
gugucuuuauaauuaccau

SEQ ID NO: 320084 - RNA, 19 nt, Artificial Sequence
  Description of Artificial Sequence: Synthetic oligonucleotide
  Antisense Strand to SEQ ID NO: 320083
augguaauuauaaagacac

SEQ ID NO: 320085 - RNA, 19 nt, Artificial Sequence
  Description of Artificial Sequence: Synthetic oligonucleotide
  Sense Strand Starting at position 18 of SEQ ID NO: 316987
gguuaaacuguacagcuau

SEQ ID NO: 320086 - RNA, 19 nt, Artificial Sequence
  Description of Artificial Sequence: Synthetic oligonucleotide
  Antisense Strand to SEQ ID NO: 320085
auagcuguacaguuuaacc

SEQ ID NO: 320087 - RNA, 19 nt, Artificial Sequence
  Description of Artificial Sequence: Synthetic oligonucleotide
  Sense Strand Starting at position 18 of SEQ ID NO: 317086
auacaagaucuuugggcuu

SEQ ID NO: 320088 - RNA, 19 nt, Artificial Sequence
  Description of Artificial Sequence: Synthetic oligonucleotide
  Antisense Strand to SEQ ID NO: 320087
aagcccaaagaucuuguau

SEQ ID NO: 320089 - RNA, 19 nt, Artificial Sequence
  Description of Artificial Sequence: Synthetic oligonucleotide
  Sense Strand Starting at position 18 of SEQ ID NO: 317249
ucuuguauccaagaaggcu

SEQ ID NO: 320090 - RNA, 19 nt, Artificial Sequence
  Description of Artificial Sequence: Synthetic oligonucleotide
  Antisense Strand to SEQ ID NO: 320089
agccuucuuggauacaaga

SEQ ID NO: 320091 - RNA, 19 nt, Artificial Sequence
  Description of Artificial Sequence: Synthetic oligonucleotide
  Sense Strand Starting at position 18 of SEQ ID NO: 317341
ucuuaagugguuuagguua

SEQ ID NO: 320092 - RNA, 19 nt, Artificial Sequence
  Description of Artificial Sequence: Synthetic oligonucleotide
  Antisense Strand to SEQ ID NO: 320091
uaaccuaaaccacuuaaga

SEQ ID NO: 320093 - RNA, 19 nt, Artificial Sequence
  Description of Artificial Sequence: Synthetic oligonucleotide
  Sense Strand Starting at position 18 of SEQ ID NO: 317346
agugguuuagguuacaaau

SEQ ID NO: 320094 - RNA, 19 nt, Artificial Sequence
  Description of Artificial Sequence: Synthetic oligonucleotide
  Antisense Strand to SEQ ID NO: 320093
auuuguaaccuaaaccacu

SEQ ID NO: 320095 - RNA, 19 nt, Artificial Sequence
  Description of Artificial Sequence: Synthetic oligonucleotide
  Sense Strand Starting at position 18 of SEQ ID NO: 317507
guagguagcaucuagagaa

SEQ ID NO: 320096 - RNA, 19 nt, Artificial Sequence
  Description of Artificial Sequence: Synthetic oligonucleotide
  Antisense Strand to SEQ ID NO: 320095
uucucuagaugcuaccuac

SEQ ID NO: 320097 - RNA, 19 nt, Artificial Sequence
  Description of Artificial Sequence: Synthetic oligonucleotide
  Sense Strand Starting at position 18 of SEQ ID NO: 317723
ucucuauccuugucccaga

SEQ ID NO: 320098 - RNA, 19 nt, Artificial Sequence
  Description of Artificial Sequence: Synthetic oligonucleotide
  Antisense Strand to SEQ ID NO: 320097
ucugggacaaggauagaga

SEQ ID NO: 320099 - RNA, 19 nt, Artificial Sequence
  Description of Artificial Sequence: Synthetic oligonucleotide
  Sense Strand Starting at position 18 of SEQ ID NO: 317728
auccuugucccagaguauu

SEQ ID NO: 320100 - RNA, 19 nt, Artificial Sequence
  Description of Artificial Sequence: Synthetic oligonucleotide
  Antisense Strand to SEQ ID NO: 320099
aauacucugggacaaggau

SEQ ID NO: 320101 - RNA, 19 nt, Artificial Sequence
  Description of Artificial Sequence: Synthetic oligonucleotide
  Sense Strand Starting at position 18 of SEQ ID NO: 317882
agaaauuuaugcugauuug

SEQ ID NO: 320102 - RNA, 19 nt, Artificial Sequence
  Description of Artificial Sequence: Synthetic oligonucleotide
  Antisense Strand to SEQ ID NO: 320101
caaaucagcauaaauuucu

SEQ ID NO: 320103 - RNA, 19 nt, Artificial Sequence
  Description of Artificial Sequence: Synthetic oligonucleotide
  Sense Strand Starting at position 18 of SEQ ID NO: 317931
cucaaauuugcauggcagu

SEQ ID NO: 320104 - RNA, 19 nt, Artificial Sequence
  Description of Artificial Sequence: Synthetic oligonucleotide
  Antisense Strand to SEQ ID NO: 320103
acugccaugcaaauuugag

SEQ ID NO: 320105 - RNA, 19 nt, Artificial Sequence
  Description of Artificial Sequence: Synthetic oligonucleotide
  Sense Strand Starting at position 18 of SEQ ID NO: 317932
ucaaauuugcauggcaguu

SEQ ID NO: 320106 - RNA, 19 nt, Artificial Sequence
  Description of Artificial Sequence: Synthetic oligonucleotide
  Antisense Strand to SEQ ID NO: 320105
aacugccaugcaaauuuga

SEQ ID NO: 320107 - RNA, 19 nt, Artificial Sequence
  Description of Artificial Sequence: Synthetic oligonucleotide
  Sense Strand Starting at position 18 of SEQ ID NO: 317979
agucuccaccugcagaaau

SEQ ID NO: 320108 - RNA, 19 nt, Artificial Sequence
  Description of Artificial Sequence: Synthetic oligonucleotide
  Antisense Strand to SEQ ID NO: 320107
auuucugcagguggagacu

SEQ ID NO: 320109 - RNA, 19 nt, Artificial Sequence
  Description of Artificial Sequence: Synthetic oligonucleotide
  Sense Strand Starting at position 18 of SEQ ID NO: 318285
gcuuucugucccuuuguua

SEQ ID NO: 320110 - RNA, 19 nt, Artificial Sequence
  Description of Artificial Sequence: Synthetic oligonucleotide
  Antisense Strand to SEQ ID NO: 320109
uaacaaagggacagaaagc

SEQ ID NO: 320111 - RNA, 19 nt, Artificial Sequence
  Description of Artificial Sequence: Synthetic oligonucleotide
  Sense Strand Starting at position 18 of SEQ ID NO: 318554
auggaauuguuggcucgaa

SEQ ID NO: 320112 - RNA, 19 nt, Artificial Sequence
  Description of Artificial Sequence: Synthetic oligonucleotide
  Antisense Strand to SEQ ID NO: 320111
uucgagccaacaauuccau

SEQ ID NO: 320113 - RNA, 19 nt, Artificial Sequence
  Description of Artificial Sequence: Synthetic oligonucleotide
  Sense Strand Starting at position 18 of SEQ ID NO: 318558
aauuguuggcucgaaugau

SEQ ID NO: 320114 - RNA, 19 nt, Artificial Sequence
  Description of Artificial Sequence: Synthetic oligonucleotide
  Antisense Strand to SEQ ID NO: 320113
aucauucgagccaacaauu

SEQ ID NO: 320115 - RNA, 19 nt, Artificial Sequence
  Description of Artificial Sequence: Synthetic oligonucleotide
  Sense Strand Starting at position 18 of SEQ ID NO: 318798
gcgguauguaugucuucuu

SEQ ID NO: 320116 - RNA, 19 nt, Artificial Sequence
  Description of Artificial Sequence: Synthetic oligonucleotide
  Antisense Strand to SEQ ID NO: 320115
aagaagacauacauaccgc

SEQ ID NO: 320117 - RNA, 19 nt, Artificial Sequence
  Description of Artificial Sequence: Synthetic oligonucleotide
  Sense Strand Starting at position 18 of SEQ ID NO: 319063
cucucauaguagucuacaa

SEQ ID NO: 320118 - RNA, 19 nt, Artificial Sequence
  Description of Artificial Sequence: Synthetic oligonucleotide
  Antisense Strand to SEQ ID NO: 320117
uuguagacuacuaugagag

SEQ ID NO: 320119 - RNA, 19 nt, Artificial Sequence
  Description of Artificial Sequence: Synthetic oligonucleotide
  Sense Strand Starting at position 18 of SEQ ID NO: 319065
cucauaguagucuacaaga

SEQ ID NO: 320120 - RNA, 19 nt, Artificial Sequence
  Description of Artificial Sequence: Synthetic oligonucleotide
  Antisense Strand to SEQ ID NO: 320119
ucuuguagacuacuaugag

SEQ ID NO: 320121 - RNA, 19 nt, Artificial Sequence
  Description of Artificial Sequence: Synthetic oligonucleotide
  Sense Strand Starting at position 18 of SEQ ID NO: 319179
gcuguuugagagcauacca

SEQ ID NO: 320122 - RNA, 19 nt, Artificial Sequence
  Description of Artificial Sequence: Synthetic oligonucleotide
  Antisense Strand to SEQ ID NO: 320121
ugguaugcucucaaacagc

SEQ ID NO: 320123 - RNA, 19 nt, Artificial Sequence
  Description of Artificial Sequence: Synthetic oligonucleotide
  Sense Strand Starting at position 19 of SEQ ID NO: 317231
acauaaugcccuggagaau

SEQ ID NO: 320124 - RNA, 19 nt, Artificial Sequence
  Description of Artificial Sequence: Synthetic oligonucleotide
  Antisense Strand to SEQ ID NO: 320123
auucuccagggcauuaugu

SEQ ID NO: 320125 - RNA, 19 nt, Artificial Sequence
  Description of Artificial Sequence: Synthetic oligonucleotide
  Sense Strand Starting at position 19 of SEQ ID NO: 317426
agcaaauuacuugguuuau

SEQ ID NO: 320126 - RNA, 19 nt, Artificial Sequence
  Description of Artificial Sequence: Synthetic oligonucleotide
  Antisense Strand to SEQ ID NO: 320125
auaaaccaaguaauuugcu

SEQ ID NO: 320127 - RNA, 19 nt, Artificial Sequence
  Description of Artificial Sequence: Synthetic oligonucleotide
  Sense Strand Starting at position 19 of SEQ ID NO: 317427
gcaaauuacuugguuuauu

SEQ ID NO: 320128 - RNA, 19 nt, Artificial Sequence
  Description of Artificial Sequence: Synthetic oligonucleotide
  Antisense Strand to SEQ ID NO: 320127
aauaaaccaaguaauuugc

SEQ ID NO: 320129 - RNA, 19 nt, Artificial Sequence
  Description of Artificial Sequence: Synthetic oligonucleotide
  Sense Strand Starting at position 19 of SEQ ID NO: 317591
ucacuacuugcuuauugua

SEQ ID NO: 320130 - RNA, 19 nt, Artificial Sequence
  Description of Artificial Sequence: Synthetic oligonucleotide
  Antisense Strand to SEQ ID NO: 320129
uacaauaagcaaguaguga

SEQ ID NO: 320131 - RNA, 19 nt, Artificial Sequence
  Description of Artificial Sequence: Synthetic oligonucleotide
  Sense Strand Starting at position 19 of SEQ ID NO: 317593
acuacuugcuuauuguaua

SEQ ID NO: 320132 - RNA, 19 nt, Artificial Sequence
  Description of Artificial Sequence: Synthetic oligonucleotide
  Antisense Strand to SEQ ID NO: 320131
uauacaauaagcaaguagu

SEQ ID NO: 320133 - RNA, 19 nt, Artificial Sequence
  Description of Artificial Sequence: Synthetic oligonucleotide
  Sense Strand Starting at position 19 of SEQ ID NO: 317797
gcuauuauguuucucaccu

SEQ ID NO: 320134 - RNA, 19 nt, Artificial Sequence
  Description of Artificial Sequence: Synthetic oligonucleotide
  Antisense Strand to SEQ ID NO: 320133
aggugagaaacauaauagc

SEQ ID NO: 320135 - RNA, 19 nt, Artificial Sequence
  Description of Artificial Sequence: Synthetic oligonucleotide
  Sense Strand Starting at position 19 of SEQ ID NO: 317896
cuggaaugcaguggacaau

SEQ ID NO: 320136 - RNA, 19 nt, Artificial Sequence
  Description of Artificial Sequence: Synthetic oligonucleotide
  Antisense Strand to SEQ ID NO: 320135
auuguccacugcauuccag

SEQ ID NO: 320137 - RNA, 19 nt, Artificial Sequence
  Description of Artificial Sequence: Synthetic oligonucleotide
  Sense Strand Starting at position 19 of SEQ ID NO: 318182
uauugaccagguuaugagu

SEQ ID NO: 320138 - RNA, 19 nt, Artificial Sequence
  Description of Artificial Sequence: Synthetic oligonucleotide
  Antisense Strand to SEQ ID NO: 320137
acucauaaccuggucaaua

SEQ ID NO: 320139 - RNA, 19 nt, Artificial Sequence
  Description of Artificial Sequence: Synthetic oligonucleotide
  Sense Strand Starting at position 19 of SEQ ID NO: 318190
agguuaugagucuguauaa

SEQ ID NO: 320140 - RNA, 19 nt, Artificial Sequence
  Description of Artificial Sequence: Synthetic oligonucleotide
  Antisense Strand to SEQ ID NO: 320139
uuauacagacucauaaccu

SEQ ID NO: 320141 - RNA, 19 nt, Artificial Sequence
  Description of Artificial Sequence: Synthetic oligonucleotide
  Sense Strand Starting at position 19 of SEQ ID NO: 318191
gguuaugagucuguauaac

SEQ ID NO: 320142 - RNA, 19 nt, Artificial Sequence
  Description of Artificial Sequence: Synthetic oligonucleotide
  Antisense Strand to SEQ ID NO: 320141
guuauacagacucauaacc

SEQ ID NO: 320143 - RNA, 19 nt, Artificial Sequence
  Description of Artificial Sequence: Synthetic oligonucleotide
  Sense Strand Starting at position 19 of SEQ ID NO: 318298
cucgcaaagaguuggagua

SEQ ID NO: 320144 - RNA, 19 nt, Artificial Sequence
  Description of Artificial Sequence: Synthetic oligonucleotide
  Antisense Strand to SEQ ID NO: 320143
uacuccaacucuuugcgag

SEQ ID NO: 320145 - RNA, 19 nt, Artificial Sequence
  Description of Artificial Sequence: Synthetic oligonucleotide
  Sense Strand Starting at position 19 of SEQ ID NO: 318299
ucgcaaagaguuggaguaa

SEQ ID NO: 320146 - RNA, 19 nt, Artificial Sequence
  Description of Artificial Sequence: Synthetic oligonucleotide
  Antisense Strand to SEQ ID NO: 320145
uuacuccaacucuuugcga

SEQ ID NO: 320147 - RNA, 19 nt, Artificial Sequence
  Description of Artificial Sequence: Synthetic oligonucleotide
  Sense Strand Starting at position 19 of SEQ ID NO: 318344
agcaguaucuuucuaacug

SEQ ID NO: 320148 - RNA, 19 nt, Artificial Sequence
  Description of Artificial Sequence: Synthetic oligonucleotide
  Antisense Strand to SEQ ID NO: 320147
caguuagaaagauacugcu

SEQ ID NO: 320149 - RNA, 19 nt, Artificial Sequence
  Description of Artificial Sequence: Synthetic oligonucleotide
  Sense Strand Starting at position 19 of SEQ ID NO: 318348
guaucuuucuaacugauag

SEQ ID NO: 320150 - RNA, 19 nt, Artificial Sequence
  Description of Artificial Sequence: Synthetic oligonucleotide
  Antisense Strand to SEQ ID NO: 320149
cuaucaguuagaaagauac

SEQ ID NO: 320151 - RNA, 19 nt, Artificial Sequence
  Description of Artificial Sequence: Synthetic oligonucleotide
  Sense Strand Starting at position 19 of SEQ ID NO: 318369
uguuguuacuccuccucaa

SEQ ID NO: 320152 - RNA, 19 nt, Artificial Sequence
  Description of Artificial Sequence: Synthetic oligonucleotide
  Antisense Strand to SEQ ID NO: 320151
uugaggaggaguaacaaca

SEQ ID NO: 320153 - RNA, 19 nt, Artificial Sequence
  Description of Artificial Sequence: Synthetic oligonucleotide
  Sense Strand Starting at position 19 of SEQ ID NO: 318411
ucuuacuuccaccagagua

SEQ ID NO: 320154 - RNA, 19 nt, Artificial Sequence
  Description of Artificial Sequence: Synthetic oligonucleotide
  Antisense Strand to SEQ ID NO: 320153
uacucugguggaaguaaga

SEQ ID NO: 320155 - RNA, 19 nt, Artificial Sequence
  Description of Artificial Sequence: Synthetic oligonucleotide
  Sense Strand Starting at position 19 of SEQ ID NO: 318413
uuacuuccaccagaguauu

SEQ ID NO: 320156 - RNA, 19 nt, Artificial Sequence
  Description of Artificial Sequence: Synthetic oligonucleotide
  Antisense Strand to SEQ ID NO: 320155
aauacucugguggaaguaa

SEQ ID NO: 320157 - RNA, 19 nt, Artificial Sequence
  Description of Artificial Sequence: Synthetic oligonucleotide
  Sense Strand Starting at position 19 of SEQ ID NO: 318616
ggacuaauuucucagcagu

SEQ ID NO: 320158 - RNA, 19 nt, Artificial Sequence
  Description of Artificial Sequence: Synthetic oligonucleotide
  Antisense Strand to SEQ ID NO: 320157
acugcugagaaauuagucc

SEQ ID NO: 320159 - RNA, 19 nt, Artificial Sequence
  Description of Artificial Sequence: Synthetic oligonucleotide
  Sense Strand Starting at position 19 of SEQ ID NO: 318655
gcagcaucugucuacauca

SEQ ID NO: 320160 - RNA, 19 nt, Artificial Sequence
  Description of Artificial Sequence: Synthetic oligonucleotide
  Antisense Strand to SEQ ID NO: 320159
ugauguagacagaugcugc

SEQ ID NO: 320161 - RNA, 19 nt, Artificial Sequence
  Description of Artificial Sequence: Synthetic oligonucleotide
  Sense Strand Starting at position 19 of SEQ ID NO: 318657
agcaucugucuacaucauu

SEQ ID NO: 320162 - RNA, 19 nt, Artificial Sequence
  Description of Artificial Sequence: Synthetic oligonucleotide
  Antisense Strand to SEQ ID NO: 320161
aaugauguagacagaugcu

SEQ ID NO: 320163 - RNA, 19 nt, Artificial Sequence
  Description of Artificial Sequence: Synthetic oligonucleotide
  Sense Strand Starting at position 19 of SEQ ID NO: 318663
ugucuacaucauugcucau

SEQ ID NO: 320164 - RNA, 19 nt, Artificial Sequence
  Description of Artificial Sequence: Synthetic oligonucleotide
  Antisense Strand to SEQ ID NO: 320163
augagcaaugauguagaca

SEQ ID NO: 320165 - RNA, 19 nt, Artificial Sequence
  Description of Artificial Sequence: Synthetic oligonucleotide
  Sense Strand Starting at position 19 of SEQ ID NO: 318675
ugcucauucuguuccuuua

SEQ ID NO: 320166 - RNA, 19 nt, Artificial Sequence
  Description of Artificial Sequence: Synthetic oligonucleotide
  Antisense Strand to SEQ ID NO: 320165
uaaaggaacagaaugagca

SEQ ID NO: 320167 - RNA, 19 nt, Artificial Sequence
  Description of Artificial Sequence: Synthetic oligonucleotide
  Sense Strand Starting at position 19 of SEQ ID NO: 318725
agggccaauuccuacucaa

SEQ ID NO: 320168 - RNA, 19 nt, Artificial Sequence
  Description of Artificial Sequence: Synthetic oligonucleotide
  Antisense Strand to SEQ ID NO: 320167
uugaguaggaauuggcccu

SEQ ID NO: 320169 - RNA, 19 nt, Artificial Sequence
  Description of Artificial Sequence: Synthetic oligonucleotide
  Sense Strand Starting at position 19 of SEQ ID NO: 318764
ccagaagacuuuccugaug

SEQ ID NO: 320170 - RNA, 19 nt, Artificial Sequence
  Description of Artificial Sequence: Synthetic oligonucleotide
  Antisense Strand to SEQ ID NO: 320169
caucaggaaagucuucugg

SEQ ID NO: 320171 - RNA, 19 nt, Artificial Sequence
  Description of Artificial Sequence: Synthetic oligonucleotide
  Sense Strand Starting at position 19 of SEQ ID NO: 318766
agaagacuuuccugaugua

SEQ ID NO: 320172 - RNA, 19 nt, Artificial Sequence
  Description of Artificial Sequence: Synthetic oligonucleotide
  Antisense Strand to SEQ ID NO: 320171
uacaucaggaaagucuucu

SEQ ID NO: 320173 - RNA, 19 nt, Artificial Sequence
  Description of Artificial Sequence: Synthetic oligonucleotide
  Sense Strand Starting at position 19 of SEQ ID NO: 318813
acugauccauucuguggaa

SEQ ID NO: 320174 - RNA, 19 nt, Artificial Sequence
  Description of Artificial Sequence: Synthetic oligonucleotide
  Antisense Strand to SEQ ID NO: 320173
uuccacagaauggaucagu

SEQ ID NO: 320175 - RNA, 19 nt, Artificial Sequence
  Description of Artificial Sequence: Synthetic oligonucleotide
  Sense Strand Starting at position 19 of SEQ ID NO: 318814
cugauccauucuguggaaa

SEQ ID NO: 320176 - RNA, 19 nt, Artificial Sequence
  Description of Artificial Sequence: Synthetic oligonucleotide
  Antisense Strand to SEQ ID NO: 320175
uuuccacagaauggaucag

SEQ ID NO: 320177 - RNA, 19 nt, Artificial Sequence
  Description of Artificial Sequence: Synthetic oligonucleotide
  Sense Strand Starting at position 19 of SEQ ID NO: 318815
ugauccauucuguggaaag

SEQ ID NO: 320178 - RNA, 19 nt, Artificial Sequence
  Description of Artificial Sequence: Synthetic oligonucleotide
  Antisense Strand to SEQ ID NO: 320177
cuuuccacagaauggauca

SEQ ID NO: 320179 - RNA, 19 nt, Artificial Sequence
  Description of Artificial Sequence: Synthetic oligonucleotide
  Sense Strand Starting at position 19 of SEQ ID NO: 318816
gauccauucuguggaaagg

SEQ ID NO: 320180 - RNA, 19 nt, Artificial Sequence
  Description of Artificial Sequence: Synthetic oligonucleotide
  Antisense Strand to SEQ ID NO: 320179
ccuuuccacagaauggauc

SEQ ID NO: 320181 - RNA, 19 nt, Artificial Sequence
  Description of Artificial Sequence: Synthetic oligonucleotide
  Sense Strand Starting at position 19 of SEQ ID NO: 318890
cuauuugauuuguguuugu

SEQ ID NO: 320182 - RNA, 19 nt, Artificial Sequence
  Description of Artificial Sequence: Synthetic oligonucleotide
  Antisense Strand to SEQ ID NO: 320181
acaaacacaaaucaaauag

SEQ ID NO: 320183 - RNA, 19 nt, Artificial Sequence
  Description of Artificial Sequence: Synthetic oligonucleotide
  Sense Strand Starting at position 19 of SEQ ID NO: 318920
uguuaaugugccuggcaca

SEQ ID NO: 320184 - RNA, 19 nt, Artificial Sequence
  Description of Artificial Sequence: Synthetic oligonucleotide
  Antisense Strand to SEQ ID NO: 320183
ugugccaggcacauuaaca

SEQ ID NO: 320185 - RNA, 19 nt, Artificial Sequence
  Description of Artificial Sequence: Synthetic oligonucleotide
  Sense Strand Starting at position 19 of SEQ ID NO: 318921
guuaaugugccuggcacaa

SEQ ID NO: 320186 - RNA, 19 nt, Artificial Sequence
  Description of Artificial Sequence: Synthetic oligonucleotide
  Antisense Strand to SEQ ID NO: 320185
uugugccaggcacauuaac

SEQ ID NO: 320187 - RNA, 19 nt, Artificial Sequence
  Description of Artificial Sequence: Synthetic oligonucleotide
  Sense Strand Starting at position 19 of SEQ ID NO: 318994
gcuguuacucuagaaugga

SEQ ID NO: 320188 - RNA, 19 nt, Artificial Sequence
  Description of Artificial Sequence: Synthetic oligonucleotide
  Antisense Strand to SEQ ID NO: 320187
uccauucuagaguaacagc

SEQ ID NO: 320189 - RNA, 19 nt, Artificial Sequence
  Description of Artificial Sequence: Synthetic oligonucleotide
  Sense Strand Starting at position 19 of SEQ ID NO: 319011
gauagauaguaugccagaa

SEQ ID NO: 320190 - RNA, 19 nt, Artificial Sequence
  Description of Artificial Sequence: Synthetic oligonucleotide
  Antisense Strand to SEQ ID NO: 320189
uucuggcauacuaucuauc

SEQ ID NO: 320191 - RNA, 19 nt, Artificial Sequence
  Description of Artificial Sequence: Synthetic oligonucleotide
  Sense Strand Starting at position 19 of SEQ ID NO: 319013
uagauaguaugccagaaau

SEQ ID NO: 320192 - RNA, 19 nt, Artificial Sequence
  Description of Artificial Sequence: Synthetic oligonucleotide
  Antisense Strand to SEQ ID NO: 320191
auuucuggcauacuaucua

SEQ ID NO: 320193 - RNA, 19 nt, Artificial Sequence
  Description of Artificial Sequence: Synthetic oligonucleotide
  Sense Strand Starting at position 19 of SEQ ID NO: 319015
gauaguaugccagaaaucu

SEQ ID NO: 320194 - RNA, 19 nt, Artificial Sequence
  Description of Artificial Sequence: Synthetic oligonucleotide
  Antisense Strand to SEQ ID NO: 320193
agauuucuggcauacuauc

SEQ ID NO: 320195 - RNA, 19 nt, Artificial Sequence
  Description of Artificial Sequence: Synthetic oligonucleotide
  Sense Strand Starting at position 19 of SEQ ID NO: 319032
cuucuaugucaacauuguu

SEQ ID NO: 320196 - RNA, 19 nt, Artificial Sequence
  Description of Artificial Sequence: Synthetic oligonucleotide
  Antisense Strand to SEQ ID NO: 320195
aacaauguugacauagaag

SEQ ID NO: 320197 - RNA, 19 nt, Artificial Sequence
  Description of Artificial Sequence: Synthetic oligonucleotide
  Sense Strand Starting at position 19 of SEQ ID NO: 319035
cuaugucaacauuguuauu

SEQ ID NO: 320198 - RNA, 19 nt, Artificial Sequence
  Description of Artificial Sequence: Synthetic oligonucleotide
  Antisense Strand to SEQ ID NO: 320197
aauaacaauguugacauag

SEQ ID NO: 320199 - RNA, 19 nt, Artificial Sequence
  Description of Artificial Sequence: Synthetic oligonucleotide
  Sense Strand Starting at position 19 of SEQ ID NO: 319053
ugcacuauguuggcuacua

SEQ ID NO: 320200 - RNA, 19 nt, Artificial Sequence
  Description of Artificial Sequence: Synthetic oligonucleotide
  Antisense Strand to SEQ ID NO: 320199
uaguagccaacauagugca

SEQ ID NO: 320201 - RNA, 19 nt, Artificial Sequence
  Description of Artificial Sequence: Synthetic oligonucleotide
  Sense Strand Starting at position 19 of SEQ ID NO: 319097
ugcacagaauucguaaguu

SEQ ID NO: 320202 - RNA, 19 nt, Artificial Sequence
  Description of Artificial Sequence: Synthetic oligonucleotide
  Antisense Strand to SEQ ID NO: 320201
aacuuacgaauucugugca

SEQ ID NO: 320203 - RNA, 19 nt, Artificial Sequence
  Description of Artificial Sequence: Synthetic oligonucleotide
  Sense Strand Starting at position 20 of SEQ ID NO: 315448
cccaaagauugggcucuau

SEQ ID NO: 320204 - RNA, 19 nt, Artificial Sequence
  Description of Artificial Sequence: Synthetic oligonucleotide
  Antisense Strand to SEQ ID NO: 320203
auagagcccaaucuuuggg

SEQ ID NO: 320205 - RNA, 19 nt, Artificial Sequence
  Description of Artificial Sequence: Synthetic oligonucleotide
  Sense Strand Starting at position 20 of SEQ ID NO: 315471
ugcaguuugaguuacauga

SEQ ID NO: 320206 - RNA, 19 nt, Artificial Sequence
  Description of Artificial Sequence: Synthetic oligonucleotide
  Antisense Strand to SEQ ID NO: 320205
ucauguaacucaaacugca

SEQ ID NO: 320207 - RNA, 19 nt, Artificial Sequence
  Description of Artificial Sequence: Synthetic oligonucleotide
  Sense Strand Starting at position 20 of SEQ ID NO: 315475
guuugaguuacaugaauug

SEQ ID NO: 320208 - RNA, 19 nt, Artificial Sequence
  Description of Artificial Sequence: Synthetic oligonucleotide
  Antisense Strand to SEQ ID NO: 320207
caauucauguaacucaaac

SEQ ID NO: 320209 - RNA, 19 nt, Artificial Sequence
  Description of Artificial Sequence: Synthetic oligonucleotide
  Sense Strand Starting at position 20 of SEQ ID NO: 315486
augaauugccuagggaaau

SEQ ID NO: 320210 - RNA, 19 nt, Artificial Sequence
  Description of Artificial Sequence: Synthetic oligonucleotide
  Antisense Strand to SEQ ID NO: 320209
auuucccuaggcaauucau

SEQ ID NO: 320211 - RNA, 19 nt, Artificial Sequence
  Description of Artificial Sequence: Synthetic oligonucleotide
  Sense Strand Starting at position 20 of SEQ ID NO: 315691
ucauaaguucuaggaucac

SEQ ID NO: 320212 - RNA, 19 nt, Artificial Sequence
  Description of Artificial Sequence: Synthetic oligonucleotide
  Antisense Strand to SEQ ID NO: 320211
gugauccuagaacuuauga

SEQ ID NO: 320213 - RNA, 19 nt, Artificial Sequence
  Description of Artificial Sequence: Synthetic oligonucleotide
  Sense Strand Starting at position 20 of SEQ ID NO: 316218
guucucucugaacaaaguu

SEQ ID NO: 320214 - RNA, 19 nt, Artificial Sequence
  Description of Artificial Sequence: Synthetic oligonucleotide
  Antisense Strand to SEQ ID NO: 320213
aacuuuguucagagagaac

SEQ ID NO: 320215 - RNA, 19 nt, Artificial Sequence
  Description of Artificial Sequence: Synthetic oligonucleotide
  Sense Strand Starting at position 20 of SEQ ID NO: 316277
guucuuauuugcuuacaug

SEQ ID NO: 320216 - RNA, 19 nt, Artificial Sequence
  Description of Artificial Sequence: Synthetic oligonucleotide
  Antisense Strand to SEQ ID NO: 320215
cauguaagcaaauaagaac

SEQ ID NO: 320217 - RNA, 19 nt, Artificial Sequence
  Description of Artificial Sequence: Synthetic oligonucleotide
  Sense Strand Starting at position 20 of SEQ ID NO: 316449
ggaugugggccuuggaaag

SEQ ID NO: 320218 - RNA, 19 nt, Artificial Sequence
  Description of Artificial Sequence: Synthetic oligonucleotide
  Antisense Strand to SEQ ID NO: 320217
cuuuccaaggcccacaucc

SEQ ID NO: 320219 - RNA, 19 nt, Artificial Sequence
  Description of Artificial Sequence: Synthetic oligonucleotide
  Sense Strand Starting at position 20 of SEQ ID NO: 316476
cuuuauaagggucaugcaa

SEQ ID NO: 320220 - RNA, 19 nt, Artificial Sequence
  Description of Artificial Sequence: Synthetic oligonucleotide
  Antisense Strand to SEQ ID NO: 320219
uugcaugacccuuauaaag

SEQ ID NO: 320221 - RNA, 19 nt, Artificial Sequence
  Description of Artificial Sequence: Synthetic oligonucleotide
  Sense Strand Starting at position 20 of SEQ ID NO: 316887
ucugacauuugagaucauu

SEQ ID NO: 320222 - RNA, 19 nt, Artificial Sequence
  Description of Artificial Sequence: Synthetic oligonucleotide
  Antisense Strand to SEQ ID NO: 320221
aaugaucucaaaugucaga

SEQ ID NO: 320223 - RNA, 19 nt, Artificial Sequence
  Description of Artificial Sequence: Synthetic oligonucleotide
  Sense Strand Starting at position 20 of SEQ ID NO: 317019
gccugauuugcaggaggug

SEQ ID NO: 320224 - RNA, 19 nt, Artificial Sequence
  Description of Artificial Sequence: Synthetic oligonucleotide
  Antisense Strand to SEQ ID NO: 320223
caccuccugcaaaucaggc

SEQ ID NO: 320225 - RNA, 19 nt, Artificial Sequence
  Description of Artificial Sequence: Synthetic oligonucleotide
  Sense Strand Starting at position 20 of SEQ ID NO: 317031
ggaggugcccagugaagaa

SEQ ID NO: 320226 - RNA, 19 nt, Artificial Sequence
  Description of Artificial Sequence: Synthetic oligonucleotide
  Antisense Strand to SEQ ID NO: 320225
uucuucacugggcaccucc

SEQ ID NO: 320227 - RNA, 19 nt, Artificial Sequence
  Description of Artificial Sequence: Synthetic oligonucleotide
  Sense Strand Starting at position 20 of SEQ ID NO: 317452
ggaggacuucugggagguu

SEQ ID NO: 320228 - RNA, 19 nt, Artificial Sequence
  Description of Artificial Sequence: Synthetic oligonucleotide
  Antisense Strand to SEQ ID NO: 320227
aaccucccagaaguccucc

SEQ ID NO: 320229 - RNA, 19 nt, Artificial Sequence
  Description of Artificial Sequence: Synthetic oligonucleotide
  Sense Strand Starting at position 20 of SEQ ID NO: 317455
ggacuucugggagguugga

SEQ ID NO: 320230 - RNA, 19 nt, Artificial Sequence
  Description of Artificial Sequence: Synthetic oligonucleotide
  Antisense Strand to SEQ ID NO: 320229
uccaaccucccagaagucc

SEQ ID NO: 320231 - RNA, 19 nt, Artificial Sequence
  Description of Artificial Sequence: Synthetic oligonucleotide
  Sense Strand Starting at position 20 of SEQ ID NO: 317492
cagggauuccuuugacacu

SEQ ID NO: 320232 - RNA, 19 nt, Artificial Sequence
  Description of Artificial Sequence: Synthetic oligonucleotide
  Antisense Strand to SEQ ID NO: 320231
agugucaaaggaaucccug

SEQ ID NO: 320233 - RNA, 19 nt, Artificial Sequence
  Description of Artificial Sequence: Synthetic oligonucleotide
  Sense Strand Starting at position 20 of SEQ ID NO: 317560
cuggucuucccugaucuuu

SEQ ID NO: 320234 - RNA, 19 nt, Artificial Sequence
  Description of Artificial Sequence: Synthetic oligonucleotide
  Antisense Strand to SEQ ID NO: 320233
aaagaucagggaagaccag

SEQ ID NO: 320235 - RNA, 19 nt, Artificial Sequence
  Description of Artificial Sequence: Synthetic oligonucleotide
  Sense Strand Starting at position 20 of SEQ ID NO: 317608
uuaauaucacacgagcuua

SEQ ID NO: 320236 - RNA, 19 nt, Artificial Sequence
  Description of Artificial Sequence: Synthetic oligonucleotide
  Antisense Strand to SEQ ID NO: 320235
uaagcucgugugauauuaa

SEQ ID NO: 320237 - RNA, 19 nt, Artificial Sequence
  Description of Artificial Sequence: Synthetic oligonucleotide
  Sense Strand Starting at position 20 of SEQ ID NO: 317637
cugagaugguccucaugug

SEQ ID NO: 320238 - RNA, 19 nt, Artificial Sequence
  Description of Artificial Sequence: Synthetic oligonucleotide
  Antisense Strand to SEQ ID NO: 320237
cacaugaggaccaucucag

SEQ ID NO: 320239 - RNA, 19 nt, Artificial Sequence
  Description of Artificial Sequence: Synthetic oligonucleotide
  Sense Strand Starting at position 20 of SEQ ID NO: 317638
ugagaugguccucauguga

SEQ ID NO: 320240 - RNA, 19 nt, Artificial Sequence
  Description of Artificial Sequence: Synthetic oligonucleotide
  Antisense Strand to SEQ ID NO: 320239
ucacaugaggaccaucuca

SEQ ID NO: 320241 - RNA, 19 nt, Artificial Sequence
  Description of Artificial Sequence: Synthetic oligonucleotide
  Sense Strand Starting at position 20 of SEQ ID NO: 317656
aaaggauugcucuguaagg

SEQ ID NO: 320242 - RNA, 19 nt, Artificial Sequence
  Description of Artificial Sequence: Synthetic oligonucleotide
  Antisense Strand to SEQ ID NO: 320241
ccuuacagagcaauccuuu

SEQ ID NO: 320243 - RNA, 19 nt, Artificial Sequence
  Description of Artificial Sequence: Synthetic oligonucleotide
  Sense Strand Starting at position 20 of SEQ ID NO: 317658
aggauugcucuguaaggug

SEQ ID NO: 320244 - RNA, 19 nt, Artificial Sequence
  Description of Artificial Sequence: Synthetic oligonucleotide
  Antisense Strand to SEQ ID NO: 320243
caccuuacagagcaauccu

SEQ ID NO: 320245 - RNA, 19 nt, Artificial Sequence
  Description of Artificial Sequence: Synthetic oligonucleotide
  Sense Strand Starting at position 20 of SEQ ID NO: 317739
cccugacauucccuggaaa

SEQ ID NO: 320246 - RNA, 19 nt, Artificial Sequence
  Description of Artificial Sequence: Synthetic oligonucleotide
  Antisense Strand to SEQ ID NO: 320245
uuuccagggaaugucaggg

SEQ ID NO: 320247 - RNA, 19 nt, Artificial Sequence
  Description of Artificial Sequence: Synthetic oligonucleotide
  Sense Strand Starting at position 20 of SEQ ID NO: 317783
gugugugggauccagauga

SEQ ID NO: 320248 - RNA, 19 nt, Artificial Sequence
  Description of Artificial Sequence: Synthetic oligonucleotide
  Antisense Strand to SEQ ID NO: 320247
ucaucuggaucccacacac

SEQ ID NO: 320249 - RNA, 19 nt, Artificial Sequence
  Description of Artificial Sequence: Synthetic oligonucleotide
  Sense Strand Starting at position 20 of SEQ ID NO: 317796
agaugagagcugggucuua

SEQ ID NO: 320250 - RNA, 19 nt, Artificial Sequence
  Description of Artificial Sequence: Synthetic oligonucleotide
  Antisense Strand to SEQ ID NO: 320249
uaagacccagcucucaucu

SEQ ID NO: 320251 - RNA, 19 nt, Artificial Sequence
  Description of Artificial Sequence: Synthetic oligonucleotide
  Sense Strand Starting at position 20 of SEQ ID NO: 317809
gucuuagugagaggaauga

SEQ ID NO: 320252 - RNA, 19 nt, Artificial Sequence
  Description of Artificial Sequence: Synthetic oligonucleotide
  Antisense Strand to SEQ ID NO: 320251
ucauuccucucacuaagac

SEQ ID NO: 320253 - RNA, 19 nt, Artificial Sequence
  Description of Artificial Sequence: Synthetic oligonucleotide
  Sense Strand Starting at position 20 of SEQ ID NO: 317941
caauaaguagauuacguaa

SEQ ID NO: 320254 - RNA, 19 nt, Artificial Sequence
  Description of Artificial Sequence: Synthetic oligonucleotide
  Antisense Strand to SEQ ID NO: 320253
uuacguaaucuacuuauug

SEQ ID NO: 320255 - RNA, 19 nt, Artificial Sequence
  Description of Artificial Sequence: Synthetic oligonucleotide
  Sense Strand Starting at position 20 of SEQ ID NO: 317966
uguguaagacugggaaaga

SEQ ID NO: 320256 - RNA, 19 nt, Artificial Sequence
  Description of Artificial Sequence: Synthetic oligonucleotide
  Antisense Strand to SEQ ID NO: 320255
ucuuucccagucuuacaca

SEQ ID NO: 320257 - RNA, 19 nt, Artificial Sequence
  Description of Artificial Sequence: Synthetic oligonucleotide
  Sense Strand Starting at position 20 of SEQ ID NO: 318026
ggacuucugagcuauguug

SEQ ID NO: 320258 - RNA, 19 nt, Artificial Sequence
  Description of Artificial Sequence: Synthetic oligonucleotide
  Antisense Strand to SEQ ID NO: 320257
caacauagcucagaagucc

SEQ ID NO: 320259 - RNA, 19 nt, Artificial Sequence
  Description of Artificial Sequence: Synthetic oligonucleotide
  Sense Strand Starting at position 20 of SEQ ID NO: 318034
gagcuauguugacucugag

SEQ ID NO: 320260 - RNA, 19 nt, Artificial Sequence
  Description of Artificial Sequence: Synthetic oligonucleotide
  Antisense Strand to SEQ ID NO: 320259
cucagagucaacauagcuc

SEQ ID NO: 320261 - RNA, 19 nt, Artificial Sequence
  Description of Artificial Sequence: Synthetic oligonucleotide
  Sense Strand Starting at position 20 of SEQ ID NO: 318084
ccuguaaugcaagguauuu

SEQ ID NO: 320262 - RNA, 19 nt, Artificial Sequence
  Description of Artificial Sequence: Synthetic oligonucleotide
  Antisense Strand to SEQ ID NO: 320261
aaauaccuugcauuacagg

SEQ ID NO: 320263 - RNA, 19 nt, Artificial Sequence
  Description of Artificial Sequence: Synthetic oligonucleotide
  Sense Strand Starting at position 20 of SEQ ID NO: 318299
acuguuuggaggugaaagu

SEQ ID NO: 320264 - RNA, 19 nt, Artificial Sequence
  Description of Artificial Sequence: Synthetic oligonucleotide
  Antisense Strand to SEQ ID NO: 320263
acuuucaccuccaaacagu

SEQ ID NO: 320265 - RNA, 19 nt, Artificial Sequence
  Description of Artificial Sequence: Synthetic oligonucleotide
  Sense Strand Starting at position 20 of SEQ ID NO: 318300
cuguuuggaggugaaaguu

SEQ ID NO: 320266 - RNA, 19 nt, Artificial Sequence
  Description of Artificial Sequence: Synthetic oligonucleotide
  Antisense Strand to SEQ ID NO: 320265
aacuuucaccuccaaacag

SEQ ID NO: 320267 - RNA, 19 nt, Artificial Sequence
  Description of Artificial Sequence: Synthetic oligonucleotide
  Sense Strand Starting at position 20 of SEQ ID NO: 318308
aggugaaaguucuuacuua

SEQ ID NO: 320268 - RNA, 19 nt, Artificial Sequence
  Description of Artificial Sequence: Synthetic oligonucleotide
  Antisense Strand to SEQ ID NO: 320267
uaaguaagaacuuucaccu

SEQ ID NO: 320269 - RNA, 19 nt, Artificial Sequence
  Description of Artificial Sequence: Synthetic oligonucleotide
  Sense Strand Starting at position 20 of SEQ ID NO: 318334
acucaucuccgccaaggau

SEQ ID NO: 320270 - RNA, 19 nt, Artificial Sequence
  Description of Artificial Sequence: Synthetic oligonucleotide
  Antisense Strand to SEQ ID NO: 320269
auccuuggcggagaugagu

SEQ ID NO: 320271 - RNA, 19 nt, Artificial Sequence
  Description of Artificial Sequence: Synthetic oligonucleotide
  Sense Strand Starting at position 20 of SEQ ID NO: 318366
gaccaugggcaaugacuua

SEQ ID NO: 320272 - RNA, 19 nt, Artificial Sequence
  Description of Artificial Sequence: Synthetic oligonucleotide
  Antisense Strand to SEQ ID NO: 320271
uaagucauugcccaugguc

SEQ ID NO: 320273 - RNA, 19 nt, Artificial Sequence
  Description of Artificial Sequence: Synthetic oligonucleotide
  Sense Strand Starting at position 20 of SEQ ID NO: 318387
uccucucugccauagagaa

SEQ ID NO: 320274 - RNA, 19 nt, Artificial Sequence
  Description of Artificial Sequence: Synthetic oligonucleotide
  Antisense Strand to SEQ ID NO: 320273
uucucuauggcagagagga

SEQ ID NO: 320275 - RNA, 19 nt, Artificial Sequence
  Description of Artificial Sequence: Synthetic oligonucleotide
  Sense Strand Starting at position 20 of SEQ ID NO: 318399
uagagaaaggcuuggauug

SEQ ID NO: 320276 - RNA, 19 nt, Artificial Sequence
  Description of Artificial Sequence: Synthetic oligonucleotide
  Antisense Strand to SEQ ID NO: 320275
caauccaagccuuucucua

SEQ ID NO: 320277 - RNA, 19 nt, Artificial Sequence
  Description of Artificial Sequence: Synthetic oligonucleotide
  Sense Strand Starting at position 20 of SEQ ID NO: 318420
ggaagugcccagugaagaa

SEQ ID NO: 320278 - RNA, 19 nt, Artificial Sequence
  Description of Artificial Sequence: Synthetic oligonucleotide
  Antisense Strand to SEQ ID NO: 320277
uucuucacugggcacuucc

SEQ ID NO: 320279 - RNA, 19 nt, Artificial Sequence
  Description of Artificial Sequence: Synthetic oligonucleotide
  Sense Strand Starting at position 20 of SEQ ID NO: 318859
cuuauuugagugugucaga

SEQ ID NO: 320280 - RNA, 19 nt, Artificial Sequence
  Description of Artificial Sequence: Synthetic oligonucleotide
  Antisense Strand to SEQ ID NO: 320279
ucugacacacucaaauaag

SEQ ID NO: 320281 - RNA, 19 nt, Artificial Sequence
  Description of Artificial Sequence: Synthetic oligonucleotide
  Sense Strand Starting at position 20 of SEQ ID NO: 318872
gucagagguucuccaagau

SEQ ID NO: 320282 - RNA, 19 nt, Artificial Sequence
  Description of Artificial Sequence: Synthetic oligonucleotide
  Antisense Strand to SEQ ID NO: 320281
aucuuggagaaccucugac

SEQ ID NO: 320283 - RNA, 19 nt, Artificial Sequence
  Description of Artificial Sequence: Synthetic oligonucleotide
  Sense Strand Starting at position 21 of SEQ ID NO: 315259
uuuaguuaugggcaucuuu

SEQ ID NO: 320284 - RNA, 19 nt, Artificial Sequence
  Description of Artificial Sequence: Synthetic oligonucleotide
  Antisense Strand to SEQ ID NO: 320283
aaagaugcccauaacuaaa

SEQ ID NO: 320285 - RNA, 19 nt, Artificial Sequence
  Description of Artificial Sequence: Synthetic oligonucleotide
  Sense Strand Starting at position 21 of SEQ ID NO: 315392
uggcuuaaguacuuagaug

SEQ ID NO: 320286 - RNA, 19 nt, Artificial Sequence
  Description of Artificial Sequence: Synthetic oligonucleotide
  Antisense Strand to SEQ ID NO: 320285
caucuaaguacuuaagcca

SEQ ID NO: 320287 - RNA, 19 nt, Artificial Sequence
  Description of Artificial Sequence: Synthetic oligonucleotide
  Sense Strand Starting at position 21 of SEQ ID NO: 315427
ggccaagaaagauguauua

SEQ ID NO: 320288 - RNA, 19 nt, Artificial Sequence
  Description of Artificial Sequence: Synthetic oligonucleotide
  Antisense Strand to SEQ ID NO: 320287
uaauacaucuuucuuggcc

SEQ ID NO: 320289 - RNA, 19 nt, Artificial Sequence
  Description of Artificial Sequence: Synthetic oligonucleotide
  Sense Strand Starting at position 21 of SEQ ID NO: 315506
ggcuuugugcaauauuugu

SEQ ID NO: 320290 - RNA, 19 nt, Artificial Sequence
  Description of Artificial Sequence: Synthetic oligonucleotide
  Antisense Strand to SEQ ID NO: 320289
acaaauauugcacaaagcc

SEQ ID NO: 320291 - RNA, 19 nt, Artificial Sequence
  Description of Artificial Sequence: Synthetic oligonucleotide
  Sense Strand Starting at position 21 of SEQ ID NO: 315543
gagagcuagcuuuguauuu

SEQ ID NO: 320292 - RNA, 19 nt, Artificial Sequence
  Description of Artificial Sequence: Synthetic oligonucleotide
  Antisense Strand to SEQ ID NO: 320291
aaauacaaagcuagcucuc

SEQ ID NO: 320293 - RNA, 19 nt, Artificial Sequence
  Description of Artificial Sequence: Synthetic oligonucleotide
  Sense Strand Starting at position 21 of SEQ ID NO: 315560
uuuggcuuuccucaggaaa

SEQ ID NO: 320294 - RNA, 19 nt, Artificial Sequence
  Description of Artificial Sequence: Synthetic oligonucleotide
  Antisense Strand to SEQ ID NO: 320293
uuuccugaggaaagccaaa

SEQ ID NO: 320295 - RNA, 19 nt, Artificial Sequence
  Description of Artificial Sequence: Synthetic oligonucleotide
  Sense Strand Starting at position 21 of SEQ ID NO: 315586
cuugcagucccugaauaua

SEQ ID NO: 320296 - RNA, 19 nt, Artificial Sequence
  Description of Artificial Sequence: Synthetic oligonucleotide
  Antisense Strand to SEQ ID NO: 320295
uauauucagggacugcaag

SEQ ID NO: 320297 - RNA, 19 nt, Artificial Sequence
  Description of Artificial Sequence: Synthetic oligonucleotide
  Sense Strand Starting at position 21 of SEQ ID NO: 315613
acaacaauuugguagucaa

SEQ ID NO: 320298 - RNA, 19 nt, Artificial Sequence
  Description of Artificial Sequence: Synthetic oligonucleotide
  Antisense Strand to SEQ ID NO: 320297
uugacuaccaaauuguugu

SEQ ID NO: 320299 - RNA, 19 nt, Artificial Sequence
  Description of Artificial Sequence: Synthetic oligonucleotide
  Sense Strand Starting at position 21 of SEQ ID NO: 315621
uugguagucaaaggaaguu

SEQ ID NO: 320300 - RNA, 19 nt, Artificial Sequence
  Description of Artificial Sequence: Synthetic oligonucleotide
  Antisense Strand to SEQ ID NO: 320299
aacuuccuuugacuaccaa

SEQ ID NO: 320301 - RNA, 19 nt, Artificial Sequence
  Description of Artificial Sequence: Synthetic oligonucleotide
  Sense Strand Starting at position 21 of SEQ ID NO: 315706
uuggauuucucagaggacu

SEQ ID NO: 320302 - RNA, 19 nt, Artificial Sequence
  Description of Artificial Sequence: Synthetic oligonucleotide
  Antisense Strand to SEQ ID NO: 320301
aguccucugagaaauccaa

SEQ ID NO: 320303 - RNA, 19 nt, Artificial Sequence
  Description of Artificial Sequence: Synthetic oligonucleotide
  Sense Strand Starting at position 21 of SEQ ID NO: 315744
acagguuuacaguauuaca

SEQ ID NO: 320304 - RNA, 19 nt, Artificial Sequence
  Description of Artificial Sequence: Synthetic oligonucleotide
  Antisense Strand to SEQ ID NO: 320303
uguaauacuguaaaccugu

SEQ ID NO: 320305 - RNA, 19 nt, Artificial Sequence
  Description of Artificial Sequence: Synthetic oligonucleotide
  Sense Strand Starting at position 21 of SEQ ID NO: 315855
ucacauggguuucccuaaa

SEQ ID NO: 320306 - RNA, 19 nt, Artificial Sequence
  Description of Artificial Sequence: Synthetic oligonucleotide
  Antisense Strand to SEQ ID NO: 320305
uuuagggaaacccauguga

SEQ ID NO: 320307 - RNA, 19 nt, Artificial Sequence
  Description of Artificial Sequence: Synthetic oligonucleotide
  Sense Strand Starting at position 21 of SEQ ID NO: 315915
cugacagcuggugaaucau

SEQ ID NO: 320308 - RNA, 19 nt, Artificial Sequence
  Description of Artificial Sequence: Synthetic oligonucleotide
  Antisense Strand to SEQ ID NO: 320307
augauucaccagcugucag

SEQ ID NO: 320309 - RNA, 19 nt, Artificial Sequence
  Description of Artificial Sequence: Synthetic oligonucleotide
  Sense Strand Starting at position 21 of SEQ ID NO: 315978
guugacucaugaccuagua

SEQ ID NO: 320310 - RNA, 19 nt, Artificial Sequence
  Description of Artificial Sequence: Synthetic oligonucleotide
  Antisense Strand to SEQ ID NO: 320309
uacuaggucaugagucaac

SEQ ID NO: 320311 - RNA, 19 nt, Artificial Sequence
  Description of Artificial Sequence: Synthetic oligonucleotide
  Sense Strand Starting at position 21 of SEQ ID NO: 316031
uaagcacauggguaucaua

SEQ ID NO: 320312 - RNA, 19 nt, Artificial Sequence
  Description of Artificial Sequence: Synthetic oligonucleotide
  Antisense Strand to SEQ ID NO: 320311
uaugauacccaugugcuua

SEQ ID NO: 320313 - RNA, 19 nt, Artificial Sequence
  Description of Artificial Sequence: Synthetic oligonucleotide
  Sense Strand Starting at position 21 of SEQ ID NO: 316062
aguaaagagcuuugaauau

SEQ ID NO: 320314 - RNA, 19 nt, Artificial Sequence
  Description of Artificial Sequence: Synthetic oligonucleotide
  Antisense Strand to SEQ ID NO: 320313
auauucaaagcucuuuacu

SEQ ID NO: 320315 - RNA, 19 nt, Artificial Sequence
  Description of Artificial Sequence: Synthetic oligonucleotide
  Sense Strand Starting at position 21 of SEQ ID NO: 316073
uugaauaucccaugcugaa

SEQ ID NO: 320316 - RNA, 19 nt, Artificial Sequence
  Description of Artificial Sequence: Synthetic oligonucleotide
  Antisense Strand to SEQ ID NO: 320315
uucagcaugggauauucaa

SEQ ID NO: 320317 - RNA, 19 nt, Artificial Sequence
  Description of Artificial Sequence: Synthetic oligonucleotide
  Sense Strand Starting at position 21 of SEQ ID NO: 316336
ucagacucuuagguaacau

SEQ ID NO: 320318 - RNA, 19 nt, Artificial Sequence
  Description of Artificial Sequence: Synthetic oligonucleotide
  Antisense Strand to SEQ ID NO: 320317
auguuaccuaagagucuga

SEQ ID NO: 320319 - RNA, 19 nt, Artificial Sequence
  Description of Artificial Sequence: Synthetic oligonucleotide
  Sense Strand Starting at position 21 of SEQ ID NO: 316758
gcaguuguaaaguaaguaa

SEQ ID NO: 320320 - RNA, 19 nt, Artificial Sequence
  Description of Artificial Sequence: Synthetic oligonucleotide
  Antisense Strand to SEQ ID NO: 320319
uuacuuacuuuacaacugc

SEQ ID NO: 320321 - RNA, 19 nt, Artificial Sequence
  Description of Artificial Sequence: Synthetic oligonucleotide
  Sense Strand Starting at position 21 of SEQ ID NO: 316914
gagccuggucucugggaaa

SEQ ID NO: 320322 - RNA, 19 nt, Artificial Sequence
  Description of Artificial Sequence: Synthetic oligonucleotide
  Antisense Strand to SEQ ID NO: 320321
uuucccagagaccaggcuc

SEQ ID NO: 320323 - RNA, 19 nt, Artificial Sequence
  Description of Artificial Sequence: Synthetic oligonucleotide
  Sense Strand Starting at position 21 of SEQ ID NO: 316970
ucagacuuugcugggaaca

SEQ ID NO: 320324 - RNA, 19 nt, Artificial Sequence
  Description of Artificial Sequence: Synthetic oligonucleotide
  Antisense Strand to SEQ ID NO: 320323
uguucccagcaaagucuga

SEQ ID NO: 320325 - RNA, 19 nt, Artificial Sequence
  Description of Artificial Sequence: Synthetic oligonucleotide
  Sense Strand Starting at position 21 of SEQ ID NO: 317263
guaguaaaguuuccaggaa

SEQ ID NO: 320326 - RNA, 19 nt, Artificial Sequence
  Description of Artificial Sequence: Synthetic oligonucleotide
  Antisense Strand to SEQ ID NO: 320325
uuccuggaaacuuuacuac

SEQ ID NO: 320327 - RNA, 19 nt, Artificial Sequence
  Description of Artificial Sequence: Synthetic oligonucleotide
  Sense Strand Starting at position 21 of SEQ ID NO: 317267
uaaaguuuccaggaagcgu

SEQ ID NO: 320328 - RNA, 19 nt, Artificial Sequence
  Description of Artificial Sequence: Synthetic oligonucleotide
  Antisense Strand to SEQ ID NO: 320327
acgcuuccuggaaacuuua

SEQ ID NO: 320329 - RNA, 19 nt, Artificial Sequence
  Description of Artificial Sequence: Synthetic oligonucleotide
  Sense Strand Starting at position 21 of SEQ ID NO: 317290
cagguuugguauguaaaua

SEQ ID NO: 320330 - RNA, 19 nt, Artificial Sequence
  Description of Artificial Sequence: Synthetic oligonucleotide
  Antisense Strand to SEQ ID NO: 320329
uauuuacauaccaaaccug

SEQ ID NO: 320331 - RNA, 19 nt, Artificial Sequence
  Description of Artificial Sequence: Synthetic oligonucleotide
  Sense Strand Starting at position 21 of SEQ ID NO: 317291
agguuugguauguaaauaa

SEQ ID NO: 320332 - RNA, 19 nt, Artificial Sequence
  Description of Artificial Sequence: Synthetic oligonucleotide
  Antisense Strand to SEQ ID NO: 320331
uuauuuacauaccaaaccu

SEQ ID NO: 320333 - RNA, 19 nt, Artificial Sequence
  Description of Artificial Sequence: Synthetic oligonucleotide
  Sense Strand Starting at position 21 of SEQ ID NO: 317383
gaaagcuguugaucaaggu

SEQ ID NO: 320334 - RNA, 19 nt, Artificial Sequence
  Description of Artificial Sequence: Synthetic oligonucleotide
  Antisense Strand to SEQ ID NO: 320333
accuugaucaacagcuuuc

SEQ ID NO: 320335 - RNA, 19 nt, Artificial Sequence
  Description of Artificial Sequence: Synthetic oligonucleotide
  Sense Strand Starting at position 21 of SEQ ID NO: 317802
uggauuuguggcugucacu

SEQ ID NO: 320336 - RNA, 19 nt, Artificial Sequence
  Description of Artificial Sequence: Synthetic oligonucleotide
  Antisense Strand to SEQ ID NO: 320335
agugacagccacaaaucca

SEQ ID NO: 320337 - RNA, 19 nt, Artificial Sequence
  Description of Artificial Sequence: Synthetic oligonucleotide
  Sense Strand Starting at position 21 of SEQ ID NO: 317827
agggaucuacccugacuuu

SEQ ID NO: 320338 - RNA, 19 nt, Artificial Sequence
  Description of Artificial Sequence: Synthetic oligonucleotide
  Antisense Strand to SEQ ID NO: 320337
aaagucaggguagaucccu

SEQ ID NO: 320339 - RNA, 19 nt, Artificial Sequence
  Description of Artificial Sequence: Synthetic oligonucleotide
  Sense Strand Starting at position 21 of SEQ ID NO: 317850
accuuagaccagugauucu

SEQ ID NO: 320340 - RNA, 19 nt, Artificial Sequence
  Description of Artificial Sequence: Synthetic oligonucleotide
  Antisense Strand to SEQ ID NO: 320339
agaaucacuggucuaaggu

SEQ ID NO: 320341 - RNA, 19 nt, Artificial Sequence
  Description of Artificial Sequence: Synthetic oligonucleotide
  Sense Strand Starting at position 21 of SEQ ID NO: 317863
gauucuuaaucuguuggga

SEQ ID NO: 320342 - RNA, 19 nt, Artificial Sequence
  Description of Artificial Sequence: Synthetic oligonucleotide
  Antisense Strand to SEQ ID NO: 320341
ucccaacagauuaagaauc

SEQ ID NO: 320343 - RNA, 19 nt, Artificial Sequence
  Description of Artificial Sequence: Synthetic oligonucleotide
  Sense Strand Starting at position 21 of SEQ ID NO: 317937
ggccuauuuccaugccaaa

SEQ ID NO: 320344 - RNA, 19 nt, Artificial Sequence
  Description of Artificial Sequence: Synthetic oligonucleotide
  Antisense Strand to SEQ ID NO: 320343
uuuggcauggaaauaggcc

SEQ ID NO: 320345 - RNA, 19 nt, Artificial Sequence
  Description of Artificial Sequence: Synthetic oligonucleotide
  Sense Strand Starting at position 21 of SEQ ID NO: 317979
ucauguagccuauagaggu

SEQ ID NO: 320346 - RNA, 19 nt, Artificial Sequence
  Description of Artificial Sequence: Synthetic oligonucleotide
  Antisense Strand to SEQ ID NO: 320345
accucuauaggcuacauga

SEQ ID NO: 320347 - RNA, 19 nt, Artificial Sequence
  Description of Artificial Sequence: Synthetic oligonucleotide
  Sense Strand Starting at position 21 of SEQ ID NO: 318682
ugaggugcacauugagauu

SEQ ID NO: 320348 - RNA, 19 nt, Artificial Sequence
  Description of Artificial Sequence: Synthetic oligonucleotide
  Antisense Strand to SEQ ID NO: 320347
aaucucaaugugcaccuca

SEQ ID NO: 320349 - RNA, 19 nt, Artificial Sequence
  Description of Artificial Sequence: Synthetic oligonucleotide
  Sense Strand Starting at position 21 of SEQ ID NO: 318721
gcugccugucaugauauuu

SEQ ID NO: 320350 - RNA, 19 nt, Artificial Sequence
  Description of Artificial Sequence: Synthetic oligonucleotide
  Antisense Strand to SEQ ID NO: 320349
aaauaucaugacaggcagc

SEQ ID NO: 320351 - RNA, 19 nt, Artificial Sequence
  Description of Artificial Sequence: Synthetic oligonucleotide
  Sense Strand Starting at position 21 of SEQ ID NO: 318814
ggaggauuguguucuuaug

SEQ ID NO: 320352 - RNA, 19 nt, Artificial Sequence
  Description of Artificial Sequence: Synthetic oligonucleotide
  Antisense Strand to SEQ ID NO: 320351
cauaagaacacaauccucc

SEQ ID NO: 320353 - RNA, 19 nt, Artificial Sequence
  Description of Artificial Sequence: Synthetic oligonucleotide
  Sense Strand Starting at position 21 of SEQ ID NO: 318824
guucuuaugugaucauagg

SEQ ID NO: 320354 - RNA, 19 nt, Artificial Sequence
  Description of Artificial Sequence: Synthetic oligonucleotide
  Antisense Strand to SEQ ID NO: 320353
ccuaugaucacauaagaac

SEQ ID NO: 320355 - RNA, 19 nt, Artificial Sequence
  Description of Artificial Sequence: Synthetic oligonucleotide
  Sense Strand Starting at position 21 of SEQ ID NO: 318838
auaggaugcccuggaaugu

SEQ ID NO: 320356 - RNA, 19 nt, Artificial Sequence
  Description of Artificial Sequence: Synthetic oligonucleotide
  Antisense Strand to SEQ ID NO: 320355
acauuccagggcauccuau

SEQ ID NO: 320357 - RNA, 19 nt, Artificial Sequence
  Description of Artificial Sequence: Synthetic oligonucleotide
  Sense Strand Starting at position 21 of SEQ ID NO: 318851
gaaugugguauaugggaga

SEQ ID NO: 320358 - RNA, 19 nt, Artificial Sequence
  Description of Artificial Sequence: Synthetic oligonucleotide
  Antisense Strand to SEQ ID NO: 320357
ucucccauauaccacauuc

SEQ ID NO: 320359 - RNA, 19 nt, Artificial Sequence
  Description of Artificial Sequence: Synthetic oligonucleotide
  Sense Strand Starting at position 21 of SEQ ID NO: 318865
ggagaacuguuccuucuuc

SEQ ID NO: 320360 - RNA, 19 nt, Artificial Sequence
  Description of Artificial Sequence: Synthetic oligonucleotide
  Antisense Strand to SEQ ID NO: 320359
gaagaaggaacaguucucc

SEQ ID NO: 320361 - RNA, 19 nt, Artificial Sequence
  Description of Artificial Sequence: Synthetic oligonucleotide
  Sense Strand Starting at position 21 of SEQ ID NO: 318890
uaggaaacaugcgcaaaua

SEQ ID NO: 320362 - RNA, 19 nt, Artificial Sequence
  Description of Artificial Sequence: Synthetic oligonucleotide
  Antisense Strand to SEQ ID NO: 320361
uauuugcgcauguuuccua

SEQ ID NO: 320363 - RNA, 19 nt, Artificial Sequence
  Description of Artificial Sequence: Synthetic oligonucleotide
  Sense Strand Starting at position 22 of SEQ ID NO: 315288
gcuguuuaaaugugggaaa

SEQ ID NO: 320364 - RNA, 19 nt, Artificial Sequence
  Description of Artificial Sequence: Synthetic oligonucleotide
  Antisense Strand to SEQ ID NO: 320363
uuucccacauuuaaacagc

SEQ ID NO: 320365 - RNA, 19 nt, Artificial Sequence
  Description of Artificial Sequence: Synthetic oligonucleotide
  Sense Strand Starting at position 22 of SEQ ID NO: 315326
agugaaauacggugucuau

SEQ ID NO: 320366 - RNA, 19 nt, Artificial Sequence
  Description of Artificial Sequence: Synthetic oligonucleotide
  Antisense Strand to SEQ ID NO: 320365
auagacaccguauuucacu

SEQ ID NO: 320367 - RNA, 19 nt, Artificial Sequence
  Description of Artificial Sequence: Synthetic oligonucleotide
  Sense Strand Starting at position 22 of SEQ ID NO: 315333
uacggugucuauuuaccua

SEQ ID NO: 320368 - RNA, 19 nt, Artificial Sequence
  Description of Artificial Sequence: Synthetic oligonucleotide
  Antisense Strand to SEQ ID NO: 320367
uagguaaauagacaccgua

SEQ ID NO: 320369 - RNA, 19 nt, Artificial Sequence
  Description of Artificial Sequence: Synthetic oligonucleotide
  Sense Strand Starting at position 22 of SEQ ID NO: 315470
uguccuaauuaguuuagua

SEQ ID NO: 320370 - RNA, 19 nt, Artificial Sequence
  Description of Artificial Sequence: Synthetic oligonucleotide
  Antisense Strand to SEQ ID NO: 320369
uacuaaacuaauuaggaca

SEQ ID NO: 320371 - RNA, 19 nt, Artificial Sequence
  Description of Artificial Sequence: Synthetic oligonucleotide
  Sense Strand Starting at position 22 of SEQ ID NO: 315661
cacagaguucuggauguuu

SEQ ID NO: 320372 - RNA, 19 nt, Artificial Sequence
  Description of Artificial Sequence: Synthetic oligonucleotide
  Antisense Strand to SEQ ID NO: 320371
aaacauccagaacucugug

SEQ ID NO: 320373 - RNA, 19 nt, Artificial Sequence
  Description of Artificial Sequence: Synthetic oligonucleotide
  Sense Strand Starting at position 22 of SEQ ID NO: 315663
cagaguucuggauguuuaa

SEQ ID NO: 320374 - RNA, 19 nt, Artificial Sequence
  Description of Artificial Sequence: Synthetic oligonucleotide
  Antisense Strand to SEQ ID NO: 320373
uuaaacauccagaacucug

SEQ ID NO: 320375 - RNA, 19 nt, Artificial Sequence
  Description of Artificial Sequence: Synthetic oligonucleotide
  Sense Strand Starting at position 22 of SEQ ID NO: 315688
ggaugcaauuucuagucua

SEQ ID NO: 320376 - RNA, 19 nt, Artificial Sequence
  Description of Artificial Sequence: Synthetic oligonucleotide
  Antisense Strand to SEQ ID NO: 320375
uagacuagaaauugcaucc

SEQ ID NO: 320377 - RNA, 19 nt, Artificial Sequence
  Description of Artificial Sequence: Synthetic oligonucleotide
  Sense Strand Starting at position 22 of SEQ ID NO: 315843
guuguuuccuaccuguaaa

SEQ ID NO: 320378 - RNA, 19 nt, Artificial Sequence
  Description of Artificial Sequence: Synthetic oligonucleotide
  Antisense Strand to SEQ ID NO: 320377
uuuacagguaggaaacaac

SEQ ID NO: 320379 - RNA, 19 nt, Artificial Sequence
  Description of Artificial Sequence: Synthetic oligonucleotide
  Sense Strand Starting at position 22 of SEQ ID NO: 315980
caguguuucgauuaaccug

SEQ ID NO: 320380 - RNA, 19 nt, Artificial Sequence
  Description of Artificial Sequence: Synthetic oligonucleotide
  Antisense Strand to SEQ ID NO: 320379
cagguuaaucgaaacacug

SEQ ID NO: 320381 - RNA, 19 nt, Artificial Sequence
  Description of Artificial Sequence: Synthetic oligonucleotide
  Sense Strand Starting at position 22 of SEQ ID NO: 315987
ucgauuaaccugcagaucu

SEQ ID NO: 320382 - RNA, 19 nt, Artificial Sequence
  Description of Artificial Sequence: Synthetic oligonucleotide
  Antisense Strand to SEQ ID NO: 320381
agaucugcagguuaaucga

SEQ ID NO: 320383 - RNA, 19 nt, Artificial Sequence
  Description of Artificial Sequence: Synthetic oligonucleotide
  Sense Strand Starting at position 22 of SEQ ID NO: 316018
ggcucuaaaucaguagauu

SEQ ID NO: 320384 - RNA, 19 nt, Artificial Sequence
  Description of Artificial Sequence: Synthetic oligonucleotide
  Antisense Strand to SEQ ID NO: 320383
aaucuacugauuuagagcc

SEQ ID NO: 320385 - RNA, 19 nt, Artificial Sequence
  Description of Artificial Sequence: Synthetic oligonucleotide
  Sense Strand Starting at position 22 of SEQ ID NO: 316019
gcucuaaaucaguagauuc

SEQ ID NO: 320386 - RNA, 19 nt, Artificial Sequence
  Description of Artificial Sequence: Synthetic oligonucleotide
  Antisense Strand to SEQ ID NO: 320385
gaaucuacugauuuagagc

SEQ ID NO: 320387 - RNA, 19 nt, Artificial Sequence
  Description of Artificial Sequence: Synthetic oligonucleotide
  Sense Strand Starting at position 22 of SEQ ID NO: 316035
uucugaaugacgcgugaga

SEQ ID NO: 320388 - RNA, 19 nt, Artificial Sequence
  Description of Artificial Sequence: Synthetic oligonucleotide
  Antisense Strand to SEQ ID NO: 320387
ucucacgcgucauucagaa

SEQ ID NO: 320389 - RNA, 19 nt, Artificial Sequence
  Description of Artificial Sequence: Synthetic oligonucleotide
  Sense Strand Starting at position 22 of SEQ ID NO: 316037
cugaaugacgcgugagauc

SEQ ID NO: 320390 - RNA, 19 nt, Artificial Sequence
  Description of Artificial Sequence: Synthetic oligonucleotide
  Antisense Strand to SEQ ID NO: 320389
gaucucacgcgucauucag

SEQ ID NO: 320391 - RNA, 19 nt, Artificial Sequence
  Description of Artificial Sequence: Synthetic oligonucleotide
  Sense Strand Starting at position 22 of SEQ ID NO: 316044
acgcgugagauccugcauu

SEQ ID NO: 320392 - RNA, 19 nt, Artificial Sequence
  Description of Artificial Sequence: Synthetic oligonucleotide
  Antisense Strand to SEQ ID NO: 320391
aaugcaggaucucacgcgu

SEQ ID NO: 320393 - RNA, 19 nt, Artificial Sequence
  Description of Artificial Sequence: Synthetic oligonucleotide
  Sense Strand Starting at position 22 of SEQ ID NO: 316097
guccaugggccagacuuua

SEQ ID NO: 320394 - RNA, 19 nt, Artificial Sequence
  Description of Artificial Sequence: Synthetic oligonucleotide
  Antisense Strand to SEQ ID NO: 320393
uaaagucuggcccauggac

SEQ ID NO: 320395 - RNA, 19 nt, Artificial Sequence
  Description of Artificial Sequence: Synthetic oligonucleotide
  Sense Strand Starting at position 22 of SEQ ID NO: 316105
gccagacuuuaaguggcaa

SEQ ID NO: 320396 - RNA, 19 nt, Artificial Sequence
  Description of Artificial Sequence: Synthetic oligonucleotide
  Antisense Strand to SEQ ID NO: 320395
uugccacuuaaagucuggc

SEQ ID NO: 320397 - RNA, 19 nt, Artificial Sequence
  Description of Artificial Sequence: Synthetic oligonucleotide
  Sense Strand Starting at position 22 of SEQ ID NO: 316181
auaaaugaggccugaaguu

SEQ ID NO: 320398 - RNA, 19 nt, Artificial Sequence
  Description of Artificial Sequence: Synthetic oligonucleotide
  Antisense Strand to SEQ ID NO: 320397
aacuucaggccucauuuau

SEQ ID NO: 320399 - RNA, 19 nt, Artificial Sequence
  Description of Artificial Sequence: Synthetic oligonucleotide
  Sense Strand Starting at position 22 of SEQ ID NO: 316238
uaaagagugagguggauau

SEQ ID NO: 320400 - RNA, 19 nt, Artificial Sequence
  Description of Artificial Sequence: Synthetic oligonucleotide
  Antisense Strand to SEQ ID NO: 320399
auauccaccucacucuuua

SEQ ID NO: 320401 - RNA, 19 nt, Artificial Sequence
  Description of Artificial Sequence: Synthetic oligonucleotide
  Sense Strand Starting at position 22 of SEQ ID NO: 316380
acacgugcuccugaauuga

SEQ ID NO: 320402 - RNA, 19 nt, Artificial Sequence
  Description of Artificial Sequence: Synthetic oligonucleotide
  Antisense Strand to SEQ ID NO: 320401
ucaauucaggagcacgugu

SEQ ID NO: 320403 - RNA, 19 nt, Artificial Sequence
  Description of Artificial Sequence: Synthetic oligonucleotide
  Sense Strand Starting at position 22 of SEQ ID NO: 316390
cugaauugaucucaaacag

SEQ ID NO: 320404 - RNA, 19 nt, Artificial Sequence
  Description of Artificial Sequence: Synthetic oligonucleotide
  Antisense Strand to SEQ ID NO: 320403
cuguuugagaucaauucag

SEQ ID NO: 320405 - RNA, 19 nt, Artificial Sequence
  Description of Artificial Sequence: Synthetic oligonucleotide
  Sense Strand Starting at position 22 of SEQ ID NO: 316453
gcaagaguuacugaaaggu

SEQ ID NO: 320406 - RNA, 19 nt, Artificial Sequence
  Description of Artificial Sequence: Synthetic oligonucleotide
  Antisense Strand to SEQ ID NO: 320405
accuuucaguaacucuugc

SEQ ID NO: 320407 - RNA, 19 nt, Artificial Sequence
  Description of Artificial Sequence: Synthetic oligonucleotide
  Sense Strand Starting at position 22 of SEQ ID NO: 317267
gccuaagucuagccaauca

SEQ ID NO: 320408 - RNA, 19 nt, Artificial Sequence
  Description of Artificial Sequence: Synthetic oligonucleotide
  Antisense Strand to SEQ ID NO: 320407
ugauuggcuagacuuaggc

SEQ ID NO: 320409 - RNA, 19 nt, Artificial Sequence
  Description of Artificial Sequence: Synthetic oligonucleotide
  Sense Strand Starting at position 22 of SEQ ID NO: 317580
cgagauuccuguccaguga

SEQ ID NO: 320410 - RNA, 19 nt, Artificial Sequence
  Description of Artificial Sequence: Synthetic oligonucleotide
  Antisense Strand to SEQ ID NO: 320409
ucacuggacaggaaucucg

SEQ ID NO: 320411 - RNA, 19 nt, Artificial Sequence
  Description of Artificial Sequence: Synthetic oligonucleotide
  Sense Strand Starting at position 22 of SEQ ID NO: 317771
gaaugaaauuaugcgguau

SEQ ID NO: 320412 - RNA, 19 nt, Artificial Sequence
  Description of Artificial Sequence: Synthetic oligonucleotide
  Antisense Strand to SEQ ID NO: 320411
auaccgcauaauuucauuc

SEQ ID NO: 320413 - RNA, 19 nt, Artificial Sequence
  Description of Artificial Sequence: Synthetic oligonucleotide
  Sense Strand Starting at position 22 of SEQ ID NO: 317775
gaaauuaugcgguauccca

SEQ ID NO: 320414 - RNA, 19 nt, Artificial Sequence
  Description of Artificial Sequence: Synthetic oligonucleotide
  Antisense Strand to SEQ ID NO: 320413
ugggauaccgcauaauuuc

SEQ ID NO: 320415 - RNA, 19 nt, Artificial Sequence
  Description of Artificial Sequence: Synthetic oligonucleotide
  Sense Strand Starting at position 22 of SEQ ID NO: 318387
cgcucaaacccuuaagauu

SEQ ID NO: 320416 - RNA, 19 nt, Artificial Sequence
  Description of Artificial Sequence: Synthetic oligonucleotide
  Antisense Strand to SEQ ID NO: 320415
aaucuuaaggguuugagcg

SEQ ID NO: 320417 - RNA, 19 nt, Artificial Sequence
  Description of Artificial Sequence: Synthetic oligonucleotide
  Sense Strand Starting at position 22 of SEQ ID NO: 318395
cccuuaagauugcugccua

SEQ ID NO: 320418 - RNA, 19 nt, Artificial Sequence
  Description of Artificial Sequence: Synthetic oligonucleotide
  Antisense Strand to SEQ ID NO: 320417
uaggcagcaaucuuaaggg

SEQ ID NO: 320419 - RNA, 19 nt, Artificial Sequence
  Description of Artificial Sequence: Synthetic oligonucleotide
  Sense Strand Starting at position 22 of SEQ ID NO: 318415
ccuuguaauugauccuugu

SEQ ID NO: 320420 - RNA, 19 nt, Artificial Sequence
  Description of Artificial Sequence: Synthetic oligonucleotide
  Antisense Strand to SEQ ID NO: 320419
acaaggaucaauuacaagg

SEQ ID NO: 320421 - RNA, 19 nt, Artificial Sequence
  Description of Artificial Sequence: Synthetic oligonucleotide
  Sense Strand Starting at position 22 of SEQ ID NO: 318418
uguaauugauccuugucua

SEQ ID NO: 320422 - RNA, 19 nt, Artificial Sequence
  Description of Artificial Sequence: Synthetic oligonucleotide
  Antisense Strand to SEQ ID NO: 320421
uagacaaggaucaauuaca

SEQ ID NO: 320423 - RNA, 19 nt, Artificial Sequence
  Description of Artificial Sequence: Synthetic oligonucleotide
  Sense Strand Starting at position 22 of SEQ ID NO: 318419
guaauugauccuugucuag

SEQ ID NO: 320424 - RNA, 19 nt, Artificial Sequence
  Description of Artificial Sequence: Synthetic oligonucleotide
  Antisense Strand to SEQ ID NO: 320423
cuagacaaggaucaauuac

SEQ ID NO: 320425 - RNA, 19 nt, Artificial Sequence
  Description of Artificial Sequence: Synthetic oligonucleotide
  Sense Strand Starting at position 22 of SEQ ID NO: 318421
aauugauccuugucuagag

SEQ ID NO: 320426 - RNA, 19 nt, Artificial Sequence
  Description of Artificial Sequence: Synthetic oligonucleotide
  Antisense Strand to SEQ ID NO: 320425
cucuagacaaggaucaauu

SEQ ID NO: 320427 - RNA, 19 nt, Artificial Sequence
  Description of Artificial Sequence: Synthetic oligonucleotide
  Sense Strand Starting at position 22 of SEQ ID NO: 318422
auugauccuugucuagagu

SEQ ID NO: 320428 - RNA, 19 nt, Artificial Sequence
  Description of Artificial Sequence: Synthetic oligonucleotide
  Antisense Strand to SEQ ID NO: 320427
acucuagacaaggaucaau

SEQ ID NO: 320429 - RNA, 19 nt, Artificial Sequence
  Description of Artificial Sequence: Synthetic oligonucleotide
  Sense Strand Starting at position 22 of SEQ ID NO: 318425
gauccuugucuagagucua

SEQ ID NO: 320430 - RNA, 19 nt, Artificial Sequence
  Description of Artificial Sequence: Synthetic oligonucleotide
  Antisense Strand to SEQ ID NO: 320429
uagacucuagacaaggauc

SEQ ID NO: 320431 - RNA, 19 nt, Artificial Sequence
  Description of Artificial Sequence: Synthetic oligonucleotide
  Sense Strand Starting at position 22 of SEQ ID NO: 318430
uugucuagagucuagacau

SEQ ID NO: 320432 - RNA, 19 nt, Artificial Sequence
  Description of Artificial Sequence: Synthetic oligonucleotide
  Antisense Strand to SEQ ID NO: 320431
augucuagacucuagacaa

SEQ ID NO: 320433 - RNA, 19 nt, Artificial Sequence
  Description of Artificial Sequence: Synthetic oligonucleotide
  Sense Strand Starting at position 22 of SEQ ID NO: 318584
auauaaucacaguguaucu

SEQ ID NO: 320434 - RNA, 19 nt, Artificial Sequence
  Description of Artificial Sequence: Synthetic oligonucleotide
  Antisense Strand to SEQ ID NO: 320433
agauacacugugauuauau

SEQ ID NO: 320435 - RNA, 19 nt, Artificial Sequence
  Description of Artificial Sequence: Synthetic oligonucleotide
  Sense Strand Starting at position 22 of SEQ ID NO: 318620
cuauuaacccagugagaua

SEQ ID NO: 320436 - RNA, 19 nt, Artificial Sequence
  Description of Artificial Sequence: Synthetic oligonucleotide
  Antisense Strand to SEQ ID NO: 320435
uaucucacuggguuaauag

SEQ ID NO: 320437 - RNA, 19 nt, Artificial Sequence
  Description of Artificial Sequence: Synthetic oligonucleotide
  Sense Strand Starting at position 22 of SEQ ID NO: 318632
ugagauaaugcagaugugu

SEQ ID NO: 320438 - RNA, 19 nt, Artificial Sequence
  Description of Artificial Sequence: Synthetic oligonucleotide
  Antisense Strand to SEQ ID NO: 320437
acacaucugcauuaucuca

SEQ ID NO: 320439 - RNA, 19 nt, Artificial Sequence
  Description of Artificial Sequence: Synthetic oligonucleotide
  Sense Strand Starting at position 22 of SEQ ID NO: 318634
agauaaugcagaugugugu

SEQ ID NO: 320440 - RNA, 19 nt, Artificial Sequence
  Description of Artificial Sequence: Synthetic oligonucleotide
  Antisense Strand to SEQ ID NO: 320439
acacacaucugcauuaucu

SEQ ID NO: 320441 - RNA, 19 nt, Artificial Sequence
  Description of Artificial Sequence: Synthetic oligonucleotide
  Sense Strand Starting at position 22 of SEQ ID NO: 318769
uugagcuaagaaugauuau

SEQ ID NO: 320442 - RNA, 19 nt, Artificial Sequence
  Description of Artificial Sequence: Synthetic oligonucleotide
  Antisense Strand to SEQ ID NO: 320441
auaaucauucuuagcucaa

SEQ ID NO: 320443 - RNA, 19 nt, Artificial Sequence
  Description of Artificial Sequence: Synthetic oligonucleotide
  Sense Strand Starting at position 23 of SEQ ID NO: 315258
ucaauaaaguucuuugaga

SEQ ID NO: 320444 - RNA, 19 nt, Artificial Sequence
  Description of Artificial Sequence: Synthetic oligonucleotide
  Antisense Strand to SEQ ID NO: 320443
ucucaaagaacuuuauuga

SEQ ID NO: 320445 - RNA, 19 nt, Artificial Sequence
  Description of Artificial Sequence: Synthetic oligonucleotide
  Sense Strand Starting at position 23 of SEQ ID NO: 315322
uuauguucccuugaccuga

SEQ ID NO: 320446 - RNA, 19 nt, Artificial Sequence
  Description of Artificial Sequence: Synthetic oligonucleotide
  Antisense Strand to SEQ ID NO: 320445
ucaggucaagggaacauaa

SEQ ID NO: 320447 - RNA, 19 nt, Artificial Sequence
  Description of Artificial Sequence: Synthetic oligonucleotide
  Sense Strand Starting at position 23 of SEQ ID NO: 315327
uucccuugaccugaguuau

SEQ ID NO: 320448 - RNA, 19 nt, Artificial Sequence
  Description of Artificial Sequence: Synthetic oligonucleotide
  Antisense Strand to SEQ ID NO: 320447
auaacucaggucaagggaa

SEQ ID NO: 320449 - RNA, 19 nt, Artificial Sequence
  Description of Artificial Sequence: Synthetic oligonucleotide
  Sense Strand Starting at position 23 of SEQ ID NO: 315338
ugaguuauaguacauagcu

SEQ ID NO: 320450 - RNA, 19 nt, Artificial Sequence
  Description of Artificial Sequence: Synthetic oligonucleotide
  Antisense Strand to SEQ ID NO: 320449
agcuauguacuauaacuca

SEQ ID NO: 320451 - RNA, 19 nt, Artificial Sequence
  Description of Artificial Sequence: Synthetic oligonucleotide
  Sense Strand Starting at position 23 of SEQ ID NO: 315437
gaagaaauguugcuauaga

SEQ ID NO: 320452 - RNA, 19 nt, Artificial Sequence
  Description of Artificial Sequence: Synthetic oligonucleotide
  Antisense Strand to SEQ ID NO: 320451
ucuauagcaacauuucuuc

SEQ ID NO: 320453 - RNA, 19 nt, Artificial Sequence
  Description of Artificial Sequence: Synthetic oligonucleotide
  Sense Strand Starting at position 23 of SEQ ID NO: 315589
acaggaagcauucgaggaa

SEQ ID NO: 320454 - RNA, 19 nt, Artificial Sequence
  Description of Artificial Sequence: Synthetic oligonucleotide
  Antisense Strand to SEQ ID NO: 320453
uuccucgaaugcuuccugu

SEQ ID NO: 320455 - RNA, 19 nt, Artificial Sequence
  Description of Artificial Sequence: Synthetic oligonucleotide
  Sense Strand Starting at position 23 of SEQ ID NO: 315592
ggaagcauucgaggaaugu

SEQ ID NO: 320456 - RNA, 19 nt, Artificial Sequence
  Description of Artificial Sequence: Synthetic oligonucleotide
  Antisense Strand to SEQ ID NO: 320455
acauuccucgaaugcuucc

SEQ ID NO: 320457 - RNA, 19 nt, Artificial Sequence
  Description of Artificial Sequence: Synthetic oligonucleotide
  Sense Strand Starting at position 23 of SEQ ID NO: 315593
gaagcauucgaggaauguu

SEQ ID NO: 320458 - RNA, 19 nt, Artificial Sequence
  Description of Artificial Sequence: Synthetic oligonucleotide
  Antisense Strand to SEQ ID NO: 320457
aacauuccucgaaugcuuc

SEQ ID NO: 320459 - RNA, 19 nt, Artificial Sequence
  Description of Artificial Sequence: Synthetic oligonucleotide
  Sense Strand Starting at position 23 of SEQ ID NO: 315602
gaggaauguuggcucuuac

SEQ ID NO: 320460 - RNA, 19 nt, Artificial Sequence
  Description of Artificial Sequence: Synthetic oligonucleotide
  Antisense Strand to SEQ ID NO: 320459
guaagagccaacauuccuc

SEQ ID NO: 320461 - RNA, 19 nt, Artificial Sequence
  Description of Artificial Sequence: Synthetic oligonucleotide
  Sense Strand Starting at position 23 of SEQ ID NO: 315611
uggcucuuacuauaguaaa

SEQ ID NO: 320462 - RNA, 19 nt, Artificial Sequence
  Description of Artificial Sequence: Synthetic oligonucleotide
  Antisense Strand to SEQ ID NO: 320461
uuuacuauaguaagagcca

SEQ ID NO: 320463 - RNA, 19 nt, Artificial Sequence
  Description of Artificial Sequence: Synthetic oligonucleotide
  Sense Strand Starting at position 23 of SEQ ID NO: 316234
cccaucuaccgguaaggaa

SEQ ID NO: 320464 - RNA, 19 nt, Artificial Sequence
  Description of Artificial Sequence: Synthetic oligonucleotide
  Antisense Strand to SEQ ID NO: 320463
uuccuuaccgguagauggg

SEQ ID NO: 320465 - RNA, 19 nt, Artificial Sequence
  Description of Artificial Sequence: Synthetic oligonucleotide
  Sense Strand Starting at position 23 of SEQ ID NO: 316254
cuggaucagagauguccua

SEQ ID NO: 320466 - RNA, 19 nt, Artificial Sequence
  Description of Artificial Sequence: Synthetic oligonucleotide
  Antisense Strand to SEQ ID NO: 320465
uaggacaucucugauccag

SEQ ID NO: 320467 - RNA, 19 nt, Artificial Sequence
  Description of Artificial Sequence: Synthetic oligonucleotide
  Sense Strand Starting at position 23 of SEQ ID NO: 316285
agcaguuuaugccucauuu

SEQ ID NO: 320468 - RNA, 19 nt, Artificial Sequence
  Description of Artificial Sequence: Synthetic oligonucleotide
  Antisense Strand to SEQ ID NO: 320467
aaaugaggcauaaacugcu

SEQ ID NO: 320469 - RNA, 19 nt, Artificial Sequence
  Description of Artificial Sequence: Synthetic oligonucleotide
  Sense Strand Starting at position 23 of SEQ ID NO: 316354
uuuaguuacugaucaguaa

SEQ ID NO: 320470 - RNA, 19 nt, Artificial Sequence
  Description of Artificial Sequence: Synthetic oligonucleotide
  Antisense Strand to SEQ ID NO: 320469
uuacugaucaguaacuaaa

SEQ ID NO: 320471 - RNA, 19 nt, Artificial Sequence
  Description of Artificial Sequence: Synthetic oligonucleotide
  Sense Strand Starting at position 23 of SEQ ID NO: 316355
uuaguuacugaucaguaag

SEQ ID NO: 320472 - RNA, 19 nt, Artificial Sequence
  Description of Artificial Sequence: Synthetic oligonucleotide
  Antisense Strand to SEQ ID NO: 320471
cuuacugaucaguaacuaa

SEQ ID NO: 320473 - RNA, 19 nt, Artificial Sequence
  Description of Artificial Sequence: Synthetic oligonucleotide
  Sense Strand Starting at position 23 of SEQ ID NO: 316357
aguuacugaucaguaaggu

SEQ ID NO: 320474 - RNA, 19 nt, Artificial Sequence
  Description of Artificial Sequence: Synthetic oligonucleotide
  Antisense Strand to SEQ ID NO: 320473
accuuacugaucaguaacu

SEQ ID NO: 320475 - RNA, 19 nt, Artificial Sequence
  Description of Artificial Sequence: Synthetic oligonucleotide
  Sense Strand Starting at position 23 of SEQ ID NO: 316358
guuacugaucaguaagguu

SEQ ID NO: 320476 - RNA, 19 nt, Artificial Sequence
  Description of Artificial Sequence: Synthetic oligonucleotide
  Antisense Strand to SEQ ID NO: 320475
aaccuuacugaucaguaac

SEQ ID NO: 320477 - RNA, 19 nt, Artificial Sequence
  Description of Artificial Sequence: Synthetic oligonucleotide
  Sense Strand Starting at position 23 of SEQ ID NO: 316384
uguguauacaucuaagguc

SEQ ID NO: 320478 - RNA, 19 nt, Artificial Sequence
  Description of Artificial Sequence: Synthetic oligonucleotide
  Antisense Strand to SEQ ID NO: 320477
gaccuuagauguauacaca

SEQ ID NO: 320479 - RNA, 19 nt, Artificial Sequence
  Description of Artificial Sequence: Synthetic oligonucleotide
  Sense Strand Starting at position 23 of SEQ ID NO: 316444
uuuaguuuggucuaauagu

SEQ ID NO: 320480 - RNA, 19 nt, Artificial Sequence
  Description of Artificial Sequence: Synthetic oligonucleotide
  Antisense Strand to SEQ ID NO: 320479
acuauuagaccaaacuaaa

SEQ ID NO: 320481 - RNA, 19 nt, Artificial Sequence
  Description of Artificial Sequence: Synthetic oligonucleotide
  Sense Strand Starting at position 23 of SEQ ID NO: 316537
ugacuuccauuaucugaga

SEQ ID NO: 320482 - RNA, 19 nt, Artificial Sequence
  Description of Artificial Sequence: Synthetic oligonucleotide
  Antisense Strand to SEQ ID NO: 320481
ucucagauaauggaaguca

SEQ ID NO: 320483 - RNA, 19 nt, Artificial Sequence
  Description of Artificial Sequence: Synthetic oligonucleotide
  Sense Strand Starting at position 23 of SEQ ID NO: 316553
agauuuccuuaacaaagga

SEQ ID NO: 320484 - RNA, 19 nt, Artificial Sequence
  Description of Artificial Sequence: Synthetic oligonucleotide
  Antisense Strand to SEQ ID NO: 320483
uccuuuguuaaggaaaucu

SEQ ID NO: 320485 - RNA, 19 nt, Artificial Sequence
  Description of Artificial Sequence: Synthetic oligonucleotide
  Sense Strand Starting at position 23 of SEQ ID NO: 317349
gugauuaguccugacugug

SEQ ID NO: 320486 - RNA, 19 nt, Artificial Sequence
  Description of Artificial Sequence: Synthetic oligonucleotide
  Antisense Strand to SEQ ID NO: 320485
cacagucaggacuaaucac

SEQ ID NO: 320487 - RNA, 19 nt, Artificial Sequence
  Description of Artificial Sequence: Synthetic oligonucleotide
  Sense Strand Starting at position 23 of SEQ ID NO: 317366
uguagaugccagcaacaua

SEQ ID NO: 320488 - RNA, 19 nt, Artificial Sequence
  Description of Artificial Sequence: Synthetic oligonucleotide
  Antisense Strand to SEQ ID NO: 320487
uauguugcuggcaucuaca

SEQ ID NO: 320489 - RNA, 19 nt, Artificial Sequence
  Description of Artificial Sequence: Synthetic oligonucleotide
  Sense Strand Starting at position 23 of SEQ ID NO: 317431
gcaucuuauuucguccuca

SEQ ID NO: 320490 - RNA, 19 nt, Artificial Sequence
  Description of Artificial Sequence: Synthetic oligonucleotide
  Antisense Strand to SEQ ID NO: 320489
ugaggacgaaauaagaugc

SEQ ID NO: 320491 - RNA, 19 nt, Artificial Sequence
  Description of Artificial Sequence: Synthetic oligonucleotide
  Sense Strand Starting at position 23 of SEQ ID NO: 317559
acacuccuugggugacuau

SEQ ID NO: 320492 - RNA, 19 nt, Artificial Sequence
  Description of Artificial Sequence: Synthetic oligonucleotide
  Antisense Strand to SEQ ID NO: 320491
auagucacccaaggagugu

SEQ ID NO: 320493 - RNA, 19 nt, Artificial Sequence
  Description of Artificial Sequence: Synthetic oligonucleotide
  Sense Strand Starting at position 23 of SEQ ID NO: 317599
ugaauacgauucccaaaua

SEQ ID NO: 320494 - RNA, 19 nt, Artificial Sequence
  Description of Artificial Sequence: Synthetic oligonucleotide
  Antisense Strand to SEQ ID NO: 320493
uauuugggaaucguauuca

SEQ ID NO: 320495 - RNA, 19 nt, Artificial Sequence
  Description of Artificial Sequence: Synthetic oligonucleotide
  Sense Strand Starting at position 23 of SEQ ID NO: 317681
ccaucuggauugucuacaa

SEQ ID NO: 320496 - RNA, 19 nt, Artificial Sequence
  Description of Artificial Sequence: Synthetic oligonucleotide
  Antisense Strand to SEQ ID NO: 320495
uuguagacaauccagaugg

SEQ ID NO: 320497 - RNA, 19 nt, Artificial Sequence
  Description of Artificial Sequence: Synthetic oligonucleotide
  Sense Strand Starting at position 23 of SEQ ID NO: 317685
cuggauugucuacaaggca

SEQ ID NO: 320498 - RNA, 19 nt, Artificial Sequence
  Description of Artificial Sequence: Synthetic oligonucleotide
  Antisense Strand to SEQ ID NO: 320497
ugccuuguagacaauccag

SEQ ID NO: 320499 - RNA, 19 nt, Artificial Sequence
  Description of Artificial Sequence: Synthetic oligonucleotide
  Sense Strand Starting at position 23 of SEQ ID NO: 317758
ucaccaucucaguaaaugu

SEQ ID NO: 320500 - RNA, 19 nt, Artificial Sequence
  Description of Artificial Sequence: Synthetic oligonucleotide
  Antisense Strand to SEQ ID NO: 320499
acauuuacugagaugguga

SEQ ID NO: 320501 - RNA, 19 nt, Artificial Sequence
  Description of Artificial Sequence: Synthetic oligonucleotide
  Sense Strand Starting at position 23 of SEQ ID NO: 318072
ugcuuuaaacucuaauggu

SEQ ID NO: 320502 - RNA, 19 nt, Artificial Sequence
  Description of Artificial Sequence: Synthetic oligonucleotide
  Antisense Strand to SEQ ID NO: 320501
accauuagaguuuaaagca

SEQ ID NO: 320503 - RNA, 19 nt, Artificial Sequence
  Description of Artificial Sequence: Synthetic oligonucleotide
  Sense Strand Starting at position 23 of SEQ ID NO: 318389
agcauuagucuguaauuau

SEQ ID NO: 320504 - RNA, 19 nt, Artificial Sequence
  Description of Artificial Sequence: Synthetic oligonucleotide
  Antisense Strand to SEQ ID NO: 320503
auaauuacagacuaaugcu

SEQ ID NO: 320505 - RNA, 19 nt, Artificial Sequence
  Description of Artificial Sequence: Synthetic oligonucleotide
  Sense Strand Starting at position 23 of SEQ ID NO: 318494
gcaugugaugacuaaauac

SEQ ID NO: 320506 - RNA, 19 nt, Artificial Sequence
  Description of Artificial Sequence: Synthetic oligonucleotide
  Antisense Strand to SEQ ID NO: 320505
guauuuagucaucacaugc

SEQ ID NO: 320507 - RNA, 19 nt, Artificial Sequence
  Description of Artificial Sequence: Synthetic oligonucleotide
  Sense Strand Starting at position 23 of SEQ ID NO: 318557
aggugagugaagugggaua

SEQ ID NO: 320508 - RNA, 19 nt, Artificial Sequence
  Description of Artificial Sequence: Synthetic oligonucleotide
  Antisense Strand to SEQ ID NO: 320507
uaucccacuucacucaccu

SEQ ID NO: 320509 - RNA, 19 nt, Artificial Sequence
  Description of Artificial Sequence: Synthetic oligonucleotide
  Sense Strand Starting at position 23 of SEQ ID NO: 318601
uaagcuauugaguagcaaa

SEQ ID NO: 320510 - RNA, 19 nt, Artificial Sequence
  Description of Artificial Sequence: Synthetic oligonucleotide
  Antisense Strand to SEQ ID NO: 320509
uuugcuacucaauagcuua

SEQ ID NO: 320511 - RNA, 19 nt, Artificial Sequence
  Description of Artificial Sequence: Synthetic oligonucleotide
  Sense Strand Starting at position 23 of SEQ ID NO: 318631
agcauaaaguacucaagaa

SEQ ID NO: 320512 - RNA, 19 nt, Artificial Sequence
  Description of Artificial Sequence: Synthetic oligonucleotide
  Antisense Strand to SEQ ID NO: 320511
uucuugaguacuuuaugcu

SEQ ID NO: 320513 - RNA, 19 nt, Artificial Sequence
  Description of Artificial Sequence: Synthetic oligonucleotide
  Sense Strand Starting at position 23 of SEQ ID NO: 318704
cagccagaacucugggaua

SEQ ID NO: 320514 - RNA, 19 nt, Artificial Sequence
  Description of Artificial Sequence: Synthetic oligonucleotide
  Antisense Strand to SEQ ID NO: 320513
uaucccagaguucuggcug

SEQ ID NO: 320515 - RNA, 19 nt, Artificial Sequence
  Description of Artificial Sequence: Synthetic oligonucleotide
  Sense Strand Starting at position 23 of SEQ ID NO: 318706
gccagaacucugggauaag

SEQ ID NO: 320516 - RNA, 19 nt, Artificial Sequence
  Description of Artificial Sequence: Synthetic oligonucleotide
  Antisense Strand to SEQ ID NO: 320515
cuuaucccagaguucuggc

SEQ ID NO: 320517 - RNA, 19 nt, Artificial Sequence
  Description of Artificial Sequence: Synthetic oligonucleotide
  Sense Strand Starting at position 23 of SEQ ID NO: 318855
ggguaagguggagguuuaa

SEQ ID NO: 320518 - RNA, 19 nt, Artificial Sequence
  Description of Artificial Sequence: Synthetic oligonucleotide
  Antisense Strand to SEQ ID NO: 320517
uuaaaccuccaccuuaccc

SEQ ID NO: 320519 - RNA, 19 nt, Artificial Sequence
  Description of Artificial Sequence: Synthetic oligonucleotide
  Sense Strand Starting at position 23 of SEQ ID NO: 319069
cguguaaucccagcguuua

SEQ ID NO: 320520 - RNA, 19 nt, Artificial Sequence
  Description of Artificial Sequence: Synthetic oligonucleotide
  Antisense Strand to SEQ ID NO: 320519
uaaacgcugggauuacacg

SEQ ID NO: 320521 - RNA, 19 nt, Artificial Sequence
  Description of Artificial Sequence: Synthetic oligonucleotide
  Sense Strand Starting at position 23 of SEQ ID NO: 319093
gccauagugggagaucacu

SEQ ID NO: 320522 - RNA, 19 nt, Artificial Sequence
  Description of Artificial Sequence: Synthetic oligonucleotide
  Antisense Strand to SEQ ID NO: 320521
agugaucucccacuauggc

SEQ ID NO: 320523 - RNA, 19 nt, Artificial Sequence
  Description of Artificial Sequence: Synthetic oligonucleotide
  Sense Strand Starting at position 24 of SEQ ID NO: 315285
agcacugagcaacaugaua

SEQ ID NO: 320524 - RNA, 19 nt, Artificial Sequence
  Description of Artificial Sequence: Synthetic oligonucleotide
  Antisense Strand to SEQ ID NO: 320523
uaucauguugcucagugcu

SEQ ID NO: 320525 - RNA, 19 nt, Artificial Sequence
  Description of Artificial Sequence: Synthetic oligonucleotide
  Sense Strand Starting at position 24 of SEQ ID NO: 315293
gcaacaugauaccaugguu

SEQ ID NO: 320526 - RNA, 19 nt, Artificial Sequence
  Description of Artificial Sequence: Synthetic oligonucleotide
  Antisense Strand to SEQ ID NO: 320525
aaccaugguaucauguugc

SEQ ID NO: 320527 - RNA, 19 nt, Artificial Sequence
  Description of Artificial Sequence: Synthetic oligonucleotide
  Sense Strand Starting at position 24 of SEQ ID NO: 315296
acaugauaccaugguucuu

SEQ ID NO: 320528 - RNA, 19 nt, Artificial Sequence
  Description of Artificial Sequence: Synthetic oligonucleotide
  Antisense Strand to SEQ ID NO: 320527
aagaaccaugguaucaugu

SEQ ID NO: 320529 - RNA, 19 nt, Artificial Sequence
  Description of Artificial Sequence: Synthetic oligonucleotide
  Sense Strand Starting at position 24 of SEQ ID NO: 315314
ucauuagcaccaugaggua

SEQ ID NO: 320530 - RNA, 19 nt, Artificial Sequence
  Description of Artificial Sequence: Synthetic oligonucleotide
  Antisense Strand to SEQ ID NO: 320529
uaccucauggugcuaauga

SEQ ID NO: 320531 - RNA, 19 nt, Artificial Sequence
  Description of Artificial Sequence: Synthetic oligonucleotide
  Sense Strand Starting at position 24 of SEQ ID NO: 315533
ccgugaucuguugccgguu

SEQ ID NO: 320532 - RNA, 19 nt, Artificial Sequence
  Description of Artificial Sequence: Synthetic oligonucleotide
  Antisense Strand to SEQ ID NO: 320531
aaccggcaacagaucacgg

SEQ ID NO: 320533 - RNA, 19 nt, Artificial Sequence
  Description of Artificial Sequence: Synthetic oligonucleotide
  Sense Strand Starting at position 24 of SEQ ID NO: 315565
agcgcuggcucaguaauca

SEQ ID NO: 320534 - RNA, 19 nt, Artificial Sequence
  Description of Artificial Sequence: Synthetic oligonucleotide
  Antisense Strand to SEQ ID NO: 320533
ugauuacugagccagcgcu

SEQ ID NO: 320535 - RNA, 19 nt, Artificial Sequence
  Description of Artificial Sequence: Synthetic oligonucleotide
  Sense Strand Starting at position 24 of SEQ ID NO: 315600
cggcuucagcuuuagguua

SEQ ID NO: 320536 - RNA, 19 nt, Artificial Sequence
  Description of Artificial Sequence: Synthetic oligonucleotide
  Antisense Strand to SEQ ID NO: 320535
uaaccuaaagcugaagccg

SEQ ID NO: 320537 - RNA, 19 nt, Artificial Sequence
  Description of Artificial Sequence: Synthetic oligonucleotide
  Sense Strand Starting at position 24 of SEQ ID NO: 315613
agguuauagucauagauau

SEQ ID NO: 320538 - RNA, 19 nt, Artificial Sequence
  Description of Artificial Sequence: Synthetic oligonucleotide
  Antisense Strand to SEQ ID NO: 320537
auaucuaugacuauaaccu

SEQ ID NO: 320539 - RNA, 19 nt, Artificial Sequence
  Description of Artificial Sequence: Synthetic oligonucleotide
  Sense Strand Starting at position 24 of SEQ ID NO: 315649
auguccucccaugaaguaa

SEQ ID NO: 320540 - RNA, 19 nt, Artificial Sequence
  Description of Artificial Sequence: Synthetic oligonucleotide
  Antisense Strand to SEQ ID NO: 320539
uuacuucaugggaggacau

SEQ ID NO: 320541 - RNA, 19 nt, Artificial Sequence
  Description of Artificial Sequence: Synthetic oligonucleotide
  Sense Strand Starting at position 24 of SEQ ID NO: 315745
gucuucgacccucaguuaa

SEQ ID NO: 320542 - RNA, 19 nt, Artificial Sequence
  Description of Artificial Sequence: Synthetic oligonucleotide
  Antisense Strand to SEQ ID NO: 320541
uuaacugagggucgaagac

SEQ ID NO: 320543 - RNA, 19 nt, Artificial Sequence
  Description of Artificial Sequence: Synthetic oligonucleotide
  Sense Strand Starting at position 24 of SEQ ID NO: 315747
cuucgacccucaguuaauu

SEQ ID NO: 320544 - RNA, 19 nt, Artificial Sequence
  Description of Artificial Sequence: Synthetic oligonucleotide
  Antisense Strand to SEQ ID NO: 320543
aauuaacugagggucgaag

SEQ ID NO: 320545 - RNA, 19 nt, Artificial Sequence
  Description of Artificial Sequence: Synthetic oligonucleotide
  Sense Strand Starting at position 24 of SEQ ID NO: 315768
ccgcguuuauuaccaauau

SEQ ID NO: 320546 - RNA, 19 nt, Artificial Sequence
  Description of Artificial Sequence: Synthetic oligonucleotide
  Antisense Strand to SEQ ID NO: 320545
auauugguaauaaacgcgg

SEQ ID NO: 320547 - RNA, 19 nt, Artificial Sequence
  Description of Artificial Sequence: Synthetic oligonucleotide
  Sense Strand Starting at position 24 of SEQ ID NO: 315785
aucccuuuaugggcaauaa

SEQ ID NO: 320548 - RNA, 19 nt, Artificial Sequence
  Description of Artificial Sequence: Synthetic oligonucleotide
  Antisense Strand to SEQ ID NO: 320547
uuauugcccauaaagggau

SEQ ID NO: 320549 - RNA, 19 nt, Artificial Sequence
  Description of Artificial Sequence: Synthetic oligonucleotide
  Sense Strand Starting at position 24 of SEQ ID NO: 316163
cggccuaccucugcgauuu

SEQ ID NO: 320550 - RNA, 19 nt, Artificial Sequence
  Description of Artificial Sequence: Synthetic oligonucleotide
  Antisense Strand to SEQ ID NO: 320549
aaaucgcagagguaggccg

SEQ ID NO: 320551 - RNA, 19 nt, Artificial Sequence
  Description of Artificial Sequence: Synthetic oligonucleotide
  Sense Strand Starting at position 24 of SEQ ID NO: 316318
cuuaaaugaauucguucga

SEQ ID NO: 320552 - RNA, 19 nt, Artificial Sequence
  Description of Artificial Sequence: Synthetic oligonucleotide
  Antisense Strand to SEQ ID NO: 320551
ucgaacgaauucauuuaag

SEQ ID NO: 320553 - RNA, 19 nt, Artificial Sequence
  Description of Artificial Sequence: Synthetic oligonucleotide
  Sense Strand Starting at position 24 of SEQ ID NO: 316319
uuaaaugaauucguucgau

SEQ ID NO: 320554 - RNA, 19 nt, Artificial Sequence
  Description of Artificial Sequence: Synthetic oligonucleotide
  Antisense Strand to SEQ ID NO: 320553
aucgaacgaauucauuuaa

SEQ ID NO: 320555 - RNA, 19 nt, Artificial Sequence
  Description of Artificial Sequence: Synthetic oligonucleotide
  Sense Strand Starting at position 24 of SEQ ID NO: 316322
aaugaauucguucgauaac

SEQ ID NO: 320556 - RNA, 19 nt, Artificial Sequence
  Description of Artificial Sequence: Synthetic oligonucleotide
  Antisense Strand to SEQ ID NO: 320555
guuaucgaacgaauucauu

SEQ ID NO: 320557 - RNA, 19 nt, Artificial Sequence
  Description of Artificial Sequence: Synthetic oligonucleotide
  Sense Strand Starting at position 24 of SEQ ID NO: 316325
gaauucguucgauaacuuu

SEQ ID NO: 320558 - RNA, 19 nt, Artificial Sequence
  Description of Artificial Sequence: Synthetic oligonucleotide
  Antisense Strand to SEQ ID NO: 320557
aaaguuaucgaacgaauuc

SEQ ID NO: 320559 - RNA, 19 nt, Artificial Sequence
  Description of Artificial Sequence: Synthetic oligonucleotide
  Sense Strand Starting at position 24 of SEQ ID NO: 316328
uucguucgauaacuuuaua

SEQ ID NO: 320560 - RNA, 19 nt, Artificial Sequence
  Description of Artificial Sequence: Synthetic oligonucleotide
  Antisense Strand to SEQ ID NO: 320559
uauaaaguuaucgaacgaa

SEQ ID NO: 320561 - RNA, 19 nt, Artificial Sequence
  Description of Artificial Sequence: Synthetic oligonucleotide
  Sense Strand Starting at position 24 of SEQ ID NO: 316331
guucgauaacuuuauacgu

SEQ ID NO: 320562 - RNA, 19 nt, Artificial Sequence
  Description of Artificial Sequence: Synthetic oligonucleotide
  Antisense Strand to SEQ ID NO: 320561
acguauaaaguuaucgaac

SEQ ID NO: 320563 - RNA, 19 nt, Artificial Sequence
  Description of Artificial Sequence: Synthetic oligonucleotide
  Sense Strand Starting at position 24 of SEQ ID NO: 316400
ugugguacccuuggagauu

SEQ ID NO: 320564 - RNA, 19 nt, Artificial Sequence
  Description of Artificial Sequence: Synthetic oligonucleotide
  Antisense Strand to SEQ ID NO: 320563
aaucuccaaggguaccaca

SEQ ID NO: 320565 - RNA, 19 nt, Artificial Sequence
  Description of Artificial Sequence: Synthetic oligonucleotide
  Sense Strand Starting at position 24 of SEQ ID NO: 316401
gugguacccuuggagauuu

SEQ ID NO: 320566 - RNA, 19 nt, Artificial Sequence
  Description of Artificial Sequence: Synthetic oligonucleotide
  Antisense Strand to SEQ ID NO: 320565
aaaucuccaaggguaccac

SEQ ID NO: 320567 - RNA, 19 nt, Artificial Sequence
  Description of Artificial Sequence: Synthetic oligonucleotide
  Sense Strand Starting at position 24 of SEQ ID NO: 316752
ggccgauaauguucgggua

SEQ ID NO: 320568 - RNA, 19 nt, Artificial Sequence
  Description of Artificial Sequence: Synthetic oligonucleotide
  Antisense Strand to SEQ ID NO: 320567
uacccgaacauuaucggcc

SEQ ID NO: 320569 - RNA, 19 nt, Artificial Sequence
  Description of Artificial Sequence: Synthetic oligonucleotide
  Sense Strand Starting at position 24 of SEQ ID NO: 317036
caccgugcuccucauguua

SEQ ID NO: 320570 - RNA, 19 nt, Artificial Sequence
  Description of Artificial Sequence: Synthetic oligonucleotide
  Antisense Strand to SEQ ID NO: 320569
uaacaugaggagcacggug

SEQ ID NO: 320571 - RNA, 19 nt, Artificial Sequence
  Description of Artificial Sequence: Synthetic oligonucleotide
  Sense Strand Starting at position 24 of SEQ ID NO: 317226
acggaauucugguuaacug

SEQ ID NO: 320572 - RNA, 19 nt, Artificial Sequence
  Description of Artificial Sequence: Synthetic oligonucleotide
  Antisense Strand to SEQ ID NO: 320571
caguuaaccagaauuccgu

SEQ ID NO: 320573 - RNA, 19 nt, Artificial Sequence
  Description of Artificial Sequence: Synthetic oligonucleotide
  Sense Strand Starting at position 24 of SEQ ID NO: 317266
agaauucgcccuugaaacu

SEQ ID NO: 320574 - RNA, 19 nt, Artificial Sequence
  Description of Artificial Sequence: Synthetic oligonucleotide
  Antisense Strand to SEQ ID NO: 320573
aguuucaagggcgaauucu

SEQ ID NO: 320575 - RNA, 19 nt, Artificial Sequence
  Description of Artificial Sequence: Synthetic oligonucleotide
  Sense Strand Starting at position 24 of SEQ ID NO: 317330
ggcagugucugcuucugaa

SEQ ID NO: 320576 - RNA, 19 nt, Artificial Sequence
  Description of Artificial Sequence: Synthetic oligonucleotide
  Antisense Strand to SEQ ID NO: 320575
uucagaagcagacacugcc

SEQ ID NO: 320577 - RNA, 19 nt, Artificial Sequence
  Description of Artificial Sequence: Synthetic oligonucleotide
  Sense Strand Starting at position 24 of SEQ ID NO: 317405
cguuuauuauuguuucugu

SEQ ID NO: 320578 - RNA, 19 nt, Artificial Sequence
  Description of Artificial Sequence: Synthetic oligonucleotide
  Antisense Strand to SEQ ID NO: 320577
acagaaacaauaauaaacg

SEQ ID NO: 320579 - RNA, 19 nt, Artificial Sequence
  Description of Artificial Sequence: Synthetic oligonucleotide
  Sense Strand Starting at position 24 of SEQ ID NO: 317416
guuucuguaccuugggcaa

SEQ ID NO: 320580 - RNA, 19 nt, Artificial Sequence
  Description of Artificial Sequence: Synthetic oligonucleotide
  Antisense Strand to SEQ ID NO: 320579
uugcccaagguacagaaac

SEQ ID NO: 320581 - RNA, 19 nt, Artificial Sequence
  Description of Artificial Sequence: Synthetic oligonucleotide
  Sense Strand Starting at position 24 of SEQ ID NO: 317429
gggcaaugcuuuguugugu

SEQ ID NO: 320582 - RNA, 19 nt, Artificial Sequence
  Description of Artificial Sequence: Synthetic oligonucleotide
  Antisense Strand to SEQ ID NO: 320581
acacaacaaagcauugccc

SEQ ID NO: 320583 - RNA, 19 nt, Artificial Sequence
  Description of Artificial Sequence: Synthetic oligonucleotide
  Sense Strand Starting at position 24 of SEQ ID NO: 317442
uuguguuucuuccugugau

SEQ ID NO: 320584 - RNA, 19 nt, Artificial Sequence
  Description of Artificial Sequence: Synthetic oligonucleotide
  Antisense Strand to SEQ ID NO: 320583
aucacaggaagaaacacaa

SEQ ID NO: 320585 - RNA, 19 nt, Artificial Sequence
  Description of Artificial Sequence: Synthetic oligonucleotide
  Sense Strand Starting at position 24 of SEQ ID NO: 317452
uccugugauuuccaagcaa

SEQ ID NO: 320586 - RNA, 19 nt, Artificial Sequence
  Description of Artificial Sequence: Synthetic oligonucleotide
  Antisense Strand to SEQ ID NO: 320585
uugcuuggaaaucacagga

SEQ ID NO: 320587 - RNA, 19 nt, Artificial Sequence
  Description of Artificial Sequence: Synthetic oligonucleotide
  Sense Strand Starting at position 24 of SEQ ID NO: 317494
aguaguuccuagcuuaaau

SEQ ID NO: 320588 - RNA, 19 nt, Artificial Sequence
  Description of Artificial Sequence: Synthetic oligonucleotide
  Antisense Strand to SEQ ID NO: 320587
auuuaagcuaggaacuacu

SEQ ID NO: 320589 - RNA, 19 nt, Artificial Sequence
  Description of Artificial Sequence: Synthetic oligonucleotide
  Sense Strand Starting at position 24 of SEQ ID NO: 318912
ugguguaaucugcaagccu

SEQ ID NO: 320590 - RNA, 19 nt, Artificial Sequence
  Description of Artificial Sequence: Synthetic oligonucleotide
  Antisense Strand to SEQ ID NO: 320589
aggcuugcagauuacacca

SEQ ID NO: 320591 - RNA, 19 nt, Artificial Sequence
  Description of Artificial Sequence: Synthetic oligonucleotide
  Sense Strand Starting at position 24 of SEQ ID NO: 318957
gaaggacgugccugucuuu

SEQ ID NO: 320592 - RNA, 19 nt, Artificial Sequence
  Description of Artificial Sequence: Synthetic oligonucleotide
  Antisense Strand to SEQ ID NO: 320591
aaagacaggcacguccuuc

SEQ ID NO: 320593 - RNA, 19 nt, Artificial Sequence
  Description of Artificial Sequence: Synthetic oligonucleotide
  Sense Strand Starting at position 24 of SEQ ID NO: 318985
aagugaaguuuaucagguc

SEQ ID NO: 320594 - RNA, 19 nt, Artificial Sequence
  Description of Artificial Sequence: Synthetic oligonucleotide
  Antisense Strand to SEQ ID NO: 320593
gaccugauaaacuucacuu

SEQ ID NO: 320595 - RNA, 19 nt, Artificial Sequence
  Description of Artificial Sequence: Synthetic oligonucleotide
  Sense Strand Starting at position 24 of SEQ ID NO: 318993
uuuaucaggucauaugaaa

SEQ ID NO: 320596 - RNA, 19 nt, Artificial Sequence
  Description of Artificial Sequence: Synthetic oligonucleotide
  Antisense Strand to SEQ ID NO: 320595
uuucauaugaccugauaaa

SEQ ID NO: 320597 - RNA, 19 nt, Artificial Sequence
  Description of Artificial Sequence: Synthetic oligonucleotide
  Sense Strand Starting at position 24 of SEQ ID NO: 319064
gugucugauucugcauaca

SEQ ID NO: 320598 - RNA, 19 nt, Artificial Sequence
  Description of Artificial Sequence: Synthetic oligonucleotide
  Antisense Strand to SEQ ID NO: 320597
uguaugcagaaucagacac

SEQ ID NO: 320599 - RNA, 19 nt, Artificial Sequence
  Description of Artificial Sequence: Synthetic oligonucleotide
  Sense Strand Starting at position 24 of SEQ ID NO: 319074
cugcauacaucuguagaga

SEQ ID NO: 320600 - RNA, 19 nt, Artificial Sequence
  Description of Artificial Sequence: Synthetic oligonucleotide
  Antisense Strand to SEQ ID NO: 320599
ucucuacagauguaugcag

SEQ ID NO: 320601 - RNA, 19 nt, Artificial Sequence
  Description of Artificial Sequence: Synthetic oligonucleotide
  Sense Strand Starting at position 24 of SEQ ID NO: 319075
ugcauacaucuguagagaa

SEQ ID NO: 320602 - RNA, 19 nt, Artificial Sequence
  Description of Artificial Sequence: Synthetic oligonucleotide
  Antisense Strand to SEQ ID NO: 320601
uucucuacagauguaugca

SEQ ID NO: 320603 - RNA, 19 nt, Artificial Sequence
  Description of Artificial Sequence: Synthetic oligonucleotide
  Sense Strand Starting at position 25 of SEQ ID NO: 315295
acugguugaugugacuaca

SEQ ID NO: 320604 - RNA, 19 nt, Artificial Sequence
  Description of Artificial Sequence: Synthetic oligonucleotide
  Antisense Strand to SEQ ID NO: 320603
uguagucacaucaaccagu

SEQ ID NO: 320605 - RNA, 19 nt, Artificial Sequence
  Description of Artificial Sequence: Synthetic oligonucleotide
  Sense Strand Starting at position 25 of SEQ ID NO: 315352
gaauacagguccuuauagu

SEQ ID NO: 320606 - RNA, 19 nt, Artificial Sequence
  Description of Artificial Sequence: Synthetic oligonucleotide
  Antisense Strand to SEQ ID NO: 320605
acuauaaggaccuguauuc

SEQ ID NO: 320607 - RNA, 19 nt, Artificial Sequence
  Description of Artificial Sequence: Synthetic oligonucleotide
  Sense Strand Starting at position 25 of SEQ ID NO: 315360
guccuuauagugugacucu

SEQ ID NO: 320608 - RNA, 19 nt, Artificial Sequence
  Description of Artificial Sequence: Synthetic oligonucleotide
  Antisense Strand to SEQ ID NO: 320607
agagucacacuauaaggac

SEQ ID NO: 320609 - RNA, 19 nt, Artificial Sequence
  Description of Artificial Sequence: Synthetic oligonucleotide
  Sense Strand Starting at position 25 of SEQ ID NO: 315556
ggaggaagcucuccuaaag

SEQ ID NO: 320610 - RNA, 19 nt, Artificial Sequence
  Description of Artificial Sequence: Synthetic oligonucleotide
  Antisense Strand to SEQ ID NO: 320609
cuuuaggagagcuuccucc

SEQ ID NO: 320611 - RNA, 19 nt, Artificial Sequence
  Description of Artificial Sequence: Synthetic oligonucleotide
  Sense Strand Starting at position 25 of SEQ ID NO: 315904
gcgcuacuacccuacagaa

SEQ ID NO: 320612 - RNA, 19 nt, Artificial Sequence
  Description of Artificial Sequence: Synthetic oligonucleotide
  Antisense Strand to SEQ ID NO: 320611
uucuguaggguaguagcgc

SEQ ID NO: 320613 - RNA, 19 nt, Artificial Sequence
  Description of Artificial Sequence: Synthetic oligonucleotide
  Sense Strand Starting at position 25 of SEQ ID NO: 315926
acucgcuuucgguguaaac

SEQ ID NO: 320614 - RNA, 19 nt, Artificial Sequence
  Description of Artificial Sequence: Synthetic oligonucleotide
  Antisense Strand to SEQ ID NO: 320613
guuuacaccgaaagcgagu

SEQ ID NO: 320615 - RNA, 19 nt, Artificial Sequence
  Description of Artificial Sequence: Synthetic oligonucleotide
  Sense Strand Starting at position 25 of SEQ ID NO: 315927
cucgcuuucgguguaaacu

SEQ ID NO: 320616 - RNA, 19 nt, Artificial Sequence
  Description of Artificial Sequence: Synthetic oligonucleotide
  Antisense Strand to SEQ ID NO: 320615
aguuuacaccgaaagcgag

SEQ ID NO: 320617 - RNA, 19 nt, Artificial Sequence
  Description of Artificial Sequence: Synthetic oligonucleotide
  Sense Strand Starting at position 25 of SEQ ID NO: 315928
ucgcuuucgguguaaacua

SEQ ID NO: 320618 - RNA, 19 nt, Artificial Sequence
  Description of Artificial Sequence: Synthetic oligonucleotide
  Antisense Strand to SEQ ID NO: 320617
uaguuuacaccgaaagcga

SEQ ID NO: 320619 - RNA, 19 nt, Artificial Sequence
  Description of Artificial Sequence: Synthetic oligonucleotide
  Sense Strand Starting at position 25 of SEQ ID NO: 316310
gugcuuggaccguaggaga

SEQ ID NO: 320620 - RNA, 19 nt, Artificial Sequence
  Description of Artificial Sequence: Synthetic oligonucleotide
  Antisense Strand to SEQ ID NO: 320619
ucuccuacgguccaagcac

SEQ ID NO: 320621 - RNA, 19 nt, Artificial Sequence
  Description of Artificial Sequence: Synthetic oligonucleotide
  Sense Strand Starting at position 25 of SEQ ID NO: 316330
acaagcuuuccaggcggaa

SEQ ID NO: 320622 - RNA, 19 nt, Artificial Sequence
  Description of Artificial Sequence: Synthetic oligonucleotide
  Antisense Strand to SEQ ID NO: 320621
uuccgccuggaaagcuugu

SEQ ID NO: 320623 - RNA, 19 nt, Artificial Sequence
  Description of Artificial Sequence: Synthetic oligonucleotide
  Sense Strand Starting at position 25 of SEQ ID NO: 316342
ggcggaacuccgcuuguuu

SEQ ID NO: 320624 - RNA, 19 nt, Artificial Sequence
  Description of Artificial Sequence: Synthetic oligonucleotide
  Antisense Strand to SEQ ID NO: 320623
aaacaagcggaguuccgcc

SEQ ID NO: 320625 - RNA, 19 nt, Artificial Sequence
  Description of Artificial Sequence: Synthetic oligonucleotide
  Sense Strand Starting at position 25 of SEQ ID NO: 316343
gcggaacuccgcuuguuua

SEQ ID NO: 320626 - RNA, 19 nt, Artificial Sequence
  Description of Artificial Sequence: Synthetic oligonucleotide
  Antisense Strand to SEQ ID NO: 320625
uaaacaagcggaguuccgc

SEQ ID NO: 320627 - RNA, 19 nt, Artificial Sequence
  Description of Artificial Sequence: Synthetic oligonucleotide
  Sense Strand Starting at position 25 of SEQ ID NO: 316723
uagugacucugagggacau

SEQ ID NO: 320628 - RNA, 19 nt, Artificial Sequence
  Description of Artificial Sequence: Synthetic oligonucleotide
  Antisense Strand to SEQ ID NO: 320627
augucccucagagucacua

SEQ ID NO: 320629 - RNA, 19 nt, Artificial Sequence
  Description of Artificial Sequence: Synthetic oligonucleotide
  Sense Strand Starting at position 25 of SEQ ID NO: 316940
accagaaucccgcagauga

SEQ ID NO: 320630 - RNA, 19 nt, Artificial Sequence
  Description of Artificial Sequence: Synthetic oligonucleotide
  Antisense Strand to SEQ ID NO: 320629
ucaucugcgggauucuggu

SEQ ID NO: 320631 - RNA, 19 nt, Artificial Sequence
  Description of Artificial Sequence: Synthetic oligonucleotide
  Sense Strand Starting at position 25 of SEQ ID NO: 317076
cgcccuuuguugguaaaca

SEQ ID NO: 320632 - RNA, 19 nt, Artificial Sequence
  Description of Artificial Sequence: Synthetic oligonucleotide
  Antisense Strand to SEQ ID NO: 320631
uguuuaccaacaaagggcg

SEQ ID NO: 320633 - RNA, 19 nt, Artificial Sequence
  Description of Artificial Sequence: Synthetic oligonucleotide
  Sense Strand Starting at position 25 of SEQ ID NO: 317939
gcccaagcuccugacacau

SEQ ID NO: 320634 - RNA, 19 nt, Artificial Sequence
  Description of Artificial Sequence: Synthetic oligonucleotide
  Antisense Strand to SEQ ID NO: 320633
augugucaggagcuugggc

SEQ ID NO: 320635 - RNA, 19 nt, Artificial Sequence
  Description of Artificial Sequence: Synthetic oligonucleotide
  Sense Strand Starting at position 25 of SEQ ID NO: 317971
cccggaaugaguggauagu

SEQ ID NO: 320636 - RNA, 19 nt, Artificial Sequence
  Description of Artificial Sequence: Synthetic oligonucleotide
  Antisense Strand to SEQ ID NO: 320635
acuauccacucauuccggg

SEQ ID NO: 320637 - RNA, 19 nt, Artificial Sequence
  Description of Artificial Sequence: Synthetic oligonucleotide
  Sense Strand Starting at position 25 of SEQ ID NO: 318049
gacagugaaccgugggaaa

SEQ ID NO: 320638 - RNA, 19 nt, Artificial Sequence
  Description of Artificial Sequence: Synthetic oligonucleotide
  Antisense Strand to SEQ ID NO: 320637
uuucccacgguucacuguc

SEQ ID NO: 320639 - RNA, 19 nt, Artificial Sequence
  Description of Artificial Sequence: Synthetic oligonucleotide
  Sense Strand Starting at position 25 of SEQ ID NO: 318051
cagugaaccgugggaaagu

SEQ ID NO: 320640 - RNA, 19 nt, Artificial Sequence
  Description of Artificial Sequence: Synthetic oligonucleotide
  Antisense Strand to SEQ ID NO: 320639
acuuucccacgguucacug

SEQ ID NO: 320641 - RNA, 19 nt, Artificial Sequence
  Description of Artificial Sequence: Synthetic oligonucleotide
  Sense Strand Starting at position 25 of SEQ ID NO: 318074
ucucuacugaugggcgaau

SEQ ID NO: 320642 - RNA, 19 nt, Artificial Sequence
  Description of Artificial Sequence: Synthetic oligonucleotide
  Antisense Strand to SEQ ID NO: 320641
auucgcccaucaguagaga

SEQ ID NO: 320643 - RNA, 19 nt, Artificial Sequence
  Description of Artificial Sequence: Synthetic oligonucleotide
  Sense Strand Starting at position 25 of SEQ ID NO: 318076
ucuacugaugggcgaauua

SEQ ID NO: 320644 - RNA, 19 nt, Artificial Sequence
  Description of Artificial Sequence: Synthetic oligonucleotide
  Antisense Strand to SEQ ID NO: 320643
uaauucgcccaucaguaga

SEQ ID NO: 320645 - RNA, 19 nt, Artificial Sequence
  Description of Artificial Sequence: Synthetic oligonucleotide
  Sense Strand Starting at position 25 of SEQ ID NO: 318085
gggcgaauuaaguggcaga

SEQ ID NO: 320646 - RNA, 19 nt, Artificial Sequence
  Description of Artificial Sequence: Synthetic oligonucleotide
  Antisense Strand to SEQ ID NO: 320645
ucugccacuuaauucgccc

SEQ ID NO: 320647 - RNA, 19 nt, Artificial Sequence
  Description of Artificial Sequence: Synthetic oligonucleotide
  Sense Strand Starting at position 25 of SEQ ID NO: 318086
ggcgaauuaaguggcagaa

SEQ ID NO: 320648 - RNA, 19 nt, Artificial Sequence
  Description of Artificial Sequence: Synthetic oligonucleotide
  Antisense Strand to SEQ ID NO: 320647
uucugccacuuaauucgcc

SEQ ID NO: 320649 - RNA, 19 nt, Artificial Sequence
  Description of Artificial Sequence: Synthetic oligonucleotide
  Sense Strand Starting at position 25 of SEQ ID NO: 318088
cgaauuaaguggcagaaag

SEQ ID NO: 320650 - RNA, 19 nt, Artificial Sequence
  Description of Artificial Sequence: Synthetic oligonucleotide
  Antisense Strand to SEQ ID NO: 320649
cuuucugccacuuaauucg

SEQ ID NO: 320651 - RNA, 19 nt, Artificial Sequence
  Description of Artificial Sequence: Synthetic oligonucleotide
  Sense Strand Starting at position 25 of SEQ ID NO: 318106
gaggcugacuucccugaau

SEQ ID NO: 320652 - RNA, 19 nt, Artificial Sequence
  Description of Artificial Sequence: Synthetic oligonucleotide
  Antisense Strand to SEQ ID NO: 320651
auucagggaagucagccuc

SEQ ID NO: 320653 - RNA, 19 nt, Artificial Sequence
  Description of Artificial Sequence: Synthetic oligonucleotide
  Sense Strand Starting at position 25 of SEQ ID NO: 318108
ggcugacuucccugaauug

SEQ ID NO: 320654 - RNA, 19 nt, Artificial Sequence
  Description of Artificial Sequence: Synthetic oligonucleotide
  Antisense Strand to SEQ ID NO: 320653
caauucagggaagucagcc

SEQ ID NO: 320655 - RNA, 19 nt, Artificial Sequence
  Description of Artificial Sequence: Synthetic oligonucleotide
  Sense Strand Starting at position 25 of SEQ ID NO: 318109
gcugacuucccugaauuga

SEQ ID NO: 320656 - RNA, 19 nt, Artificial Sequence
  Description of Artificial Sequence: Synthetic oligonucleotide
  Antisense Strand to SEQ ID NO: 320655
ucaauucagggaagucagc

SEQ ID NO: 320657 - RNA, 19 nt, Artificial Sequence
  Description of Artificial Sequence: Synthetic oligonucleotide
  Sense Strand Starting at position 25 of SEQ ID NO: 318130
agcagucucccgucugcaa

SEQ ID NO: 320658 - RNA, 19 nt, Artificial Sequence
  Description of Artificial Sequence: Synthetic oligonucleotide
  Antisense Strand to SEQ ID NO: 320657
uugcagacgggagacugcu

SEQ ID NO: 320659 - RNA, 19 nt, Artificial Sequence
  Description of Artificial Sequence: Synthetic oligonucleotide
  Sense Strand Starting at position 25 of SEQ ID NO: 318131
gcagucucccgucugcaau

SEQ ID NO: 320660 - RNA, 19 nt, Artificial Sequence
  Description of Artificial Sequence: Synthetic oligonucleotide
  Antisense Strand to SEQ ID NO: 320659
auugcagacgggagacugc

SEQ ID NO: 320661 - RNA, 19 nt, Artificial Sequence
  Description of Artificial Sequence: Synthetic oligonucleotide
  Sense Strand Starting at position 25 of SEQ ID NO: 318388
ugaagaucuugucuagcac

SEQ ID NO: 320662 - RNA, 19 nt, Artificial Sequence
  Description of Artificial Sequence: Synthetic oligonucleotide
  Antisense Strand to SEQ ID NO: 320661
gugcuagacaagaucuuca

SEQ ID NO: 320663 - RNA, 19 nt, Artificial Sequence
  Description of Artificial Sequence: Synthetic oligonucleotide
  Sense Strand Starting at position 25 of SEQ ID NO: 318389
gaagaucuugucuagcaca

SEQ ID NO: 320664 - RNA, 19 nt, Artificial Sequence
  Description of Artificial Sequence: Synthetic oligonucleotide
  Antisense Strand to SEQ ID NO: 320663
ugugcuagacaagaucuuc

SEQ ID NO: 320665 - RNA, 19 nt, Artificial Sequence
  Description of Artificial Sequence: Synthetic oligonucleotide
  Sense Strand Starting at position 25 of SEQ ID NO: 318453
aucguucucugucucagau

SEQ ID NO: 320666 - RNA, 19 nt, Artificial Sequence
  Description of Artificial Sequence: Synthetic oligonucleotide
  Antisense Strand to SEQ ID NO: 320665
aucugagacagagaacgau

SEQ ID NO: 320667 - RNA, 19 nt, Artificial Sequence
  Description of Artificial Sequence: Synthetic oligonucleotide
  Sense Strand Starting at position 25 of SEQ ID NO: 318543
caucauagcucagggauga

SEQ ID NO: 320668 - RNA, 19 nt, Artificial Sequence
  Description of Artificial Sequence: Synthetic oligonucleotide
  Antisense Strand to SEQ ID NO: 320667
ucaucccugagcuaugaug

SEQ ID NO: 320669 - RNA, 19 nt, Artificial Sequence
  Description of Artificial Sequence: Synthetic oligonucleotide
  Sense Strand Starting at position 25 of SEQ ID NO: 318566
ccgagauccucagauaaca

SEQ ID NO: 320670 - RNA, 19 nt, Artificial Sequence
  Description of Artificial Sequence: Synthetic oligonucleotide
  Antisense Strand to SEQ ID NO: 320669
uguuaucugaggaucucgg

SEQ ID NO: 320671 - RNA, 19 nt, Artificial Sequence
  Description of Artificial Sequence: Synthetic oligonucleotide
  Sense Strand Starting at position 25 of SEQ ID NO: 318750
uucuuaauggcagaaaccu

SEQ ID NO: 320672 - RNA, 19 nt, Artificial Sequence
  Description of Artificial Sequence: Synthetic oligonucleotide
  Antisense Strand to SEQ ID NO: 320671
agguuucugccauuaagaa

SEQ ID NO: 320673 - RNA, 19 nt, Artificial Sequence
  Description of Artificial Sequence: Synthetic oligonucleotide
  Sense Strand Starting at position 25 of SEQ ID NO: 318759
gcagaaaccuagucaaaca

SEQ ID NO: 320674 - RNA, 19 nt, Artificial Sequence
  Description of Artificial Sequence: Synthetic oligonucleotide
  Antisense Strand to SEQ ID NO: 320673
uguuugacuagguuucugc

SEQ ID NO: 320675 - RNA, 19 nt, Artificial Sequence
  Description of Artificial Sequence: Synthetic oligonucleotide
  Sense Strand Starting at position 25 of SEQ ID NO: 319110
gaauguauauuguucugau

SEQ ID NO: 320676 - RNA, 19 nt, Artificial Sequence
  Description of Artificial Sequence: Synthetic oligonucleotide
  Antisense Strand to SEQ ID NO: 320675
aucagaacaauauacauuc

SEQ ID NO: 320677 - RNA, 19 nt, Artificial Sequence
  Description of Artificial Sequence: Synthetic oligonucleotide
  Sense Strand Starting at position 25 of SEQ ID NO: 319120
uguucugauugacauugaa

SEQ ID NO: 320678 - RNA, 19 nt, Artificial Sequence
  Description of Artificial Sequence: Synthetic oligonucleotide
  Antisense Strand to SEQ ID NO: 320677
uucaaugucaaucagaaca

SEQ ID NO: 320679 - RNA, 19 nt, Artificial Sequence
  Description of Artificial Sequence: Synthetic oligonucleotide
  Sense Strand Starting at position 25 of SEQ ID NO: 319199
aggcacugcccagaaagau

SEQ ID NO: 320680 - RNA, 19 nt, Artificial Sequence
  Description of Artificial Sequence: Synthetic oligonucleotide
  Antisense Strand to SEQ ID NO: 320679
aucuuucugggcagugccu

SEQ ID NO: 320681 - RNA, 19 nt, Artificial Sequence
  Description of Artificial Sequence: Synthetic oligonucleotide
  Sense Strand Starting at position 25 of SEQ ID NO: 319209
cagaaagauuucugggucu

SEQ ID NO: 320682 - RNA, 19 nt, Artificial Sequence
  Description of Artificial Sequence: Synthetic oligonucleotide
  Antisense Strand to SEQ ID NO: 320681
agacccagaaaucuuucug

SEQ ID NO: 320683 - RNA, 19 nt, Artificial Sequence
  Description of Artificial Sequence: Synthetic oligonucleotide
  Sense Strand Starting at position 26 of SEQ ID NO: 315437
cucagagaugcuugcauuu

SEQ ID NO: 320684 - RNA, 19 nt, Artificial Sequence
  Description of Artificial Sequence: Synthetic oligonucleotide
  Antisense Strand to SEQ ID NO: 320683
aaaugcaagcaucucugag

SEQ ID NO: 320685 - RNA, 19 nt, Artificial Sequence
  Description of Artificial Sequence: Synthetic oligonucleotide
  Sense Strand Starting at position 26 of SEQ ID NO: 315532
guuggaggaagguguuauc

SEQ ID NO: 320686 - RNA, 19 nt, Artificial Sequence
  Description of Artificial Sequence: Synthetic oligonucleotide
  Antisense Strand to SEQ ID NO: 320685
gauaacaccuuccuccaac

SEQ ID NO: 320687 - RNA, 19 nt, Artificial Sequence
  Description of Artificial Sequence: Synthetic oligonucleotide
  Sense Strand Starting at position 26 of SEQ ID NO: 315542
gguguuaucuuccuuaaau

SEQ ID NO: 320688 - RNA, 19 nt, Artificial Sequence
  Description of Artificial Sequence: Synthetic oligonucleotide
  Antisense Strand to SEQ ID NO: 320687
auuuaaggaagauaacacc

SEQ ID NO: 320689 - RNA, 19 nt, Artificial Sequence
  Description of Artificial Sequence: Synthetic oligonucleotide
  Sense Strand Starting at position 26 of SEQ ID NO: 315543
guguuaucuuccuuaaaua

SEQ ID NO: 320690 - RNA, 19 nt, Artificial Sequence
  Description of Artificial Sequence: Synthetic oligonucleotide
  Antisense Strand to SEQ ID NO: 320689
uauuuaaggaagauaacac

SEQ ID NO: 320691 - RNA, 19 nt, Artificial Sequence
  Description of Artificial Sequence: Synthetic oligonucleotide
  Sense Strand Starting at position 26 of SEQ ID NO: 315553
ccuuaaauaugggaaacua

SEQ ID NO: 320692 - RNA, 19 nt, Artificial Sequence
  Description of Artificial Sequence: Synthetic oligonucleotide
  Antisense Strand to SEQ ID NO: 320691
uaguuucccauauuuaagg

SEQ ID NO: 320693 - RNA, 19 nt, Artificial Sequence
  Description of Artificial Sequence: Synthetic oligonucleotide
  Sense Strand Starting at position 26 of SEQ ID NO: 315608
ucagcugauuaaucacaga

SEQ ID NO: 320694 - RNA, 19 nt, Artificial Sequence
  Description of Artificial Sequence: Synthetic oligonucleotide
  Antisense Strand to SEQ ID NO: 320693
ucugugauuaaucagcuga

SEQ ID NO: 320695 - RNA, 19 nt, Artificial Sequence
  Description of Artificial Sequence: Synthetic oligonucleotide
  Sense Strand Starting at position 26 of SEQ ID NO: 316102
uggagagugaggugaaguu

SEQ ID NO: 320696 - RNA, 19 nt, Artificial Sequence
  Description of Artificial Sequence: Synthetic oligonucleotide
  Antisense Strand to SEQ ID NO: 320695
aacuucaccucacucucca

SEQ ID NO: 320697 - RNA, 19 nt, Artificial Sequence
  Description of Artificial Sequence: Synthetic oligonucleotide
  Sense Strand Starting at position 26 of SEQ ID NO: 316103
ggagagugaggugaaguuu

SEQ ID NO: 320698 - RNA, 19 nt, Artificial Sequence
  Description of Artificial Sequence: Synthetic oligonucleotide
  Antisense Strand to SEQ ID NO: 320697
aaacuucaccucacucucc

SEQ ID NO: 320699 - RNA, 19 nt, Artificial Sequence
  Description of Artificial Sequence: Synthetic oligonucleotide
  Sense Strand Starting at position 26 of SEQ ID NO: 316140
ggaguaaccuuggucagca

SEQ ID NO: 320700 - RNA, 19 nt, Artificial Sequence
  Description of Artificial Sequence: Synthetic oligonucleotide
  Antisense Strand to SEQ ID NO: 320699
ugcugaccaagguuacucc

SEQ ID NO: 320701 - RNA, 19 nt, Artificial Sequence
  Description of Artificial Sequence: Synthetic oligonucleotide
  Sense Strand Starting at position 26 of SEQ ID NO: 316171
gggaaaggguuccucccua

SEQ ID NO: 320702 - RNA, 19 nt, Artificial Sequence
  Description of Artificial Sequence: Synthetic oligonucleotide
  Antisense Strand to SEQ ID NO: 320701
uagggaggaacccuuuccc

SEQ ID NO: 320703 - RNA, 19 nt, Artificial Sequence
  Description of Artificial Sequence: Synthetic oligonucleotide
  Sense Strand Starting at position 26 of SEQ ID NO: 316349
accgucuucucaccauagu

SEQ ID NO: 320704 - RNA, 19 nt, Artificial Sequence
  Description of Artificial Sequence: Synthetic oligonucleotide
  Antisense Strand to SEQ ID NO: 320703
acuauggugagaagacggu

SEQ ID NO: 320705 - RNA, 19 nt, Artificial Sequence
  Description of Artificial Sequence: Synthetic oligonucleotide
  Sense Strand Starting at position 26 of SEQ ID NO: 316478
gggcaaagugaauggcuaa

SEQ ID NO: 320706 - RNA, 19 nt, Artificial Sequence
  Description of Artificial Sequence: Synthetic oligonucleotide
  Antisense Strand to SEQ ID NO: 320705
uuagccauucacuuugccc

SEQ ID NO: 320707 - RNA, 19 nt, Artificial Sequence
  Description of Artificial Sequence: Synthetic oligonucleotide
  Sense Strand Starting at position 26 of SEQ ID NO: 316502
ccuccaagacccuggaaau

SEQ ID NO: 320708 - RNA, 19 nt, Artificial Sequence
  Description of Artificial Sequence: Synthetic oligonucleotide
  Antisense Strand to SEQ ID NO: 320707
auuuccagggucuuggagg

SEQ ID NO: 320709 - RNA, 19 nt, Artificial Sequence
  Description of Artificial Sequence: Synthetic oligonucleotide
  Sense Strand Starting at position 26 of SEQ ID NO: 316638
gucugcuuccagcacauuu

SEQ ID NO: 320710 - RNA, 19 nt, Artificial Sequence
  Description of Artificial Sequence: Synthetic oligonucleotide
  Antisense Strand to SEQ ID NO: 320709
aaaugugcuggaagcagac

SEQ ID NO: 320711 - RNA, 19 nt, Artificial Sequence
  Description of Artificial Sequence: Synthetic oligonucleotide
  Sense Strand Starting at position 26 of SEQ ID NO: 316682
caugaaguuugugcucaga

SEQ ID NO: 320712 - RNA, 19 nt, Artificial Sequence
  Description of Artificial Sequence: Synthetic oligonucleotide
  Antisense Strand to SEQ ID NO: 320711
ucugagcacaaacuucaug

SEQ ID NO: 320713 - RNA, 19 nt, Artificial Sequence
  Description of Artificial Sequence: Synthetic oligonucleotide
  Sense Strand Starting at position 26 of SEQ ID NO: 316684
ugaaguuugugcucagaau

SEQ ID NO: 320714 - RNA, 19 nt, Artificial Sequence
  Description of Artificial Sequence: Synthetic oligonucleotide
  Antisense Strand to SEQ ID NO: 320713
auucugagcacaaacuuca

SEQ ID NO: 320715 - RNA, 19 nt, Artificial Sequence
  Description of Artificial Sequence: Synthetic oligonucleotide
  Sense Strand Starting at position 26 of SEQ ID NO: 316685
gaaguuugugcucagaaug

SEQ ID NO: 320716 - RNA, 19 nt, Artificial Sequence
  Description of Artificial Sequence: Synthetic oligonucleotide
  Antisense Strand to SEQ ID NO: 320715
cauucugagcacaaacuuc

SEQ ID NO: 320717 - RNA, 19 nt, Artificial Sequence
  Description of Artificial Sequence: Synthetic oligonucleotide
  Sense Strand Starting at position 26 of SEQ ID NO: 317544
ugaaguuauuggccaaugu

SEQ ID NO: 320718 - RNA, 19 nt, Artificial Sequence
  Description of Artificial Sequence: Synthetic oligonucleotide
  Antisense Strand to SEQ ID NO: 320717
acauuggccaauaacuuca

SEQ ID NO: 320719 - RNA, 19 nt, Artificial Sequence
  Description of Artificial Sequence: Synthetic oligonucleotide
  Sense Strand Starting at position 26 of SEQ ID NO: 317545
gaaguuauuggccaauguc

SEQ ID NO: 320720 - RNA, 19 nt, Artificial Sequence
  Description of Artificial Sequence: Synthetic oligonucleotide
  Antisense Strand to SEQ ID NO: 320719
gacauuggccaauaacuuc

SEQ ID NO: 320721 - RNA, 19 nt, Artificial Sequence
  Description of Artificial Sequence: Synthetic oligonucleotide
  Sense Strand Starting at position 26 of SEQ ID NO: 317646
ugccuagaaugggaaugaa

SEQ ID NO: 320722 - RNA, 19 nt, Artificial Sequence
  Description of Artificial Sequence: Synthetic oligonucleotide
  Antisense Strand to SEQ ID NO: 320721
uucauucccauucuaggca

SEQ ID NO: 320723 - RNA, 19 nt, Artificial Sequence
  Description of Artificial Sequence: Synthetic oligonucleotide
  Sense Strand Starting at position 26 of SEQ ID NO: 317678
gcacgugugacgguuuaag

SEQ ID NO: 320724 - RNA, 19 nt, Artificial Sequence
  Description of Artificial Sequence: Synthetic oligonucleotide
  Antisense Strand to SEQ ID NO: 320723
cuuaaaccgucacacgugc

SEQ ID NO: 320725 - RNA, 19 nt, Artificial Sequence
  Description of Artificial Sequence: Synthetic oligonucleotide
  Sense Strand Starting at position 26 of SEQ ID NO: 317711
ugcagucuaucaguggaua

SEQ ID NO: 320726 - RNA, 19 nt, Artificial Sequence
  Description of Artificial Sequence: Synthetic oligonucleotide
  Antisense Strand to SEQ ID NO: 320725
uauccacugauagacugca

SEQ ID NO: 320727 - RNA, 19 nt, Artificial Sequence
  Description of Artificial Sequence: Synthetic oligonucleotide
  Sense Strand Starting at position 26 of SEQ ID NO: 317712
gcagucuaucaguggauau

SEQ ID NO: 320728 - RNA, 19 nt, Artificial Sequence
  Description of Artificial Sequence: Synthetic oligonucleotide
  Antisense Strand to SEQ ID NO: 320727
auauccacugauagacugc

SEQ ID NO: 320729 - RNA, 19 nt, Artificial Sequence
  Description of Artificial Sequence: Synthetic oligonucleotide
  Sense Strand Starting at position 26 of SEQ ID NO: 317722
aguggauaugauuguguau

SEQ ID NO: 320730 - RNA, 19 nt, Artificial Sequence
  Description of Artificial Sequence: Synthetic oligonucleotide
  Antisense Strand to SEQ ID NO: 320729
auacacaaucauauccacu

SEQ ID NO: 320731 - RNA, 19 nt, Artificial Sequence
  Description of Artificial Sequence: Synthetic oligonucleotide
  Sense Strand Starting at position 26 of SEQ ID NO: 317725
ggauaugauuguguaugug

SEQ ID NO: 320732 - RNA, 19 nt, Artificial Sequence
  Description of Artificial Sequence: Synthetic oligonucleotide
  Antisense Strand to SEQ ID NO: 320731
cacauacacaaucauaucc

SEQ ID NO: 320733 - RNA, 19 nt, Artificial Sequence
  Description of Artificial Sequence: Synthetic oligonucleotide
  Sense Strand Starting at position 26 of SEQ ID NO: 317728
uaugauuguguaugugaca

SEQ ID NO: 320734 - RNA, 19 nt, Artificial Sequence
  Description of Artificial Sequence: Synthetic oligonucleotide
  Antisense Strand to SEQ ID NO: 320733
ugucacauacacaaucaua

SEQ ID NO: 320735 - RNA, 19 nt, Artificial Sequence
  Description of Artificial Sequence: Synthetic oligonucleotide
  Sense Strand Starting at position 26 of SEQ ID NO: 317756
ggugggugggugugaugaa

SEQ ID NO: 320736 - RNA, 19 nt, Artificial Sequence
  Description of Artificial Sequence: Synthetic oligonucleotide
  Antisense Strand to SEQ ID NO: 320735
uucaucacacccacccacc

SEQ ID NO: 320737 - RNA, 19 nt, Artificial Sequence
  Description of Artificial Sequence: Synthetic oligonucleotide
  Sense Strand Starting at position 26 of SEQ ID NO: 317768
ugaugaagucacugugaau

SEQ ID NO: 320738 - RNA, 19 nt, Artificial Sequence
  Description of Artificial Sequence: Synthetic oligonucleotide
  Antisense Strand to SEQ ID NO: 320737
auucacagugacuucauca

SEQ ID NO: 320739 - RNA, 19 nt, Artificial Sequence
  Description of Artificial Sequence: Synthetic oligonucleotide
  Sense Strand Starting at position 26 of SEQ ID NO: 317775
gucacugugaauggaugua

SEQ ID NO: 320740 - RNA, 19 nt, Artificial Sequence
  Description of Artificial Sequence: Synthetic oligonucleotide
  Antisense Strand to SEQ ID NO: 320739
uacauccauucacagugac

SEQ ID NO: 320741 - RNA, 19 nt, Artificial Sequence
  Description of Artificial Sequence: Synthetic oligonucleotide
  Sense Strand Starting at position 26 of SEQ ID NO: 317780
ugugaauggauguaauugu

SEQ ID NO: 320742 - RNA, 19 nt, Artificial Sequence
  Description of Artificial Sequence: Synthetic oligonucleotide
  Antisense Strand to SEQ ID NO: 320741
acaauuacauccauucaca

SEQ ID NO: 320743 - RNA, 19 nt, Artificial Sequence
  Description of Artificial Sequence: Synthetic oligonucleotide
  Sense Strand Starting at position 26 of SEQ ID NO: 317789
auguaauugugacccugga

SEQ ID NO: 320744 - RNA, 19 nt, Artificial Sequence
  Description of Artificial Sequence: Synthetic oligonucleotide
  Antisense Strand to SEQ ID NO: 320743
uccagggucacaauuacau

SEQ ID NO: 320745 - RNA, 19 nt, Artificial Sequence
  Description of Artificial Sequence: Synthetic oligonucleotide
  Sense Strand Starting at position 26 of SEQ ID NO: 317793
aauugugacccuggaugga

SEQ ID NO: 320746 - RNA, 19 nt, Artificial Sequence
  Description of Artificial Sequence: Synthetic oligonucleotide
  Antisense Strand to SEQ ID NO: 320745
uccauccagggucacaauu

SEQ ID NO: 320747 - RNA, 19 nt, Artificial Sequence
  Description of Artificial Sequence: Synthetic oligonucleotide
  Sense Strand Starting at position 26 of SEQ ID NO: 318067
agucuuggcugcucacaca

SEQ ID NO: 320748 - RNA, 19 nt, Artificial Sequence
  Description of Artificial Sequence: Synthetic oligonucleotide
  Antisense Strand to SEQ ID NO: 320747
ugugugagcagccaagacu

SEQ ID NO: 320749 - RNA, 19 nt, Artificial Sequence
  Description of Artificial Sequence: Synthetic oligonucleotide
  Sense Strand Starting at position 26 of SEQ ID NO: 318340
ccuucucggcucgcugaaa

SEQ ID NO: 320750 - RNA, 19 nt, Artificial Sequence
  Description of Artificial Sequence: Synthetic oligonucleotide
  Antisense Strand to SEQ ID NO: 320749
uuucagcgagccgagaagg

SEQ ID NO: 320751 - RNA, 19 nt, Artificial Sequence
  Description of Artificial Sequence: Synthetic oligonucleotide
  Sense Strand Starting at position 26 of SEQ ID NO: 318920
gcuggcuaauuguuaaauc

SEQ ID NO: 320752 - RNA, 19 nt, Artificial Sequence
  Description of Artificial Sequence: Synthetic oligonucleotide
  Antisense Strand to SEQ ID NO: 320751
gauuuaacaauuagccagc

SEQ ID NO: 320753 - RNA, 19 nt, Artificial Sequence
  Description of Artificial Sequence: Synthetic oligonucleotide
  Sense Strand Starting at position 26 of SEQ ID NO: 319063
agccuuauguggccaagua

SEQ ID NO: 320754 - RNA, 19 nt, Artificial Sequence
  Description of Artificial Sequence: Synthetic oligonucleotide
  Antisense Strand to SEQ ID NO: 320753
uacuuggccacauaaggcu

SEQ ID NO: 320755 - RNA, 19 nt, Artificial Sequence
  Description of Artificial Sequence: Synthetic oligonucleotide
  Sense Strand Starting at position 26 of SEQ ID NO: 319064
gccuuauguggccaaguac

SEQ ID NO: 320756 - RNA, 19 nt, Artificial Sequence
  Description of Artificial Sequence: Synthetic oligonucleotide
  Antisense Strand to SEQ ID NO: 320755
guacuuggccacauaaggc

SEQ ID NO: 320757 - RNA, 19 nt, Artificial Sequence
  Description of Artificial Sequence: Synthetic oligonucleotide
  Sense Strand Starting at position 26 of SEQ ID NO: 319071
guggccaaguacucaguua

SEQ ID NO: 320758 - RNA, 19 nt, Artificial Sequence
  Description of Artificial Sequence: Synthetic oligonucleotide
  Antisense Strand to SEQ ID NO: 320757
uaacugaguacuuggccac

SEQ ID NO: 320759 - RNA, 19 nt, Artificial Sequence
  Description of Artificial Sequence: Synthetic oligonucleotide
  Sense Strand Starting at position 26 of SEQ ID NO: 319079
guacucaguuauccagacu

SEQ ID NO: 320760 - RNA, 19 nt, Artificial Sequence
  Description of Artificial Sequence: Synthetic oligonucleotide
  Antisense Strand to SEQ ID NO: 320759
agucuggauaacugaguac

SEQ ID NO: 320761 - RNA, 19 nt, Artificial Sequence
  Description of Artificial Sequence: Synthetic oligonucleotide
  Sense Strand Starting at position 26 of SEQ ID NO: 319082
cucaguuauccagacucau

SEQ ID NO: 320762 - RNA, 19 nt, Artificial Sequence
  Description of Artificial Sequence: Synthetic oligonucleotide
  Antisense Strand to SEQ ID NO: 320761
augagucuggauaacugag

SEQ ID NO: 320763 - RNA, 19 nt, Artificial Sequence
  Description of Artificial Sequence: Synthetic oligonucleotide
  Sense Strand Starting at position 27 of SEQ ID NO: 315311
ccuggaacccgugaguagu

SEQ ID NO: 320764 - RNA, 19 nt, Artificial Sequence
  Description of Artificial Sequence: Synthetic oligonucleotide
  Antisense Strand to SEQ ID NO: 320763
acuacucacggguuccagg

SEQ ID NO: 320765 - RNA, 19 nt, Artificial Sequence
  Description of Artificial Sequence: Synthetic oligonucleotide
  Sense Strand Starting at position 27 of SEQ ID NO: 315543
ggaccugcucccugucaau

SEQ ID NO: 320766 - RNA, 19 nt, Artificial Sequence
  Description of Artificial Sequence: Synthetic oligonucleotide
  Antisense Strand to SEQ ID NO: 320765
auugacagggagcaggucc

SEQ ID NO: 320767 - RNA, 19 nt, Artificial Sequence
  Description of Artificial Sequence: Synthetic oligonucleotide
  Sense Strand Starting at position 27 of SEQ ID NO: 315577
gguuccuggcgcgugaaua

SEQ ID NO: 320768 - RNA, 19 nt, Artificial Sequence
  Description of Artificial Sequence: Synthetic oligonucleotide
  Antisense Strand to SEQ ID NO: 320767
uauucacgcgccaggaacc

SEQ ID NO: 320769 - RNA, 19 nt, Artificial Sequence
  Description of Artificial Sequence: Synthetic oligonucleotide
  Sense Strand Starting at position 27 of SEQ ID NO: 315767
ccaaguuugcugcagggaa

SEQ ID NO: 320770 - RNA, 19 nt, Artificial Sequence
  Description of Artificial Sequence: Synthetic oligonucleotide
  Antisense Strand to SEQ ID NO: 320769
uucccugcagcaaacuugg

SEQ ID NO: 320771 - RNA, 19 nt, Artificial Sequence
  Description of Artificial Sequence: Synthetic oligonucleotide
  Sense Strand Starting at position 27 of SEQ ID NO: 315786
ccgcaacuccaguaacuuu

SEQ ID NO: 320772 - RNA, 19 nt, Artificial Sequence
  Description of Artificial Sequence: Synthetic oligonucleotide
  Antisense Strand to SEQ ID NO: 320771
aaaguuacuggaguugcgg

SEQ ID NO: 320773 - RNA, 19 nt, Artificial Sequence
  Description of Artificial Sequence: Synthetic oligonucleotide
  Sense Strand Starting at position 27 of SEQ ID NO: 315794
ccaguaacuuucuccgagu

SEQ ID NO: 320774 - RNA, 19 nt, Artificial Sequence
  Description of Artificial Sequence: Synthetic oligonucleotide
  Antisense Strand to SEQ ID NO: 320773
acucggagaaaguuacugg

SEQ ID NO: 320775 - RNA, 19 nt, Artificial Sequence
  Description of Artificial Sequence: Synthetic oligonucleotide
  Sense Strand Starting at position 27 of SEQ ID NO: 315795
caguaacuuucuccgaguu

SEQ ID NO: 320776 - RNA, 19 nt, Artificial Sequence
  Description of Artificial Sequence: Synthetic oligonucleotide
  Antisense Strand to SEQ ID NO: 320775
aacucggagaaaguuacug

SEQ ID NO: 320777 - RNA, 19 nt, Artificial Sequence
  Description of Artificial Sequence: Synthetic oligonucleotide
  Sense Strand Starting at position 27 of SEQ ID NO: 315869
guccaaacuccagaaagcu

SEQ ID NO: 320778 - RNA, 19 nt, Artificial Sequence
  Description of Artificial Sequence: Synthetic oligonucleotide
  Antisense Strand to SEQ ID NO: 320777
agcuuucuggaguuuggac

SEQ ID NO: 320779 - RNA, 19 nt, Artificial Sequence
  Description of Artificial Sequence: Synthetic oligonucleotide
  Sense Strand Starting at position 27 of SEQ ID NO: 315877
uccagaaagcucugaaaca

SEQ ID NO: 320780 - RNA, 19 nt, Artificial Sequence
  Description of Artificial Sequence: Synthetic oligonucleotide
  Antisense Strand to SEQ ID NO: 320779
uguuucagagcuuucugga

SEQ ID NO: 320781 - RNA, 19 nt, Artificial Sequence
  Description of Artificial Sequence: Synthetic oligonucleotide
  Sense Strand Starting at position 27 of SEQ ID NO: 315973
acgaguuucuagcugauau

SEQ ID NO: 320782 - RNA, 19 nt, Artificial Sequence
  Description of Artificial Sequence: Synthetic oligonucleotide
  Antisense Strand to SEQ ID NO: 320781
auaucagcuagaaacucgu

SEQ ID NO: 320783 - RNA, 19 nt, Artificial Sequence
  Description of Artificial Sequence: Synthetic oligonucleotide
  Sense Strand Starting at position 27 of SEQ ID NO: 316026
gagggucucuaggcuuaga

SEQ ID NO: 320784 - RNA, 19 nt, Artificial Sequence
  Description of Artificial Sequence: Synthetic oligonucleotide
  Antisense Strand to SEQ ID NO: 320783
ucuaagccuagagacccuc

SEQ ID NO: 320785 - RNA, 19 nt, Artificial Sequence
  Description of Artificial Sequence: Synthetic oligonucleotide
  Sense Strand Starting at position 27 of SEQ ID NO: 316029
ggucucuaggcuuagagga

SEQ ID NO: 320786 - RNA, 19 nt, Artificial Sequence
  Description of Artificial Sequence: Synthetic oligonucleotide
  Antisense Strand to SEQ ID NO: 320785
uccucuaagccuagagacc

SEQ ID NO: 320787 - RNA, 19 nt, Artificial Sequence
  Description of Artificial Sequence: Synthetic oligonucleotide
  Sense Strand Starting at position 27 of SEQ ID NO: 316109
cuuaccauuccugagcaga

SEQ ID NO: 320788 - RNA, 19 nt, Artificial Sequence
  Description of Artificial Sequence: Synthetic oligonucleotide
  Antisense Strand to SEQ ID NO: 320787
ucugcucaggaaugguaag

SEQ ID NO: 320789 - RNA, 19 nt, Artificial Sequence
  Description of Artificial Sequence: Synthetic oligonucleotide
  Sense Strand Starting at position 27 of SEQ ID NO: 316141
cgugugcucggaguuggua

SEQ ID NO: 320790 - RNA, 19 nt, Artificial Sequence
  Description of Artificial Sequence: Synthetic oligonucleotide
  Antisense Strand to SEQ ID NO: 320789
uaccaacuccgagcacacg

SEQ ID NO: 320791 - RNA, 19 nt, Artificial Sequence
  Description of Artificial Sequence: Synthetic oligonucleotide
  Sense Strand Starting at position 27 of SEQ ID NO: 316142
gugugcucggaguugguau

SEQ ID NO: 320792 - RNA, 19 nt, Artificial Sequence
  Description of Artificial Sequence: Synthetic oligonucleotide
  Antisense Strand to SEQ ID NO: 320791
auaccaacuccgagcacac

SEQ ID NO: 320793 - RNA, 19 nt, Artificial Sequence
  Description of Artificial Sequence: Synthetic oligonucleotide
  Sense Strand Starting at position 27 of SEQ ID NO: 316161
ugacauagccuuuguagaa

SEQ ID NO: 320794 - RNA, 19 nt, Artificial Sequence
  Description of Artificial Sequence: Synthetic oligonucleotide
  Antisense Strand to SEQ ID NO: 320793
uucuacaaaggcuauguca

SEQ ID NO: 320795 - RNA, 19 nt, Artificial Sequence
  Description of Artificial Sequence: Synthetic oligonucleotide
  Sense Strand Starting at position 27 of SEQ ID NO: 316162
gacauagccuuuguagaaa

SEQ ID NO: 320796 - RNA, 19 nt, Artificial Sequence
  Description of Artificial Sequence: Synthetic oligonucleotide
  Antisense Strand to SEQ ID NO: 320795
uuucuacaaaggcuauguc

SEQ ID NO: 320797 - RNA, 19 nt, Artificial Sequence
  Description of Artificial Sequence: Synthetic oligonucleotide
  Sense Strand Starting at position 27 of SEQ ID NO: 316175
uagaaacagugcuugaguu

SEQ ID NO: 320798 - RNA, 19 nt, Artificial Sequence
  Description of Artificial Sequence: Synthetic oligonucleotide
  Antisense Strand to SEQ ID NO: 320797
aacucaagcacuguuucua

SEQ ID NO: 320799 - RNA, 19 nt, Artificial Sequence
  Description of Artificial Sequence: Synthetic oligonucleotide
  Sense Strand Starting at position 27 of SEQ ID NO: 316257
ugaacaguggagcgauaaa

SEQ ID NO: 320800 - RNA, 19 nt, Artificial Sequence
  Description of Artificial Sequence: Synthetic oligonucleotide
  Antisense Strand to SEQ ID NO: 320799
uuuaucgcuccacuguuca

SEQ ID NO: 320801 - RNA, 19 nt, Artificial Sequence
  Description of Artificial Sequence: Synthetic oligonucleotide
  Sense Strand Starting at position 27 of SEQ ID NO: 316279
ggcauuggcggugagauua

SEQ ID NO: 320802 - RNA, 19 nt, Artificial Sequence
  Description of Artificial Sequence: Synthetic oligonucleotide
  Antisense Strand to SEQ ID NO: 320801
uaaucucaccgccaaugcc

SEQ ID NO: 320803 - RNA, 19 nt, Artificial Sequence
  Description of Artificial Sequence: Synthetic oligonucleotide
  Sense Strand Starting at position 27 of SEQ ID NO: 316385
gggucaguggcagaguuaa

SEQ ID NO: 320804 - RNA, 19 nt, Artificial Sequence
  Description of Artificial Sequence: Synthetic oligonucleotide
  Antisense Strand to SEQ ID NO: 320803
uuaacucugccacugaccc

SEQ ID NO: 320805 - RNA, 19 nt, Artificial Sequence
  Description of Artificial Sequence: Synthetic oligonucleotide
  Sense Strand Starting at position 27 of SEQ ID NO: 316438
gggaaaggguucuccgaga

SEQ ID NO: 320806 - RNA, 19 nt, Artificial Sequence
  Description of Artificial Sequence: Synthetic oligonucleotide
  Antisense Strand to SEQ ID NO: 320805
ucucggagaacccuuuccc

SEQ ID NO: 320807 - RNA, 19 nt, Artificial Sequence
  Description of Artificial Sequence: Synthetic oligonucleotide
  Sense Strand Starting at position 27 of SEQ ID NO: 316458
cguucacucggaugggaga

SEQ ID NO: 320808 - RNA, 19 nt, Artificial Sequence
  Description of Artificial Sequence: Synthetic oligonucleotide
  Antisense Strand to SEQ ID NO: 320807
ucucccauccgagugaacg

SEQ ID NO: 320809 - RNA, 19 nt, Artificial Sequence
  Description of Artificial Sequence: Synthetic oligonucleotide
  Sense Strand Starting at position 27 of SEQ ID NO: 316478
acgauuucguauucgcuca

SEQ ID NO: 320810 - RNA, 19 nt, Artificial Sequence
  Description of Artificial Sequence: Synthetic oligonucleotide
  Antisense Strand to SEQ ID NO: 320809
ugagcgaauacgaaaucgu

SEQ ID NO: 320811 - RNA, 19 nt, Artificial Sequence
  Description of Artificial Sequence: Synthetic oligonucleotide
  Sense Strand Starting at position 27 of SEQ ID NO: 316482
uuucguauucgcucagggu

SEQ ID NO: 320812 - RNA, 19 nt, Artificial Sequence
  Description of Artificial Sequence: Synthetic oligonucleotide
  Antisense Strand to SEQ ID NO: 320811
acccugagcgaauacgaaa

SEQ ID NO: 320813 - RNA, 19 nt, Artificial Sequence
  Description of Artificial Sequence: Synthetic oligonucleotide
  Sense Strand Starting at position 27 of SEQ ID NO: 316491
cgcucagggucucuaauaa

SEQ ID NO: 320814 - RNA, 19 nt, Artificial Sequence
  Description of Artificial Sequence: Synthetic oligonucleotide
  Antisense Strand to SEQ ID NO: 320813
uuauuagagacccugagcg

SEQ ID NO: 320815 - RNA, 19 nt, Artificial Sequence
  Description of Artificial Sequence: Synthetic oligonucleotide
  Sense Strand Starting at position 27 of SEQ ID NO: 316635
acccuuaaucaguggacaa

SEQ ID NO: 320816 - RNA, 19 nt, Artificial Sequence
  Description of Artificial Sequence: Synthetic oligonucleotide
  Antisense Strand to SEQ ID NO: 320815
uuguccacugauuaagggu

SEQ ID NO: 320817 - RNA, 19 nt, Artificial Sequence
  Description of Artificial Sequence: Synthetic oligonucleotide
  Sense Strand Starting at position 27 of SEQ ID NO: 316894
cuaaauucguuuccauagu

SEQ ID NO: 320818 - RNA, 19 nt, Artificial Sequence
  Description of Artificial Sequence: Synthetic oligonucleotide
  Antisense Strand to SEQ ID NO: 320817
acuauggaaacgaauuuag

SEQ ID NO: 320819 - RNA, 19 nt, Artificial Sequence
  Description of Artificial Sequence: Synthetic oligonucleotide
  Sense Strand Starting at position 27 of SEQ ID NO: 316960
ugcaaagcgggagauaauu

SEQ ID NO: 320820 - RNA, 19 nt, Artificial Sequence
  Description of Artificial Sequence: Synthetic oligonucleotide
  Antisense Strand to SEQ ID NO: 320819
aauuaucucccgcuuugca

SEQ ID NO: 320821 - RNA, 19 nt, Artificial Sequence
  Description of Artificial Sequence: Synthetic oligonucleotide
  Sense Strand Starting at position 27 of SEQ ID NO: 317466
ggcugcuuggccgcauaau

SEQ ID NO: 320822 - RNA, 19 nt, Artificial Sequence
  Description of Artificial Sequence: Synthetic oligonucleotide
  Antisense Strand to SEQ ID NO: 320821
auuaugcggccaagcagcc

SEQ ID NO: 320823 - RNA, 19 nt, Artificial Sequence
  Description of Artificial Sequence: Synthetic oligonucleotide
  Sense Strand Starting at position 27 of SEQ ID NO: 317873
agggaaaguucucucccuu

SEQ ID NO: 320824 - RNA, 19 nt, Artificial Sequence
  Description of Artificial Sequence: Synthetic oligonucleotide
  Antisense Strand to SEQ ID NO: 320823
aagggagagaacuuucccu

SEQ ID NO: 320825 - RNA, 19 nt, Artificial Sequence
  Description of Artificial Sequence: Synthetic oligonucleotide
  Sense Strand Starting at position 27 of SEQ ID NO: 318526
guuguagaucccuguggga

SEQ ID NO: 320826 - RNA, 19 nt, Artificial Sequence
  Description of Artificial Sequence: Synthetic oligonucleotide
  Antisense Strand to SEQ ID NO: 320825
ucccacagggaucuacaac

SEQ ID NO: 320827 - RNA, 19 nt, Artificial Sequence
  Description of Artificial Sequence: Synthetic oligonucleotide
  Sense Strand Starting at position 27 of SEQ ID NO: 318594
cugagagaugcuuggaaag

SEQ ID NO: 320828 - RNA, 19 nt, Artificial Sequence
  Description of Artificial Sequence: Synthetic oligonucleotide
  Antisense Strand to SEQ ID NO: 320827
cuuuccaagcaucucucag

SEQ ID NO: 320829 - RNA, 19 nt, Artificial Sequence
  Description of Artificial Sequence: Synthetic oligonucleotide
  Sense Strand Starting at position 27 of SEQ ID NO: 318924
accaaaucgcaauaugcua

SEQ ID NO: 320830 - RNA, 19 nt, Artificial Sequence
  Description of Artificial Sequence: Synthetic oligonucleotide
  Antisense Strand to SEQ ID NO: 320829
uagcauauugcgauuuggu

SEQ ID NO: 320831 - RNA, 19 nt, Artificial Sequence
  Description of Artificial Sequence: Synthetic oligonucleotide
  Sense Strand Starting at position 27 of SEQ ID NO: 318947
ugucaacuauucuugagau

SEQ ID NO: 320832 - RNA, 19 nt, Artificial Sequence
  Description of Artificial Sequence: Synthetic oligonucleotide
  Antisense Strand to SEQ ID NO: 320831
aucucaagaauaguugaca

SEQ ID NO: 320833 - RNA, 19 nt, Artificial Sequence
  Description of Artificial Sequence: Synthetic oligonucleotide
  Sense Strand Starting at position 27 of SEQ ID NO: 319012
agacgaauuugcuaaauaa

SEQ ID NO: 320834 - RNA, 19 nt, Artificial Sequence
  Description of Artificial Sequence: Synthetic oligonucleotide
  Antisense Strand to SEQ ID NO: 320833
uuauuuagcaaauucgucu

SEQ ID NO: 320835 - RNA, 19 nt, Artificial Sequence
  Description of Artificial Sequence: Synthetic oligonucleotide
  Sense Strand Starting at position 27 of SEQ ID NO: 319058
aucgucuuauuacuggaau

SEQ ID NO: 320836 - RNA, 19 nt, Artificial Sequence
  Description of Artificial Sequence: Synthetic oligonucleotide
  Antisense Strand to SEQ ID NO: 320835
auuccaguaauaagacgau

SEQ ID NO: 320837 - RNA, 19 nt, Artificial Sequence
  Description of Artificial Sequence: Synthetic oligonucleotide
  Sense Strand Starting at position 27 of SEQ ID NO: 319117
aucuguauugugcacaauu

SEQ ID NO: 320838 - RNA, 19 nt, Artificial Sequence
  Description of Artificial Sequence: Synthetic oligonucleotide
  Antisense Strand to SEQ ID NO: 320837
aauugugcacaauacagau

SEQ ID NO: 320839 - RNA, 19 nt, Artificial Sequence
  Description of Artificial Sequence: Synthetic oligonucleotide
  Sense Strand Starting at position 27 of SEQ ID NO: 319119
cuguauugugcacaauuag

SEQ ID NO: 320840 - RNA, 19 nt, Artificial Sequence
  Description of Artificial Sequence: Synthetic oligonucleotide
  Antisense Strand to SEQ ID NO: 320839
cuaauugugcacaauacag

SEQ ID NO: 320841 - RNA, 19 nt, Artificial Sequence
  Description of Artificial Sequence: Synthetic oligonucleotide
  Sense Strand Starting at position 27 of SEQ ID NO: 319125
ugugcacaauuagagauuu

SEQ ID NO: 320842 - RNA, 19 nt, Artificial Sequence
  Description of Artificial Sequence: Synthetic oligonucleotide
  Antisense Strand to SEQ ID NO: 320841
aaaucucuaauugugcaca

SEQ ID NO: 320843 - RNA, 19 nt, Artificial Sequence
  Description of Artificial Sequence: Synthetic oligonucleotide
  Sense Strand Starting at position 28 of SEQ ID NO: 315253
ggaugauaauaguuuccac

SEQ ID NO: 320844 - RNA, 19 nt, Artificial Sequence
  Description of Artificial Sequence: Synthetic oligonucleotide
  Antisense Strand to SEQ ID NO: 320843
guggaaacuauuaucaucc

SEQ ID NO: 320845 - RNA, 19 nt, Artificial Sequence
  Description of Artificial Sequence: Synthetic oligonucleotide
  Sense Strand Starting at position 28 of SEQ ID NO: 315342
ggugauuuccuguguccag

SEQ ID NO: 320846 - RNA, 19 nt, Artificial Sequence
  Description of Artificial Sequence: Synthetic oligonucleotide
  Antisense Strand to SEQ ID NO: 320845
cuggacacaggaaaucacc

SEQ ID NO: 320847 - RNA, 19 nt, Artificial Sequence
  Description of Artificial Sequence: Synthetic oligonucleotide
  Sense Strand Starting at position 28 of SEQ ID NO: 315349
uccuguguccaggacuaaa

SEQ ID NO: 320848 - RNA, 19 nt, Artificial Sequence
  Description of Artificial Sequence: Synthetic oligonucleotide
  Antisense Strand to SEQ ID NO: 320847
uuuaguccuggacacagga

SEQ ID NO: 320849 - RNA, 19 nt, Artificial Sequence
  Description of Artificial Sequence: Synthetic oligonucleotide
  Sense Strand Starting at position 28 of SEQ ID NO: 315750
ccugauggcucaucuuuaa

SEQ ID NO: 320850 - RNA, 19 nt, Artificial Sequence
  Description of Artificial Sequence: Synthetic oligonucleotide
  Antisense Strand to SEQ ID NO: 320849
uuaaagaugagccaucagg

SEQ ID NO: 320851 - RNA, 19 nt, Artificial Sequence
  Description of Artificial Sequence: Synthetic oligonucleotide
  Sense Strand Starting at position 28 of SEQ ID NO: 315754
auggcucaucuuuaaagca

SEQ ID NO: 320852 - RNA, 19 nt, Artificial Sequence
  Description of Artificial Sequence: Synthetic oligonucleotide
  Antisense Strand to SEQ ID NO: 320851
ugcuuuaaagaugagccau

SEQ ID NO: 320853 - RNA, 19 nt, Artificial Sequence
  Description of Artificial Sequence: Synthetic oligonucleotide
  Sense Strand Starting at position 28 of SEQ ID NO: 315858
gaagcaggauuugaacaua

SEQ ID NO: 320854 - RNA, 19 nt, Artificial Sequence
  Description of Artificial Sequence: Synthetic oligonucleotide
  Antisense Strand to SEQ ID NO: 320853
uauguucaaauccugcuuc

SEQ ID NO: 320855 - RNA, 19 nt, Artificial Sequence
  Description of Artificial Sequence: Synthetic oligonucleotide
  Sense Strand Starting at position 28 of SEQ ID NO: 316030
aggaacuguuuauucuaga

SEQ ID NO: 320856 - RNA, 19 nt, Artificial Sequence
  Description of Artificial Sequence: Synthetic oligonucleotide
  Antisense Strand to SEQ ID NO: 320855
ucuagaauaaacaguuccu

SEQ ID NO: 320857 - RNA, 19 nt, Artificial Sequence
  Description of Artificial Sequence: Synthetic oligonucleotide
  Sense Strand Starting at position 28 of SEQ ID NO: 316031
ggaacuguuuauucuagac

SEQ ID NO: 320858 - RNA, 19 nt, Artificial Sequence
  Description of Artificial Sequence: Synthetic oligonucleotide
  Antisense Strand to SEQ ID NO: 320857
gucuagaauaaacaguucc

SEQ ID NO: 320859 - RNA, 19 nt, Artificial Sequence
  Description of Artificial Sequence: Synthetic oligonucleotide
  Sense Strand Starting at position 28 of SEQ ID NO: 316035
cuguuuauucuagacucau

SEQ ID NO: 320860 - RNA, 19 nt, Artificial Sequence
  Description of Artificial Sequence: Synthetic oligonucleotide
  Antisense Strand to SEQ ID NO: 320859
augagucuagaauaaacag

SEQ ID NO: 320861 - RNA, 19 nt, Artificial Sequence
  Description of Artificial Sequence: Synthetic oligonucleotide
  Sense Strand Starting at position 28 of SEQ ID NO: 316097
augcauuuguuagagagga

SEQ ID NO: 320862 - RNA, 19 nt, Artificial Sequence
  Description of Artificial Sequence: Synthetic oligonucleotide
  Antisense Strand to SEQ ID NO: 320861
uccucucuaacaaaugcau

SEQ ID NO: 320863 - RNA, 19 nt, Artificial Sequence
  Description of Artificial Sequence: Synthetic oligonucleotide
  Sense Strand Starting at position 28 of SEQ ID NO: 316297
ccgaucagaucacuucuca

SEQ ID NO: 320864 - RNA, 19 nt, Artificial Sequence
  Description of Artificial Sequence: Synthetic oligonucleotide
  Antisense Strand to SEQ ID NO: 320863
ugagaagugaucugaucgg

SEQ ID NO: 320865 - RNA, 19 nt, Artificial Sequence
  Description of Artificial Sequence: Synthetic oligonucleotide
  Sense Strand Starting at position 28 of SEQ ID NO: 316355
gacccagauucuuucugag

SEQ ID NO: 320866 - RNA, 19 nt, Artificial Sequence
  Description of Artificial Sequence: Synthetic oligonucleotide
  Antisense Strand to SEQ ID NO: 320865
cucagaaagaaucuggguc

SEQ ID NO: 320867 - RNA, 19 nt, Artificial Sequence
  Description of Artificial Sequence: Synthetic oligonucleotide
  Sense Strand Starting at position 28 of SEQ ID NO: 316357
cccagauucuuucugagcu

SEQ ID NO: 320868 - RNA, 19 nt, Artificial Sequence
  Description of Artificial Sequence: Synthetic oligonucleotide
  Antisense Strand to SEQ ID NO: 320867
agcucagaaagaaucuggg

SEQ ID NO: 320869 - RNA, 19 nt, Artificial Sequence
  Description of Artificial Sequence: Synthetic oligonucleotide
  Sense Strand Starting at position 28 of SEQ ID NO: 316741
aaauacaugcuagguguau

SEQ ID NO: 320870 - RNA, 19 nt, Artificial Sequence
  Description of Artificial Sequence: Synthetic oligonucleotide
  Antisense Strand to SEQ ID NO: 320869
auacaccuagcauguauuu

SEQ ID NO: 320871 - RNA, 19 nt, Artificial Sequence
  Description of Artificial Sequence: Synthetic oligonucleotide
  Sense Strand Starting at position 28 of SEQ ID NO: 316742
aauacaugcuagguguaua

SEQ ID NO: 320872 - RNA, 19 nt, Artificial Sequence
  Description of Artificial Sequence: Synthetic oligonucleotide
  Antisense Strand to SEQ ID NO: 320871
uauacaccuagcauguauu

SEQ ID NO: 320873 - RNA, 19 nt, Artificial Sequence
  Description of Artificial Sequence: Synthetic oligonucleotide
  Sense Strand Starting at position 28 of SEQ ID NO: 316769
uggacaugauggcuggaau

SEQ ID NO: 320874 - RNA, 19 nt, Artificial Sequence
  Description of Artificial Sequence: Synthetic oligonucleotide
  Antisense Strand to SEQ ID NO: 320873
auuccagccaucaugucca

SEQ ID NO: 320875 - RNA, 19 nt, Artificial Sequence
  Description of Artificial Sequence: Synthetic oligonucleotide
  Sense Strand Starting at position 28 of SEQ ID NO: 316770
ggacaugauggcuggaauu

SEQ ID NO: 320876 - RNA, 19 nt, Artificial Sequence
  Description of Artificial Sequence: Synthetic oligonucleotide
  Antisense Strand to SEQ ID NO: 320875
aauuccagccaucaugucc

SEQ ID NO: 320877 - RNA, 19 nt, Artificial Sequence
  Description of Artificial Sequence: Synthetic oligonucleotide
  Sense Strand Starting at position 28 of SEQ ID NO: 316856
augacaacugcugguugaa

SEQ ID NO: 320878 - RNA, 19 nt, Artificial Sequence
  Description of Artificial Sequence: Synthetic oligonucleotide
  Antisense Strand to SEQ ID NO: 320877
uucaaccagcaguugucau

SEQ ID NO: 320879 - RNA, 19 nt, Artificial Sequence
  Description of Artificial Sequence: Synthetic oligonucleotide
  Sense Strand Starting at position 28 of SEQ ID NO: 316868
gguugaaugguagguauac

SEQ ID NO: 320880 - RNA, 19 nt, Artificial Sequence
  Description of Artificial Sequence: Synthetic oligonucleotide
  Antisense Strand to SEQ ID NO: 320879
guauaccuaccauucaacc

SEQ ID NO: 320881 - RNA, 19 nt, Artificial Sequence
  Description of Artificial Sequence: Synthetic oligonucleotide
  Sense Strand Starting at position 28 of SEQ ID NO: 317168
gacuuacuuccagacgcuu

SEQ ID NO: 320882 - RNA, 19 nt, Artificial Sequence
  Description of Artificial Sequence: Synthetic oligonucleotide
  Antisense Strand to SEQ ID NO: 320881
aagcgucuggaaguaaguc

SEQ ID NO: 320883 - RNA, 19 nt, Artificial Sequence
  Description of Artificial Sequence: Synthetic oligonucleotide
  Sense Strand Starting at position 28 of SEQ ID NO: 317323
ugucucugauuugacuaga

SEQ ID NO: 320884 - RNA, 19 nt, Artificial Sequence
  Description of Artificial Sequence: Synthetic oligonucleotide
  Antisense Strand to SEQ ID NO: 320883
ucuagucaaaucagagaca

SEQ ID NO: 320885 - RNA, 19 nt, Artificial Sequence
  Description of Artificial Sequence: Synthetic oligonucleotide
  Sense Strand Starting at position 28 of SEQ ID NO: 317787
guaggcuccagagauaucu

SEQ ID NO: 320886 - RNA, 19 nt, Artificial Sequence
  Description of Artificial Sequence: Synthetic oligonucleotide
  Antisense Strand to SEQ ID NO: 320885
agauaucucuggagccuac

SEQ ID NO: 320887 - RNA, 19 nt, Artificial Sequence
  Description of Artificial Sequence: Synthetic oligonucleotide
  Sense Strand Starting at position 28 of SEQ ID NO: 317866
ggagaauccucauccgacc

SEQ ID NO: 320888 - RNA, 19 nt, Artificial Sequence
  Description of Artificial Sequence: Synthetic oligonucleotide
  Antisense Strand to SEQ ID NO: 320887
ggucggaugaggauucucc

SEQ ID NO: 320889 - RNA, 19 nt, Artificial Sequence
  Description of Artificial Sequence: Synthetic oligonucleotide
  Sense Strand Starting at position 28 of SEQ ID NO: 318061
agcagaucugucuagcuca

SEQ ID NO: 320890 - RNA, 19 nt, Artificial Sequence
  Description of Artificial Sequence: Synthetic oligonucleotide
  Antisense Strand to SEQ ID NO: 320889
ugagcuagacagaucugcu

SEQ ID NO: 320891 - RNA, 19 nt, Artificial Sequence
  Description of Artificial Sequence: Synthetic oligonucleotide
  Sense Strand Starting at position 28 of SEQ ID NO: 318064
agaucugucuagcucaaga

SEQ ID NO: 320892 - RNA, 19 nt, Artificial Sequence
  Description of Artificial Sequence: Synthetic oligonucleotide
  Antisense Strand to SEQ ID NO: 320891
ucuugagcuagacagaucu

SEQ ID NO: 320893 - RNA, 19 nt, Artificial Sequence
  Description of Artificial Sequence: Synthetic oligonucleotide
  Sense Strand Starting at position 28 of SEQ ID NO: 318415
agggacaaguccuuacuaa

SEQ ID NO: 320894 - RNA, 19 nt, Artificial Sequence
  Description of Artificial Sequence: Synthetic oligonucleotide
  Antisense Strand to SEQ ID NO: 320893
uuaguaaggacuugucccu

SEQ ID NO: 320895 - RNA, 19 nt, Artificial Sequence
  Description of Artificial Sequence: Synthetic oligonucleotide
  Sense Strand Starting at position 28 of SEQ ID NO: 318448
gaaugcuagagauggaugu

SEQ ID NO: 320896 - RNA, 19 nt, Artificial Sequence
  Description of Artificial Sequence: Synthetic oligonucleotide
  Antisense Strand to SEQ ID NO: 320895
acauccaucucuagcauuc

SEQ ID NO: 320897 - RNA, 19 nt, Artificial Sequence
  Description of Artificial Sequence: Synthetic oligonucleotide
  Sense Strand Starting at position 28 of SEQ ID NO: 318452
gcuagagauggauguguca

SEQ ID NO: 320898 - RNA, 19 nt, Artificial Sequence
  Description of Artificial Sequence: Synthetic oligonucleotide
  Antisense Strand to SEQ ID NO: 320897
ugacacauccaucucuagc

SEQ ID NO: 320899 - RNA, 19 nt, Artificial Sequence
  Description of Artificial Sequence: Synthetic oligonucleotide
  Sense Strand Starting at position 28 of SEQ ID NO: 318454
uagagauggaugugucacu

SEQ ID NO: 320900 - RNA, 19 nt, Artificial Sequence
  Description of Artificial Sequence: Synthetic oligonucleotide
  Antisense Strand to SEQ ID NO: 320899
agugacacauccaucucua

SEQ ID NO: 320901 - RNA, 19 nt, Artificial Sequence
  Description of Artificial Sequence: Synthetic oligonucleotide
  Sense Strand Starting at position 28 of SEQ ID NO: 318594
cuaaaucagccauggaaua

SEQ ID NO: 320902 - RNA, 19 nt, Artificial Sequence
  Description of Artificial Sequence: Synthetic oligonucleotide
  Antisense Strand to SEQ ID NO: 320901
uauuccauggcugauuuag

SEQ ID NO: 320903 - RNA, 19 nt, Artificial Sequence
  Description of Artificial Sequence: Synthetic oligonucleotide
  Sense Strand Starting at position 28 of SEQ ID NO: 318679
gcuggagaugaugguuaua

SEQ ID NO: 320904 - RNA, 19 nt, Artificial Sequence
  Description of Artificial Sequence: Synthetic oligonucleotide
  Antisense Strand to SEQ ID NO: 320903
uauaaccaucaucuccagc

SEQ ID NO: 320905 - RNA, 19 nt, Artificial Sequence
  Description of Artificial Sequence: Synthetic oligonucleotide
  Sense Strand Starting at position 28 of SEQ ID NO: 318681
uggagaugaugguuauacu

SEQ ID NO: 320906 - RNA, 19 nt, Artificial Sequence
  Description of Artificial Sequence: Synthetic oligonucleotide
  Antisense Strand to SEQ ID NO: 320905
aguauaaccaucaucucca

SEQ ID NO: 320907 - RNA, 19 nt, Artificial Sequence
  Description of Artificial Sequence: Synthetic oligonucleotide
  Sense Strand Starting at position 28 of SEQ ID NO: 318690
ugguuauacuucuuuccag

SEQ ID NO: 320908 - RNA, 19 nt, Artificial Sequence
  Description of Artificial Sequence: Synthetic oligonucleotide
  Antisense Strand to SEQ ID NO: 320907
cuggaaagaaguauaacca

SEQ ID NO: 320909 - RNA, 19 nt, Artificial Sequence
  Description of Artificial Sequence: Synthetic oligonucleotide
  Sense Strand Starting at position 28 of SEQ ID NO: 318791
cugcaaugugcuggaggaa

SEQ ID NO: 320910 - RNA, 19 nt, Artificial Sequence
  Description of Artificial Sequence: Synthetic oligonucleotide
  Antisense Strand to SEQ ID NO: 320909
uuccuccagcacauugcag

SEQ ID NO: 320911 - RNA, 19 nt, Artificial Sequence
  Description of Artificial Sequence: Synthetic oligonucleotide
  Sense Strand Starting at position 28 of SEQ ID NO: 318901
uaaucagagugggcucauu

SEQ ID NO: 320912 - RNA, 19 nt, Artificial Sequence
  Description of Artificial Sequence: Synthetic oligonucleotide
  Antisense Strand to SEQ ID NO: 320911
aaugagcccacucugauua

SEQ ID NO: 320913 - RNA, 19 nt, Artificial Sequence
  Description of Artificial Sequence: Synthetic oligonucleotide
  Sense Strand Starting at position 28 of SEQ ID NO: 318913
gcucauuucccuggugaac

SEQ ID NO: 320914 - RNA, 19 nt, Artificial Sequence
  Description of Artificial Sequence: Synthetic oligonucleotide
  Antisense Strand to SEQ ID NO: 320913
guucaccagggaaaugagc

SEQ ID NO: 320915 - RNA, 19 nt, Artificial Sequence
  Description of Artificial Sequence: Synthetic oligonucleotide
  Sense Strand Starting at position 28 of SEQ ID NO: 319002
gaucacugguuccuggaaa

SEQ ID NO: 320916 - RNA, 19 nt, Artificial Sequence
  Description of Artificial Sequence: Synthetic oligonucleotide
  Antisense Strand to SEQ ID NO: 320915
uuuccaggaaccagugauc

SEQ ID NO: 320917 - RNA, 19 nt, Artificial Sequence
  Description of Artificial Sequence: Synthetic oligonucleotide
  Sense Strand Starting at position 28 of SEQ ID NO: 319149
acauuauaucuggguguau

SEQ ID NO: 320918 - RNA, 19 nt, Artificial Sequence
  Description of Artificial Sequence: Synthetic oligonucleotide
  Antisense Strand to SEQ ID NO: 320917
auacacccagauauaaugu

SEQ ID NO: 320919 - RNA, 19 nt, Artificial Sequence
  Description of Artificial Sequence: Synthetic oligonucleotide
  Sense Strand Starting at position 28 of SEQ ID NO: 319150
cauuauaucuggguguauc

SEQ ID NO: 320920 - RNA, 19 nt, Artificial Sequence
  Description of Artificial Sequence: Synthetic oligonucleotide
  Antisense Strand to SEQ ID NO: 320919
gauacacccagauauaaug

SEQ ID NO: 320921 - RNA, 19 nt, Artificial Sequence
  Description of Artificial Sequence: Synthetic oligonucleotide
  Sense Strand Starting at position 28 of SEQ ID NO: 319151
auuauaucuggguguaucu

SEQ ID NO: 320922 - RNA, 19 nt, Artificial Sequence
  Description of Artificial Sequence: Synthetic oligonucleotide
  Antisense Strand to SEQ ID NO: 320921
agauacacccagauauaau

SEQ ID NO: 320923 - RNA, 19 nt, Artificial Sequence
  Description of Artificial Sequence: Synthetic oligonucleotide
  Sense Strand Starting at position 29 of SEQ ID NO: 315280
uuaagagagucaccagcua

SEQ ID NO: 320924 - RNA, 19 nt, Artificial Sequence
  Description of Artificial Sequence: Synthetic oligonucleotide
  Antisense Strand to SEQ ID NO: 320923
uagcuggugacucucuuaa

SEQ ID NO: 320925 - RNA, 19 nt, Artificial Sequence
  Description of Artificial Sequence: Synthetic oligonucleotide
  Sense Strand Starting at position 29 of SEQ ID NO: 315549
gucaguccuucugcaaguu

SEQ ID NO: 320926 - RNA, 19 nt, Artificial Sequence
  Description of Artificial Sequence: Synthetic oligonucleotide
  Antisense Strand to SEQ ID NO: 320925
aacuugcagaaggacugac

SEQ ID NO: 320927 - RNA, 19 nt, Artificial Sequence
  Description of Artificial Sequence: Synthetic oligonucleotide
  Sense Strand Starting at position 29 of SEQ ID NO: 315568
cagggauaucuccagcuac

SEQ ID NO: 320928 - RNA, 19 nt, Artificial Sequence
  Description of Artificial Sequence: Synthetic oligonucleotide
  Antisense Strand to SEQ ID NO: 320927
guagcuggagauaucccug

SEQ ID NO: 320929 - RNA, 19 nt, Artificial Sequence
  Description of Artificial Sequence: Synthetic oligonucleotide
  Sense Strand Starting at position 29 of SEQ ID NO: 315833
acugcauucccacagugau

SEQ ID NO: 320930 - RNA, 19 nt, Artificial Sequence
  Description of Artificial Sequence: Synthetic oligonucleotide
  Antisense Strand to SEQ ID NO: 320929
aucacugugggaaugcagu

SEQ ID NO: 320931 - RNA, 19 nt, Artificial Sequence
  Description of Artificial Sequence: Synthetic oligonucleotide
  Sense Strand Starting at position 29 of SEQ ID NO: 315843
cacagugauggcuacaguu

SEQ ID NO: 320932 - RNA, 19 nt, Artificial Sequence
  Description of Artificial Sequence: Synthetic oligonucleotide
  Antisense Strand to SEQ ID NO: 320931
aacuguagccaucacugug

SEQ ID NO: 320933 - RNA, 19 nt, Artificial Sequence
  Description of Artificial Sequence: Synthetic oligonucleotide
  Sense Strand Starting at position 29 of SEQ ID NO: 315950
guaagaagcucccaaauag

SEQ ID NO: 320934 - RNA, 19 nt, Artificial Sequence
  Description of Artificial Sequence: Synthetic oligonucleotide
  Antisense Strand to SEQ ID NO: 320933
cuauuugggagcuucuuac

SEQ ID NO: 320935 - RNA, 19 nt, Artificial Sequence
  Description of Artificial Sequence: Synthetic oligonucleotide
  Sense Strand Starting at position 29 of SEQ ID NO: 316212
gcguguagaugguguagau

SEQ ID NO: 320936 - RNA, 19 nt, Artificial Sequence
  Description of Artificial Sequence: Synthetic oligonucleotide
  Antisense Strand to SEQ ID NO: 320935
aucuacaccaucuacacgc

SEQ ID NO: 320937 - RNA, 19 nt, Artificial Sequence
  Description of Artificial Sequence: Synthetic oligonucleotide
  Sense Strand Starting at position 29 of SEQ ID NO: 316341
ccaugugguccugguggaa

SEQ ID NO: 320938 - RNA, 19 nt, Artificial Sequence
  Description of Artificial Sequence: Synthetic oligonucleotide
  Antisense Strand to SEQ ID NO: 320937
uuccaccaggaccacaugg

SEQ ID NO: 320939 - RNA, 19 nt, Artificial Sequence
  Description of Artificial Sequence: Synthetic oligonucleotide
  Sense Strand Starting at position 29 of SEQ ID NO: 316556
uccaguuuguccgacggga

SEQ ID NO: 320940 - RNA, 19 nt, Artificial Sequence
  Description of Artificial Sequence: Synthetic oligonucleotide
  Antisense Strand to SEQ ID NO: 320939
ucccgucggacaaacugga

SEQ ID NO: 320941 - RNA, 19 nt, Artificial Sequence
  Description of Artificial Sequence: Synthetic oligonucleotide
  Sense Strand Starting at position 29 of SEQ ID NO: 316558
caguuuguccgacgggaac

SEQ ID NO: 320942 - RNA, 19 nt, Artificial Sequence
  Description of Artificial Sequence: Synthetic oligonucleotide
  Antisense Strand to SEQ ID NO: 320941
guucccgucggacaaacug

SEQ ID NO: 320943 - RNA, 19 nt, Artificial Sequence
  Description of Artificial Sequence: Synthetic oligonucleotide
  Sense Strand Starting at position 29 of SEQ ID NO: 316560
guuuguccgacgggaacuu

SEQ ID NO: 320944 - RNA, 19 nt, Artificial Sequence
  Description of Artificial Sequence: Synthetic oligonucleotide
  Antisense Strand to SEQ ID NO: 320943
aaguucccgucggacaaac

SEQ ID NO: 320945 - RNA, 19 nt, Artificial Sequence
  Description of Artificial Sequence: Synthetic oligonucleotide
  Sense Strand Starting at position 29 of SEQ ID NO: 316574
aacuucuuggagcggaaua

SEQ ID NO: 320946 - RNA, 19 nt, Artificial Sequence
  Description of Artificial Sequence: Synthetic oligonucleotide
  Antisense Strand to SEQ ID NO: 320945
uauuccgcuccaagaaguu

SEQ ID NO: 320947 - RNA, 19 nt, Artificial Sequence
  Description of Artificial Sequence: Synthetic oligonucleotide
  Sense Strand Starting at position 29 of SEQ ID NO: 316575
acuucuuggagcggaauau

SEQ ID NO: 320948 - RNA, 19 nt, Artificial Sequence
  Description of Artificial Sequence: Synthetic oligonucleotide
  Antisense Strand to SEQ ID NO: 320947
auauuccgcuccaagaagu

SEQ ID NO: 320949 - RNA, 19 nt, Artificial Sequence
  Description of Artificial Sequence: Synthetic oligonucleotide
  Sense Strand Starting at position 29 of SEQ ID NO: 316585
gcggaauaucugcagcaac

SEQ ID NO: 320950 - RNA, 19 nt, Artificial Sequence
  Description of Artificial Sequence: Synthetic oligonucleotide
  Antisense Strand to SEQ ID NO: 320949
guugcugcagauauuccgc

SEQ ID NO: 320951 - RNA, 19 nt, Artificial Sequence
  Description of Artificial Sequence: Synthetic oligonucleotide
  Sense Strand Starting at position 29 of SEQ ID NO: 317111
uagccauucgcgcgggaau

SEQ ID NO: 320952 - RNA, 19 nt, Artificial Sequence
  Description of Artificial Sequence: Synthetic oligonucleotide
  Antisense Strand to SEQ ID NO: 320951
auucccgcgcgaauggcua

SEQ ID NO: 320953 - RNA, 19 nt, Artificial Sequence
  Description of Artificial Sequence: Synthetic oligonucleotide
  Sense Strand Starting at position 29 of SEQ ID NO: 317426
gugagaaguagcugaggau

SEQ ID NO: 320954 - RNA, 19 nt, Artificial Sequence
  Description of Artificial Sequence: Synthetic oligonucleotide
  Antisense Strand to SEQ ID NO: 320953
auccucagcuacuucucac

SEQ ID NO: 320955 - RNA, 19 nt, Artificial Sequence
  Description of Artificial Sequence: Synthetic oligonucleotide
  Sense Strand Starting at position 29 of SEQ ID NO: 317439
gaggauccgcgucagaagu

SEQ ID NO: 320956 - RNA, 19 nt, Artificial Sequence
  Description of Artificial Sequence: Synthetic oligonucleotide
  Antisense Strand to SEQ ID NO: 320955
acuucugacgcggauccuc

SEQ ID NO: 320957 - RNA, 19 nt, Artificial Sequence
  Description of Artificial Sequence: Synthetic oligonucleotide
  Sense Strand Starting at position 29 of SEQ ID NO: 318894
gcgcucuuauugggcgauu

SEQ ID NO: 320958 - RNA, 19 nt, Artificial Sequence
  Description of Artificial Sequence: Synthetic oligonucleotide
  Antisense Strand to SEQ ID NO: 320957
aaucgcccaauaagagcgc

SEQ ID NO: 320959 - RNA, 19 nt, Artificial Sequence
  Description of Artificial Sequence: Synthetic oligonucleotide
  Sense Strand Starting at position 29 of SEQ ID NO: 318896
gcucuuauugggcgauucu

SEQ ID NO: 320960 - RNA, 19 nt, Artificial Sequence
  Description of Artificial Sequence: Synthetic oligonucleotide
  Antisense Strand to SEQ ID NO: 320959
agaaucgcccaauaagagc

SEQ ID NO: 320961 - RNA, 19 nt, Artificial Sequence
  Description of Artificial Sequence: Synthetic oligonucleotide
  Sense Strand Starting at position 29 of SEQ ID NO: 319150
aggcuuugguggguaguua

SEQ ID NO: 320962 - RNA, 19 nt, Artificial Sequence
  Description of Artificial Sequence: Synthetic oligonucleotide
  Antisense Strand to SEQ ID NO: 320961
uaacuacccaccaaagccu

SEQ ID NO: 320963 - RNA, 19 nt, Artificial Sequence
  Description of Artificial Sequence: Synthetic oligonucleotide
  Sense Strand Starting at position 29 of SEQ ID NO: 319158
guggguaguuaccaggaga

SEQ ID NO: 320964 - RNA, 19 nt, Artificial Sequence
  Description of Artificial Sequence: Synthetic oligonucleotide
  Antisense Strand to SEQ ID NO: 320963
ucuccugguaacuacccac

SEQ ID NO: 320965 - RNA, 19 nt, Artificial Sequence
  Description of Artificial Sequence: Synthetic oligonucleotide
  Sense Strand Starting at position 30 of SEQ ID NO: 315443
gugaucucagcuuaagacu

SEQ ID NO: 320966 - RNA, 19 nt, Artificial Sequence
  Description of Artificial Sequence: Synthetic oligonucleotide
  Antisense Strand to SEQ ID NO: 320965
agucuuaagcugagaucac

SEQ ID NO: 320967 - RNA, 19 nt, Artificial Sequence
  Description of Artificial Sequence: Synthetic oligonucleotide
  Sense Strand Starting at position 30 of SEQ ID NO: 315452
gcuuaagacuccucggcca

SEQ ID NO: 320968 - RNA, 19 nt, Artificial Sequence
  Description of Artificial Sequence: Synthetic oligonucleotide
  Antisense Strand to SEQ ID NO: 320967
uggccgaggagucuuaagc

SEQ ID NO: 320969 - RNA, 19 nt, Artificial Sequence
  Description of Artificial Sequence: Synthetic oligonucleotide
  Sense Strand Starting at position 30 of SEQ ID NO: 315821
cggacauauucugcuagca

SEQ ID NO: 320970 - RNA, 19 nt, Artificial Sequence
  Description of Artificial Sequence: Synthetic oligonucleotide
  Antisense Strand to SEQ ID NO: 320969
ugcuagcagaauauguccg

SEQ ID NO: 320971 - RNA, 19 nt, Artificial Sequence
  Description of Artificial Sequence: Synthetic oligonucleotide
  Sense Strand Starting at position 30 of SEQ ID NO: 315893
gcggaguuccuaggaguga

SEQ ID NO: 320972 - RNA, 19 nt, Artificial Sequence
  Description of Artificial Sequence: Synthetic oligonucleotide
  Antisense Strand to SEQ ID NO: 320971
ucacuccuaggaacuccgc

SEQ ID NO: 320973 - RNA, 19 nt, Artificial Sequence
  Description of Artificial Sequence: Synthetic oligonucleotide
  Sense Strand Starting at position 30 of SEQ ID NO: 315924
ccuugugaggcuugaucca

SEQ ID NO: 320974 - RNA, 19 nt, Artificial Sequence
  Description of Artificial Sequence: Synthetic oligonucleotide
  Antisense Strand to SEQ ID NO: 320973
uggaucaagccucacaagg

SEQ ID NO: 320975 - RNA, 19 nt, Artificial Sequence
  Description of Artificial Sequence: Synthetic oligonucleotide
  Sense Strand Starting at position 30 of SEQ ID NO: 315965
agggauccauguccucuaa

SEQ ID NO: 320976 - RNA, 19 nt, Artificial Sequence
  Description of Artificial Sequence: Synthetic oligonucleotide
  Antisense Strand to SEQ ID NO: 320975
uuagaggacauggaucccu

SEQ ID NO: 320977 - RNA, 19 nt, Artificial Sequence
  Description of Artificial Sequence: Synthetic oligonucleotide
  Sense Strand Starting at position 30 of SEQ ID NO: 315967
ggauccauguccucuaaca

SEQ ID NO: 320978 - RNA, 19 nt, Artificial Sequence
  Description of Artificial Sequence: Synthetic oligonucleotide
  Antisense Strand to SEQ ID NO: 320977
uguuagaggacauggaucc

SEQ ID NO: 320979 - RNA, 19 nt, Artificial Sequence
  Description of Artificial Sequence: Synthetic oligonucleotide
  Sense Strand Starting at position 30 of SEQ ID NO: 316121
ccaguuucuucugucagaa

SEQ ID NO: 320980 - RNA, 19 nt, Artificial Sequence
  Description of Artificial Sequence: Synthetic oligonucleotide
  Antisense Strand to SEQ ID NO: 320979
uucugacagaagaaacugg

SEQ ID NO: 320981 - RNA, 19 nt, Artificial Sequence
  Description of Artificial Sequence: Synthetic oligonucleotide
  Sense Strand Starting at position 30 of SEQ ID NO: 316522
cauggcuggccucauuaga

SEQ ID NO: 320982 - RNA, 19 nt, Artificial Sequence
  Description of Artificial Sequence: Synthetic oligonucleotide
  Antisense Strand to SEQ ID NO: 320981
ucuaaugaggccagccaug

SEQ ID NO: 320983 - RNA, 19 nt, Artificial Sequence
  Description of Artificial Sequence: Synthetic oligonucleotide
  Sense Strand Starting at position 30 of SEQ ID NO: 316544
ucuugauuaccuuguaaga

SEQ ID NO: 320984 - RNA, 19 nt, Artificial Sequence
  Description of Artificial Sequence: Synthetic oligonucleotide
  Antisense Strand to SEQ ID NO: 320983
ucuuacaagguaaucaaga

SEQ ID NO: 320985 - RNA, 19 nt, Artificial Sequence
  Description of Artificial Sequence: Synthetic oligonucleotide
  Sense Strand Starting at position 30 of SEQ ID NO: 316642
cugucuagcccauagaauu

SEQ ID NO: 320986 - RNA, 19 nt, Artificial Sequence
  Description of Artificial Sequence: Synthetic oligonucleotide
  Antisense Strand to SEQ ID NO: 320985
aauucuaugggcuagacag

SEQ ID NO: 320987 - RNA, 19 nt, Artificial Sequence
  Description of Artificial Sequence: Synthetic oligonucleotide
  Sense Strand Starting at position 30 of SEQ ID NO: 316701
cuggauuccuaauuccagu

SEQ ID NO: 320988 - RNA, 19 nt, Artificial Sequence
  Description of Artificial Sequence: Synthetic oligonucleotide
  Antisense Strand to SEQ ID NO: 320987
acuggaauuaggaauccag

SEQ ID NO: 320989 - RNA, 19 nt, Artificial Sequence
  Description of Artificial Sequence: Synthetic oligonucleotide
  Sense Strand Starting at position 30 of SEQ ID NO: 316801
ggcaauguauucccuuauc

SEQ ID NO: 320990 - RNA, 19 nt, Artificial Sequence
  Description of Artificial Sequence: Synthetic oligonucleotide
  Antisense Strand to SEQ ID NO: 320989
gauaagggaauacauugcc

SEQ ID NO: 320991 - RNA, 19 nt, Artificial Sequence
  Description of Artificial Sequence: Synthetic oligonucleotide
  Sense Strand Starting at position 30 of SEQ ID NO: 316835
ggacuucaucuguggacag

SEQ ID NO: 320992 - RNA, 19 nt, Artificial Sequence
  Description of Artificial Sequence: Synthetic oligonucleotide
  Antisense Strand to SEQ ID NO: 320991
cuguccacagaugaagucc

SEQ ID NO: 320993 - RNA, 19 nt, Artificial Sequence
  Description of Artificial Sequence: Synthetic oligonucleotide
  Sense Strand Starting at position 30 of SEQ ID NO: 316884
cucaauagguauccugcua

SEQ ID NO: 320994 - RNA, 19 nt, Artificial Sequence
  Description of Artificial Sequence: Synthetic oligonucleotide
  Antisense Strand to SEQ ID NO: 320993
uagcaggauaccuauugag

SEQ ID NO: 320995 - RNA, 19 nt, Artificial Sequence
  Description of Artificial Sequence: Synthetic oligonucleotide
  Sense Strand Starting at position 30 of SEQ ID NO: 316946
gaaggaaugucugaaauaa

SEQ ID NO: 320996 - RNA, 19 nt, Artificial Sequence
  Description of Artificial Sequence: Synthetic oligonucleotide
  Antisense Strand to SEQ ID NO: 320995
uuauuucagacauuccuuc

SEQ ID NO: 320997 - RNA, 19 nt, Artificial Sequence
  Description of Artificial Sequence: Synthetic oligonucleotide
  Sense Strand Starting at position 30 of SEQ ID NO: 316998
gaagaagcccagugcauau

SEQ ID NO: 320998 - RNA, 19 nt, Artificial Sequence
  Description of Artificial Sequence: Synthetic oligonucleotide
  Antisense Strand to SEQ ID NO: 320997
auaugcacugggcuucuuc

SEQ ID NO: 320999 - RNA, 19 nt, Artificial Sequence
  Description of Artificial Sequence: Synthetic oligonucleotide
  Sense Strand Starting at position 30 of SEQ ID NO: 317274
gucauuucccauuggccaa

SEQ ID NO: 321000 - RNA, 19 nt, Artificial Sequence
  Description of Artificial Sequence: Synthetic oligonucleotide
  Antisense Strand to SEQ ID NO: 320999
uuggccaaugggaaaugac

SEQ ID NO: 321001 - RNA, 19 nt, Artificial Sequence
  Description of Artificial Sequence: Synthetic oligonucleotide
  Sense Strand Starting at position 30 of SEQ ID NO: 317398
aguggagcuucagucaaag

SEQ ID NO: 321002 - RNA, 19 nt, Artificial Sequence
  Description of Artificial Sequence: Synthetic oligonucleotide
  Antisense Strand to SEQ ID NO: 321001
cuuugacugaagcuccacu

SEQ ID NO: 321003 - RNA, 19 nt, Artificial Sequence
  Description of Artificial Sequence: Synthetic oligonucleotide
  Sense Strand Starting at position 30 of SEQ ID NO: 317409
agucaaagcacuuguguuu

SEQ ID NO: 321004 - RNA, 19 nt, Artificial Sequence
  Description of Artificial Sequence: Synthetic oligonucleotide
  Antisense Strand to SEQ ID NO: 321003
aaacacaagugcuuugacu

SEQ ID NO: 321005 - RNA, 19 nt, Artificial Sequence
  Description of Artificial Sequence: Synthetic oligonucleotide
  Sense Strand Starting at position 30 of SEQ ID NO: 317516
ccugcaucugacggagaaa

SEQ ID NO: 321006 - RNA, 19 nt, Artificial Sequence
  Description of Artificial Sequence: Synthetic oligonucleotide
  Antisense Strand to SEQ ID NO: 321005
uuucuccgucagaugcagg

SEQ ID NO: 321007 - RNA, 19 nt, Artificial Sequence
  Description of Artificial Sequence: Synthetic oligonucleotide
  Sense Strand Starting at position 30 of SEQ ID NO: 317519
gcaucugacggagaaacuu

SEQ ID NO: 321008 - RNA, 19 nt, Artificial Sequence
  Description of Artificial Sequence: Synthetic oligonucleotide
  Antisense Strand to SEQ ID NO: 321007
aaguuucuccgucagaugc

SEQ ID NO: 321009 - RNA, 19 nt, Artificial Sequence
  Description of Artificial Sequence: Synthetic oligonucleotide
  Sense Strand Starting at position 30 of SEQ ID NO: 317527
cggagaaacuuccuaaugu

SEQ ID NO: 321010 - RNA, 19 nt, Artificial Sequence
  Description of Artificial Sequence: Synthetic oligonucleotide
  Antisense Strand to SEQ ID NO: 321009
acauuaggaaguuucuccg

SEQ ID NO: 321011 - RNA, 19 nt, Artificial Sequence
  Description of Artificial Sequence: Synthetic oligonucleotide
  Sense Strand Starting at position 30 of SEQ ID NO: 317550
gaauuaauugcucaguggu

SEQ ID NO: 321012 - RNA, 19 nt, Artificial Sequence
  Description of Artificial Sequence: Synthetic oligonucleotide
  Antisense Strand to SEQ ID NO: 321011
accacugagcaauuaauuc

SEQ ID NO: 321013 - RNA, 19 nt, Artificial Sequence
  Description of Artificial Sequence: Synthetic oligonucleotide
  Sense Strand Starting at position 30 of SEQ ID NO: 317639
gcucacugugcaugauuaa

SEQ ID NO: 321014 - RNA, 19 nt, Artificial Sequence
  Description of Artificial Sequence: Synthetic oligonucleotide
  Antisense Strand to SEQ ID NO: 321013
uuaaucaugcacagugagc

SEQ ID NO: 321015 - RNA, 19 nt, Artificial Sequence
  Description of Artificial Sequence: Synthetic oligonucleotide
  Sense Strand Starting at position 30 of SEQ ID NO: 317649
caugauuaagucugagacu

SEQ ID NO: 321016 - RNA, 19 nt, Artificial Sequence
  Description of Artificial Sequence: Synthetic oligonucleotide
  Antisense Strand to SEQ ID NO: 321015
agucucagacuuaaucaug

SEQ ID NO: 321017 - RNA, 19 nt, Artificial Sequence
  Description of Artificial Sequence: Synthetic oligonucleotide
  Sense Strand Starting at position 30 of SEQ ID NO: 317662
gagacuguguacguucaga

SEQ ID NO: 321018 - RNA, 19 nt, Artificial Sequence
  Description of Artificial Sequence: Synthetic oligonucleotide
  Antisense Strand to SEQ ID NO: 321017
ucugaacguacacagucuc

SEQ ID NO: 321019 - RNA, 19 nt, Artificial Sequence
  Description of Artificial Sequence: Synthetic oligonucleotide
  Sense Strand Starting at position 30 of SEQ ID NO: 317817
ggaaguuccuggaguggug

SEQ ID NO: 321020 - RNA, 19 nt, Artificial Sequence
  Description of Artificial Sequence: Synthetic oligonucleotide
  Antisense Strand to SEQ ID NO: 321019
caccacuccaggaacuucc

SEQ ID NO: 321021 - RNA, 19 nt, Artificial Sequence
  Description of Artificial Sequence: Synthetic oligonucleotide
  Sense Strand Starting at position 30 of SEQ ID NO: 318135
ccacuuagguguuccuaga

SEQ ID NO: 321022 - RNA, 19 nt, Artificial Sequence
  Description of Artificial Sequence: Synthetic oligonucleotide
  Antisense Strand to SEQ ID NO: 321021
ucuaggaacaccuaagugg

SEQ ID NO: 321023 - RNA, 19 nt, Artificial Sequence
  Description of Artificial Sequence: Synthetic oligonucleotide
  Sense Strand Starting at position 30 of SEQ ID NO: 318150
uagaaaguuuaggcuugaa

SEQ ID NO: 321024 - RNA, 19 nt, Artificial Sequence
  Description of Artificial Sequence: Synthetic oligonucleotide
  Antisense Strand to SEQ ID NO: 321023
uucaagccuaaacuuucua

SEQ ID NO: 321025 - RNA, 19 nt, Artificial Sequence
  Description of Artificial Sequence: Synthetic oligonucleotide
  Sense Strand Starting at position 30 of SEQ ID NO: 318153
aaaguuuaggcuugaagug

SEQ ID NO: 321026 - RNA, 19 nt, Artificial Sequence
  Description of Artificial Sequence: Synthetic oligonucleotide
  Antisense Strand to SEQ ID NO: 321025
cacuucaagccuaaacuuu

SEQ ID NO: 321027 - RNA, 19 nt, Artificial Sequence
  Description of Artificial Sequence: Synthetic oligonucleotide
  Sense Strand Starting at position 30 of SEQ ID NO: 318441
aaguaaagaucugauguaa

SEQ ID NO: 321028 - RNA, 19 nt, Artificial Sequence
  Description of Artificial Sequence: Synthetic oligonucleotide
  Antisense Strand to SEQ ID NO: 321027
uuacaucagaucuuuacuu

SEQ ID NO: 321029 - RNA, 19 nt, Artificial Sequence
  Description of Artificial Sequence: Synthetic oligonucleotide
  Sense Strand Starting at position 30 of SEQ ID NO: 318503
acauuaggccguugagaug

SEQ ID NO: 321030 - RNA, 19 nt, Artificial Sequence
  Description of Artificial Sequence: Synthetic oligonucleotide
  Antisense Strand to SEQ ID NO: 321029
caucucaacggccuaaugu

SEQ ID NO: 321031 - RNA, 19 nt, Artificial Sequence
  Description of Artificial Sequence: Synthetic oligonucleotide
  Sense Strand Starting at position 30 of SEQ ID NO: 318528
augagagacuuuccaaggu

SEQ ID NO: 321032 - RNA, 19 nt, Artificial Sequence
  Description of Artificial Sequence: Synthetic oligonucleotide
  Antisense Strand to SEQ ID NO: 321031
accuuggaaagucucucau

SEQ ID NO: 321033 - RNA, 19 nt, Artificial Sequence
  Description of Artificial Sequence: Synthetic oligonucleotide
  Sense Strand Starting at position 30 of SEQ ID NO: 318580
gguuccauauaguuuagca

SEQ ID NO: 321034 - RNA, 19 nt, Artificial Sequence
  Description of Artificial Sequence: Synthetic oligonucleotide
  Antisense Strand to SEQ ID NO: 321033
ugcuaaacuauauggaacc

SEQ ID NO: 321035 - RNA, 19 nt, Artificial Sequence
  Description of Artificial Sequence: Synthetic oligonucleotide
  Sense Strand Starting at position 30 of SEQ ID NO: 318587
uauaguuuagcaggcugau

SEQ ID NO: 321036 - RNA, 19 nt, Artificial Sequence
  Description of Artificial Sequence: Synthetic oligonucleotide
  Antisense Strand to SEQ ID NO: 321035
aucagccugcuaaacuaua

SEQ ID NO: 321037 - RNA, 19 nt, Artificial Sequence
  Description of Artificial Sequence: Synthetic oligonucleotide
  Sense Strand Starting at position 30 of SEQ ID NO: 318708
gucuguugcuauuuaauag

SEQ ID NO: 321038 - RNA, 19 nt, Artificial Sequence
  Description of Artificial Sequence: Synthetic oligonucleotide
  Antisense Strand to SEQ ID NO: 321037
cuauuaaauagcaacagac

SEQ ID NO: 321039 - RNA, 19 nt, Artificial Sequence
  Description of Artificial Sequence: Synthetic oligonucleotide
  Sense Strand Starting at position 30 of SEQ ID NO: 318712
guugcuauuuaauagaaca

SEQ ID NO: 321040 - RNA, 19 nt, Artificial Sequence
  Description of Artificial Sequence: Synthetic oligonucleotide
  Antisense Strand to SEQ ID NO: 321039
uguucuauuaaauagcaac

SEQ ID NO: 321041 - RNA, 19 nt, Artificial Sequence
  Description of Artificial Sequence: Synthetic oligonucleotide
  Sense Strand Starting at position 30 of SEQ ID NO: 318791
acaggcauaucaccugaga

SEQ ID NO: 321042 - RNA, 19 nt, Artificial Sequence
  Description of Artificial Sequence: Synthetic oligonucleotide
  Antisense Strand to SEQ ID NO: 321041
ucucaggugauaugccugu

SEQ ID NO: 321043 - RNA, 19 nt, Artificial Sequence
  Description of Artificial Sequence: Synthetic oligonucleotide
  Sense Strand Starting at position 30 of SEQ ID NO: 319212
ucuagaguucaaugagggu

SEQ ID NO: 321044 - RNA, 19 nt, Artificial Sequence
  Description of Artificial Sequence: Synthetic oligonucleotide
  Antisense Strand to SEQ ID NO: 321043
acccucauugaacucuaga

SEQ ID NO: 321045 - RNA, 19 nt, Artificial Sequence
  Description of Artificial Sequence: Synthetic oligonucleotide
  Sense Strand Starting at position 31 of SEQ ID NO: 315259
uggauuuguuguuaggaau

SEQ ID NO: 321046 - RNA, 19 nt, Artificial Sequence
  Description of Artificial Sequence: Synthetic oligonucleotide
  Antisense Strand to SEQ ID NO: 321045
auuccuaacaacaaaucca

SEQ ID NO: 321047 - RNA, 19 nt, Artificial Sequence
  Description of Artificial Sequence: Synthetic oligonucleotide
  Sense Strand Starting at position 31 of SEQ ID NO: 315720
ccuuuccuucgacaguaau

SEQ ID NO: 321048 - RNA, 19 nt, Artificial Sequence
  Description of Artificial Sequence: Synthetic oligonucleotide
  Antisense Strand to SEQ ID NO: 321047
auuacugucgaaggaaagg

SEQ ID NO: 321049 - RNA, 19 nt, Artificial Sequence
  Description of Artificial Sequence: Synthetic oligonucleotide
  Sense Strand Starting at position 31 of SEQ ID NO: 315723
uuccuucgacaguaauguu

SEQ ID NO: 321050 - RNA, 19 nt, Artificial Sequence
  Description of Artificial Sequence: Synthetic oligonucleotide
  Antisense Strand to SEQ ID NO: 321049
aacauuacugucgaaggaa

SEQ ID NO: 321051 - RNA, 19 nt, Artificial Sequence
  Description of Artificial Sequence: Synthetic oligonucleotide
  Sense Strand Starting at position 31 of SEQ ID NO: 315846
guuggugcauuuccuaaga

SEQ ID NO: 321052 - RNA, 19 nt, Artificial Sequence
  Description of Artificial Sequence: Synthetic oligonucleotide
  Antisense Strand to SEQ ID NO: 321051
ucuuaggaaaugcaccaac

SEQ ID NO: 321053 - RNA, 19 nt, Artificial Sequence
  Description of Artificial Sequence: Synthetic oligonucleotide
  Sense Strand Starting at position 31 of SEQ ID NO: 315877
cagccaauuccucaggguu

SEQ ID NO: 321054 - RNA, 19 nt, Artificial Sequence
  Description of Artificial Sequence: Synthetic oligonucleotide
  Antisense Strand to SEQ ID NO: 321053
aacccugaggaauuggcug

SEQ ID NO: 321055 - RNA, 19 nt, Artificial Sequence
  Description of Artificial Sequence: Synthetic oligonucleotide
  Sense Strand Starting at position 31 of SEQ ID NO: 315951
uuuauaagggucuggcaga

SEQ ID NO: 321056 - RNA, 19 nt, Artificial Sequence
  Description of Artificial Sequence: Synthetic oligonucleotide
  Antisense Strand to SEQ ID NO: 321055
ucugccagacccuuauaaa

SEQ ID NO: 321057 - RNA, 19 nt, Artificial Sequence
  Description of Artificial Sequence: Synthetic oligonucleotide
  Sense Strand Starting at position 31 of SEQ ID NO: 316126
aggaguaaacgacgaagau

SEQ ID NO: 321058 - RNA, 19 nt, Artificial Sequence
  Description of Artificial Sequence: Synthetic oligonucleotide
  Antisense Strand to SEQ ID NO: 321057
aucuucgucguuuacuccu

SEQ ID NO: 321059 - RNA, 19 nt, Artificial Sequence
  Description of Artificial Sequence: Synthetic oligonucleotide
  Sense Strand Starting at position 31 of SEQ ID NO: 316177
cugaguuucugagcucaca

SEQ ID NO: 321060 - RNA, 19 nt, Artificial Sequence
  Description of Artificial Sequence: Synthetic oligonucleotide
  Antisense Strand to SEQ ID NO: 321059
ugugagcucagaaacucag

SEQ ID NO: 321061 - RNA, 19 nt, Artificial Sequence
  Description of Artificial Sequence: Synthetic oligonucleotide
  Sense Strand Starting at position 31 of SEQ ID NO: 316241
aagccuaggcacugagauu

SEQ ID NO: 321062 - RNA, 19 nt, Artificial Sequence
  Description of Artificial Sequence: Synthetic oligonucleotide
  Antisense Strand to SEQ ID NO: 321061
aaucucagugccuaggcuu

SEQ ID NO: 321063 - RNA, 19 nt, Artificial Sequence
  Description of Artificial Sequence: Synthetic oligonucleotide
  Sense Strand Starting at position 31 of SEQ ID NO: 316252
cugagauucugggcuacua

SEQ ID NO: 321064 - RNA, 19 nt, Artificial Sequence
  Description of Artificial Sequence: Synthetic oligonucleotide
  Antisense Strand to SEQ ID NO: 321063
uaguagcccagaaucucag

SEQ ID NO: 321065 - RNA, 19 nt, Artificial Sequence
  Description of Artificial Sequence: Synthetic oligonucleotide
  Sense Strand Starting at position 31 of SEQ ID NO: 316263
ggcuacuagaccugacaga

SEQ ID NO: 321066 - RNA, 19 nt, Artificial Sequence
  Description of Artificial Sequence: Synthetic oligonucleotide
  Antisense Strand to SEQ ID NO: 321065
ucugucaggucuaguagcc

SEQ ID NO: 321067 - RNA, 19 nt, Artificial Sequence
  Description of Artificial Sequence: Synthetic oligonucleotide
  Sense Strand Starting at position 31 of SEQ ID NO: 316293
gcgguuugcccaucuguaa

SEQ ID NO: 321068 - RNA, 19 nt, Artificial Sequence
  Description of Artificial Sequence: Synthetic oligonucleotide
  Antisense Strand to SEQ ID NO: 321067
uuacagaugggcaaaccgc

SEQ ID NO: 321069 - RNA, 19 nt, Artificial Sequence
  Description of Artificial Sequence: Synthetic oligonucleotide
  Sense Strand Starting at position 31 of SEQ ID NO: 316524
gaagaagaccggcaucuuu

SEQ ID NO: 321070 - RNA, 19 nt, Artificial Sequence
  Description of Artificial Sequence: Synthetic oligonucleotide
  Antisense Strand to SEQ ID NO: 321069
aaagaugccggucuucuuc

SEQ ID NO: 321071 - RNA, 19 nt, Artificial Sequence
  Description of Artificial Sequence: Synthetic oligonucleotide
  Sense Strand Starting at position 31 of SEQ ID NO: 316547
gguuguaaauucccuuuaa

SEQ ID NO: 321072 - RNA, 19 nt, Artificial Sequence
  Description of Artificial Sequence: Synthetic oligonucleotide
  Antisense Strand to SEQ ID NO: 321071
uuaaagggaauuuacaacc

SEQ ID NO: 321073 - RNA, 19 nt, Artificial Sequence
  Description of Artificial Sequence: Synthetic oligonucleotide
  Sense Strand Starting at position 31 of SEQ ID NO: 316548
guuguaaauucccuuuaac

SEQ ID NO: 321074 - RNA, 19 nt, Artificial Sequence
  Description of Artificial Sequence: Synthetic oligonucleotide
  Antisense Strand to SEQ ID NO: 321073
guuaaagggaauuuacaac

SEQ ID NO: 321075 - RNA, 19 nt, Artificial Sequence
  Description of Artificial Sequence: Synthetic oligonucleotide
  Sense Strand Starting at position 31 of SEQ ID NO: 316551
guaaauucccuuuaacguu

SEQ ID NO: 321076 - RNA, 19 nt, Artificial Sequence
  Description of Artificial Sequence: Synthetic oligonucleotide
  Antisense Strand to SEQ ID NO: 321075
aacguuaaagggaauuuac

SEQ ID NO: 321077 - RNA, 19 nt, Artificial Sequence
  Description of Artificial Sequence: Synthetic oligonucleotide
  Sense Strand Starting at position 31 of SEQ ID NO: 317319
acgcauaaagugggauaau

SEQ ID NO: 321078 - RNA, 19 nt, Artificial Sequence
  Description of Artificial Sequence: Synthetic oligonucleotide
  Antisense Strand to SEQ ID NO: 321077
auuaucccacuuuaugcgu

SEQ ID NO: 321079 - RNA, 19 nt, Artificial Sequence
  Description of Artificial Sequence: Synthetic oligonucleotide
  Sense Strand Starting at position 31 of SEQ ID NO: 317347
cucuuagaaugguuguuaa

SEQ ID NO: 321080 - RNA, 19 nt, Artificial Sequence
  Description of Artificial Sequence: Synthetic oligonucleotide
  Antisense Strand to SEQ ID NO: 321079
uuaacaaccauucuaagag

SEQ ID NO: 321081 - RNA, 19 nt, Artificial Sequence
  Description of Artificial Sequence: Synthetic oligonucleotide
  Sense Strand Starting at position 31 of SEQ ID NO: 317350
uuagaaugguuguuaagga

SEQ ID NO: 321082 - RNA, 19 nt, Artificial Sequence
  Description of Artificial Sequence: Synthetic oligonucleotide
  Antisense Strand to SEQ ID NO: 321081
uccuuaacaaccauucuaa

SEQ ID NO: 321083 - RNA, 19 nt, Artificial Sequence
  Description of Artificial Sequence: Synthetic oligonucleotide
  Sense Strand Starting at position 31 of SEQ ID NO: 317419
cuuguauccugaucguaaa

SEQ ID NO: 321084 - RNA, 19 nt, Artificial Sequence
  Description of Artificial Sequence: Synthetic oligonucleotide
  Antisense Strand to SEQ ID NO: 321083
uuuacgaucaggauacaag

SEQ ID NO: 321085 - RNA, 19 nt, Artificial Sequence
  Description of Artificial Sequence: Synthetic oligonucleotide
  Sense Strand Starting at position 31 of SEQ ID NO: 317420
uuguauccugaucguaaau

SEQ ID NO: 321086 - RNA, 19 nt, Artificial Sequence
  Description of Artificial Sequence: Synthetic oligonucleotide
  Antisense Strand to SEQ ID NO: 321085
auuuacgaucaggauacaa

SEQ ID NO: 321087 - RNA, 19 nt, Artificial Sequence
  Description of Artificial Sequence: Synthetic oligonucleotide
  Sense Strand Starting at position 31 of SEQ ID NO: 317641
guccuuacaccauaaucga

SEQ ID NO: 321088 - RNA, 19 nt, Artificial Sequence
  Description of Artificial Sequence: Synthetic oligonucleotide
  Antisense Strand to SEQ ID NO: 321087
ucgauuaugguguaaggac

SEQ ID NO: 321089 - RNA, 19 nt, Artificial Sequence
  Description of Artificial Sequence: Synthetic oligonucleotide
  Sense Strand Starting at position 31 of SEQ ID NO: 317698
uggccuucccagugaauaa

SEQ ID NO: 321090 - RNA, 19 nt, Artificial Sequence
  Description of Artificial Sequence: Synthetic oligonucleotide
  Antisense Strand to SEQ ID NO: 321089
uuauucacugggaaggcca

SEQ ID NO: 321091 - RNA, 19 nt, Artificial Sequence
  Description of Artificial Sequence: Synthetic oligonucleotide
  Sense Strand Starting at position 31 of SEQ ID NO: 317729
ccaacucuagccuaaguga

SEQ ID NO: 321092 - RNA, 19 nt, Artificial Sequence
  Description of Artificial Sequence: Synthetic oligonucleotide
  Antisense Strand to SEQ ID NO: 321091
ucacuuaggcuagaguugg

SEQ ID NO: 321093 - RNA, 19 nt, Artificial Sequence
  Description of Artificial Sequence: Synthetic oligonucleotide
  Sense Strand Starting at position 31 of SEQ ID NO: 318099
guggaagauaaugguuacu

SEQ ID NO: 321094 - RNA, 19 nt, Artificial Sequence
  Description of Artificial Sequence: Synthetic oligonucleotide
  Antisense Strand to SEQ ID NO: 321093
aguaaccauuaucuuccac

SEQ ID NO: 321095 - RNA, 19 nt, Artificial Sequence
  Description of Artificial Sequence: Synthetic oligonucleotide
  Sense Strand Starting at position 31 of SEQ ID NO: 318101
ggaagauaaugguuacuuu

SEQ ID NO: 321096 - RNA, 19 nt, Artificial Sequence
  Description of Artificial Sequence: Synthetic oligonucleotide
  Antisense Strand to SEQ ID NO: 321095
aaaguaaccauuaucuucc

SEQ ID NO: 321097 - RNA, 19 nt, Artificial Sequence
  Description of Artificial Sequence: Synthetic oligonucleotide
  Sense Strand Starting at position 31 of SEQ ID NO: 318105
gauaaugguuacuuugcaa

SEQ ID NO: 321098 - RNA, 19 nt, Artificial Sequence
  Description of Artificial Sequence: Synthetic oligonucleotide
  Antisense Strand to SEQ ID NO: 321097
uugcaaaguaaccauuauc

SEQ ID NO: 321099 - RNA, 19 nt, Artificial Sequence
  Description of Artificial Sequence: Synthetic oligonucleotide
  Sense Strand Starting at position 31 of SEQ ID NO: 318112
guuacuuugcaagaauguu

SEQ ID NO: 321100 - RNA, 19 nt, Artificial Sequence
  Description of Artificial Sequence: Synthetic oligonucleotide
  Antisense Strand to SEQ ID NO: 321099
aacauucuugcaaaguaac

SEQ ID NO: 321101 - RNA, 19 nt, Artificial Sequence
  Description of Artificial Sequence: Synthetic oligonucleotide
  Sense Strand Starting at position 31 of SEQ ID NO: 318156
guuccaaaucucuggugau

SEQ ID NO: 321102 - RNA, 19 nt, Artificial Sequence
  Description of Artificial Sequence: Synthetic oligonucleotide
  Antisense Strand to SEQ ID NO: 321101
aucaccagagauuuggaac

SEQ ID NO: 321103 - RNA, 19 nt, Artificial Sequence
  Description of Artificial Sequence: Synthetic oligonucleotide
  Sense Strand Starting at position 31 of SEQ ID NO: 318482
aagugaggcaaucgguaau

SEQ ID NO: 321104 - RNA, 19 nt, Artificial Sequence
  Description of Artificial Sequence: Synthetic oligonucleotide
  Antisense Strand to SEQ ID NO: 321103
auuaccgauugccucacuu

SEQ ID NO: 321105 - RNA, 19 nt, Artificial Sequence
  Description of Artificial Sequence: Synthetic oligonucleotide
  Sense Strand Starting at position 31 of SEQ ID NO: 318494
cgguaaucugagcaagcau

SEQ ID NO: 321106 - RNA, 19 nt, Artificial Sequence
  Description of Artificial Sequence: Synthetic oligonucleotide
  Antisense Strand to SEQ ID NO: 321105
augcuugcucagauuaccg

SEQ ID NO: 321107 - RNA, 19 nt, Artificial Sequence
  Description of Artificial Sequence: Synthetic oligonucleotide
  Sense Strand Starting at position 31 of SEQ ID NO: 318558
ugacguuagcaugaucuga

SEQ ID NO: 321108 - RNA, 19 nt, Artificial Sequence
  Description of Artificial Sequence: Synthetic oligonucleotide
  Antisense Strand to SEQ ID NO: 321107
ucagaucaugcuaacguca

SEQ ID NO: 321109 - RNA, 19 nt, Artificial Sequence
  Description of Artificial Sequence: Synthetic oligonucleotide
  Sense Strand Starting at position 31 of SEQ ID NO: 318560
acguuagcaugaucugaga

SEQ ID NO: 321110 - RNA, 19 nt, Artificial Sequence
  Description of Artificial Sequence: Synthetic oligonucleotide
  Antisense Strand to SEQ ID NO: 321109
ucucagaucaugcuaacgu

SEQ ID NO: 321111 - RNA, 19 nt, Artificial Sequence
  Description of Artificial Sequence: Synthetic oligonucleotide
  Sense Strand Starting at position 31 of SEQ ID NO: 318562
guuagcaugaucugagagu

SEQ ID NO: 321112 - RNA, 19 nt, Artificial Sequence
  Description of Artificial Sequence: Synthetic oligonucleotide
  Antisense Strand to SEQ ID NO: 321111
acucucagaucaugcuaac

SEQ ID NO: 321113 - RNA, 19 nt, Artificial Sequence
  Description of Artificial Sequence: Synthetic oligonucleotide
  Sense Strand Starting at position 31 of SEQ ID NO: 318754
gaauuuaguuauguaucgu

SEQ ID NO: 321114 - RNA, 19 nt, Artificial Sequence
  Description of Artificial Sequence: Synthetic oligonucleotide
  Antisense Strand to SEQ ID NO: 321113
acgauacauaacuaaauuc

SEQ ID NO: 321115 - RNA, 19 nt, Artificial Sequence
  Description of Artificial Sequence: Synthetic oligonucleotide
  Sense Strand Starting at position 31 of SEQ ID NO: 319016
aaagcaaguucuguaguaa

SEQ ID NO: 321116 - RNA, 19 nt, Artificial Sequence
  Description of Artificial Sequence: Synthetic oligonucleotide
  Antisense Strand to SEQ ID NO: 321115
uuacuacagaacuugcuuu

SEQ ID NO: 321117 - RNA, 19 nt, Artificial Sequence
  Description of Artificial Sequence: Synthetic oligonucleotide
  Sense Strand Starting at position 31 of SEQ ID NO: 319017
aagcaaguucuguaguaag

SEQ ID NO: 321118 - RNA, 19 nt, Artificial Sequence
  Description of Artificial Sequence: Synthetic oligonucleotide
  Antisense Strand to SEQ ID NO: 321117
cuuacuacagaacuugcuu

SEQ ID NO: 321119 - RNA, 19 nt, Artificial Sequence
  Description of Artificial Sequence: Synthetic oligonucleotide
  Sense Strand Starting at position 31 of SEQ ID NO: 319082
agcuuaagaugucugcuga

SEQ ID NO: 321120 - RNA, 19 nt, Artificial Sequence
  Description of Artificial Sequence: Synthetic oligonucleotide
  Antisense Strand to SEQ ID NO: 321119
ucagcagacaucuuaagcu

SEQ ID NO: 321121 - RNA, 19 nt, Artificial Sequence
  Description of Artificial Sequence: Synthetic oligonucleotide
  Sense Strand Starting at position 31 of SEQ ID NO: 319121
agugaucuuucugugagaa

SEQ ID NO: 321122 - RNA, 19 nt, Artificial Sequence
  Description of Artificial Sequence: Synthetic oligonucleotide
  Antisense Strand to SEQ ID NO: 321121
uucucacagaaagaucacu

SEQ ID NO: 321123 - RNA, 19 nt, Artificial Sequence
  Description of Artificial Sequence: Synthetic oligonucleotide
  Sense Strand Starting at position 31 of SEQ ID NO: 319122
gugaucuuucugugagaau

SEQ ID NO: 321124 - RNA, 19 nt, Artificial Sequence
  Description of Artificial Sequence: Synthetic oligonucleotide
  Antisense Strand to SEQ ID NO: 321123
auucucacagaaagaucac

SEQ ID NO: 321125 - RNA, 19 nt, Artificial Sequence
  Description of Artificial Sequence: Synthetic oligonucleotide
  Sense Strand Starting at position 32 of SEQ ID NO: 315372
caauuaugaugggcaguuu

SEQ ID NO: 321126 - RNA, 19 nt, Artificial Sequence
  Description of Artificial Sequence: Synthetic oligonucleotide
  Antisense Strand to SEQ ID NO: 321125
aaacugcccaucauaauug

SEQ ID NO: 321127 - RNA, 19 nt, Artificial Sequence
  Description of Artificial Sequence: Synthetic oligonucleotide
  Sense Strand Starting at position 32 of SEQ ID NO: 315488
agacuugagguucagaguu

SEQ ID NO: 321128 - RNA, 19 nt, Artificial Sequence
  Description of Artificial Sequence: Synthetic oligonucleotide
  Antisense Strand to SEQ ID NO: 321127
aacucugaaccucaagucu

SEQ ID NO: 321129 - RNA, 19 nt, Artificial Sequence
  Description of Artificial Sequence: Synthetic oligonucleotide
  Sense Strand Starting at position 32 of SEQ ID NO: 315501
agaguugugaaauaaugcu

SEQ ID NO: 321130 - RNA, 19 nt, Artificial Sequence
  Description of Artificial Sequence: Synthetic oligonucleotide
  Antisense Strand to SEQ ID NO: 321129
agcauuauuucacaacucu

SEQ ID NO: 321131 - RNA, 19 nt, Artificial Sequence
  Description of Artificial Sequence: Synthetic oligonucleotide
  Sense Strand Starting at position 32 of SEQ ID NO: 315507
gugaaauaaugcucuuacu

SEQ ID NO: 321132 - RNA, 19 nt, Artificial Sequence
  Description of Artificial Sequence: Synthetic oligonucleotide
  Antisense Strand to SEQ ID NO: 321131
aguaagagcauuauuucac

SEQ ID NO: 321133 - RNA, 19 nt, Artificial Sequence
  Description of Artificial Sequence: Synthetic oligonucleotide
  Sense Strand Starting at position 32 of SEQ ID NO: 315675
ggccuuuauagcuagggaa

SEQ ID NO: 321134 - RNA, 19 nt, Artificial Sequence
  Description of Artificial Sequence: Synthetic oligonucleotide
  Antisense Strand to SEQ ID NO: 321133
uucccuagcuauaaaggcc

SEQ ID NO: 321135 - RNA, 19 nt, Artificial Sequence
  Description of Artificial Sequence: Synthetic oligonucleotide
  Sense Strand Starting at position 32 of SEQ ID NO: 315677
ccuuuauagcuagggaaac

SEQ ID NO: 321136 - RNA, 19 nt, Artificial Sequence
  Description of Artificial Sequence: Synthetic oligonucleotide
  Antisense Strand to SEQ ID NO: 321135
guuucccuagcuauaaagg

SEQ ID NO: 321137 - RNA, 19 nt, Artificial Sequence
  Description of Artificial Sequence: Synthetic oligonucleotide
  Sense Strand Starting at position 32 of SEQ ID NO: 315857
gcacaaguugcucaacaaa

SEQ ID NO: 321138 - RNA, 19 nt, Artificial Sequence
  Description of Artificial Sequence: Synthetic oligonucleotide
  Antisense Strand to SEQ ID NO: 321137
uuuguugagcaacuugugc

SEQ ID NO: 321139 - RNA, 19 nt, Artificial Sequence
  Description of Artificial Sequence: Synthetic oligonucleotide
  Sense Strand Starting at position 32 of SEQ ID NO: 315886
agaucaauagggugccaaa

SEQ ID NO: 321140 - RNA, 19 nt, Artificial Sequence
  Description of Artificial Sequence: Synthetic oligonucleotide
  Antisense Strand to SEQ ID NO: 321139
uuuggcacccuauugaucu

SEQ ID NO: 321141 - RNA, 19 nt, Artificial Sequence
  Description of Artificial Sequence: Synthetic oligonucleotide
  Sense Strand Starting at position 32 of SEQ ID NO: 316041
cgaggcuaucagcaaacaa

SEQ ID NO: 321142 - RNA, 19 nt, Artificial Sequence
  Description of Artificial Sequence: Synthetic oligonucleotide
  Antisense Strand to SEQ ID NO: 321141
uuguuugcugauagccucg

SEQ ID NO: 321143 - RNA, 19 nt, Artificial Sequence
  Description of Artificial Sequence: Synthetic oligonucleotide
  Sense Strand Starting at position 32 of SEQ ID NO: 316095
acaaaugguugcccaaaga

SEQ ID NO: 321144 - RNA, 19 nt, Artificial Sequence
  Description of Artificial Sequence: Synthetic oligonucleotide
  Antisense Strand to SEQ ID NO: 321143
ucuuugggcaaccauuugu

SEQ ID NO: 321145 - RNA, 19 nt, Artificial Sequence
  Description of Artificial Sequence: Synthetic oligonucleotide
  Sense Strand Starting at position 32 of SEQ ID NO: 316143
ggaagaauugcugaggucu

SEQ ID NO: 321146 - RNA, 19 nt, Artificial Sequence
  Description of Artificial Sequence: Synthetic oligonucleotide
  Antisense Strand to SEQ ID NO: 321145
agaccucagcaauucuucc

SEQ ID NO: 321147 - RNA, 19 nt, Artificial Sequence
  Description of Artificial Sequence: Synthetic oligonucleotide
  Sense Strand Starting at position 32 of SEQ ID NO: 316154
ugaggucuucgggagacua

SEQ ID NO: 321148 - RNA, 19 nt, Artificial Sequence
  Description of Artificial Sequence: Synthetic oligonucleotide
  Antisense Strand to SEQ ID NO: 321147
uagucucccgaagaccuca

SEQ ID NO: 321149 - RNA, 19 nt, Artificial Sequence
  Description of Artificial Sequence: Synthetic oligonucleotide
  Sense Strand Starting at position 32 of SEQ ID NO: 316156
aggucuucgggagacuaua

SEQ ID NO: 321150 - RNA, 19 nt, Artificial Sequence
  Description of Artificial Sequence: Synthetic oligonucleotide
  Antisense Strand to SEQ ID NO: 321149
uauagucucccgaagaccu

SEQ ID NO: 321151 - RNA, 19 nt, Artificial Sequence
  Description of Artificial Sequence: Synthetic oligonucleotide
  Sense Strand Starting at position 32 of SEQ ID NO: 316183
gcacuauggagauguuuac

SEQ ID NO: 321152 - RNA, 19 nt, Artificial Sequence
  Description of Artificial Sequence: Synthetic oligonucleotide
  Antisense Strand to SEQ ID NO: 321151
guaaacaucuccauagugc

SEQ ID NO: 321153 - RNA, 19 nt, Artificial Sequence
  Description of Artificial Sequence: Synthetic oligonucleotide
  Sense Strand Starting at position 32 of SEQ ID NO: 316190
ggagauguuuaccuggaca

SEQ ID NO: 321154 - RNA, 19 nt, Artificial Sequence
  Description of Artificial Sequence: Synthetic oligonucleotide
  Antisense Strand to SEQ ID NO: 321153
uguccagguaaacaucucc

SEQ ID NO: 321155 - RNA, 19 nt, Artificial Sequence
  Description of Artificial Sequence: Synthetic oligonucleotide
  Sense Strand Starting at position 32 of SEQ ID NO: 316192
agauguuuaccuggacauu

SEQ ID NO: 321156 - RNA, 19 nt, Artificial Sequence
  Description of Artificial Sequence: Synthetic oligonucleotide
  Antisense Strand to SEQ ID NO: 321155
aauguccagguaaacaucu

SEQ ID NO: 321157 - RNA, 19 nt, Artificial Sequence
  Description of Artificial Sequence: Synthetic oligonucleotide
  Sense Strand Starting at position 32 of SEQ ID NO: 316264
uguuuaguccuggaagcag

SEQ ID NO: 321158 - RNA, 19 nt, Artificial Sequence
  Description of Artificial Sequence: Synthetic oligonucleotide
  Antisense Strand to SEQ ID NO: 321157
cugcuuccaggacuaaaca

SEQ ID NO: 321159 - RNA, 19 nt, Artificial Sequence
  Description of Artificial Sequence: Synthetic oligonucleotide
  Sense Strand Starting at position 32 of SEQ ID NO: 316437
gagcgaugucccgugucua

SEQ ID NO: 321160 - RNA, 19 nt, Artificial Sequence
  Description of Artificial Sequence: Synthetic oligonucleotide
  Antisense Strand to SEQ ID NO: 321159
uagacacgggacaucgcuc

SEQ ID NO: 321161 - RNA, 19 nt, Artificial Sequence
  Description of Artificial Sequence: Synthetic oligonucleotide
  Sense Strand Starting at position 32 of SEQ ID NO: 316467
uaugguuugcagggagaga

SEQ ID NO: 321162 - RNA, 19 nt, Artificial Sequence
  Description of Artificial Sequence: Synthetic oligonucleotide
  Antisense Strand to SEQ ID NO: 321161
ucucucccugcaaaccaua

SEQ ID NO: 321163 - RNA, 19 nt, Artificial Sequence
  Description of Artificial Sequence: Synthetic oligonucleotide
  Sense Strand Starting at position 32 of SEQ ID NO: 316510
ggacauugacugggaagca

SEQ ID NO: 321164 - RNA, 19 nt, Artificial Sequence
  Description of Artificial Sequence: Synthetic oligonucleotide
  Antisense Strand to SEQ ID NO: 321163
ugcuucccagucaaugucc

SEQ ID NO: 321165 - RNA, 19 nt, Artificial Sequence
  Description of Artificial Sequence: Synthetic oligonucleotide
  Sense Strand Starting at position 32 of SEQ ID NO: 316676
auugcaucuuauuucugua

SEQ ID NO: 321166 - RNA, 19 nt, Artificial Sequence
  Description of Artificial Sequence: Synthetic oligonucleotide
  Antisense Strand to SEQ ID NO: 321165
uacagaaauaagaugcaau

SEQ ID NO: 321167 - RNA, 19 nt, Artificial Sequence
  Description of Artificial Sequence: Synthetic oligonucleotide
  Sense Strand Starting at position 32 of SEQ ID NO: 316678
ugcaucuuauuucuguaga

SEQ ID NO: 321168 - RNA, 19 nt, Artificial Sequence
  Description of Artificial Sequence: Synthetic oligonucleotide
  Antisense Strand to SEQ ID NO: 321167
ucuacagaaauaagaugca

SEQ ID NO: 321169 - RNA, 19 nt, Artificial Sequence
  Description of Artificial Sequence: Synthetic oligonucleotide
  Sense Strand Starting at position 32 of SEQ ID NO: 316692
guagauuucuuccuugcac

SEQ ID NO: 321170 - RNA, 19 nt, Artificial Sequence
  Description of Artificial Sequence: Synthetic oligonucleotide
  Antisense Strand to SEQ ID NO: 321169
gugcaaggaagaaaucuac

SEQ ID NO: 321171 - RNA, 19 nt, Artificial Sequence
  Description of Artificial Sequence: Synthetic oligonucleotide
  Sense Strand Starting at position 32 of SEQ ID NO: 316736
ugagaauuucgaggcacgu

SEQ ID NO: 321172 - RNA, 19 nt, Artificial Sequence
  Description of Artificial Sequence: Synthetic oligonucleotide
  Antisense Strand to SEQ ID NO: 321171
acgugccucgaaauucuca

SEQ ID NO: 321173 - RNA, 19 nt, Artificial Sequence
  Description of Artificial Sequence: Synthetic oligonucleotide
  Sense Strand Starting at position 32 of SEQ ID NO: 316876
agagcuucccaguauagag

SEQ ID NO: 321174 - RNA, 19 nt, Artificial Sequence
  Description of Artificial Sequence: Synthetic oligonucleotide
  Antisense Strand to SEQ ID NO: 321173
cucuauacugggaagcucu

SEQ ID NO: 321175 - RNA, 19 nt, Artificial Sequence
  Description of Artificial Sequence: Synthetic oligonucleotide
  Sense Strand Starting at position 32 of SEQ ID NO: 317371
cacagucgucccgugucaa

SEQ ID NO: 321176 - RNA, 19 nt, Artificial Sequence
  Description of Artificial Sequence: Synthetic oligonucleotide
  Antisense Strand to SEQ ID NO: 321175
uugacacgggacgacugug

SEQ ID NO: 321177 - RNA, 19 nt, Artificial Sequence
  Description of Artificial Sequence: Synthetic oligonucleotide
  Sense Strand Starting at position 32 of SEQ ID NO: 317374
agucgucccgugucaacua

SEQ ID NO: 321178 - RNA, 19 nt, Artificial Sequence
  Description of Artificial Sequence: Synthetic oligonucleotide
  Antisense Strand to SEQ ID NO: 321177
uaguugacacgggacgacu

SEQ ID NO: 321179 - RNA, 19 nt, Artificial Sequence
  Description of Artificial Sequence: Synthetic oligonucleotide
  Sense Strand Starting at position 32 of SEQ ID NO: 317387
caacuaucagaucagcguu

SEQ ID NO: 321180 - RNA, 19 nt, Artificial Sequence
  Description of Artificial Sequence: Synthetic oligonucleotide
  Antisense Strand to SEQ ID NO: 321179
aacgcugaucugauaguug

SEQ ID NO: 321181 - RNA, 19 nt, Artificial Sequence
  Description of Artificial Sequence: Synthetic oligonucleotide
  Sense Strand Starting at position 32 of SEQ ID NO: 317466
gaguaucauuuccugcgga

SEQ ID NO: 321182 - RNA, 19 nt, Artificial Sequence
  Description of Artificial Sequence: Synthetic oligonucleotide
  Antisense Strand to SEQ ID NO: 321181
uccgcaggaaaugauacuc

SEQ ID NO: 321183 - RNA, 19 nt, Artificial Sequence
  Description of Artificial Sequence: Synthetic oligonucleotide
  Sense Strand Starting at position 32 of SEQ ID NO: 317613
ggauuaauuccaggguuau

SEQ ID NO: 321184 - RNA, 19 nt, Artificial Sequence
  Description of Artificial Sequence: Synthetic oligonucleotide
  Antisense Strand to SEQ ID NO: 321183
auaacccuggaauuaaucc

SEQ ID NO: 321185 - RNA, 19 nt, Artificial Sequence
  Description of Artificial Sequence: Synthetic oligonucleotide
  Sense Strand Starting at position 32 of SEQ ID NO: 317614
gauuaauuccaggguuaug

SEQ ID NO: 321186 - RNA, 19 nt, Artificial Sequence
  Description of Artificial Sequence: Synthetic oligonucleotide
  Antisense Strand to SEQ ID NO: 321185
cauaacccuggaauuaauc

SEQ ID NO: 321187 - RNA, 19 nt, Artificial Sequence
  Description of Artificial Sequence: Synthetic oligonucleotide
  Sense Strand Starting at position 32 of SEQ ID NO: 317657
guuccuauuggacaugcua

SEQ ID NO: 321188 - RNA, 19 nt, Artificial Sequence
  Description of Artificial Sequence: Synthetic oligonucleotide
  Antisense Strand to SEQ ID NO: 321187
uagcauguccaauaggaac

SEQ ID NO: 321189 - RNA, 19 nt, Artificial Sequence
  Description of Artificial Sequence: Synthetic oligonucleotide
  Sense Strand Starting at position 32 of SEQ ID NO: 317969
gcaagauuagauuaguuua

SEQ ID NO: 321190 - RNA, 19 nt, Artificial Sequence
  Description of Artificial Sequence: Synthetic oligonucleotide
  Antisense Strand to SEQ ID NO: 321189
uaaacuaaucuaaucuugc

SEQ ID NO: 321191 - RNA, 19 nt, Artificial Sequence
  Description of Artificial Sequence: Synthetic oligonucleotide
  Sense Strand Starting at position 32 of SEQ ID NO: 317972
agauuagauuaguuuacca

SEQ ID NO: 321192 - RNA, 19 nt, Artificial Sequence
  Description of Artificial Sequence: Synthetic oligonucleotide
  Antisense Strand to SEQ ID NO: 321191
ugguaaacuaaucuaaucu

SEQ ID NO: 321193 - RNA, 19 nt, Artificial Sequence
  Description of Artificial Sequence: Synthetic oligonucleotide
  Sense Strand Starting at position 32 of SEQ ID NO: 318000
uaauguuagauaggugagu

SEQ ID NO: 321194 - RNA, 19 nt, Artificial Sequence
  Description of Artificial Sequence: Synthetic oligonucleotide
  Antisense Strand to SEQ ID NO: 321193
acucaccuaucuaacauua

SEQ ID NO: 321195 - RNA, 19 nt, Artificial Sequence
  Description of Artificial Sequence: Synthetic oligonucleotide
  Sense Strand Starting at position 32 of SEQ ID NO: 318001
aauguuagauaggugagua

SEQ ID NO: 321196 - RNA, 19 nt, Artificial Sequence
  Description of Artificial Sequence: Synthetic oligonucleotide
  Antisense Strand to SEQ ID NO: 321195
uacucaccuaucuaacauu

SEQ ID NO: 321197 - RNA, 19 nt, Artificial Sequence
  Description of Artificial Sequence: Synthetic oligonucleotide
  Sense Strand Starting at position 32 of SEQ ID NO: 318002
auguuagauaggugaguag

SEQ ID NO: 321198 - RNA, 19 nt, Artificial Sequence
  Description of Artificial Sequence: Synthetic oligonucleotide
  Antisense Strand to SEQ ID NO: 321197
cuacucaccuaucuaacau

SEQ ID NO: 321199 - RNA, 19 nt, Artificial Sequence
  Description of Artificial Sequence: Synthetic oligonucleotide
  Sense Strand Starting at position 32 of SEQ ID NO: 319030
auacauuagucaucauaga

SEQ ID NO: 321200 - RNA, 19 nt, Artificial Sequence
  Description of Artificial Sequence: Synthetic oligonucleotide
  Antisense Strand to SEQ ID NO: 321199
ucuaugaugacuaauguau

SEQ ID NO: 321201 - RNA, 19 nt, Artificial Sequence
  Description of Artificial Sequence: Synthetic oligonucleotide
  Sense Strand Starting at position 32 of SEQ ID NO: 319083
cacccugguuuguuagaga

SEQ ID NO: 321202 - RNA, 19 nt, Artificial Sequence
  Description of Artificial Sequence: Synthetic oligonucleotide
  Antisense Strand to SEQ ID NO: 321201
ucucuaacaaaccagggug

SEQ ID NO: 321203 - RNA, 19 nt, Artificial Sequence
  Description of Artificial Sequence: Synthetic oligonucleotide
  Sense Strand Starting at position 32 of SEQ ID NO: 319204
aagaaaugaccugguguag

SEQ ID NO: 321204 - RNA, 19 nt, Artificial Sequence
  Description of Artificial Sequence: Synthetic oligonucleotide
  Antisense Strand to SEQ ID NO: 321203
cuacaccaggucauuucuu

SEQ ID NO: 321205 - RNA, 19 nt, Artificial Sequence
  Description of Artificial Sequence: Synthetic oligonucleotide
  Sense Strand Starting at position 33 of SEQ ID NO: 315328
cucagauucuuuguaagaa

SEQ ID NO: 321206 - RNA, 19 nt, Artificial Sequence
  Description of Artificial Sequence: Synthetic oligonucleotide
  Antisense Strand to SEQ ID NO: 321205
uucuuacaaagaaucugag

SEQ ID NO: 321207 - RNA, 19 nt, Artificial Sequence
  Description of Artificial Sequence: Synthetic oligonucleotide
  Sense Strand Starting at position 33 of SEQ ID NO: 315383
ggucuaauugcccagauaa

SEQ ID NO: 321208 - RNA, 19 nt, Artificial Sequence
  Description of Artificial Sequence: Synthetic oligonucleotide
  Antisense Strand to SEQ ID NO: 321207
uuaucugggcaauuagacc

SEQ ID NO: 321209 - RNA, 19 nt, Artificial Sequence
  Description of Artificial Sequence: Synthetic oligonucleotide
  Sense Strand Starting at position 33 of SEQ ID NO: 315469
aagggccucuguucuaaga

SEQ ID NO: 321210 - RNA, 19 nt, Artificial Sequence
  Description of Artificial Sequence: Synthetic oligonucleotide
  Antisense Strand to SEQ ID NO: 321209
ucuuagaacagaggcccuu

SEQ ID NO: 321211 - RNA, 19 nt, Artificial Sequence
  Description of Artificial Sequence: Synthetic oligonucleotide
  Sense Strand Starting at position 33 of SEQ ID NO: 315497
cuauaagggucauauuuau

SEQ ID NO: 321212 - RNA, 19 nt, Artificial Sequence
  Description of Artificial Sequence: Synthetic oligonucleotide
  Antisense Strand to SEQ ID NO: 321211
auaaauaugacccuuauag

SEQ ID NO: 321213 - RNA, 19 nt, Artificial Sequence
  Description of Artificial Sequence: Synthetic oligonucleotide
  Sense Strand Starting at position 33 of SEQ ID NO: 316004
gcacuugauuaacccugaa

SEQ ID NO: 321214 - RNA, 19 nt, Artificial Sequence
  Description of Artificial Sequence: Synthetic oligonucleotide
  Antisense Strand to SEQ ID NO: 321213
uucaggguuaaucaagugc

SEQ ID NO: 321215 - RNA, 19 nt, Artificial Sequence
  Description of Artificial Sequence: Synthetic oligonucleotide
  Sense Strand Starting at position 33 of SEQ ID NO: 316038
uagauauuggauugcuucu

SEQ ID NO: 321216 - RNA, 19 nt, Artificial Sequence
  Description of Artificial Sequence: Synthetic oligonucleotide
  Antisense Strand to SEQ ID NO: 321215
agaagcaauccaauaucua

SEQ ID NO: 321217 - RNA, 19 nt, Artificial Sequence
  Description of Artificial Sequence: Synthetic oligonucleotide
  Sense Strand Starting at position 33 of SEQ ID NO: 316076
gcaaauguuuggguacaaa

SEQ ID NO: 321218 - RNA, 19 nt, Artificial Sequence
  Description of Artificial Sequence: Synthetic oligonucleotide
  Antisense Strand to SEQ ID NO: 321217
uuuguacccaaacauuugc

SEQ ID NO: 321219 - RNA, 19 nt, Artificial Sequence
  Description of Artificial Sequence: Synthetic oligonucleotide
  Sense Strand Starting at position 33 of SEQ ID NO: 316107
ggcaaaucugaacaacgua

SEQ ID NO: 321220 - RNA, 19 nt, Artificial Sequence
  Description of Artificial Sequence: Synthetic oligonucleotide
  Antisense Strand to SEQ ID NO: 321219
uacguuguucagauuugcc

SEQ ID NO: 321221 - RNA, 19 nt, Artificial Sequence
  Description of Artificial Sequence: Synthetic oligonucleotide
  Sense Strand Starting at position 33 of SEQ ID NO: 316132
uucuuugguccucagagua

SEQ ID NO: 321222 - RNA, 19 nt, Artificial Sequence
  Description of Artificial Sequence: Synthetic oligonucleotide
  Antisense Strand to SEQ ID NO: 321221
uacucugaggaccaaagaa

SEQ ID NO: 321223 - RNA, 19 nt, Artificial Sequence
  Description of Artificial Sequence: Synthetic oligonucleotide
  Sense Strand Starting at position 33 of SEQ ID NO: 316614
ccagaaauuuguuagagau

SEQ ID NO: 321224 - RNA, 19 nt, Artificial Sequence
  Description of Artificial Sequence: Synthetic oligonucleotide
  Antisense Strand to SEQ ID NO: 321223
aucucuaacaaauuucugg

SEQ ID NO: 321225 - RNA, 19 nt, Artificial Sequence
  Description of Artificial Sequence: Synthetic oligonucleotide
  Sense Strand Starting at position 33 of SEQ ID NO: 316616
agaaauuuguuagagaugu

SEQ ID NO: 321226 - RNA, 19 nt, Artificial Sequence
  Description of Artificial Sequence: Synthetic oligonucleotide
  Antisense Strand to SEQ ID NO: 321225
acaucucuaacaaauuucu

SEQ ID NO: 321227 - RNA, 19 nt, Artificial Sequence
  Description of Artificial Sequence: Synthetic oligonucleotide
  Sense Strand Starting at position 33 of SEQ ID NO: 316782
ggcuuaaaugcugauaauc

SEQ ID NO: 321228 - RNA, 19 nt, Artificial Sequence
  Description of Artificial Sequence: Synthetic oligonucleotide
  Antisense Strand to SEQ ID NO: 321227
gauuaucagcauuuaagcc

SEQ ID NO: 321229 - RNA, 19 nt, Artificial Sequence
  Description of Artificial Sequence: Synthetic oligonucleotide
  Sense Strand Starting at position 33 of SEQ ID NO: 316996
gcucacagauaucugaaau

SEQ ID NO: 321230 - RNA, 19 nt, Artificial Sequence
  Description of Artificial Sequence: Synthetic oligonucleotide
  Antisense Strand to SEQ ID NO: 321229
auuucagauaucugugagc

SEQ ID NO: 321231 - RNA, 19 nt, Artificial Sequence
  Description of Artificial Sequence: Synthetic oligonucleotide
  Sense Strand Starting at position 33 of SEQ ID NO: 317124
gugggaagagcauagugau

SEQ ID NO: 321232 - RNA, 19 nt, Artificial Sequence
  Description of Artificial Sequence: Synthetic oligonucleotide
  Antisense Strand to SEQ ID NO: 321231
aucacuaugcucuucccac

SEQ ID NO: 321233 - RNA, 19 nt, Artificial Sequence
  Description of Artificial Sequence: Synthetic oligonucleotide
  Sense Strand Starting at position 33 of SEQ ID NO: 317292
gcauguguccaguuuggug

SEQ ID NO: 321234 - RNA, 19 nt, Artificial Sequence
  Description of Artificial Sequence: Synthetic oligonucleotide
  Antisense Strand to SEQ ID NO: 321233
caccaaacuggacacaugc

SEQ ID NO: 321235 - RNA, 19 nt, Artificial Sequence
  Description of Artificial Sequence: Synthetic oligonucleotide
  Sense Strand Starting at position 33 of SEQ ID NO: 317364
acccuagagcuuuggaacu

SEQ ID NO: 321236 - RNA, 19 nt, Artificial Sequence
  Description of Artificial Sequence: Synthetic oligonucleotide
  Antisense Strand to SEQ ID NO: 321235
aguuccaaagcucuagggu

SEQ ID NO: 321237 - RNA, 19 nt, Artificial Sequence
  Description of Artificial Sequence: Synthetic oligonucleotide
  Sense Strand Starting at position 33 of SEQ ID NO: 317462
aagagaaauugggaaacua

SEQ ID NO: 321238 - RNA, 19 nt, Artificial Sequence
  Description of Artificial Sequence: Synthetic oligonucleotide
  Antisense Strand to SEQ ID NO: 321237
uaguuucccaauuucucuu

SEQ ID NO: 321239 - RNA, 19 nt, Artificial Sequence
  Description of Artificial Sequence: Synthetic oligonucleotide
  Sense Strand Starting at position 33 of SEQ ID NO: 317486
ggugcuagaaguggaagaa

SEQ ID NO: 321240 - RNA, 19 nt, Artificial Sequence
  Description of Artificial Sequence: Synthetic oligonucleotide
  Antisense Strand to SEQ ID NO: 321239
uucuuccacuucuagcacc

SEQ ID NO: 321241 - RNA, 19 nt, Artificial Sequence
  Description of Artificial Sequence: Synthetic oligonucleotide
  Sense Strand Starting at position 33 of SEQ ID NO: 317582
acuguuucgccagcucuga

SEQ ID NO: 321242 - RNA, 19 nt, Artificial Sequence
  Description of Artificial Sequence: Synthetic oligonucleotide
  Antisense Strand to SEQ ID NO: 321241
ucagagcuggcgaaacagu

SEQ ID NO: 321243 - RNA, 19 nt, Artificial Sequence
  Description of Artificial Sequence: Synthetic oligonucleotide
  Sense Strand Starting at position 33 of SEQ ID NO: 317644
gugauauuacaucacugua

SEQ ID NO: 321244 - RNA, 19 nt, Artificial Sequence
  Description of Artificial Sequence: Synthetic oligonucleotide
  Antisense Strand to SEQ ID NO: 321243
uacagugauguaauaucac

SEQ ID NO: 321245 - RNA, 19 nt, Artificial Sequence
  Description of Artificial Sequence: Synthetic oligonucleotide
  Sense Strand Starting at position 33 of SEQ ID NO: 317743
uuaaauauccugugauaag

SEQ ID NO: 321246 - RNA, 19 nt, Artificial Sequence
  Description of Artificial Sequence: Synthetic oligonucleotide
  Antisense Strand to SEQ ID NO: 321245
cuuaucacaggauauuuaa

SEQ ID NO: 321247 - RNA, 19 nt, Artificial Sequence
  Description of Artificial Sequence: Synthetic oligonucleotide
  Sense Strand Starting at position 33 of SEQ ID NO: 317881
ugucacacaucagauuuga

SEQ ID NO: 321248 - RNA, 19 nt, Artificial Sequence
  Description of Artificial Sequence: Synthetic oligonucleotide
  Antisense Strand to SEQ ID NO: 321247
ucaaaucugaugugugaca

SEQ ID NO: 321249 - RNA, 19 nt, Artificial Sequence
  Description of Artificial Sequence: Synthetic oligonucleotide
  Sense Strand Starting at position 33 of SEQ ID NO: 317907
auauauucccaguaguugu

SEQ ID NO: 321250 - RNA, 19 nt, Artificial Sequence
  Description of Artificial Sequence: Synthetic oligonucleotide
  Antisense Strand to SEQ ID NO: 321249
acaacuacugggaauauau

SEQ ID NO: 321251 - RNA, 19 nt, Artificial Sequence
  Description of Artificial Sequence: Synthetic oligonucleotide
  Sense Strand Starting at position 33 of SEQ ID NO: 318046
uggguugugaaguggaaau

SEQ ID NO: 321252 - RNA, 19 nt, Artificial Sequence
  Description of Artificial Sequence: Synthetic oligonucleotide
  Antisense Strand to SEQ ID NO: 321251
auuuccacuucacaaccca

SEQ ID NO: 321253 - RNA, 19 nt, Artificial Sequence
  Description of Artificial Sequence: Synthetic oligonucleotide
  Sense Strand Starting at position 33 of SEQ ID NO: 318048
gguugugaaguggaaauau

SEQ ID NO: 321254 - RNA, 19 nt, Artificial Sequence
  Description of Artificial Sequence: Synthetic oligonucleotide
  Antisense Strand to SEQ ID NO: 321253
auauuuccacuucacaacc

SEQ ID NO: 321255 - RNA, 19 nt, Artificial Sequence
  Description of Artificial Sequence: Synthetic oligonucleotide
  Sense Strand Starting at position 33 of SEQ ID NO: 318098
guggcacauuacucaaaua

SEQ ID NO: 321256 - RNA, 19 nt, Artificial Sequence
  Description of Artificial Sequence: Synthetic oligonucleotide
  Antisense Strand to SEQ ID NO: 321255
uauuugaguaaugugccac

SEQ ID NO: 321257 - RNA, 19 nt, Artificial Sequence
  Description of Artificial Sequence: Synthetic oligonucleotide
  Sense Strand Starting at position 33 of SEQ ID NO: 318116
agcaguaacuccuuaagga

SEQ ID NO: 321258 - RNA, 19 nt, Artificial Sequence
  Description of Artificial Sequence: Synthetic oligonucleotide
  Antisense Strand to SEQ ID NO: 321257
uccuuaaggaguuacugcu

SEQ ID NO: 321259 - RNA, 19 nt, Artificial Sequence
  Description of Artificial Sequence: Synthetic oligonucleotide
  Sense Strand Starting at position 33 of SEQ ID NO: 318117
gcaguaacuccuuaaggac

SEQ ID NO: 321260 - RNA, 19 nt, Artificial Sequence
  Description of Artificial Sequence: Synthetic oligonucleotide
  Antisense Strand to SEQ ID NO: 321259
guccuuaaggaguuacugc

SEQ ID NO: 321261 - RNA, 19 nt, Artificial Sequence
  Description of Artificial Sequence: Synthetic oligonucleotide
  Sense Strand Starting at position 33 of SEQ ID NO: 318313
gaacuauaauaaccguguu

SEQ ID NO: 321262 - RNA, 19 nt, Artificial Sequence
  Description of Artificial Sequence: Synthetic oligonucleotide
  Antisense Strand to SEQ ID NO: 321261
aacacgguuauuauaguuc

SEQ ID NO: 321263 - RNA, 19 nt, Artificial Sequence
  Description of Artificial Sequence: Synthetic oligonucleotide
  Sense Strand Starting at position 33 of SEQ ID NO: 318412
guuacaagucuccaaucca

SEQ ID NO: 321264 - RNA, 19 nt, Artificial Sequence
  Description of Artificial Sequence: Synthetic oligonucleotide
  Antisense Strand to SEQ ID NO: 321263
uggauuggagacuuguaac

SEQ ID NO: 321265 - RNA, 19 nt, Artificial Sequence
  Description of Artificial Sequence: Synthetic oligonucleotide
  Sense Strand Starting at position 33 of SEQ ID NO: 318432
aagcaauugugguuaggga

SEQ ID NO: 321266 - RNA, 19 nt, Artificial Sequence
  Description of Artificial Sequence: Synthetic oligonucleotide
  Antisense Strand to SEQ ID NO: 321265
ucccuaaccacaauugcuu

SEQ ID NO: 321267 - RNA, 19 nt, Artificial Sequence
  Description of Artificial Sequence: Synthetic oligonucleotide
  Sense Strand Starting at position 33 of SEQ ID NO: 318433
agcaauugugguuagggaa

SEQ ID NO: 321268 - RNA, 19 nt, Artificial Sequence
  Description of Artificial Sequence: Synthetic oligonucleotide
  Antisense Strand to SEQ ID NO: 321267
uucccuaaccacaauugcu

SEQ ID NO: 321269 - RNA, 19 nt, Artificial Sequence
  Description of Artificial Sequence: Synthetic oligonucleotide
  Sense Strand Starting at position 33 of SEQ ID NO: 318606
acugguuccagcugaagau

SEQ ID NO: 321270 - RNA, 19 nt, Artificial Sequence
  Description of Artificial Sequence: Synthetic oligonucleotide
  Antisense Strand to SEQ ID NO: 321269
aucuucagcuggaaccagu

SEQ ID NO: 321271 - RNA, 19 nt, Artificial Sequence
  Description of Artificial Sequence: Synthetic oligonucleotide
  Sense Strand Starting at position 33 of SEQ ID NO: 318616
gcugaagaucauggucacu

SEQ ID NO: 321272 - RNA, 19 nt, Artificial Sequence
  Description of Artificial Sequence: Synthetic oligonucleotide
  Antisense Strand to SEQ ID NO: 321271
agugaccaugaucuucagc

SEQ ID NO: 321273 - RNA, 19 nt, Artificial Sequence
  Description of Artificial Sequence: Synthetic oligonucleotide
  Sense Strand Starting at position 33 of SEQ ID NO: 318621
agaucauggucacuugaaa

SEQ ID NO: 321274 - RNA, 19 nt, Artificial Sequence
  Description of Artificial Sequence: Synthetic oligonucleotide
  Antisense Strand to SEQ ID NO: 321273
uuucaagugaccaugaucu

SEQ ID NO: 321275 - RNA, 19 nt, Artificial Sequence
  Description of Artificial Sequence: Synthetic oligonucleotide
  Sense Strand Starting at position 33 of SEQ ID NO: 318901
ugagaugauuucuaucaau

SEQ ID NO: 321276 - RNA, 19 nt, Artificial Sequence
  Description of Artificial Sequence: Synthetic oligonucleotide
  Antisense Strand to SEQ ID NO: 321275
auugauagaaaucaucuca

SEQ ID NO: 321277 - RNA, 19 nt, Artificial Sequence
  Description of Artificial Sequence: Synthetic oligonucleotide
  Sense Strand Starting at position 33 of SEQ ID NO: 318971
acauacaaguguuuaaguu

SEQ ID NO: 321278 - RNA, 19 nt, Artificial Sequence
  Description of Artificial Sequence: Synthetic oligonucleotide
  Antisense Strand to SEQ ID NO: 321277
aacuuaaacacuuguaugu

SEQ ID NO: 321279 - RNA, 19 nt, Artificial Sequence
  Description of Artificial Sequence: Synthetic oligonucleotide
  Sense Strand Starting at position 33 of SEQ ID NO: 319023
guuucugcugauuaacaga

SEQ ID NO: 321280 - RNA, 19 nt, Artificial Sequence
  Description of Artificial Sequence: Synthetic oligonucleotide
  Antisense Strand to SEQ ID NO: 321279
ucuguuaaucagcagaaac

SEQ ID NO: 321281 - RNA, 19 nt, Artificial Sequence
  Description of Artificial Sequence: Synthetic oligonucleotide
  Sense Strand Starting at position 33 of SEQ ID NO: 319058
ggcuuaauauuagcaauag

SEQ ID NO: 321282 - RNA, 19 nt, Artificial Sequence
  Description of Artificial Sequence: Synthetic oligonucleotide
  Antisense Strand to SEQ ID NO: 321281
cuauugcuaauauuaagcc

SEQ ID NO: 321283 - RNA, 19 nt, Artificial Sequence
  Description of Artificial Sequence: Synthetic oligonucleotide
  Sense Strand Starting at position 33 of SEQ ID NO: 319177
auucccauugcucagguua

SEQ ID NO: 321284 - RNA, 19 nt, Artificial Sequence
  Description of Artificial Sequence: Synthetic oligonucleotide
  Antisense Strand to SEQ ID NO: 321283
uaaccugagcaaugggaau

SEQ ID NO: 321285 - RNA, 19 nt, Artificial Sequence
  Description of Artificial Sequence: Synthetic oligonucleotide
  Sense Strand Starting at position 34 of SEQ ID NO: 315293
caggaaacuggaugucacu

SEQ ID NO: 321286 - RNA, 19 nt, Artificial Sequence
  Description of Artificial Sequence: Synthetic oligonucleotide
  Antisense Strand to SEQ ID NO: 321285
agugacauccaguuuccug

SEQ ID NO: 321287 - RNA, 19 nt, Artificial Sequence
  Description of Artificial Sequence: Synthetic oligonucleotide
  Sense Strand Starting at position 34 of SEQ ID NO: 315299
acuggaugucacuagugua

SEQ ID NO: 321288 - RNA, 19 nt, Artificial Sequence
  Description of Artificial Sequence: Synthetic oligonucleotide
  Antisense Strand to SEQ ID NO: 321287
uacacuagugacauccagu

SEQ ID NO: 321289 - RNA, 19 nt, Artificial Sequence
  Description of Artificial Sequence: Synthetic oligonucleotide
  Sense Strand Starting at position 34 of SEQ ID NO: 315331
uugcaacaauccuuggaga

SEQ ID NO: 321290 - RNA, 19 nt, Artificial Sequence
  Description of Artificial Sequence: Synthetic oligonucleotide
  Antisense Strand to SEQ ID NO: 321289
ucuccaaggauuguugcaa

SEQ ID NO: 321291 - RNA, 19 nt, Artificial Sequence
  Description of Artificial Sequence: Synthetic oligonucleotide
  Sense Strand Starting at position 34 of SEQ ID NO: 315332
ugcaacaauccuuggagau

SEQ ID NO: 321292 - RNA, 19 nt, Artificial Sequence
  Description of Artificial Sequence: Synthetic oligonucleotide
  Antisense Strand to SEQ ID NO: 321291
aucuccaaggauuguugca

SEQ ID NO: 321293 - RNA, 19 nt, Artificial Sequence
  Description of Artificial Sequence: Synthetic oligonucleotide
  Sense Strand Starting at position 34 of SEQ ID NO: 315333
gcaacaauccuuggagaua

SEQ ID NO: 321294 - RNA, 19 nt, Artificial Sequence
  Description of Artificial Sequence: Synthetic oligonucleotide
  Antisense Strand to SEQ ID NO: 321293
uaucuccaaggauuguugc

SEQ ID NO: 321295 - RNA, 19 nt, Artificial Sequence
  Description of Artificial Sequence: Synthetic oligonucleotide
  Sense Strand Starting at position 34 of SEQ ID NO: 315600
ggguuucucaagggaacca

SEQ ID NO: 321296 - RNA, 19 nt, Artificial Sequence
  Description of Artificial Sequence: Synthetic oligonucleotide
  Antisense Strand to SEQ ID NO: 321295
ugguucccuugagaaaccc

SEQ ID NO: 321297 - RNA, 19 nt, Artificial Sequence
  Description of Artificial Sequence: Synthetic oligonucleotide
  Sense Strand Starting at position 34 of SEQ ID NO: 315685
gcguguugcguguucauuu

SEQ ID NO: 321298 - RNA, 19 nt, Artificial Sequence
  Description of Artificial Sequence: Synthetic oligonucleotide
  Antisense Strand to SEQ ID NO: 321297
aaaugaacacgcaacacgc

SEQ ID NO: 321299 - RNA, 19 nt, Artificial Sequence
  Description of Artificial Sequence: Synthetic oligonucleotide
  Sense Strand Starting at position 34 of SEQ ID NO: 315735
accacugugcuuuaauaug

SEQ ID NO: 321300 - RNA, 19 nt, Artificial Sequence
  Description of Artificial Sequence: Synthetic oligonucleotide
  Antisense Strand to SEQ ID NO: 321299
cauauuaaagcacaguggu

SEQ ID NO: 321301 - RNA, 19 nt, Artificial Sequence
  Description of Artificial Sequence: Synthetic oligonucleotide
  Sense Strand Starting at position 34 of SEQ ID NO: 315918
acuguauuagguugaacca

SEQ ID NO: 321302 - RNA, 19 nt, Artificial Sequence
  Description of Artificial Sequence: Synthetic oligonucleotide
  Antisense Strand to SEQ ID NO: 321301
ugguucaaccuaauacagu

SEQ ID NO: 321303 - RNA, 19 nt, Artificial Sequence
  Description of Artificial Sequence: Synthetic oligonucleotide
  Sense Strand Starting at position 34 of SEQ ID NO: 315944
ggccaauauuugguugcuu

SEQ ID NO: 321304 - RNA, 19 nt, Artificial Sequence
  Description of Artificial Sequence: Synthetic oligonucleotide
  Antisense Strand to SEQ ID NO: 321303
aagcaaccaaauauuggcc

SEQ ID NO: 321305 - RNA, 19 nt, Artificial Sequence
  Description of Artificial Sequence: Synthetic oligonucleotide
  Sense Strand Starting at position 34 of SEQ ID NO: 315945
gccaauauuugguugcuuu

SEQ ID NO: 321306 - RNA, 19 nt, Artificial Sequence
  Description of Artificial Sequence: Synthetic oligonucleotide
  Antisense Strand to SEQ ID NO: 321305
aaagcaaccaaauauuggc

SEQ ID NO: 321307 - RNA, 19 nt, Artificial Sequence
  Description of Artificial Sequence: Synthetic oligonucleotide
  Sense Strand Starting at position 34 of SEQ ID NO: 316008
cugguucuuguccaaggaa

SEQ ID NO: 321308 - RNA, 19 nt, Artificial Sequence
  Description of Artificial Sequence: Synthetic oligonucleotide
  Antisense Strand to SEQ ID NO: 321307
uuccuuggacaagaaccag

SEQ ID NO: 321309 - RNA, 19 nt, Artificial Sequence
  Description of Artificial Sequence: Synthetic oligonucleotide
  Sense Strand Starting at position 34 of SEQ ID NO: 316143
cgaggcauauuuccagcuu

SEQ ID NO: 321310 - RNA, 19 nt, Artificial Sequence
  Description of Artificial Sequence: Synthetic oligonucleotide
  Antisense Strand to SEQ ID NO: 321309
aagcuggaaauaugccucg

SEQ ID NO: 321311 - RNA, 19 nt, Artificial Sequence
  Description of Artificial Sequence: Synthetic oligonucleotide
  Sense Strand Starting at position 34 of SEQ ID NO: 316227
uguuuaugccaagacuucu

SEQ ID NO: 321312 - RNA, 19 nt, Artificial Sequence
  Description of Artificial Sequence: Synthetic oligonucleotide
  Antisense Strand to SEQ ID NO: 321311
agaagucuuggcauaaaca

SEQ ID NO: 321313 - RNA, 19 nt, Artificial Sequence
  Description of Artificial Sequence: Synthetic oligonucleotide
  Sense Strand Starting at position 34 of SEQ ID NO: 316237
aagacuucucucugggaug

SEQ ID NO: 321314 - RNA, 19 nt, Artificial Sequence
  Description of Artificial Sequence: Synthetic oligonucleotide
  Antisense Strand to SEQ ID NO: 321313
caucccagagagaagucuu

SEQ ID NO: 321315 - RNA, 19 nt, Artificial Sequence
  Description of Artificial Sequence: Synthetic oligonucleotide
  Sense Strand Starting at position 34 of SEQ ID NO: 316257
ggguaacucucuuugggag

SEQ ID NO: 321316 - RNA, 19 nt, Artificial Sequence
  Description of Artificial Sequence: Synthetic oligonucleotide
  Antisense Strand to SEQ ID NO: 321315
cucccaaagagaguuaccc

SEQ ID NO: 321317 - RNA, 19 nt, Artificial Sequence
  Description of Artificial Sequence: Synthetic oligonucleotide
  Sense Strand Starting at position 34 of SEQ ID NO: 316276
gcaguuuguguagaagaag

SEQ ID NO: 321318 - RNA, 19 nt, Artificial Sequence
  Description of Artificial Sequence: Synthetic oligonucleotide
  Antisense Strand to SEQ ID NO: 321317
cuucuucuacacaaacugc

SEQ ID NO: 321319 - RNA, 19 nt, Artificial Sequence
  Description of Artificial Sequence: Synthetic oligonucleotide
  Sense Strand Starting at position 34 of SEQ ID NO: 316322
ccugaagacuuaguaauua

SEQ ID NO: 321320 - RNA, 19 nt, Artificial Sequence
  Description of Artificial Sequence: Synthetic oligonucleotide
  Antisense Strand to SEQ ID NO: 321319
uaauuacuaagucuucagg

SEQ ID NO: 321321 - RNA, 19 nt, Artificial Sequence
  Description of Artificial Sequence: Synthetic oligonucleotide
  Sense Strand Starting at position 34 of SEQ ID NO: 316418
ucuccucuuggguaagaca

SEQ ID NO: 321322 - RNA, 19 nt, Artificial Sequence
  Description of Artificial Sequence: Synthetic oligonucleotide
  Antisense Strand to SEQ ID NO: 321321
ugucuuacccaagaggaga

SEQ ID NO: 321323 - RNA, 19 nt, Artificial Sequence
  Description of Artificial Sequence: Synthetic oligonucleotide
  Sense Strand Starting at position 34 of SEQ ID NO: 316490
ugagauaaucuaugugaau

SEQ ID NO: 321324 - RNA, 19 nt, Artificial Sequence
  Description of Artificial Sequence: Synthetic oligonucleotide
  Antisense Strand to SEQ ID NO: 321323
auucacauagauuaucuca

SEQ ID NO: 321325 - RNA, 19 nt, Artificial Sequence
  Description of Artificial Sequence: Synthetic oligonucleotide
  Sense Strand Starting at position 34 of SEQ ID NO: 316806
ucccucacuccugggaaga

SEQ ID NO: 321326 - RNA, 19 nt, Artificial Sequence
  Description of Artificial Sequence: Synthetic oligonucleotide
  Antisense Strand to SEQ ID NO: 321325
ucuucccaggagugaggga

SEQ ID NO: 321327 - RNA, 19 nt, Artificial Sequence
  Description of Artificial Sequence: Synthetic oligonucleotide
  Sense Strand Starting at position 34 of SEQ ID NO: 316807
cccucacuccugggaagaa

SEQ ID NO: 321328 - RNA, 19 nt, Artificial Sequence
  Description of Artificial Sequence: Synthetic oligonucleotide
  Antisense Strand to SEQ ID NO: 321327
uucuucccaggagugaggg

SEQ ID NO: 321329 - RNA, 19 nt, Artificial Sequence
  Description of Artificial Sequence: Synthetic oligonucleotide
  Sense Strand Starting at position 34 of SEQ ID NO: 317271
uggagccugccggaagaau

SEQ ID NO: 321330 - RNA, 19 nt, Artificial Sequence
  Description of Artificial Sequence: Synthetic oligonucleotide
  Antisense Strand to SEQ ID NO: 321329
auucuuccggcaggcucca

SEQ ID NO: 321331 - RNA, 19 nt, Artificial Sequence
  Description of Artificial Sequence: Synthetic oligonucleotide
  Sense Strand Starting at position 34 of SEQ ID NO: 317305
gaugauuucugcuuugguu

SEQ ID NO: 321332 - RNA, 19 nt, Artificial Sequence
  Description of Artificial Sequence: Synthetic oligonucleotide
  Antisense Strand to SEQ ID NO: 321331
aaccaaagcagaaaucauc

SEQ ID NO: 321333 - RNA, 19 nt, Artificial Sequence
  Description of Artificial Sequence: Synthetic oligonucleotide
  Sense Strand Starting at position 34 of SEQ ID NO: 317439
caaagucugcuuggaacau

SEQ ID NO: 321334 - RNA, 19 nt, Artificial Sequence
  Description of Artificial Sequence: Synthetic oligonucleotide
  Antisense Strand to SEQ ID NO: 321333
auguuccaagcagacuuug

SEQ ID NO: 321335 - RNA, 19 nt, Artificial Sequence
  Description of Artificial Sequence: Synthetic oligonucleotide
  Sense Strand Starting at position 34 of SEQ ID NO: 317445
cugcuuggaacaugguaau

SEQ ID NO: 321336 - RNA, 19 nt, Artificial Sequence
  Description of Artificial Sequence: Synthetic oligonucleotide
  Antisense Strand to SEQ ID NO: 321335
auuaccauguuccaagcag

SEQ ID NO: 321337 - RNA, 19 nt, Artificial Sequence
  Description of Artificial Sequence: Synthetic oligonucleotide
  Sense Strand Starting at position 34 of SEQ ID NO: 317537
gaggaaaugucuucuacug

SEQ ID NO: 321338 - RNA, 19 nt, Artificial Sequence
  Description of Artificial Sequence: Synthetic oligonucleotide
  Antisense Strand to SEQ ID NO: 321337
caguagaagacauuuccuc

SEQ ID NO: 321339 - RNA, 19 nt, Artificial Sequence
  Description of Artificial Sequence: Synthetic oligonucleotide
  Sense Strand Starting at position 34 of SEQ ID NO: 317634
ggaguuagcuuuccaagag

SEQ ID NO: 321340 - RNA, 19 nt, Artificial Sequence
  Description of Artificial Sequence: Synthetic oligonucleotide
  Antisense Strand to SEQ ID NO: 321339
cucuuggaaagcuaacucc

SEQ ID NO: 321341 - RNA, 19 nt, Artificial Sequence
  Description of Artificial Sequence: Synthetic oligonucleotide
  Sense Strand Starting at position 34 of SEQ ID NO: 317638
uuagcuuuccaagaggagu

SEQ ID NO: 321342 - RNA, 19 nt, Artificial Sequence
  Description of Artificial Sequence: Synthetic oligonucleotide
  Antisense Strand to SEQ ID NO: 321341
acuccucuuggaaagcuaa

SEQ ID NO: 321343 - RNA, 19 nt, Artificial Sequence
  Description of Artificial Sequence: Synthetic oligonucleotide
  Sense Strand Starting at position 34 of SEQ ID NO: 317692
gguacagauguguauagga

SEQ ID NO: 321344 - RNA, 19 nt, Artificial Sequence
  Description of Artificial Sequence: Synthetic oligonucleotide
  Antisense Strand to SEQ ID NO: 321343
uccuauacacaucuguacc

SEQ ID NO: 321345 - RNA, 19 nt, Artificial Sequence
  Description of Artificial Sequence: Synthetic oligonucleotide
  Sense Strand Starting at position 34 of SEQ ID NO: 317758
agagauguuucugccuaaa

SEQ ID NO: 321346 - RNA, 19 nt, Artificial Sequence
  Description of Artificial Sequence: Synthetic oligonucleotide
  Antisense Strand to SEQ ID NO: 321345
uuuaggcagaaacaucucu

SEQ ID NO: 321347 - RNA, 19 nt, Artificial Sequence
  Description of Artificial Sequence: Synthetic oligonucleotide
  Sense Strand Starting at position 34 of SEQ ID NO: 317761
gauguuucugccuaaagug

SEQ ID NO: 321348 - RNA, 19 nt, Artificial Sequence
  Description of Artificial Sequence: Synthetic oligonucleotide
  Antisense Strand to SEQ ID NO: 321347
cacuuuaggcagaaacauc

SEQ ID NO: 321349 - RNA, 19 nt, Artificial Sequence
  Description of Artificial Sequence: Synthetic oligonucleotide
  Sense Strand Starting at position 34 of SEQ ID NO: 318074
cuugaacauucuuugcaga

SEQ ID NO: 321350 - RNA, 19 nt, Artificial Sequence
  Description of Artificial Sequence: Synthetic oligonucleotide
  Antisense Strand to SEQ ID NO: 321349
ucugcaaagaauguucaag

SEQ ID NO: 321351 - RNA, 19 nt, Artificial Sequence
  Description of Artificial Sequence: Synthetic oligonucleotide
  Sense Strand Starting at position 34 of SEQ ID NO: 318085
uuugcagacucagcagaau

SEQ ID NO: 321352 - RNA, 19 nt, Artificial Sequence
  Description of Artificial Sequence: Synthetic oligonucleotide
  Antisense Strand to SEQ ID NO: 321351
auucugcugagucugcaaa

SEQ ID NO: 321353 - RNA, 19 nt, Artificial Sequence
  Description of Artificial Sequence: Synthetic oligonucleotide
  Sense Strand Starting at position 34 of SEQ ID NO: 318111
ugucuuucuggccagaaca

SEQ ID NO: 321354 - RNA, 19 nt, Artificial Sequence
  Description of Artificial Sequence: Synthetic oligonucleotide
  Antisense Strand to SEQ ID NO: 321353
uguucuggccagaaagaca

SEQ ID NO: 321355 - RNA, 19 nt, Artificial Sequence
  Description of Artificial Sequence: Synthetic oligonucleotide
  Sense Strand Starting at position 34 of SEQ ID NO: 318157
ccuauuaagugacccuuga

SEQ ID NO: 321356 - RNA, 19 nt, Artificial Sequence
  Description of Artificial Sequence: Synthetic oligonucleotide
  Antisense Strand to SEQ ID NO: 321355
ucaagggucacuuaauagg

SEQ ID NO: 321357 - RNA, 19 nt, Artificial Sequence
  Description of Artificial Sequence: Synthetic oligonucleotide
  Sense Strand Starting at position 34 of SEQ ID NO: 318161
uuaagugacccuugacaau

SEQ ID NO: 321358 - RNA, 19 nt, Artificial Sequence
  Description of Artificial Sequence: Synthetic oligonucleotide
  Antisense Strand to SEQ ID NO: 321357
auugucaagggucacuuaa

SEQ ID NO: 321359 - RNA, 19 nt, Artificial Sequence
  Description of Artificial Sequence: Synthetic oligonucleotide
  Sense Strand Starting at position 34 of SEQ ID NO: 318460
aggugaagugaguggugau

SEQ ID NO: 321360 - RNA, 19 nt, Artificial Sequence
  Description of Artificial Sequence: Synthetic oligonucleotide
  Antisense Strand to SEQ ID NO: 321359
aucaccacucacuucaccu

SEQ ID NO: 321361 - RNA, 19 nt, Artificial Sequence
  Description of Artificial Sequence: Synthetic oligonucleotide
  Sense Strand Starting at position 34 of SEQ ID NO: 318604
ggaccaugauucuuccaga

SEQ ID NO: 321362 - RNA, 19 nt, Artificial Sequence
  Description of Artificial Sequence: Synthetic oligonucleotide
  Antisense Strand to SEQ ID NO: 321361
ucuggaagaaucauggucc

SEQ ID NO: 321363 - RNA, 19 nt, Artificial Sequence
  Description of Artificial Sequence: Synthetic oligonucleotide
  Sense Strand Starting at position 34 of SEQ ID NO: 318647
gcaagaugauccucaaagc

SEQ ID NO: 321364 - RNA, 19 nt, Artificial Sequence
  Description of Artificial Sequence: Synthetic oligonucleotide
  Antisense Strand to SEQ ID NO: 321363
gcuuugaggaucaucuugc

SEQ ID NO: 321365 - RNA, 19 nt, Artificial Sequence
  Description of Artificial Sequence: Synthetic oligonucleotide
  Sense Strand Starting at position 35 of SEQ ID NO: 315581
uaauauuuaugugaacgag

SEQ ID NO: 321366 - RNA, 19 nt, Artificial Sequence
  Description of Artificial Sequence: Synthetic oligonucleotide
  Antisense Strand to SEQ ID NO: 321365
cucguucacauaaauauua

SEQ ID NO: 321367 - RNA, 19 nt, Artificial Sequence
  Description of Artificial Sequence: Synthetic oligonucleotide
  Sense Strand Starting at position 35 of SEQ ID NO: 315650
accuguaaugugcaacacu

SEQ ID NO: 321368 - RNA, 19 nt, Artificial Sequence
  Description of Artificial Sequence: Synthetic oligonucleotide
  Antisense Strand to SEQ ID NO: 321367
aguguugcacauuacaggu

SEQ ID NO: 321369 - RNA, 19 nt, Artificial Sequence
  Description of Artificial Sequence: Synthetic oligonucleotide
  Sense Strand Starting at position 35 of SEQ ID NO: 315722
ggacaaucauaugagauaa

SEQ ID NO: 321370 - RNA, 19 nt, Artificial Sequence
  Description of Artificial Sequence: Synthetic oligonucleotide
  Antisense Strand to SEQ ID NO: 321369
uuaucucauaugauugucc

SEQ ID NO: 321371 - RNA, 19 nt, Artificial Sequence
  Description of Artificial Sequence: Synthetic oligonucleotide
  Sense Strand Starting at position 35 of SEQ ID NO: 315732
augagauaaucugugcuca

SEQ ID NO: 321372 - RNA, 19 nt, Artificial Sequence
  Description of Artificial Sequence: Synthetic oligonucleotide
  Antisense Strand to SEQ ID NO: 321371
ugagcacagauuaucucau

SEQ ID NO: 321373 - RNA, 19 nt, Artificial Sequence
  Description of Artificial Sequence: Synthetic oligonucleotide
  Sense Strand Starting at position 35 of SEQ ID NO: 315733
ugagauaaucugugcucag

SEQ ID NO: 321374 - RNA, 19 nt, Artificial Sequence
  Description of Artificial Sequence: Synthetic oligonucleotide
  Antisense Strand to SEQ ID NO: 321373
cugagcacagauuaucuca

SEQ ID NO: 321375 - RNA, 19 nt, Artificial Sequence
  Description of Artificial Sequence: Synthetic oligonucleotide
  Sense Strand Starting at position 35 of SEQ ID NO: 315734
gagauaaucugugcucaga

SEQ ID NO: 321376 - RNA, 19 nt, Artificial Sequence
  Description of Artificial Sequence: Synthetic oligonucleotide
  Antisense Strand to SEQ ID NO: 321375
ucugagcacagauuaucuc

SEQ ID NO: 321377 - RNA, 19 nt, Artificial Sequence
  Description of Artificial Sequence: Synthetic oligonucleotide
  Sense Strand Starting at position 35 of SEQ ID NO: 316118
gagugacaucaacaguugu

SEQ ID NO: 321378 - RNA, 19 nt, Artificial Sequence
  Description of Artificial Sequence: Synthetic oligonucleotide
  Antisense Strand to SEQ ID NO: 321377
acaacuguugaugucacuc

SEQ ID NO: 321379 - RNA, 19 nt, Artificial Sequence
  Description of Artificial Sequence: Synthetic oligonucleotide
  Sense Strand Starting at position 35 of SEQ ID NO: 316131
aguuguuaauaaucaggca

SEQ ID NO: 321380 - RNA, 19 nt, Artificial Sequence
  Description of Artificial Sequence: Synthetic oligonucleotide
  Antisense Strand to SEQ ID NO: 321379
ugccugauuauuaacaacu

SEQ ID NO: 321381 - RNA, 19 nt, Artificial Sequence
  Description of Artificial Sequence: Synthetic oligonucleotide
  Sense Strand Starting at position 35 of SEQ ID NO: 316419
gccagagguuucuuaggga

SEQ ID NO: 321382 - RNA, 19 nt, Artificial Sequence
  Description of Artificial Sequence: Synthetic oligonucleotide
  Antisense Strand to SEQ ID NO: 321381
ucccuaagaaaccucuggc

SEQ ID NO: 321383 - RNA, 19 nt, Artificial Sequence
  Description of Artificial Sequence: Synthetic oligonucleotide
  Sense Strand Starting at position 35 of SEQ ID NO: 316465
gcuuacaucuagguggaga

SEQ ID NO: 321384 - RNA, 19 nt, Artificial Sequence
  Description of Artificial Sequence: Synthetic oligonucleotide
  Antisense Strand to SEQ ID NO: 321383
ucuccaccuagauguaagc

SEQ ID NO: 321385 - RNA, 19 nt, Artificial Sequence
  Description of Artificial Sequence: Synthetic oligonucleotide
  Sense Strand Starting at position 35 of SEQ ID NO: 316466
cuuacaucuagguggagaa

SEQ ID NO: 321386 - RNA, 19 nt, Artificial Sequence
  Description of Artificial Sequence: Synthetic oligonucleotide
  Antisense Strand to SEQ ID NO: 321385
uucuccaccuagauguaag

SEQ ID NO: 321387 - RNA, 19 nt, Artificial Sequence
  Description of Artificial Sequence: Synthetic oligonucleotide
  Sense Strand Starting at position 35 of SEQ ID NO: 316722
ggcuuauaaagucgaggga

SEQ ID NO: 321388 - RNA, 19 nt, Artificial Sequence
  Description of Artificial Sequence: Synthetic oligonucleotide
  Antisense Strand to SEQ ID NO: 321387
ucccucgacuuuauaagcc

SEQ ID NO: 321389 - RNA, 19 nt, Artificial Sequence
  Description of Artificial Sequence: Synthetic oligonucleotide
  Sense Strand Starting at position 35 of SEQ ID NO: 316725
uuauaaagucgagggaguu

SEQ ID NO: 321390 - RNA, 19 nt, Artificial Sequence
  Description of Artificial Sequence: Synthetic oligonucleotide
  Antisense Strand to SEQ ID NO: 321389
aacucccucgacuuuauaa

SEQ ID NO: 321391 - RNA, 19 nt, Artificial Sequence
  Description of Artificial Sequence: Synthetic oligonucleotide
  Sense Strand Starting at position 35 of SEQ ID NO: 316737
gggaguugagucuggagaa

SEQ ID NO: 321392 - RNA, 19 nt, Artificial Sequence
  Description of Artificial Sequence: Synthetic oligonucleotide
  Antisense Strand to SEQ ID NO: 321391
uucuccagacucaacuccc

SEQ ID NO: 321393 - RNA, 19 nt, Artificial Sequence
  Description of Artificial Sequence: Synthetic oligonucleotide
  Sense Strand Starting at position 35 of SEQ ID NO: 316797
ggucgaggucucgagaaug

SEQ ID NO: 321394 - RNA, 19 nt, Artificial Sequence
  Description of Artificial Sequence: Synthetic oligonucleotide
  Antisense Strand to SEQ ID NO: 321393
cauucucgagaccucgacc

SEQ ID NO: 321395 - RNA, 19 nt, Artificial Sequence
  Description of Artificial Sequence: Synthetic oligonucleotide
  Sense Strand Starting at position 35 of SEQ ID NO: 317534
gugucuuggacauggagga

SEQ ID NO: 321396 - RNA, 19 nt, Artificial Sequence
  Description of Artificial Sequence: Synthetic oligonucleotide
  Antisense Strand to SEQ ID NO: 321395
uccuccauguccaagacac

SEQ ID NO: 321397 - RNA, 19 nt, Artificial Sequence
  Description of Artificial Sequence: Synthetic oligonucleotide
  Sense Strand Starting at position 35 of SEQ ID NO: 317581
ggguguuaagcaggaucca

SEQ ID NO: 321398 - RNA, 19 nt, Artificial Sequence
  Description of Artificial Sequence: Synthetic oligonucleotide
  Antisense Strand to SEQ ID NO: 321397
uggauccugcuuaacaccc

SEQ ID NO: 321399 - RNA, 19 nt, Artificial Sequence
  Description of Artificial Sequence: Synthetic oligonucleotide
  Sense Strand Starting at position 35 of SEQ ID NO: 317582
gguguuaagcaggauccau

SEQ ID NO: 321400 - RNA, 19 nt, Artificial Sequence
  Description of Artificial Sequence: Synthetic oligonucleotide
  Antisense Strand to SEQ ID NO: 321399
auggauccugcuuaacacc

SEQ ID NO: 321401 - RNA, 19 nt, Artificial Sequence
  Description of Artificial Sequence: Synthetic oligonucleotide
  Sense Strand Starting at position 35 of SEQ ID NO: 317659
ggcuauaucgcccacaaau

SEQ ID NO: 321402 - RNA, 19 nt, Artificial Sequence
  Description of Artificial Sequence: Synthetic oligonucleotide
  Antisense Strand to SEQ ID NO: 321401
auuugugggcgauauagcc

SEQ ID NO: 321403 - RNA, 19 nt, Artificial Sequence
  Description of Artificial Sequence: Synthetic oligonucleotide
  Sense Strand Starting at position 35 of SEQ ID NO: 317723
ggcacuuucuggucuaaga

SEQ ID NO: 321404 - RNA, 19 nt, Artificial Sequence
  Description of Artificial Sequence: Synthetic oligonucleotide
  Antisense Strand to SEQ ID NO: 321403
ucuuagaccagaaagugcc

SEQ ID NO: 321405 - RNA, 19 nt, Artificial Sequence
  Description of Artificial Sequence: Synthetic oligonucleotide
  Sense Strand Starting at position 35 of SEQ ID NO: 317725
cacuuucuggucuaagaug

SEQ ID NO: 321406 - RNA, 19 nt, Artificial Sequence
  Description of Artificial Sequence: Synthetic oligonucleotide
  Antisense Strand to SEQ ID NO: 321405
caucuuagaccagaaagug

SEQ ID NO: 321407 - RNA, 19 nt, Artificial Sequence
  Description of Artificial Sequence: Synthetic oligonucleotide
  Sense Strand Starting at position 35 of SEQ ID NO: 317838
auaguuagcguguaacaaa

SEQ ID NO: 321408 - RNA, 19 nt, Artificial Sequence
  Description of Artificial Sequence: Synthetic oligonucleotide
  Antisense Strand to SEQ ID NO: 321407
uuuguuacacgcuaacuau

SEQ ID NO: 321409 - RNA, 19 nt, Artificial Sequence
  Description of Artificial Sequence: Synthetic oligonucleotide
  Sense Strand Starting at position 35 of SEQ ID NO: 317966
ccauaccuccauugaguuu

SEQ ID NO: 321410 - RNA, 19 nt, Artificial Sequence
  Description of Artificial Sequence: Synthetic oligonucleotide
  Antisense Strand to SEQ ID NO: 321409
aaacucaauggagguaugg

SEQ ID NO: 321411 - RNA, 19 nt, Artificial Sequence
  Description of Artificial Sequence: Synthetic oligonucleotide
  Sense Strand Starting at position 35 of SEQ ID NO: 317979
gaguuucccggguacaaca

SEQ ID NO: 321412 - RNA, 19 nt, Artificial Sequence
  Description of Artificial Sequence: Synthetic oligonucleotide
  Antisense Strand to SEQ ID NO: 321411
uguuguacccgggaaacuc

SEQ ID NO: 321413 - RNA, 19 nt, Artificial Sequence
  Description of Artificial Sequence: Synthetic oligonucleotide
  Sense Strand Starting at position 35 of SEQ ID NO: 318229
gcauuucugucucugagca

SEQ ID NO: 321414 - RNA, 19 nt, Artificial Sequence
  Description of Artificial Sequence: Synthetic oligonucleotide
  Antisense Strand to SEQ ID NO: 321413
ugcucagagacagaaaugc

SEQ ID NO: 321415 - RNA, 19 nt, Artificial Sequence
  Description of Artificial Sequence: Synthetic oligonucleotide
  Sense Strand Starting at position 35 of SEQ ID NO: 318381
ccaagagauccugggcagu

SEQ ID NO: 321416 - RNA, 19 nt, Artificial Sequence
  Description of Artificial Sequence: Synthetic oligonucleotide
  Antisense Strand to SEQ ID NO: 321415
acugcccaggaucucuugg

SEQ ID NO: 321417 - RNA, 19 nt, Artificial Sequence
  Description of Artificial Sequence: Synthetic oligonucleotide
  Sense Strand Starting at position 35 of SEQ ID NO: 318477
gaauaaggaugauauugag

SEQ ID NO: 321418 - RNA, 19 nt, Artificial Sequence
  Description of Artificial Sequence: Synthetic oligonucleotide
  Antisense Strand to SEQ ID NO: 321417
cucaauaucauccuuauuc

SEQ ID NO: 321419 - RNA, 19 nt, Artificial Sequence
  Description of Artificial Sequence: Synthetic oligonucleotide
  Sense Strand Starting at position 35 of SEQ ID NO: 318483
ggaugauauugagugcuuu

SEQ ID NO: 321420 - RNA, 19 nt, Artificial Sequence
  Description of Artificial Sequence: Synthetic oligonucleotide
  Antisense Strand to SEQ ID NO: 321419
aaagcacucaauaucaucc

SEQ ID NO: 321421 - RNA, 19 nt, Artificial Sequence
  Description of Artificial Sequence: Synthetic oligonucleotide
  Sense Strand Starting at position 35 of SEQ ID NO: 318484
gaugauauugagugcuuug

SEQ ID NO: 321422 - RNA, 19 nt, Artificial Sequence
  Description of Artificial Sequence: Synthetic oligonucleotide
  Antisense Strand to SEQ ID NO: 321421
caaagcacucaauaucauc

SEQ ID NO: 321423 - RNA, 19 nt, Artificial Sequence
  Description of Artificial Sequence: Synthetic oligonucleotide
  Sense Strand Starting at position 35 of SEQ ID NO: 318521
uuuccuuaucugggcaaua

SEQ ID NO: 321424 - RNA, 19 nt, Artificial Sequence
  Description of Artificial Sequence: Synthetic oligonucleotide
  Antisense Strand to SEQ ID NO: 321423
uauugcccagauaaggaaa

SEQ ID NO: 321425 - RNA, 19 nt, Artificial Sequence
  Description of Artificial Sequence: Synthetic oligonucleotide
  Sense Strand Starting at position 35 of SEQ ID NO: 318921
gcagaaagaacuggauagu

SEQ ID NO: 321426 - RNA, 19 nt, Artificial Sequence
  Description of Artificial Sequence: Synthetic oligonucleotide
  Antisense Strand to SEQ ID NO: 321425
acuauccaguucuuucugc

SEQ ID NO: 321427 - RNA, 19 nt, Artificial Sequence
  Description of Artificial Sequence: Synthetic oligonucleotide
  Sense Strand Starting at position 35 of SEQ ID NO: 318970
ugaaucuuacuuggccaua

SEQ ID NO: 321428 - RNA, 19 nt, Artificial Sequence
  Description of Artificial Sequence: Synthetic oligonucleotide
  Antisense Strand to SEQ ID NO: 321427
uauggccaaguaagauuca

SEQ ID NO: 321429 - RNA, 19 nt, Artificial Sequence
  Description of Artificial Sequence: Synthetic oligonucleotide
  Sense Strand Starting at position 35 of SEQ ID NO: 318975
cuuacuuggccauagacuu

SEQ ID NO: 321430 - RNA, 19 nt, Artificial Sequence
  Description of Artificial Sequence: Synthetic oligonucleotide
  Antisense Strand to SEQ ID NO: 321429
aagucuauggccaaguaag

SEQ ID NO: 321431 - RNA, 19 nt, Artificial Sequence
  Description of Artificial Sequence: Synthetic oligonucleotide
  Sense Strand Starting at position 35 of SEQ ID NO: 319015
aggcuugguuuccugauuu

SEQ ID NO: 321432 - RNA, 19 nt, Artificial Sequence
  Description of Artificial Sequence: Synthetic oligonucleotide
  Antisense Strand to SEQ ID NO: 321431
aaaucaggaaaccaagccu

SEQ ID NO: 321433 - RNA, 19 nt, Artificial Sequence
  Description of Artificial Sequence: Synthetic oligonucleotide
  Sense Strand Starting at position 35 of SEQ ID NO: 319096
agaggcuuauuguuuaaac

SEQ ID NO: 321434 - RNA, 19 nt, Artificial Sequence
  Description of Artificial Sequence: Synthetic oligonucleotide
  Antisense Strand to SEQ ID NO: 321433
guuuaaacaauaagccucu

SEQ ID NO: 321435 - RNA, 19 nt, Artificial Sequence
  Description of Artificial Sequence: Synthetic oligonucleotide
  Sense Strand Starting at position 35 of SEQ ID NO: 319098
aggcuuauuguuuaaacca

SEQ ID NO: 321436 - RNA, 19 nt, Artificial Sequence
  Description of Artificial Sequence: Synthetic oligonucleotide
  Antisense Strand to SEQ ID NO: 321435
ugguuuaaacaauaagccu

SEQ ID NO: 321437 - RNA, 19 nt, Artificial Sequence
  Description of Artificial Sequence: Synthetic oligonucleotide
  Sense Strand Starting at position 35 of SEQ ID NO: 319136
ggaguuuccuguuuaauau

SEQ ID NO: 321438 - RNA, 19 nt, Artificial Sequence
  Description of Artificial Sequence: Synthetic oligonucleotide
  Antisense Strand to SEQ ID NO: 321437
auauuaaacaggaaacucc

SEQ ID NO: 321439 - RNA, 19 nt, Artificial Sequence
  Description of Artificial Sequence: Synthetic oligonucleotide
  Sense Strand Starting at position 35 of SEQ ID NO: 319155
agagaaagauugggaaaca

SEQ ID NO: 321440 - RNA, 19 nt, Artificial Sequence
  Description of Artificial Sequence: Synthetic oligonucleotide
  Antisense Strand to SEQ ID NO: 321439
uguuucccaaucuuucucu

SEQ ID NO: 321441 - RNA, 19 nt, Artificial Sequence
  Description of Artificial Sequence: Synthetic oligonucleotide
  Sense Strand Starting at position 35 of SEQ ID NO: 319156
gagaaagauugggaaacaa

SEQ ID NO: 321442 - RNA, 19 nt, Artificial Sequence
  Description of Artificial Sequence: Synthetic oligonucleotide
  Antisense Strand to SEQ ID NO: 321441
uuguuucccaaucuuucuc

SEQ ID NO: 321443 - RNA, 19 nt, Artificial Sequence
  Description of Artificial Sequence: Synthetic oligonucleotide
  Sense Strand Starting at position 35 of SEQ ID NO: 319192
agugaaauagaguguugua

SEQ ID NO: 321444 - RNA, 19 nt, Artificial Sequence
  Description of Artificial Sequence: Synthetic oligonucleotide
  Antisense Strand to SEQ ID NO: 321443
uacaacacucuauuucacu

SEQ ID NO: 321445 - RNA, 19 nt, Artificial Sequence
  Description of Artificial Sequence: Synthetic oligonucleotide
  Sense Strand Starting at position 36 of SEQ ID NO: 315279
gggagagauucagaggcuu

SEQ ID NO: 321446 - RNA, 19 nt, Artificial Sequence
  Description of Artificial Sequence: Synthetic oligonucleotide
  Antisense Strand to SEQ ID NO: 321445
aagccucugaaucucuccc

SEQ ID NO: 321447 - RNA, 19 nt, Artificial Sequence
  Description of Artificial Sequence: Synthetic oligonucleotide
  Sense Strand Starting at position 36 of SEQ ID NO: 315335
aagggaugugcacggauaa

SEQ ID NO: 321448 - RNA, 19 nt, Artificial Sequence
  Description of Artificial Sequence: Synthetic oligonucleotide
  Antisense Strand to SEQ ID NO: 321447
uuauccgugcacaucccuu

SEQ ID NO: 321449 - RNA, 19 nt, Artificial Sequence
  Description of Artificial Sequence: Synthetic oligonucleotide
  Sense Strand Starting at position 36 of SEQ ID NO: 315336
agggaugugcacggauaaa

SEQ ID NO: 321450 - RNA, 19 nt, Artificial Sequence
  Description of Artificial Sequence: Synthetic oligonucleotide
  Antisense Strand to SEQ ID NO: 321449
uuuauccgugcacaucccu

SEQ ID NO: 321451 - RNA, 19 nt, Artificial Sequence
  Description of Artificial Sequence: Synthetic oligonucleotide
  Sense Strand Starting at position 36 of SEQ ID NO: 315425
guaggaguuuaacuggcaa

SEQ ID NO: 321452 - RNA, 19 nt, Artificial Sequence
  Description of Artificial Sequence: Synthetic oligonucleotide
  Antisense Strand to SEQ ID NO: 321451
uugccaguuaaacuccuac

SEQ ID NO: 321453 - RNA, 19 nt, Artificial Sequence
  Description of Artificial Sequence: Synthetic oligonucleotide
  Sense Strand Starting at position 36 of SEQ ID NO: 315427
aggaguuuaacuggcaacu

SEQ ID NO: 321454 - RNA, 19 nt, Artificial Sequence
  Description of Artificial Sequence: Synthetic oligonucleotide
  Antisense Strand to SEQ ID NO: 321453
aguugccaguuaaacuccu

SEQ ID NO: 321455 - RNA, 19 nt, Artificial Sequence
  Description of Artificial Sequence: Synthetic oligonucleotide
  Sense Strand Starting at position 36 of SEQ ID NO: 315444
cugucuacgcagggauaga

SEQ ID NO: 321456 - RNA, 19 nt, Artificial Sequence
  Description of Artificial Sequence: Synthetic oligonucleotide
  Antisense Strand to SEQ ID NO: 321455
ucuaucccugcguagacag

SEQ ID NO: 321457 - RNA, 19 nt, Artificial Sequence
  Description of Artificial Sequence: Synthetic oligonucleotide
  Sense Strand Starting at position 36 of SEQ ID NO: 315445
ugucuacgcagggauagaa

SEQ ID NO: 321458 - RNA, 19 nt, Artificial Sequence
  Description of Artificial Sequence: Synthetic oligonucleotide
  Antisense Strand to SEQ ID NO: 321457
uucuaucccugcguagaca

SEQ ID NO: 321459 - RNA, 19 nt, Artificial Sequence
  Description of Artificial Sequence: Synthetic oligonucleotide
  Sense Strand Starting at position 36 of SEQ ID NO: 315552
cacggaauacccuguuaga

SEQ ID NO: 321460 - RNA, 19 nt, Artificial Sequence
  Description of Artificial Sequence: Synthetic oligonucleotide
  Antisense Strand to SEQ ID NO: 321459
ucuaacaggguauuccgug

SEQ ID NO: 321461 - RNA, 19 nt, Artificial Sequence
  Description of Artificial Sequence: Synthetic oligonucleotide
  Sense Strand Starting at position 36 of SEQ ID NO: 315555
ggaauacccuguuagaaca

SEQ ID NO: 321462 - RNA, 19 nt, Artificial Sequence
  Description of Artificial Sequence: Synthetic oligonucleotide
  Antisense Strand to SEQ ID NO: 321461
uguucuaacaggguauucc

SEQ ID NO: 321463 - RNA, 19 nt, Artificial Sequence
  Description of Artificial Sequence: Synthetic oligonucleotide
  Sense Strand Starting at position 36 of SEQ ID NO: 315725
uuccaagacucaguacaga

SEQ ID NO: 321464 - RNA, 19 nt, Artificial Sequence
  Description of Artificial Sequence: Synthetic oligonucleotide
  Antisense Strand to SEQ ID NO: 321463
ucuguacugagucuuggaa

SEQ ID NO: 321465 - RNA, 19 nt, Artificial Sequence
  Description of Artificial Sequence: Synthetic oligonucleotide
  Sense Strand Starting at position 36 of SEQ ID NO: 315763
ugagcagguccuggaaauu

SEQ ID NO: 321466 - RNA, 19 nt, Artificial Sequence
  Description of Artificial Sequence: Synthetic oligonucleotide
  Antisense Strand to SEQ ID NO: 321465
aauuuccaggaccugcuca

SEQ ID NO: 321467 - RNA, 19 nt, Artificial Sequence
  Description of Artificial Sequence: Synthetic oligonucleotide
  Sense Strand Starting at position 36 of SEQ ID NO: 315826
ccuguucuggcuguguuau

SEQ ID NO: 321468 - RNA, 19 nt, Artificial Sequence
  Description of Artificial Sequence: Synthetic oligonucleotide
  Antisense Strand to SEQ ID NO: 321467
auaacacagccagaacagg

SEQ ID NO: 321469 - RNA, 19 nt, Artificial Sequence
  Description of Artificial Sequence: Synthetic oligonucleotide
  Sense Strand Starting at position 36 of SEQ ID NO: 316068
ccgagaacuaagcgaaaga

SEQ ID NO: 321470 - RNA, 19 nt, Artificial Sequence
  Description of Artificial Sequence: Synthetic oligonucleotide
  Antisense Strand to SEQ ID NO: 321469
ucuuucgcuuaguucucgg

SEQ ID NO: 321471 - RNA, 19 nt, Artificial Sequence
  Description of Artificial Sequence: Synthetic oligonucleotide
  Sense Strand Starting at position 36 of SEQ ID NO: 316224
caccaaguuccuggagauu

SEQ ID NO: 321472 - RNA, 19 nt, Artificial Sequence
  Description of Artificial Sequence: Synthetic oligonucleotide
  Antisense Strand to SEQ ID NO: 321471
aaucuccaggaacuuggug

SEQ ID NO: 321473 - RNA, 19 nt, Artificial Sequence
  Description of Artificial Sequence: Synthetic oligonucleotide
  Sense Strand Starting at position 36 of SEQ ID NO: 317334
gggagagcccugggacuaa

SEQ ID NO: 321474 - RNA, 19 nt, Artificial Sequence
  Description of Artificial Sequence: Synthetic oligonucleotide
  Antisense Strand to SEQ ID NO: 321473
uuagucccagggcucuccc

SEQ ID NO: 321475 - RNA, 19 nt, Artificial Sequence
  Description of Artificial Sequence: Synthetic oligonucleotide
  Sense Strand Starting at position 36 of SEQ ID NO: 317349
cuaacacuuucugugaugu

SEQ ID NO: 321476 - RNA, 19 nt, Artificial Sequence
  Description of Artificial Sequence: Synthetic oligonucleotide
  Antisense Strand to SEQ ID NO: 321475
acaucacagaaaguguuag

SEQ ID NO: 321477 - RNA, 19 nt, Artificial Sequence
  Description of Artificial Sequence: Synthetic oligonucleotide
  Sense Strand Starting at position 36 of SEQ ID NO: 317471
cugacucauuccucagaga

SEQ ID NO: 321478 - RNA, 19 nt, Artificial Sequence
  Description of Artificial Sequence: Synthetic oligonucleotide
  Antisense Strand to SEQ ID NO: 321477
ucucugaggaaugagucag

SEQ ID NO: 321479 - RNA, 19 nt, Artificial Sequence
  Description of Artificial Sequence: Synthetic oligonucleotide
  Sense Strand Starting at position 36 of SEQ ID NO: 317510
gcagccuucuguccuguaa

SEQ ID NO: 321480 - RNA, 19 nt, Artificial Sequence
  Description of Artificial Sequence: Synthetic oligonucleotide
  Antisense Strand to SEQ ID NO: 321479
uuacaggacagaaggcugc

SEQ ID NO: 321481 - RNA, 19 nt, Artificial Sequence
  Description of Artificial Sequence: Synthetic oligonucleotide
  Sense Strand Starting at position 36 of SEQ ID NO: 317514
ccuucuguccuguaaagag

SEQ ID NO: 321482 - RNA, 19 nt, Artificial Sequence
  Description of Artificial Sequence: Synthetic oligonucleotide
  Antisense Strand to SEQ ID NO: 321481
cucuuuacaggacagaagg

SEQ ID NO: 321483 - RNA, 19 nt, Artificial Sequence
  Description of Artificial Sequence: Synthetic oligonucleotide
  Sense Strand Starting at position 36 of SEQ ID NO: 317695
uggacugauuccuccugua

SEQ ID NO: 321484 - RNA, 19 nt, Artificial Sequence
  Description of Artificial Sequence: Synthetic oligonucleotide
  Antisense Strand to SEQ ID NO: 321483
uacaggaggaaucagucca

SEQ ID NO: 321485 - RNA, 19 nt, Artificial Sequence
  Description of Artificial Sequence: Synthetic oligonucleotide
  Sense Strand Starting at position 36 of SEQ ID NO: 317869
uaaaccguacuucgucaua

SEQ ID NO: 321486 - RNA, 19 nt, Artificial Sequence
  Description of Artificial Sequence: Synthetic oligonucleotide
  Antisense Strand to SEQ ID NO: 321485
uaugacgaaguacgguuua

SEQ ID NO: 321487 - RNA, 19 nt, Artificial Sequence
  Description of Artificial Sequence: Synthetic oligonucleotide
  Sense Strand Starting at position 36 of SEQ ID NO: 317940
cuuugaguuaagcggugau

SEQ ID NO: 321488 - RNA, 19 nt, Artificial Sequence
  Description of Artificial Sequence: Synthetic oligonucleotide
  Antisense Strand to SEQ ID NO: 321487
aucaccgcuuaacucaaag

SEQ ID NO: 321489 - RNA, 19 nt, Artificial Sequence
  Description of Artificial Sequence: Synthetic oligonucleotide
  Sense Strand Starting at position 36 of SEQ ID NO: 318062
uuaggcaauuucuaaagau

SEQ ID NO: 321490 - RNA, 19 nt, Artificial Sequence
  Description of Artificial Sequence: Synthetic oligonucleotide
  Antisense Strand to SEQ ID NO: 321489
aucuuuagaaauugccuaa

SEQ ID NO: 321491 - RNA, 19 nt, Artificial Sequence
  Description of Artificial Sequence: Synthetic oligonucleotide
  Sense Strand Starting at position 36 of SEQ ID NO: 318196
gcucuaaaucagggaugca

SEQ ID NO: 321492 - RNA, 19 nt, Artificial Sequence
  Description of Artificial Sequence: Synthetic oligonucleotide
  Antisense Strand to SEQ ID NO: 321491
ugcaucccugauuuagagc

SEQ ID NO: 321493 - RNA, 19 nt, Artificial Sequence
  Description of Artificial Sequence: Synthetic oligonucleotide
  Sense Strand Starting at position 36 of SEQ ID NO: 318284
uagccuuucgugcaucaca

SEQ ID NO: 321494 - RNA, 19 nt, Artificial Sequence
  Description of Artificial Sequence: Synthetic oligonucleotide
  Antisense Strand to SEQ ID NO: 321493
ugugaugcacgaaaggcua

SEQ ID NO: 321495 - RNA, 19 nt, Artificial Sequence
  Description of Artificial Sequence: Synthetic oligonucleotide
  Sense Strand Starting at position 36 of SEQ ID NO: 318318
gagacuggucuccagcaga

SEQ ID NO: 321496 - RNA, 19 nt, Artificial Sequence
  Description of Artificial Sequence: Synthetic oligonucleotide
  Antisense Strand to SEQ ID NO: 321495
ucugcuggagaccagucuc

SEQ ID NO: 321497 - RNA, 19 nt, Artificial Sequence
  Description of Artificial Sequence: Synthetic oligonucleotide
  Sense Strand Starting at position 36 of SEQ ID NO: 318345
acuaguaaucguuacauac

SEQ ID NO: 321498 - RNA, 19 nt, Artificial Sequence
  Description of Artificial Sequence: Synthetic oligonucleotide
  Antisense Strand to SEQ ID NO: 321497
guauguaacgauuacuagu

SEQ ID NO: 321499 - RNA, 19 nt, Artificial Sequence
  Description of Artificial Sequence: Synthetic oligonucleotide
  Sense Strand Starting at position 36 of SEQ ID NO: 318384
gcgaguuaccagcgagauu

SEQ ID NO: 321500 - RNA, 19 nt, Artificial Sequence
  Description of Artificial Sequence: Synthetic oligonucleotide
  Antisense Strand to SEQ ID NO: 321499
aaucucgcugguaacucgc

SEQ ID NO: 321501 - RNA, 19 nt, Artificial Sequence
  Description of Artificial Sequence: Synthetic oligonucleotide
  Sense Strand Starting at position 36 of SEQ ID NO: 318385
cgaguuaccagcgagauug

SEQ ID NO: 321502 - RNA, 19 nt, Artificial Sequence
  Description of Artificial Sequence: Synthetic oligonucleotide
  Antisense Strand to SEQ ID NO: 321501
caaucucgcugguaacucg

SEQ ID NO: 321503 - RNA, 19 nt, Artificial Sequence
  Description of Artificial Sequence: Synthetic oligonucleotide
  Sense Strand Starting at position 36 of SEQ ID NO: 318720
gagcuaagcuuggcugaaa

SEQ ID NO: 321504 - RNA, 19 nt, Artificial Sequence
  Description of Artificial Sequence: Synthetic oligonucleotide
  Antisense Strand to SEQ ID NO: 321503
uuucagccaagcuuagcuc

SEQ ID NO: 321505 - RNA, 19 nt, Artificial Sequence
  Description of Artificial Sequence: Synthetic oligonucleotide
  Sense Strand Starting at position 36 of SEQ ID NO: 318721
agcuaagcuuggcugaaau

SEQ ID NO: 321506 - RNA, 19 nt, Artificial Sequence
  Description of Artificial Sequence: Synthetic oligonucleotide
  Antisense Strand to SEQ ID NO: 321505
auuucagccaagcuuagcu

SEQ ID NO: 321507 - RNA, 19 nt, Artificial Sequence
  Description of Artificial Sequence: Synthetic oligonucleotide
  Sense Strand Starting at position 36 of SEQ ID NO: 318812
gguguauuagaauaaaucg

SEQ ID NO: 321508 - RNA, 19 nt, Artificial Sequence
  Description of Artificial Sequence: Synthetic oligonucleotide
  Antisense Strand to SEQ ID NO: 321507
cgauuuauucuaauacacc

SEQ ID NO: 321509 - RNA, 19 nt, Artificial Sequence
  Description of Artificial Sequence: Synthetic oligonucleotide
  Sense Strand Starting at position 36 of SEQ ID NO: 318856
ccgcgaacgcucuaucuga

SEQ ID NO: 321510 - RNA, 19 nt, Artificial Sequence
  Description of Artificial Sequence: Synthetic oligonucleotide
  Antisense Strand to SEQ ID NO: 321509
ucagauagagcguucgcgg

SEQ ID NO: 321511 - RNA, 19 nt, Artificial Sequence
  Description of Artificial Sequence: Synthetic oligonucleotide
  Sense Strand Starting at position 36 of SEQ ID NO: 318905
agcauaauugcuuaaaggu

SEQ ID NO: 321512 - RNA, 19 nt, Artificial Sequence
  Description of Artificial Sequence: Synthetic oligonucleotide
  Antisense Strand to SEQ ID NO: 321511
accuuuaagcaauuaugcu

SEQ ID NO: 321513 - RNA, 19 nt, Artificial Sequence
  Description of Artificial Sequence: Synthetic oligonucleotide
  Sense Strand Starting at position 36 of SEQ ID NO: 318964
cuguaugaucuuggucaac

SEQ ID NO: 321514 - RNA, 19 nt, Artificial Sequence
  Description of Artificial Sequence: Synthetic oligonucleotide
  Antisense Strand to SEQ ID NO: 321513
guugaccaagaucauacag

SEQ ID NO: 321515 - RNA, 19 nt, Artificial Sequence
  Description of Artificial Sequence: Synthetic oligonucleotide
  Sense Strand Starting at position 36 of SEQ ID NO: 318966
guaugaucuuggucaacuc

SEQ ID NO: 321516 - RNA, 19 nt, Artificial Sequence
  Description of Artificial Sequence: Synthetic oligonucleotide
  Antisense Strand to SEQ ID NO: 321515
gaguugaccaagaucauac

SEQ ID NO: 321517 - RNA, 19 nt, Artificial Sequence
  Description of Artificial Sequence: Synthetic oligonucleotide
  Sense Strand Starting at position 36 of SEQ ID NO: 319003
ucagucuccuuucuuguaa

SEQ ID NO: 321518 - RNA, 19 nt, Artificial Sequence
  Description of Artificial Sequence: Synthetic oligonucleotide
  Antisense Strand to SEQ ID NO: 321517
uuacaagaaaggagacuga

SEQ ID NO: 321519 - RNA, 19 nt, Artificial Sequence
  Description of Artificial Sequence: Synthetic oligonucleotide
  Sense Strand Starting at position 36 of SEQ ID NO: 319092
cguggaauucugggagcaa

SEQ ID NO: 321520 - RNA, 19 nt, Artificial Sequence
  Description of Artificial Sequence: Synthetic oligonucleotide
  Antisense Strand to SEQ ID NO: 321519
uugcucccagaauuccacg

SEQ ID NO: 321521 - RNA, 19 nt, Artificial Sequence
  Description of Artificial Sequence: Synthetic oligonucleotide
  Sense Strand Starting at position 36 of SEQ ID NO: 319161
uauauaugggcauauguau

SEQ ID NO: 321522 - RNA, 19 nt, Artificial Sequence
  Description of Artificial Sequence: Synthetic oligonucleotide
  Antisense Strand to SEQ ID NO: 321521
auacauaugcccauauaua

SEQ ID NO: 321523 - RNA, 19 nt, Artificial Sequence
  Description of Artificial Sequence: Synthetic oligonucleotide
  Sense Strand Starting at position 36 of SEQ ID NO: 319167
ugggcauauguauaauaua

SEQ ID NO: 321524 - RNA, 19 nt, Artificial Sequence
  Description of Artificial Sequence: Synthetic oligonucleotide
  Antisense Strand to SEQ ID NO: 321523
uauauuauacauaugccca

SEQ ID NO: 321525 - RNA, 19 nt, Artificial Sequence
  Description of Artificial Sequence: Synthetic oligonucleotide
  Sense Strand Starting at position 37 of SEQ ID NO: 315614
agucucauguaauucucaa

SEQ ID NO: 321526 - RNA, 19 nt, Artificial Sequence
  Description of Artificial Sequence: Synthetic oligonucleotide
  Antisense Strand to SEQ ID NO: 321525
uugagaauuacaugagacu

SEQ ID NO: 321527 - RNA, 19 nt, Artificial Sequence
  Description of Artificial Sequence: Synthetic oligonucleotide
  Sense Strand Starting at position 37 of SEQ ID NO: 315799
ugggacuccugauuaaauu

SEQ ID NO: 321528 - RNA, 19 nt, Artificial Sequence
  Description of Artificial Sequence: Synthetic oligonucleotide
  Antisense Strand to SEQ ID NO: 321527
aauuuaaucaggaguccca

SEQ ID NO: 321529 - RNA, 19 nt, Artificial Sequence
  Description of Artificial Sequence: Synthetic oligonucleotide
  Sense Strand Starting at position 37 of SEQ ID NO: 315830
gcacuuugggaagauucuu

SEQ ID NO: 321530 - RNA, 19 nt, Artificial Sequence
  Description of Artificial Sequence: Synthetic oligonucleotide
  Antisense Strand to SEQ ID NO: 321529
aagaaucuucccaaagugc

SEQ ID NO: 321531 - RNA, 19 nt, Artificial Sequence
  Description of Artificial Sequence: Synthetic oligonucleotide
  Sense Strand Starting at position 37 of SEQ ID NO: 315836
ugggaagauucuuuccucu

SEQ ID NO: 321532 - RNA, 19 nt, Artificial Sequence
  Description of Artificial Sequence: Synthetic oligonucleotide
  Antisense Strand to SEQ ID NO: 321531
agaggaaagaaucuuccca

SEQ ID NO: 321533 - RNA, 19 nt, Artificial Sequence
  Description of Artificial Sequence: Synthetic oligonucleotide
  Sense Strand Starting at position 37 of SEQ ID NO: 316067
ggaagaccuuucccuguca

SEQ ID NO: 321534 - RNA, 19 nt, Artificial Sequence
  Description of Artificial Sequence: Synthetic oligonucleotide
  Antisense Strand to SEQ ID NO: 321533
ugacagggaaaggucuucc

SEQ ID NO: 321535 - RNA, 19 nt, Artificial Sequence
  Description of Artificial Sequence: Synthetic oligonucleotide
  Sense Strand Starting at position 37 of SEQ ID NO: 316827
cgcuuaggucaagaagacu

SEQ ID NO: 321536 - RNA, 19 nt, Artificial Sequence
  Description of Artificial Sequence: Synthetic oligonucleotide
  Antisense Strand to SEQ ID NO: 321535
agucuucuugaccuaagcg

SEQ ID NO: 321537 - RNA, 19 nt, Artificial Sequence
  Description of Artificial Sequence: Synthetic oligonucleotide
  Sense Strand Starting at position 37 of SEQ ID NO: 316860
ggagaauucccagggcuuu

SEQ ID NO: 321538 - RNA, 19 nt, Artificial Sequence
  Description of Artificial Sequence: Synthetic oligonucleotide
  Antisense Strand to SEQ ID NO: 321537
aaagcccugggaauucucc

SEQ ID NO: 321539 - RNA, 19 nt, Artificial Sequence
  Description of Artificial Sequence: Synthetic oligonucleotide
  Sense Strand Starting at position 37 of SEQ ID NO: 317289
uguagaaugccgggaguga

SEQ ID NO: 321540 - RNA, 19 nt, Artificial Sequence
  Description of Artificial Sequence: Synthetic oligonucleotide
  Antisense Strand to SEQ ID NO: 321539
ucacucccggcauucuaca

SEQ ID NO: 321541 - RNA, 19 nt, Artificial Sequence
  Description of Artificial Sequence: Synthetic oligonucleotide
  Sense Strand Starting at position 37 of SEQ ID NO: 317290
guagaaugccgggagugau

SEQ ID NO: 321542 - RNA, 19 nt, Artificial Sequence
  Description of Artificial Sequence: Synthetic oligonucleotide
  Antisense Strand to SEQ ID NO: 321541
aucacucccggcauucuac

SEQ ID NO: 321543 - RNA, 19 nt, Artificial Sequence
  Description of Artificial Sequence: Synthetic oligonucleotide
  Sense Strand Starting at position 37 of SEQ ID NO: 317293
gaaugccgggagugauaau

SEQ ID NO: 321544 - RNA, 19 nt, Artificial Sequence
  Description of Artificial Sequence: Synthetic oligonucleotide
  Antisense Strand to SEQ ID NO: 321543
auuaucacucccggcauuc

SEQ ID NO: 321545 - RNA, 19 nt, Artificial Sequence
  Description of Artificial Sequence: Synthetic oligonucleotide
  Sense Strand Starting at position 37 of SEQ ID NO: 317689
cugauauuuccuuguuucu

SEQ ID NO: 321546 - RNA, 19 nt, Artificial Sequence
  Description of Artificial Sequence: Synthetic oligonucleotide
  Antisense Strand to SEQ ID NO: 321545
agaaacaaggaaauaucag

SEQ ID NO: 321547 - RNA, 19 nt, Artificial Sequence
  Description of Artificial Sequence: Synthetic oligonucleotide
  Sense Strand Starting at position 37 of SEQ ID NO: 317757
acaggaaauuugugagaug

SEQ ID NO: 321548 - RNA, 19 nt, Artificial Sequence
  Description of Artificial Sequence: Synthetic oligonucleotide
  Antisense Strand to SEQ ID NO: 321547
caucucacaaauuuccugu

SEQ ID NO: 321549 - RNA, 19 nt, Artificial Sequence
  Description of Artificial Sequence: Synthetic oligonucleotide
  Sense Strand Starting at position 37 of SEQ ID NO: 317758
caggaaauuugugagaugu

SEQ ID NO: 321550 - RNA, 19 nt, Artificial Sequence
  Description of Artificial Sequence: Synthetic oligonucleotide
  Antisense Strand to SEQ ID NO: 321549
acaucucacaaauuuccug

SEQ ID NO: 321551 - RNA, 19 nt, Artificial Sequence
  Description of Artificial Sequence: Synthetic oligonucleotide
  Sense Strand Starting at position 37 of SEQ ID NO: 317760
ggaaauuugugagauguau

SEQ ID NO: 321552 - RNA, 19 nt, Artificial Sequence
  Description of Artificial Sequence: Synthetic oligonucleotide
  Antisense Strand to SEQ ID NO: 321551
auacaucucacaaauuucc

SEQ ID NO: 321553 - RNA, 19 nt, Artificial Sequence
  Description of Artificial Sequence: Synthetic oligonucleotide
  Sense Strand Starting at position 37 of SEQ ID NO: 317843
uggcuuaaugcauguauuu

SEQ ID NO: 321554 - RNA, 19 nt, Artificial Sequence
  Description of Artificial Sequence: Synthetic oligonucleotide
  Antisense Strand to SEQ ID NO: 321553
aaauacaugcauuaagcca

SEQ ID NO: 321555 - RNA, 19 nt, Artificial Sequence
  Description of Artificial Sequence: Synthetic oligonucleotide
  Sense Strand Starting at position 37 of SEQ ID NO: 317985
cccucauaucuguggaacu

SEQ ID NO: 321556 - RNA, 19 nt, Artificial Sequence
  Description of Artificial Sequence: Synthetic oligonucleotide
  Antisense Strand to SEQ ID NO: 321555
aguuccacagauaugaggg

SEQ ID NO: 321557 - RNA, 19 nt, Artificial Sequence
  Description of Artificial Sequence: Synthetic oligonucleotide
  Sense Strand Starting at position 37 of SEQ ID NO: 317996
guggaacuucucgacucau

SEQ ID NO: 321558 - RNA, 19 nt, Artificial Sequence
  Description of Artificial Sequence: Synthetic oligonucleotide
  Antisense Strand to SEQ ID NO: 321557
augagucgagaaguuccac

SEQ ID NO: 321559 - RNA, 19 nt, Artificial Sequence
  Description of Artificial Sequence: Synthetic oligonucleotide
  Sense Strand Starting at position 37 of SEQ ID NO: 318131
agauuccuccauuauguga

SEQ ID NO: 321560 - RNA, 19 nt, Artificial Sequence
  Description of Artificial Sequence: Synthetic oligonucleotide
  Antisense Strand to SEQ ID NO: 321559
ucacauaauggaggaaucu

SEQ ID NO: 321561 - RNA, 19 nt, Artificial Sequence
  Description of Artificial Sequence: Synthetic oligonucleotide
  Sense Strand Starting at position 37 of SEQ ID NO: 318138
uccauuaugugaucacaga

SEQ ID NO: 321562 - RNA, 19 nt, Artificial Sequence
  Description of Artificial Sequence: Synthetic oligonucleotide
  Antisense Strand to SEQ ID NO: 321561
ucugugaucacauaaugga

SEQ ID NO: 321563 - RNA, 19 nt, Artificial Sequence
  Description of Artificial Sequence: Synthetic oligonucleotide
  Sense Strand Starting at position 37 of SEQ ID NO: 318151
cacagagaggccuguaauu

SEQ ID NO: 321564 - RNA, 19 nt, Artificial Sequence
  Description of Artificial Sequence: Synthetic oligonucleotide
  Antisense Strand to SEQ ID NO: 321563
aauuacaggccucucugug

SEQ ID NO: 321565 - RNA, 19 nt, Artificial Sequence
  Description of Artificial Sequence: Synthetic oligonucleotide
  Sense Strand Starting at position 37 of SEQ ID NO: 318527
cugggauugcuugauuaac

SEQ ID NO: 321566 - RNA, 19 nt, Artificial Sequence
  Description of Artificial Sequence: Synthetic oligonucleotide
  Antisense Strand to SEQ ID NO: 321565
guuaaucaagcaaucccag

SEQ ID NO: 321567 - RNA, 19 nt, Artificial Sequence
  Description of Artificial Sequence: Synthetic oligonucleotide
  Sense Strand Starting at position 37 of SEQ ID NO: 318529
gggauugcuugauuaacau

SEQ ID NO: 321568 - RNA, 19 nt, Artificial Sequence
  Description of Artificial Sequence: Synthetic oligonucleotide
  Antisense Strand to SEQ ID NO: 321567
auguuaaucaagcaauccc

SEQ ID NO: 321569 - RNA, 19 nt, Artificial Sequence
  Description of Artificial Sequence: Synthetic oligonucleotide
  Sense Strand Starting at position 37 of SEQ ID NO: 318538
ugauuaacaugucucugga

SEQ ID NO: 321570 - RNA, 19 nt, Artificial Sequence
  Description of Artificial Sequence: Synthetic oligonucleotide
  Antisense Strand to SEQ ID NO: 321569
uccagagacauguuaauca

SEQ ID NO: 321571 - RNA, 19 nt, Artificial Sequence
  Description of Artificial Sequence: Synthetic oligonucleotide
  Sense Strand Starting at position 37 of SEQ ID NO: 318541
uuaacaugucucuggacaa

SEQ ID NO: 321572 - RNA, 19 nt, Artificial Sequence
  Description of Artificial Sequence: Synthetic oligonucleotide
  Antisense Strand to SEQ ID NO: 321571
uuguccagagacauguuaa

SEQ ID NO: 321573 - RNA, 19 nt, Artificial Sequence
  Description of Artificial Sequence: Synthetic oligonucleotide
  Sense Strand Starting at position 37 of SEQ ID NO: 318572
cuagcuuauucuccuggga

SEQ ID NO: 321574 - RNA, 19 nt, Artificial Sequence
  Description of Artificial Sequence: Synthetic oligonucleotide
  Antisense Strand to SEQ ID NO: 321573
ucccaggagaauaagcuag

SEQ ID NO: 321575 - RNA, 19 nt, Artificial Sequence
  Description of Artificial Sequence: Synthetic oligonucleotide
  Sense Strand Starting at position 37 of SEQ ID NO: 318575
gcuuauucuccugggaagu

SEQ ID NO: 321576 - RNA, 19 nt, Artificial Sequence
  Description of Artificial Sequence: Synthetic oligonucleotide
  Antisense Strand to SEQ ID NO: 321575
acuucccaggagaauaagc

SEQ ID NO: 321577 - RNA, 19 nt, Artificial Sequence
  Description of Artificial Sequence: Synthetic oligonucleotide
  Sense Strand Starting at position 37 of SEQ ID NO: 318576
cuuauucuccugggaaguc

SEQ ID NO: 321578 - RNA, 19 nt, Artificial Sequence
  Description of Artificial Sequence: Synthetic oligonucleotide
  Antisense Strand to SEQ ID NO: 321577
gacuucccaggagaauaag

SEQ ID NO: 321579 - RNA, 19 nt, Artificial Sequence
  Description of Artificial Sequence: Synthetic oligonucleotide
  Sense Strand Starting at position 37 of SEQ ID NO: 318624
gaaggugugccauauaauc

SEQ ID NO: 321580 - RNA, 19 nt, Artificial Sequence
  Description of Artificial Sequence: Synthetic oligonucleotide
  Antisense Strand to SEQ ID NO: 321579
gauuauauggcacaccuuc

SEQ ID NO: 321581 - RNA, 19 nt, Artificial Sequence
  Description of Artificial Sequence: Synthetic oligonucleotide
  Sense Strand Starting at position 37 of SEQ ID NO: 318632
gccauauaaucuguaggaa

SEQ ID NO: 321582 - RNA, 19 nt, Artificial Sequence
  Description of Artificial Sequence: Synthetic oligonucleotide
  Antisense Strand to SEQ ID NO: 321581
uuccuacagauuauauggc

SEQ ID NO: 321583 - RNA, 19 nt, Artificial Sequence
  Description of Artificial Sequence: Synthetic oligonucleotide
  Sense Strand Starting at position 37 of SEQ ID NO: 318690
guguucugaacuugggagu

SEQ ID NO: 321584 - RNA, 19 nt, Artificial Sequence
  Description of Artificial Sequence: Synthetic oligonucleotide
  Antisense Strand to SEQ ID NO: 321583
acucccaaguucagaacac

SEQ ID NO: 321585 - RNA, 19 nt, Artificial Sequence
  Description of Artificial Sequence: Synthetic oligonucleotide
  Sense Strand Starting at position 37 of SEQ ID NO: 318744
ugaacaauggcuuggaggu

SEQ ID NO: 321586 - RNA, 19 nt, Artificial Sequence
  Description of Artificial Sequence: Synthetic oligonucleotide
  Antisense Strand to SEQ ID NO: 321585
accuccaagccauuguuca

SEQ ID NO: 321587 - RNA, 19 nt, Artificial Sequence
  Description of Artificial Sequence: Synthetic oligonucleotide
  Sense Strand Starting at position 37 of SEQ ID NO: 318745
gaacaauggcuuggagguu

SEQ ID NO: 321588 - RNA, 19 nt, Artificial Sequence
  Description of Artificial Sequence: Synthetic oligonucleotide
  Antisense Strand to SEQ ID NO: 321587
aaccuccaagccauuguuc

SEQ ID NO: 321589 - RNA, 19 nt, Artificial Sequence
  Description of Artificial Sequence: Synthetic oligonucleotide
  Sense Strand Starting at position 37 of SEQ ID NO: 318846
agcagaaaguguuccgaaa

SEQ ID NO: 321590 - RNA, 19 nt, Artificial Sequence
  Description of Artificial Sequence: Synthetic oligonucleotide
  Antisense Strand to SEQ ID NO: 321589
uuucggaacacuuucugcu

SEQ ID NO: 321591 - RNA, 19 nt, Artificial Sequence
  Description of Artificial Sequence: Synthetic oligonucleotide
  Sense Strand Starting at position 37 of SEQ ID NO: 318858
uccgaaaucauguggaaag

SEQ ID NO: 321592 - RNA, 19 nt, Artificial Sequence
  Description of Artificial Sequence: Synthetic oligonucleotide
  Antisense Strand to SEQ ID NO: 321591
cuuuccacaugauuucgga

SEQ ID NO: 321593 - RNA, 19 nt, Artificial Sequence
  Description of Artificial Sequence: Synthetic oligonucleotide
  Sense Strand Starting at position 37 of SEQ ID NO: 319018
cauaacuugggcugugaaa

SEQ ID NO: 321594 - RNA, 19 nt, Artificial Sequence
  Description of Artificial Sequence: Synthetic oligonucleotide
  Antisense Strand to SEQ ID NO: 321593
uuucacagcccaaguuaug

SEQ ID NO: 321595 - RNA, 19 nt, Artificial Sequence
  Description of Artificial Sequence: Synthetic oligonucleotide
  Sense Strand Starting at position 37 of SEQ ID NO: 319041
ccagcuucuccagauguca

SEQ ID NO: 321596 - RNA, 19 nt, Artificial Sequence
  Description of Artificial Sequence: Synthetic oligonucleotide
  Antisense Strand to SEQ ID NO: 321595
ugacaucuggagaagcugg

SEQ ID NO: 321597 - RNA, 19 nt, Artificial Sequence
  Description of Artificial Sequence: Synthetic oligonucleotide
  Sense Strand Starting at position 37 of SEQ ID NO: 319137
aagccaagaguguggucau

SEQ ID NO: 321598 - RNA, 19 nt, Artificial Sequence
  Description of Artificial Sequence: Synthetic oligonucleotide
  Antisense Strand to SEQ ID NO: 321597
augaccacacucuuggcuu

SEQ ID NO: 321599 - RNA, 19 nt, Artificial Sequence
  Description of Artificial Sequence: Synthetic oligonucleotide
  Sense Strand Starting at position 37 of SEQ ID NO: 319140
ccaagaguguggucaugag

SEQ ID NO: 321600 - RNA, 19 nt, Artificial Sequence
  Description of Artificial Sequence: Synthetic oligonucleotide
  Antisense Strand to SEQ ID NO: 321599
cucaugaccacacucuugg

SEQ ID NO: 321601 - RNA, 19 nt, Artificial Sequence
  Description of Artificial Sequence: Synthetic oligonucleotide
  Sense Strand Starting at position 37 of SEQ ID NO: 319144
gaguguggucaugagaucu

SEQ ID NO: 321602 - RNA, 19 nt, Artificial Sequence
  Description of Artificial Sequence: Synthetic oligonucleotide
  Antisense Strand to SEQ ID NO: 321601
agaucucaugaccacacuc

SEQ ID NO: 321603 - RNA, 19 nt, Artificial Sequence
  Description of Artificial Sequence: Synthetic oligonucleotide
  Sense Strand Starting at position 37 of SEQ ID NO: 319209
guuaaauaguaggauuucu

SEQ ID NO: 321604 - RNA, 19 nt, Artificial Sequence
  Description of Artificial Sequence: Synthetic oligonucleotide
  Antisense Strand to SEQ ID NO: 321603
agaaauccuacuauuuaac

SEQ ID NO: 321605 - RNA, 19 nt, Artificial Sequence
  Description of Artificial Sequence: Synthetic oligonucleotide
  Sense Strand Starting at position 38 of SEQ ID NO: 315261
uguugaaaguuacugggua

SEQ ID NO: 321606 - RNA, 19 nt, Artificial Sequence
  Description of Artificial Sequence: Synthetic oligonucleotide
  Antisense Strand to SEQ ID NO: 321605
uacccaguaacuuucaaca

SEQ ID NO: 321607 - RNA, 19 nt, Artificial Sequence
  Description of Artificial Sequence: Synthetic oligonucleotide
  Sense Strand Starting at position 38 of SEQ ID NO: 315263
uugaaaguuacuggguaaa

SEQ ID NO: 321608 - RNA, 19 nt, Artificial Sequence
  Description of Artificial Sequence: Synthetic oligonucleotide
  Antisense Strand to SEQ ID NO: 321607
uuuacccaguaacuuucaa

SEQ ID NO: 321609 - RNA, 19 nt, Artificial Sequence
  Description of Artificial Sequence: Synthetic oligonucleotide
  Sense Strand Starting at position 38 of SEQ ID NO: 315356
guacaugauuacuucugaa

SEQ ID NO: 321610 - RNA, 19 nt, Artificial Sequence
  Description of Artificial Sequence: Synthetic oligonucleotide
  Antisense Strand to SEQ ID NO: 321609
uucagaaguaaucauguac

SEQ ID NO: 321611 - RNA, 19 nt, Artificial Sequence
  Description of Artificial Sequence: Synthetic oligonucleotide
  Sense Strand Starting at position 38 of SEQ ID NO: 315998
agucucauguaauucucaa

SEQ ID NO: 321612 - RNA, 19 nt, Artificial Sequence
  Description of Artificial Sequence: Synthetic oligonucleotide
  Antisense Strand to SEQ ID NO: 321611
uugagaauuacaugagacu

SEQ ID NO: 321613 - RNA, 19 nt, Artificial Sequence
  Description of Artificial Sequence: Synthetic oligonucleotide
  Sense Strand Starting at position 38 of SEQ ID NO: 316183
ugggacuccugauuaaauu

SEQ ID NO: 321614 - RNA, 19 nt, Artificial Sequence
  Description of Artificial Sequence: Synthetic oligonucleotide
  Antisense Strand to SEQ ID NO: 321613
aauuuaaucaggaguccca

SEQ ID NO: 321615 - RNA, 19 nt, Artificial Sequence
  Description of Artificial Sequence: Synthetic oligonucleotide
  Sense Strand Starting at position 38 of SEQ ID NO: 316214
gcacuuugggaagauucuu

SEQ ID NO: 321616 - RNA, 19 nt, Artificial Sequence
  Description of Artificial Sequence: Synthetic oligonucleotide
  Antisense Strand to SEQ ID NO: 321615
aagaaucuucccaaagugc

SEQ ID NO: 321617 - RNA, 19 nt, Artificial Sequence
  Description of Artificial Sequence: Synthetic oligonucleotide
  Sense Strand Starting at position 38 of SEQ ID NO: 316220
ugggaagauucuuuccucu

SEQ ID NO: 321618 - RNA, 19 nt, Artificial Sequence
  Description of Artificial Sequence: Synthetic oligonucleotide
  Antisense Strand to SEQ ID NO: 321617
agaggaaagaaucuuccca

SEQ ID NO: 321619 - RNA, 19 nt, Artificial Sequence
  Description of Artificial Sequence: Synthetic oligonucleotide
  Sense Strand Starting at position 38 of SEQ ID NO: 316451
ggaagaccuuucccuguca

SEQ ID NO: 321620 - RNA, 19 nt, Artificial Sequence
  Description of Artificial Sequence: Synthetic oligonucleotide
  Antisense Strand to SEQ ID NO: 321619
ugacagggaaaggucuucc

SEQ ID NO: 321621 - RNA, 19 nt, Artificial Sequence
  Description of Artificial Sequence: Synthetic oligonucleotide
  Sense Strand Starting at position 38 of SEQ ID NO: 317211
cgcuuaggucaagaagacu

SEQ ID NO: 321622 - RNA, 19 nt, Artificial Sequence
  Description of Artificial Sequence: Synthetic oligonucleotide
  Antisense Strand to SEQ ID NO: 321621
agucuucuugaccuaagcg

SEQ ID NO: 321623 - RNA, 19 nt, Artificial Sequence
  Description of Artificial Sequence: Synthetic oligonucleotide
  Sense Strand Starting at position 38 of SEQ ID NO: 317244
ggagaauucccagggcuuu

SEQ ID NO: 321624 - RNA, 19 nt, Artificial Sequence
  Description of Artificial Sequence: Synthetic oligonucleotide
  Antisense Strand to SEQ ID NO: 321623
aaagcccugggaauucucc

SEQ ID NO: 321625 - RNA, 19 nt, Artificial Sequence
  Description of Artificial Sequence: Synthetic oligonucleotide
  Sense Strand Starting at position 38 of SEQ ID NO: 317673
uguagaaugccgggaguga

SEQ ID NO: 321626 - RNA, 19 nt, Artificial Sequence
  Description of Artificial Sequence: Synthetic oligonucleotide
  Antisense Strand to SEQ ID NO: 321625
ucacucccggcauucuaca

SEQ ID NO: 321627 - RNA, 19 nt, Artificial Sequence
  Description of Artificial Sequence: Synthetic oligonucleotide
  Sense Strand Starting at position 38 of SEQ ID NO: 317674
guagaaugccgggagugau

SEQ ID NO: 321628 - RNA, 19 nt, Artificial Sequence
  Description of Artificial Sequence: Synthetic oligonucleotide
  Antisense Strand to SEQ ID NO: 321627
aucacucccggcauucuac

SEQ ID NO: 321629 - RNA, 19 nt, Artificial Sequence
  Description of Artificial Sequence: Synthetic oligonucleotide
  Sense Strand Starting at position 38 of SEQ ID NO: 317677
gaaugccgggagugauaau

SEQ ID NO: 321630 - RNA, 19 nt, Artificial Sequence
  Description of Artificial Sequence: Synthetic oligonucleotide
  Antisense Strand to SEQ ID NO: 321629
auuaucacucccggcauuc

SEQ ID NO: 321631 - RNA, 19 nt, Artificial Sequence
  Description of Artificial Sequence: Synthetic oligonucleotide
  Sense Strand Starting at position 38 of SEQ ID NO: 317684
gggagugauaauugcguau

SEQ ID NO: 321632 - RNA, 19 nt, Artificial Sequence
  Description of Artificial Sequence: Synthetic oligonucleotide
  Antisense Strand to SEQ ID NO: 321631
auacgcaauuaucacuccc

SEQ ID NO: 321633 - RNA, 19 nt, Artificial Sequence
  Description of Artificial Sequence: Synthetic oligonucleotide
  Sense Strand Starting at position 38 of SEQ ID NO: 317978
gaggcuguuccaggucaca

SEQ ID NO: 321634 - RNA, 19 nt, Artificial Sequence
  Description of Artificial Sequence: Synthetic oligonucleotide
  Antisense Strand to SEQ ID NO: 321633
ugugaccuggaacagccuc

SEQ ID NO: 321635 - RNA, 19 nt, Artificial Sequence
  Description of Artificial Sequence: Synthetic oligonucleotide
  Sense Strand Starting at position 38 of SEQ ID NO: 318027
gccacaucacccuguucua

SEQ ID NO: 321636 - RNA, 19 nt, Artificial Sequence
  Description of Artificial Sequence: Synthetic oligonucleotide
  Antisense Strand to SEQ ID NO: 321635
uagaacagggugauguggc

SEQ ID NO: 321637 - RNA, 19 nt, Artificial Sequence
  Description of Artificial Sequence: Synthetic oligonucleotide
  Sense Strand Starting at position 38 of SEQ ID NO: 318073
cugauauuuccuuguuucu

SEQ ID NO: 321638 - RNA, 19 nt, Artificial Sequence
  Description of Artificial Sequence: Synthetic oligonucleotide
  Antisense Strand to SEQ ID NO: 321637
agaaacaaggaaauaucag

SEQ ID NO: 321639 - RNA, 19 nt, Artificial Sequence
  Description of Artificial Sequence: Synthetic oligonucleotide
  Sense Strand Starting at position 38 of SEQ ID NO: 318141
acaggaaauuugugagaug

SEQ ID NO: 321640 - RNA, 19 nt, Artificial Sequence
  Description of Artificial Sequence: Synthetic oligonucleotide
  Antisense Strand to SEQ ID NO: 321639
caucucacaaauuuccugu

SEQ ID NO: 321641 - RNA, 19 nt, Artificial Sequence
  Description of Artificial Sequence: Synthetic oligonucleotide
  Sense Strand Starting at position 38 of SEQ ID NO: 318142
caggaaauuugugagaugu

SEQ ID NO: 321642 - RNA, 19 nt, Artificial Sequence
  Description of Artificial Sequence: Synthetic oligonucleotide
  Antisense Strand to SEQ ID NO: 321641
acaucucacaaauuuccug

SEQ ID NO: 321643 - RNA, 19 nt, Artificial Sequence
  Description of Artificial Sequence: Synthetic oligonucleotide
  Sense Strand Starting at position 38 of SEQ ID NO: 318144
ggaaauuugugagauguau

SEQ ID NO: 321644 - RNA, 19 nt, Artificial Sequence
  Description of Artificial Sequence: Synthetic oligonucleotide
  Antisense Strand to SEQ ID NO: 321643
auacaucucacaaauuucc

SEQ ID NO: 321645 - RNA, 19 nt, Artificial Sequence
  Description of Artificial Sequence: Synthetic oligonucleotide
  Sense Strand Starting at position 38 of SEQ ID NO: 318227
uggcuuaaugcauguauuu

SEQ ID NO: 321646 - RNA, 19 nt, Artificial Sequence
  Description of Artificial Sequence: Synthetic oligonucleotide
  Antisense Strand to SEQ ID NO: 321645
aaauacaugcauuaagcca

SEQ ID NO: 321647 - RNA, 19 nt, Artificial Sequence
  Description of Artificial Sequence: Synthetic oligonucleotide
  Sense Strand Starting at position 38 of SEQ ID NO: 318369
cccucauaucuguggaacu

SEQ ID NO: 321648 - RNA, 19 nt, Artificial Sequence
  Description of Artificial Sequence: Synthetic oligonucleotide
  Antisense Strand to SEQ ID NO: 321647
aguuccacagauaugaggg

SEQ ID NO: 321649 - RNA, 19 nt, Artificial Sequence
  Description of Artificial Sequence: Synthetic oligonucleotide
  Sense Strand Starting at position 38 of SEQ ID NO: 318380
guggaacuucucgacucau

SEQ ID NO: 321650 - RNA, 19 nt, Artificial Sequence
  Description of Artificial Sequence: Synthetic oligonucleotide
  Antisense Strand to SEQ ID NO: 321649
augagucgagaaguuccac

SEQ ID NO: 321651 - RNA, 19 nt, Artificial Sequence
  Description of Artificial Sequence: Synthetic oligonucleotide
  Sense Strand Starting at position 38 of SEQ ID NO: 318515
agauuccuccauuauguga

SEQ ID NO: 321652 - RNA, 19 nt, Artificial Sequence
  Description of Artificial Sequence: Synthetic oligonucleotide
  Antisense Strand to SEQ ID NO: 321651
ucacauaauggaggaaucu

SEQ ID NO: 321653 - RNA, 19 nt, Artificial Sequence
  Description of Artificial Sequence: Synthetic oligonucleotide
  Sense Strand Starting at position 38 of SEQ ID NO: 318522
uccauuaugugaucacaga

SEQ ID NO: 321654 - RNA, 19 nt, Artificial Sequence
  Description of Artificial Sequence: Synthetic oligonucleotide
  Antisense Strand to SEQ ID NO: 321653
ucugugaucacauaaugga

SEQ ID NO: 321655 - RNA, 19 nt, Artificial Sequence
  Description of Artificial Sequence: Synthetic oligonucleotide
  Sense Strand Starting at position 38 of SEQ ID NO: 318535
cacagagaggccuguaauu

SEQ ID NO: 321656 - RNA, 19 nt, Artificial Sequence
  Description of Artificial Sequence: Synthetic oligonucleotide
  Antisense Strand to SEQ ID NO: 321655
aauuacaggccucucugug

SEQ ID NO: 321657 - RNA, 19 nt, Artificial Sequence
  Description of Artificial Sequence: Synthetic oligonucleotide
  Sense Strand Starting at position 38 of SEQ ID NO: 318911
cugggauugcuugauuaac

SEQ ID NO: 321658 - RNA, 19 nt, Artificial Sequence
  Description of Artificial Sequence: Synthetic oligonucleotide
  Antisense Strand to SEQ ID NO: 321657
guuaaucaagcaaucccag

SEQ ID NO: 321659 - RNA, 19 nt, Artificial Sequence
  Description of Artificial Sequence: Synthetic oligonucleotide
  Sense Strand Starting at position 38 of SEQ ID NO: 318913
gggauugcuugauuaacau

SEQ ID NO: 321660 - RNA, 19 nt, Artificial Sequence
  Description of Artificial Sequence: Synthetic oligonucleotide
  Antisense Strand to SEQ ID NO: 321659
auguuaaucaagcaauccc

SEQ ID NO: 321661 - RNA, 19 nt, Artificial Sequence
  Description of Artificial Sequence: Synthetic oligonucleotide
  Sense Strand Starting at position 38 of SEQ ID NO: 318922
ugauuaacaugucucugga

SEQ ID NO: 321662 - RNA, 19 nt, Artificial Sequence
  Description of Artificial Sequence: Synthetic oligonucleotide
  Antisense Strand to SEQ ID NO: 321661
uccagagacauguuaauca

SEQ ID NO: 321663 - RNA, 19 nt, Artificial Sequence
  Description of Artificial Sequence: Synthetic oligonucleotide
  Sense Strand Starting at position 38 of SEQ ID NO: 318925
uuaacaugucucuggacaa

SEQ ID NO: 321664 - RNA, 19 nt, Artificial Sequence
  Description of Artificial Sequence: Synthetic oligonucleotide
  Antisense Strand to SEQ ID NO: 321663
uuguccagagacauguuaa

SEQ ID NO: 321665 - RNA, 19 nt, Artificial Sequence
  Description of Artificial Sequence: Synthetic oligonucleotide
  Sense Strand Starting at position 38 of SEQ ID NO: 318948
ggcgaagacuagcuuauuc

SEQ ID NO: 321666 - RNA, 19 nt, Artificial Sequence
  Description of Artificial Sequence: Synthetic oligonucleotide
  Antisense Strand to SEQ ID NO: 321665
gaauaagcuagucuucgcc

SEQ ID NO: 321667 - RNA, 19 nt, Artificial Sequence
  Description of Artificial Sequence: Synthetic oligonucleotide
  Sense Strand Starting at position 38 of SEQ ID NO: 318956
cuagcuuauucuccuggga

SEQ ID NO: 321668 - RNA, 19 nt, Artificial Sequence
  Description of Artificial Sequence: Synthetic oligonucleotide
  Antisense Strand to SEQ ID NO: 321667
ucccaggagaauaagcuag

SEQ ID NO: 321669 - RNA, 19 nt, Artificial Sequence
  Description of Artificial Sequence: Synthetic oligonucleotide
  Sense Strand Starting at position 38 of SEQ ID NO: 318959
gcuuauucuccugggaagu

SEQ ID NO: 321670 - RNA, 19 nt, Artificial Sequence
  Description of Artificial Sequence: Synthetic oligonucleotide
  Antisense Strand to SEQ ID NO: 321669
acuucccaggagaauaagc

SEQ ID NO: 321671 - RNA, 19 nt, Artificial Sequence
  Description of Artificial Sequence: Synthetic oligonucleotide
  Sense Strand Starting at position 38 of SEQ ID NO: 318960
cuuauucuccugggaaguc

SEQ ID NO: 321672 - RNA, 19 nt, Artificial Sequence
  Description of Artificial Sequence: Synthetic oligonucleotide
  Antisense Strand to SEQ ID NO: 321671
gacuucccaggagaauaag

SEQ ID NO: 321673 - RNA, 19 nt, Artificial Sequence
  Description of Artificial Sequence: Synthetic oligonucleotide
  Sense Strand Starting at position 38 of SEQ ID NO: 319008
gaaggugugccauauaauc

SEQ ID NO: 321674 - RNA, 19 nt, Artificial Sequence
  Description of Artificial Sequence: Synthetic oligonucleotide
  Antisense Strand to SEQ ID NO: 321673
gauuauauggcacaccuuc

SEQ ID NO: 321675 - RNA, 19 nt, Artificial Sequence
  Description of Artificial Sequence: Synthetic oligonucleotide
  Sense Strand Starting at position 38 of SEQ ID NO: 319016
gccauauaaucuguaggaa

SEQ ID NO: 321676 - RNA, 19 nt, Artificial Sequence
  Description of Artificial Sequence: Synthetic oligonucleotide
  Antisense Strand to SEQ ID NO: 321675
uuccuacagauuauauggc

SEQ ID NO: 321677 - RNA, 19 nt, Artificial Sequence
  Description of Artificial Sequence: Synthetic oligonucleotide
  Sense Strand Starting at position 38 of SEQ ID NO: 319063
gggaaagugguguguucug

SEQ ID NO: 321678 - RNA, 19 nt, Artificial Sequence
  Description of Artificial Sequence: Synthetic oligonucleotide
  Antisense Strand to SEQ ID NO: 321677
cagaacacaccacuuuccc

SEQ ID NO: 321679 - RNA, 19 nt, Artificial Sequence
  Description of Artificial Sequence: Synthetic oligonucleotide
  Sense Strand Starting at position 38 of SEQ ID NO: 319074
guguucugaacuugggagu

SEQ ID NO: 321680 - RNA, 19 nt, Artificial Sequence
  Description of Artificial Sequence: Synthetic oligonucleotide
  Antisense Strand to SEQ ID NO: 321679
acucccaaguucagaacac

SEQ ID NO: 321681 - RNA, 19 nt, Artificial Sequence
  Description of Artificial Sequence: Synthetic oligonucleotide
  Sense Strand Starting at position 38 of SEQ ID NO: 319128
ugaacaauggcuuggaggu

SEQ ID NO: 321682 - RNA, 19 nt, Artificial Sequence
  Description of Artificial Sequence: Synthetic oligonucleotide
  Antisense Strand to SEQ ID NO: 321681
accuccaagccauuguuca

SEQ ID NO: 321683 - RNA, 19 nt, Artificial Sequence
  Description of Artificial Sequence: Synthetic oligonucleotide
  Sense Strand Starting at position 38 of SEQ ID NO: 319129
gaacaauggcuuggagguu

SEQ ID NO: 321684 - RNA, 19 nt, Artificial Sequence
  Description of Artificial Sequence: Synthetic oligonucleotide
  Antisense Strand to SEQ ID NO: 321683
aaccuccaagccauuguuc

SEQ ID NO: 321685 - RNA, 19 nt, Artificial Sequence
  Description of Artificial Sequence: Synthetic oligonucleotide
  Sense Strand Starting at position 39 of SEQ ID NO: 315368
uucuuaaucuaguuguauc

SEQ ID NO: 321686 - RNA, 19 nt, Artificial Sequence
  Description of Artificial Sequence: Synthetic oligonucleotide
  Antisense Strand to SEQ ID NO: 321685
gauacaacuagauuaagaa

SEQ ID NO: 321687 - RNA, 19 nt, Artificial Sequence
  Description of Artificial Sequence: Synthetic oligonucleotide
  Sense Strand Starting at position 39 of SEQ ID NO: 315379
guuguaucauccucugggu

SEQ ID NO: 321688 - RNA, 19 nt, Artificial Sequence
  Description of Artificial Sequence: Synthetic oligonucleotide
  Antisense Strand to SEQ ID NO: 321687
acccagaggaugauacaac

SEQ ID NO: 321689 - RNA, 19 nt, Artificial Sequence
  Description of Artificial Sequence: Synthetic oligonucleotide
  Sense Strand Starting at position 39 of SEQ ID NO: 315381
uguaucauccucuggguga

SEQ ID NO: 321690 - RNA, 19 nt, Artificial Sequence
  Description of Artificial Sequence: Synthetic oligonucleotide
  Antisense Strand to SEQ ID NO: 321689
ucacccagaggaugauaca

SEQ ID NO: 321691 - RNA, 19 nt, Artificial Sequence
  Description of Artificial Sequence: Synthetic oligonucleotide
  Sense Strand Starting at position 39 of SEQ ID NO: 315443
agagcagugugccugacuu

SEQ ID NO: 321692 - RNA, 19 nt, Artificial Sequence
  Description of Artificial Sequence: Synthetic oligonucleotide
  Antisense Strand to SEQ ID NO: 321691
aagucaggcacacugcucu

SEQ ID NO: 321693 - RNA, 19 nt, Artificial Sequence
  Description of Artificial Sequence: Synthetic oligonucleotide
  Sense Strand Starting at position 39 of SEQ ID NO: 315445
agcagugugccugacuuaa

SEQ ID NO: 321694 - RNA, 19 nt, Artificial Sequence
  Description of Artificial Sequence: Synthetic oligonucleotide
  Antisense Strand to SEQ ID NO: 321693
uuaagucaggcacacugcu

SEQ ID NO: 321695 - RNA, 19 nt, Artificial Sequence
  Description of Artificial Sequence: Synthetic oligonucleotide
  Sense Strand Starting at position 39 of SEQ ID NO: 315447
cagugugccugacuuaagu

SEQ ID NO: 321696 - RNA, 19 nt, Artificial Sequence
  Description of Artificial Sequence: Synthetic oligonucleotide
  Antisense Strand to SEQ ID NO: 321695
acuuaagucaggcacacug

SEQ ID NO: 321697 - RNA, 19 nt, Artificial Sequence
  Description of Artificial Sequence: Synthetic oligonucleotide
  Sense Strand Starting at position 39 of SEQ ID NO: 315449
gugugccugacuuaaguaa

SEQ ID NO: 321698 - RNA, 19 nt, Artificial Sequence
  Description of Artificial Sequence: Synthetic oligonucleotide
  Antisense Strand to SEQ ID NO: 321697
uuacuuaagucaggcacac

SEQ ID NO: 321699 - RNA, 19 nt, Artificial Sequence
  Description of Artificial Sequence: Synthetic oligonucleotide
  Sense Strand Starting at position 39 of SEQ ID NO: 315494
gacggaguugaugaagcua

SEQ ID NO: 321700 - RNA, 19 nt, Artificial Sequence
  Description of Artificial Sequence: Synthetic oligonucleotide
  Antisense Strand to SEQ ID NO: 321699
uagcuucaucaacuccguc

SEQ ID NO: 321701 - RNA, 19 nt, Artificial Sequence
  Description of Artificial Sequence: Synthetic oligonucleotide
  Sense Strand Starting at position 39 of SEQ ID NO: 315508
agcuacuguuauccagaga

SEQ ID NO: 321702 - RNA, 19 nt, Artificial Sequence
  Description of Artificial Sequence: Synthetic oligonucleotide
  Antisense Strand to SEQ ID NO: 321701
ucucuggauaacaguagcu

SEQ ID NO: 321703 - RNA, 19 nt, Artificial Sequence
  Description of Artificial Sequence: Synthetic oligonucleotide
  Sense Strand Starting at position 39 of SEQ ID NO: 315593
gcgcaaugugcgguucuca

SEQ ID NO: 321704 - RNA, 19 nt, Artificial Sequence
  Description of Artificial Sequence: Synthetic oligonucleotide
  Antisense Strand to SEQ ID NO: 321703
ugagaaccgcacauugcgc

SEQ ID NO: 321705 - RNA, 19 nt, Artificial Sequence
  Description of Artificial Sequence: Synthetic oligonucleotide
  Sense Strand Starting at position 39 of SEQ ID NO: 315594
cgcaaugugcgguucucau

SEQ ID NO: 321706 - RNA, 19 nt, Artificial Sequence
  Description of Artificial Sequence: Synthetic oligonucleotide
  Antisense Strand to SEQ ID NO: 321705
augagaaccgcacauugcg

SEQ ID NO: 321707 - RNA, 19 nt, Artificial Sequence
  Description of Artificial Sequence: Synthetic oligonucleotide
  Sense Strand Starting at position 39 of SEQ ID NO: 315601
ugcgguucucauuacaaag

SEQ ID NO: 321708 - RNA, 19 nt, Artificial Sequence
  Description of Artificial Sequence: Synthetic oligonucleotide
  Antisense Strand to SEQ ID NO: 321707
cuuuguaaugagaaccgca

SEQ ID NO: 321709 - RNA, 19 nt, Artificial Sequence
  Description of Artificial Sequence: Synthetic oligonucleotide
  Sense Strand Starting at position 39 of SEQ ID NO: 315666
ccucccuuguaauuguuua

SEQ ID NO: 321710 - RNA, 19 nt, Artificial Sequence
  Description of Artificial Sequence: Synthetic oligonucleotide
  Antisense Strand to SEQ ID NO: 321709
uaaacaauuacaagggagg

SEQ ID NO: 321711 - RNA, 19 nt, Artificial Sequence
  Description of Artificial Sequence: Synthetic oligonucleotide
  Sense Strand Starting at position 39 of SEQ ID NO: 315670
ccuuguaauuguuuaaucu

SEQ ID NO: 321712 - RNA, 19 nt, Artificial Sequence
  Description of Artificial Sequence: Synthetic oligonucleotide
  Antisense Strand to SEQ ID NO: 321711
agauuaaacaauuacaagg

SEQ ID NO: 321713 - RNA, 19 nt, Artificial Sequence
  Description of Artificial Sequence: Synthetic oligonucleotide
  Sense Strand Starting at position 39 of SEQ ID NO: 315671
cuuguaauuguuuaaucug

SEQ ID NO: 321714 - RNA, 19 nt, Artificial Sequence
  Description of Artificial Sequence: Synthetic oligonucleotide
  Antisense Strand to SEQ ID NO: 321713
cagauuaaacaauuacaag

SEQ ID NO: 321715 - RNA, 19 nt, Artificial Sequence
  Description of Artificial Sequence: Synthetic oligonucleotide
  Sense Strand Starting at position 39 of SEQ ID NO: 315739
ucagguuguacucagggaa

SEQ ID NO: 321716 - RNA, 19 nt, Artificial Sequence
  Description of Artificial Sequence: Synthetic oligonucleotide
  Antisense Strand to SEQ ID NO: 321715
uucccugaguacaaccuga

SEQ ID NO: 321717 - RNA, 19 nt, Artificial Sequence
  Description of Artificial Sequence: Synthetic oligonucleotide
  Sense Strand Starting at position 39 of SEQ ID NO: 315742
gguuguacucagggaaugu

SEQ ID NO: 321718 - RNA, 19 nt, Artificial Sequence
  Description of Artificial Sequence: Synthetic oligonucleotide
  Antisense Strand to SEQ ID NO: 321717
acauucccugaguacaacc

SEQ ID NO: 321719 - RNA, 19 nt, Artificial Sequence
  Description of Artificial Sequence: Synthetic oligonucleotide
  Sense Strand Starting at position 39 of SEQ ID NO: 315743
guuguacucagggaaugua

SEQ ID NO: 321720 - RNA, 19 nt, Artificial Sequence
  Description of Artificial Sequence: Synthetic oligonucleotide
  Antisense Strand to SEQ ID NO: 321719
uacauucccugaguacaac

SEQ ID NO: 321721 - RNA, 19 nt, Artificial Sequence
  Description of Artificial Sequence: Synthetic oligonucleotide
  Sense Strand Starting at position 39 of SEQ ID NO: 315822
gauuauccgugcccucuau

SEQ ID NO: 321722 - RNA, 19 nt, Artificial Sequence
  Description of Artificial Sequence: Synthetic oligonucleotide
  Antisense Strand to SEQ ID NO: 321721
auagagggcacggauaauc

SEQ ID NO: 321723 - RNA, 19 nt, Artificial Sequence
  Description of Artificial Sequence: Synthetic oligonucleotide
  Sense Strand Starting at position 39 of SEQ ID NO: 315826
auccgugcccucuauggau

SEQ ID NO: 321724 - RNA, 19 nt, Artificial Sequence
  Description of Artificial Sequence: Synthetic oligonucleotide
  Antisense Strand to SEQ ID NO: 321723
auccauagagggcacggau

SEQ ID NO: 321725 - RNA, 19 nt, Artificial Sequence
  Description of Artificial Sequence: Synthetic oligonucleotide
  Sense Strand Starting at position 39 of SEQ ID NO: 315849
ggcauaggcugguugaaca

SEQ ID NO: 321726 - RNA, 19 nt, Artificial Sequence
  Description of Artificial Sequence: Synthetic oligonucleotide
  Antisense Strand to SEQ ID NO: 321725
uguucaaccagccuaugcc

SEQ ID NO: 321727 - RNA, 19 nt, Artificial Sequence
  Description of Artificial Sequence: Synthetic oligonucleotide
  Sense Strand Starting at position 39 of SEQ ID NO: 315909
cuuccuauugucugugcua

SEQ ID NO: 321728 - RNA, 19 nt, Artificial Sequence
  Description of Artificial Sequence: Synthetic oligonucleotide
  Antisense Strand to SEQ ID NO: 321727
uagcacagacaauaggaag

SEQ ID NO: 321729 - RNA, 19 nt, Artificial Sequence
  Description of Artificial Sequence: Synthetic oligonucleotide
  Sense Strand Starting at position 39 of SEQ ID NO: 315910
uuccuauugucugugcuaa

SEQ ID NO: 321730 - RNA, 19 nt, Artificial Sequence
  Description of Artificial Sequence: Synthetic oligonucleotide
  Antisense Strand to SEQ ID NO: 321729
uuagcacagacaauaggaa

SEQ ID NO: 321731 - RNA, 19 nt, Artificial Sequence
  Description of Artificial Sequence: Synthetic oligonucleotide
  Sense Strand Starting at position 39 of SEQ ID NO: 315911
uccuauugucugugcuaac

SEQ ID NO: 321732 - RNA, 19 nt, Artificial Sequence
  Description of Artificial Sequence: Synthetic oligonucleotide
  Antisense Strand to SEQ ID NO: 321731
guuagcacagacaauagga

SEQ ID NO: 321733 - RNA, 19 nt, Artificial Sequence
  Description of Artificial Sequence: Synthetic oligonucleotide
  Sense Strand Starting at position 39 of SEQ ID NO: 315931
gagguaaaggcugguguga

SEQ ID NO: 321734 - RNA, 19 nt, Artificial Sequence
  Description of Artificial Sequence: Synthetic oligonucleotide
  Antisense Strand to SEQ ID NO: 321733
ucacaccagccuuuaccuc

SEQ ID NO: 321735 - RNA, 19 nt, Artificial Sequence
  Description of Artificial Sequence: Synthetic oligonucleotide
  Sense Strand Starting at position 39 of SEQ ID NO: 315978
ggcauaguuuaugcccauu

SEQ ID NO: 321736 - RNA, 19 nt, Artificial Sequence
  Description of Artificial Sequence: Synthetic oligonucleotide
  Antisense Strand to SEQ ID NO: 321735
aaugggcauaaacuaugcc

SEQ ID NO: 321737 - RNA, 19 nt, Artificial Sequence
  Description of Artificial Sequence: Synthetic oligonucleotide
  Sense Strand Starting at position 39 of SEQ ID NO: 316204
ucuccuucccagugauguc

SEQ ID NO: 321738 - RNA, 19 nt, Artificial Sequence
  Description of Artificial Sequence: Synthetic oligonucleotide
  Antisense Strand to SEQ ID NO: 321737
gacaucacugggaaggaga

SEQ ID NO: 321739 - RNA, 19 nt, Artificial Sequence
  Description of Artificial Sequence: Synthetic oligonucleotide
  Sense Strand Starting at position 39 of SEQ ID NO: 316211
cccagugaugucugguuua

SEQ ID NO: 321740 - RNA, 19 nt, Artificial Sequence
  Description of Artificial Sequence: Synthetic oligonucleotide
  Antisense Strand to SEQ ID NO: 321739
uaaaccagacaucacuggg

SEQ ID NO: 321741 - RNA, 19 nt, Artificial Sequence
  Description of Artificial Sequence: Synthetic oligonucleotide
  Sense Strand Starting at position 39 of SEQ ID NO: 316221
ucugguuuaggcugauauu

SEQ ID NO: 321742 - RNA, 19 nt, Artificial Sequence
  Description of Artificial Sequence: Synthetic oligonucleotide
  Antisense Strand to SEQ ID NO: 321741
aauaucagccuaaaccaga

SEQ ID NO: 321743 - RNA, 19 nt, Artificial Sequence
  Description of Artificial Sequence: Synthetic oligonucleotide
  Sense Strand Starting at position 39 of SEQ ID NO: 316222
cugguuuaggcugauauua

SEQ ID NO: 321744 - RNA, 19 nt, Artificial Sequence
  Description of Artificial Sequence: Synthetic oligonucleotide
  Antisense Strand to SEQ ID NO: 321743
uaauaucagccuaaaccag

SEQ ID NO: 321745 - RNA, 19 nt, Artificial Sequence
  Description of Artificial Sequence: Synthetic oligonucleotide
  Sense Strand Starting at position 39 of SEQ ID NO: 316327
gaggcugaugagcauaauu

SEQ ID NO: 321746 - RNA, 19 nt, Artificial Sequence
  Description of Artificial Sequence: Synthetic oligonucleotide
  Antisense Strand to SEQ ID NO: 321745
aauuaugcucaucagccuc

SEQ ID NO: 321747 - RNA, 19 nt, Artificial Sequence
  Description of Artificial Sequence: Synthetic oligonucleotide
  Sense Strand Starting at position 39 of SEQ ID NO: 316329
ggcugaugagcauaauuau

SEQ ID NO: 321748 - RNA, 19 nt, Artificial Sequence
  Description of Artificial Sequence: Synthetic oligonucleotide
  Antisense Strand to SEQ ID NO: 321747
auaauuaugcucaucagcc

SEQ ID NO: 321749 - RNA, 19 nt, Artificial Sequence
  Description of Artificial Sequence: Synthetic oligonucleotide
  Sense Strand Starting at position 39 of SEQ ID NO: 316335
ugagcauaauuauuggcaa

SEQ ID NO: 321750 - RNA, 19 nt, Artificial Sequence
  Description of Artificial Sequence: Synthetic oligonucleotide
  Antisense Strand to SEQ ID NO: 321749
uugccaauaauuaugcuca

SEQ ID NO: 321751 - RNA, 19 nt, Artificial Sequence
  Description of Artificial Sequence: Synthetic oligonucleotide
  Sense Strand Starting at position 39 of SEQ ID NO: 316338
gcauaauuauuggcaauga

SEQ ID NO: 321752 - RNA, 19 nt, Artificial Sequence
  Description of Artificial Sequence: Synthetic oligonucleotide
  Antisense Strand to SEQ ID NO: 321751
ucauugccaauaauuaugc

SEQ ID NO: 321753 - RNA, 19 nt, Artificial Sequence
  Description of Artificial Sequence: Synthetic oligonucleotide
  Sense Strand Starting at position 39 of SEQ ID NO: 316463
uuaacuaccuaggaauugu

SEQ ID NO: 321754 - RNA, 19 nt, Artificial Sequence
  Description of Artificial Sequence: Synthetic oligonucleotide
  Antisense Strand to SEQ ID NO: 321753
acaauuccuagguaguuaa

SEQ ID NO: 321755 - RNA, 19 nt, Artificial Sequence
  Description of Artificial Sequence: Synthetic oligonucleotide
  Sense Strand Starting at position 39 of SEQ ID NO: 316671
uuagguuccuaggucaaag

SEQ ID NO: 321756 - RNA, 19 nt, Artificial Sequence
  Description of Artificial Sequence: Synthetic oligonucleotide
  Antisense Strand to SEQ ID NO: 321755
cuuugaccuaggaaccuaa

SEQ ID NO: 321757 - RNA, 19 nt, Artificial Sequence
  Description of Artificial Sequence: Synthetic oligonucleotide
  Sense Strand Starting at position 39 of SEQ ID NO: 316687
aaggcugaguuugugaaca

SEQ ID NO: 321758 - RNA, 19 nt, Artificial Sequence
  Description of Artificial Sequence: Synthetic oligonucleotide
  Antisense Strand to SEQ ID NO: 321757
uguucacaaacucagccuu

SEQ ID NO: 321759 - RNA, 19 nt, Artificial Sequence
  Description of Artificial Sequence: Synthetic oligonucleotide
  Sense Strand Starting at position 39 of SEQ ID NO: 317079
acggacucaccugggaaau

SEQ ID NO: 321760 - RNA, 19 nt, Artificial Sequence
  Description of Artificial Sequence: Synthetic oligonucleotide
  Antisense Strand to SEQ ID NO: 321759
auuucccaggugaguccgu

SEQ ID NO: 321761 - RNA, 19 nt, Artificial Sequence
  Description of Artificial Sequence: Synthetic oligonucleotide
  Sense Strand Starting at position 39 of SEQ ID NO: 317080
cggacucaccugggaaauc

SEQ ID NO: 321762 - RNA, 19 nt, Artificial Sequence
  Description of Artificial Sequence: Synthetic oligonucleotide
  Antisense Strand to SEQ ID NO: 321761
gauuucccaggugaguccg

SEQ ID NO: 321763 - RNA, 19 nt, Artificial Sequence
  Description of Artificial Sequence: Synthetic oligonucleotide
  Sense Strand Starting at position 39 of SEQ ID NO: 318084
ugguaucagcaauggaaga

SEQ ID NO: 321764 - RNA, 19 nt, Artificial Sequence
  Description of Artificial Sequence: Synthetic oligonucleotide
  Antisense Strand to SEQ ID NO: 321763
ucuuccauugcugauacca

SEQ ID NO: 321765 - RNA, 19 nt, Artificial Sequence
  Description of Artificial Sequence: Synthetic oligonucleotide
  Sense Strand Starting at position 40 of SEQ ID NO: 315338
uguggugucugugucucaa

SEQ ID NO: 321766 - RNA, 19 nt, Artificial Sequence
  Description of Artificial Sequence: Synthetic oligonucleotide
  Antisense Strand to SEQ ID NO: 321765
uugagacacagacaccaca

SEQ ID NO: 321767 - RNA, 19 nt, Artificial Sequence
  Description of Artificial Sequence: Synthetic oligonucleotide
  Sense Strand Starting at position 40 of SEQ ID NO: 315340
uggugucugugucucaauu

SEQ ID NO: 321768 - RNA, 19 nt, Artificial Sequence
  Description of Artificial Sequence: Synthetic oligonucleotide
  Antisense Strand to SEQ ID NO: 321767
aauugagacacagacacca

SEQ ID NO: 321769 - RNA, 19 nt, Artificial Sequence
  Description of Artificial Sequence: Synthetic oligonucleotide
  Sense Strand Starting at position 40 of SEQ ID NO: 315342
gugucugugucucaauuua

SEQ ID NO: 321770 - RNA, 19 nt, Artificial Sequence
  Description of Artificial Sequence: Synthetic oligonucleotide
  Antisense Strand to SEQ ID NO: 321769
uaaauugagacacagacac

SEQ ID NO: 321771 - RNA, 19 nt, Artificial Sequence
  Description of Artificial Sequence: Synthetic oligonucleotide
  Sense Strand Starting at position 40 of SEQ ID NO: 315433
ggauuauacuguuccucuu

SEQ ID NO: 321772 - RNA, 19 nt, Artificial Sequence
  Description of Artificial Sequence: Synthetic oligonucleotide
  Antisense Strand to SEQ ID NO: 321771
aagaggaacaguauaaucc

SEQ ID NO: 321773 - RNA, 19 nt, Artificial Sequence
  Description of Artificial Sequence: Synthetic oligonucleotide
  Sense Strand Starting at position 40 of SEQ ID NO: 315515
cguaauuuguacuuuguau

SEQ ID NO: 321774 - RNA, 19 nt, Artificial Sequence
  Description of Artificial Sequence: Synthetic oligonucleotide
  Antisense Strand to SEQ ID NO: 321773
auacaaaguacaaauuacg

SEQ ID NO: 321775 - RNA, 19 nt, Artificial Sequence
  Description of Artificial Sequence: Synthetic oligonucleotide
  Sense Strand Starting at position 40 of SEQ ID NO: 315523
guacuuuguauguggcauu

SEQ ID NO: 321776 - RNA, 19 nt, Artificial Sequence
  Description of Artificial Sequence: Synthetic oligonucleotide
  Antisense Strand to SEQ ID NO: 321775
aaugccacauacaaaguac

SEQ ID NO: 321777 - RNA, 19 nt, Artificial Sequence
  Description of Artificial Sequence: Synthetic oligonucleotide
  Sense Strand Starting at position 40 of SEQ ID NO: 315963
uuggcuuacugaugcauaa

SEQ ID NO: 321778 - RNA, 19 nt, Artificial Sequence
  Description of Artificial Sequence: Synthetic oligonucleotide
  Antisense Strand to SEQ ID NO: 321777
uuaugcaucaguaagccaa

SEQ ID NO: 321779 - RNA, 19 nt, Artificial Sequence
  Description of Artificial Sequence: Synthetic oligonucleotide
  Sense Strand Starting at position 40 of SEQ ID NO: 316099
gaggguuccuuguuuguuc

SEQ ID NO: 321780 - RNA, 19 nt, Artificial Sequence
  Description of Artificial Sequence: Synthetic oligonucleotide
  Antisense Strand to SEQ ID NO: 321779
gaacaaacaaggaacccuc

SEQ ID NO: 321781 - RNA, 19 nt, Artificial Sequence
  Description of Artificial Sequence: Synthetic oligonucleotide
  Sense Strand Starting at position 40 of SEQ ID NO: 316113
uguuccuguuucuuagaau

SEQ ID NO: 321782 - RNA, 19 nt, Artificial Sequence
  Description of Artificial Sequence: Synthetic oligonucleotide
  Antisense Strand to SEQ ID NO: 321781
auucuaagaaacaggaaca

SEQ ID NO: 321783 - RNA, 19 nt, Artificial Sequence
  Description of Artificial Sequence: Synthetic oligonucleotide
  Sense Strand Starting at position 40 of SEQ ID NO: 316114
guuccuguuucuuagaaug

SEQ ID NO: 321784 - RNA, 19 nt, Artificial Sequence
  Description of Artificial Sequence: Synthetic oligonucleotide
  Antisense Strand to SEQ ID NO: 321783
cauucuaagaaacaggaac

SEQ ID NO: 321785 - RNA, 19 nt, Artificial Sequence
  Description of Artificial Sequence: Synthetic oligonucleotide
  Sense Strand Starting at position 40 of SEQ ID NO: 316650
cgcaguaagccgagauggu

SEQ ID NO: 321786 - RNA, 19 nt, Artificial Sequence
  Description of Artificial Sequence: Synthetic oligonucleotide
  Antisense Strand to SEQ ID NO: 321785
accaucucggcuuacugcg

SEQ ID NO: 321787 - RNA, 19 nt, Artificial Sequence
  Description of Artificial Sequence: Synthetic oligonucleotide
  Sense Strand Starting at position 40 of SEQ ID NO: 316952
gucucuccagucuaucaga

SEQ ID NO: 321788 - RNA, 19 nt, Artificial Sequence
  Description of Artificial Sequence: Synthetic oligonucleotide
  Antisense Strand to SEQ ID NO: 321787
ucugauagacuggagagac

SEQ ID NO: 321789 - RNA, 19 nt, Artificial Sequence
  Description of Artificial Sequence: Synthetic oligonucleotide
  Sense Strand Starting at position 40 of SEQ ID NO: 317321
gcauucaucucgugacgua

SEQ ID NO: 321790 - RNA, 19 nt, Artificial Sequence
  Description of Artificial Sequence: Synthetic oligonucleotide
  Antisense Strand to SEQ ID NO: 321789
uacgucacgagaugaaugc

SEQ ID NO: 321791 - RNA, 19 nt, Artificial Sequence
  Description of Artificial Sequence: Synthetic oligonucleotide
  Sense Strand Starting at position 40 of SEQ ID NO: 317385
gcucuucuuguugacaaau

SEQ ID NO: 321792 - RNA, 19 nt, Artificial Sequence
  Description of Artificial Sequence: Synthetic oligonucleotide
  Antisense Strand to SEQ ID NO: 321791
auuugucaacaagaagagc

SEQ ID NO: 321793 - RNA, 19 nt, Artificial Sequence
  Description of Artificial Sequence: Synthetic oligonucleotide
  Sense Strand Starting at position 40 of SEQ ID NO: 317387
ucuucuuguugacaaauga

SEQ ID NO: 321794 - RNA, 19 nt, Artificial Sequence
  Description of Artificial Sequence: Synthetic oligonucleotide
  Antisense Strand to SEQ ID NO: 321793
ucauuugucaacaagaaga

SEQ ID NO: 321795 - RNA, 19 nt, Artificial Sequence
  Description of Artificial Sequence: Synthetic oligonucleotide
  Sense Strand Starting at position 40 of SEQ ID NO: 317653
acaguuucucuccaaguca

SEQ ID NO: 321796 - RNA, 19 nt, Artificial Sequence
  Description of Artificial Sequence: Synthetic oligonucleotide
  Antisense Strand to SEQ ID NO: 321795
ugacuuggagagaaacugu

SEQ ID NO: 321797 - RNA, 19 nt, Artificial Sequence
  Description of Artificial Sequence: Synthetic oligonucleotide
  Sense Strand Starting at position 40 of SEQ ID NO: 317945
gaaucacuguaaucugaga

SEQ ID NO: 321798 - RNA, 19 nt, Artificial Sequence
  Description of Artificial Sequence: Synthetic oligonucleotide
  Antisense Strand to SEQ ID NO: 321797
ucucagauuacagugauuc

SEQ ID NO: 321799 - RNA, 19 nt, Artificial Sequence
  Description of Artificial Sequence: Synthetic oligonucleotide
  Sense Strand Starting at position 40 of SEQ ID NO: 318092
gagguuccucgauggaucu

SEQ ID NO: 321800 - RNA, 19 nt, Artificial Sequence
  Description of Artificial Sequence: Synthetic oligonucleotide
  Antisense Strand to SEQ ID NO: 321799
agauccaucgaggaaccuc

SEQ ID NO: 321801 - RNA, 19 nt, Artificial Sequence
  Description of Artificial Sequence: Synthetic oligonucleotide
  Sense Strand Starting at position 40 of SEQ ID NO: 318243
gcagguaaugcggauugau

SEQ ID NO: 321802 - RNA, 19 nt, Artificial Sequence
  Description of Artificial Sequence: Synthetic oligonucleotide
  Antisense Strand to SEQ ID NO: 321801
aucaauccgcauuaccugc

SEQ ID NO: 321803 - RNA, 19 nt, Artificial Sequence
  Description of Artificial Sequence: Synthetic oligonucleotide
  Sense Strand Starting at position 40 of SEQ ID NO: 318246
gguaaugcggauugauugu

SEQ ID NO: 321804 - RNA, 19 nt, Artificial Sequence
  Description of Artificial Sequence: Synthetic oligonucleotide
  Antisense Strand to SEQ ID NO: 321803
acaaucaauccgcauuacc

SEQ ID NO: 321805 - RNA, 19 nt, Artificial Sequence
  Description of Artificial Sequence: Synthetic oligonucleotide
  Sense Strand Starting at position 40 of SEQ ID NO: 318253
cggauugauuguagaggca

SEQ ID NO: 321806 - RNA, 19 nt, Artificial Sequence
  Description of Artificial Sequence: Synthetic oligonucleotide
  Antisense Strand to SEQ ID NO: 321805
ugccucuacaaucaauccg

SEQ ID NO: 321807 - RNA, 19 nt, Artificial Sequence
  Description of Artificial Sequence: Synthetic oligonucleotide
  Sense Strand Starting at position 40 of SEQ ID NO: 318393
agaugaauguaaucccuca

SEQ ID NO: 321808 - RNA, 19 nt, Artificial Sequence
  Description of Artificial Sequence: Synthetic oligonucleotide
  Antisense Strand to SEQ ID NO: 321807
ugagggauuacauucaucu

SEQ ID NO: 321809 - RNA, 19 nt, Artificial Sequence
  Description of Artificial Sequence: Synthetic oligonucleotide
  Sense Strand Starting at position 40 of SEQ ID NO: 318416
ucaccugagcucuggcuau

SEQ ID NO: 321810 - RNA, 19 nt, Artificial Sequence
  Description of Artificial Sequence: Synthetic oligonucleotide
  Antisense Strand to SEQ ID NO: 321809
auagccagagcucagguga

SEQ ID NO: 321811 - RNA, 19 nt, Artificial Sequence
  Description of Artificial Sequence: Synthetic oligonucleotide
  Sense Strand Starting at position 40 of SEQ ID NO: 318449
gaugaagaauaguaagcau

SEQ ID NO: 321812 - RNA, 19 nt, Artificial Sequence
  Description of Artificial Sequence: Synthetic oligonucleotide
  Antisense Strand to SEQ ID NO: 321811
augcuuacuauucuucauc

SEQ ID NO: 321813 - RNA, 19 nt, Artificial Sequence
  Description of Artificial Sequence: Synthetic oligonucleotide
  Sense Strand Starting at position 40 of SEQ ID NO: 318919
gugccagggaaucaguuaa

SEQ ID NO: 321814 - RNA, 19 nt, Artificial Sequence
  Description of Artificial Sequence: Synthetic oligonucleotide
  Antisense Strand to SEQ ID NO: 321813
uuaacugauucccuggcac

SEQ ID NO: 321815 - RNA, 19 nt, Artificial Sequence
  Description of Artificial Sequence: Synthetic oligonucleotide
  Sense Strand Starting at position 40 of SEQ ID NO: 318926
ggaaucaguuaaggaugaa

SEQ ID NO: 321816 - RNA, 19 nt, Artificial Sequence
  Description of Artificial Sequence: Synthetic oligonucleotide
  Antisense Strand to SEQ ID NO: 321815
uucauccuuaacugauucc

SEQ ID NO: 321817 - RNA, 19 nt, Artificial Sequence
  Description of Artificial Sequence: Synthetic oligonucleotide
  Sense Strand Starting at position 40 of SEQ ID NO: 318982
gggcgucuguauuucuuua

SEQ ID NO: 321818 - RNA, 19 nt, Artificial Sequence
  Description of Artificial Sequence: Synthetic oligonucleotide
  Antisense Strand to SEQ ID NO: 321817
uaaagaaauacagacgccc

SEQ ID NO: 321819 - RNA, 19 nt, Artificial Sequence
  Description of Artificial Sequence: Synthetic oligonucleotide
  Sense Strand Starting at position 40 of SEQ ID NO: 318984
gcgucuguauuucuuuaca

SEQ ID NO: 321820 - RNA, 19 nt, Artificial Sequence
  Description of Artificial Sequence: Synthetic oligonucleotide
  Antisense Strand to SEQ ID NO: 321819
uguaaagaaauacagacgc

SEQ ID NO: 321821 - RNA, 19 nt, Artificial Sequence
  Description of Artificial Sequence: Synthetic oligonucleotide
  Sense Strand Starting at position 40 of SEQ ID NO: 319023
ccuccuguguuucugugaa

SEQ ID NO: 321822 - RNA, 19 nt, Artificial Sequence
  Description of Artificial Sequence: Synthetic oligonucleotide
  Antisense Strand to SEQ ID NO: 321821
uucacagaaacacaggagg

SEQ ID NO: 321823 - RNA, 19 nt, Artificial Sequence
  Description of Artificial Sequence: Synthetic oligonucleotide
  Sense Strand Starting at position 40 of SEQ ID NO: 319025
uccuguguuucugugaaau

SEQ ID NO: 321824 - RNA, 19 nt, Artificial Sequence
  Description of Artificial Sequence: Synthetic oligonucleotide
  Antisense Strand to SEQ ID NO: 321823
auuucacagaaacacagga

SEQ ID NO: 321825 - RNA, 19 nt, Artificial Sequence
  Description of Artificial Sequence: Synthetic oligonucleotide
  Sense Strand Starting at position 40 of SEQ ID NO: 319027
cuguguuucugugaaauau

SEQ ID NO: 321826 - RNA, 19 nt, Artificial Sequence
  Description of Artificial Sequence: Synthetic oligonucleotide
  Antisense Strand to SEQ ID NO: 321825
auauuucacagaaacacag

SEQ ID NO: 321827 - RNA, 19 nt, Artificial Sequence
  Description of Artificial Sequence: Synthetic oligonucleotide
  Sense Strand Starting at position 40 of SEQ ID NO: 319069
cccucacucuaaggugaaa

SEQ ID NO: 321828 - RNA, 19 nt, Artificial Sequence
  Description of Artificial Sequence: Synthetic oligonucleotide
  Antisense Strand to SEQ ID NO: 321827
uuucaccuuagagugaggg

SEQ ID NO: 321829 - RNA, 19 nt, Artificial Sequence
  Description of Artificial Sequence: Synthetic oligonucleotide
  Sense Strand Starting at position 41 of SEQ ID NO: 315326
agaggauccucuguccaca

SEQ ID NO: 321830 - RNA, 19 nt, Artificial Sequence
  Description of Artificial Sequence: Synthetic oligonucleotide
  Antisense Strand to SEQ ID NO: 321829
uguggacagaggauccucu

SEQ ID NO: 321831 - RNA, 19 nt, Artificial Sequence
  Description of Artificial Sequence: Synthetic oligonucleotide
  Sense Strand Starting at position 41 of SEQ ID NO: 315431
ccuccaaccugguuuaagu

SEQ ID NO: 321832 - RNA, 19 nt, Artificial Sequence
  Description of Artificial Sequence: Synthetic oligonucleotide
  Antisense Strand to SEQ ID NO: 321831
acuuaaaccagguuggagg

SEQ ID NO: 321833 - RNA, 19 nt, Artificial Sequence
  Description of Artificial Sequence: Synthetic oligonucleotide
  Sense Strand Starting at position 41 of SEQ ID NO: 315440
ugguuuaagugacuuccua

SEQ ID NO: 321834 - RNA, 19 nt, Artificial Sequence
  Description of Artificial Sequence: Synthetic oligonucleotide
  Antisense Strand to SEQ ID NO: 321833
uaggaagucacuuaaacca

SEQ ID NO: 321835 - RNA, 19 nt, Artificial Sequence
  Description of Artificial Sequence: Synthetic oligonucleotide
  Sense Strand Starting at position 41 of SEQ ID NO: 315454
uccuaugcccuuuauggua

SEQ ID NO: 321836 - RNA, 19 nt, Artificial Sequence
  Description of Artificial Sequence: Synthetic oligonucleotide
  Antisense Strand to SEQ ID NO: 321835
uaccauaaagggcauagga

SEQ ID NO: 321837 - RNA, 19 nt, Artificial Sequence
  Description of Artificial Sequence: Synthetic oligonucleotide
  Sense Strand Starting at position 41 of SEQ ID NO: 315530
ccaggcccgaguuagaaau

SEQ ID NO: 321838 - RNA, 19 nt, Artificial Sequence
  Description of Artificial Sequence: Synthetic oligonucleotide
  Antisense Strand to SEQ ID NO: 321837
auuucuaacucgggccugg

SEQ ID NO: 321839 - RNA, 19 nt, Artificial Sequence
  Description of Artificial Sequence: Synthetic oligonucleotide
  Sense Strand Starting at position 41 of SEQ ID NO: 315908
gcauaaugcuaggcauaua

SEQ ID NO: 321840 - RNA, 19 nt, Artificial Sequence
  Description of Artificial Sequence: Synthetic oligonucleotide
  Antisense Strand to SEQ ID NO: 321839
uauaugccuagcauuaugc

SEQ ID NO: 321841 - RNA, 19 nt, Artificial Sequence
  Description of Artificial Sequence: Synthetic oligonucleotide
  Sense Strand Starting at position 41 of SEQ ID NO: 315919
ggcauauaauaagcacuaa

SEQ ID NO: 321842 - RNA, 19 nt, Artificial Sequence
  Description of Artificial Sequence: Synthetic oligonucleotide
  Antisense Strand to SEQ ID NO: 321841
uuagugcuuauuauaugcc

SEQ ID NO: 321843 - RNA, 19 nt, Artificial Sequence
  Description of Artificial Sequence: Synthetic oligonucleotide
  Sense Strand Starting at position 41 of SEQ ID NO: 315980
gugccuuaagccuagagua

SEQ ID NO: 321844 - RNA, 19 nt, Artificial Sequence
  Description of Artificial Sequence: Synthetic oligonucleotide
  Antisense Strand to SEQ ID NO: 321843
uacucuaggcuuaaggcac

SEQ ID NO: 321845 - RNA, 19 nt, Artificial Sequence
  Description of Artificial Sequence: Synthetic oligonucleotide
  Sense Strand Starting at position 41 of SEQ ID NO: 315982
gccuuaagccuagaguaua

SEQ ID NO: 321846 - RNA, 19 nt, Artificial Sequence
  Description of Artificial Sequence: Synthetic oligonucleotide
  Antisense Strand to SEQ ID NO: 321845
uauacucuaggcuuaaggc

SEQ ID NO: 321847 - RNA, 19 nt, Artificial Sequence
  Description of Artificial Sequence: Synthetic oligonucleotide
  Sense Strand Starting at position 41 of SEQ ID NO: 316022
gccaauaaugccuaaugga

SEQ ID NO: 321848 - RNA, 19 nt, Artificial Sequence
  Description of Artificial Sequence: Synthetic oligonucleotide
  Antisense Strand to SEQ ID NO: 321847
uccauuaggcauuauuggc

SEQ ID NO: 321849 - RNA, 19 nt, Artificial Sequence
  Description of Artificial Sequence: Synthetic oligonucleotide
  Sense Strand Starting at position 41 of SEQ ID NO: 316207
gcugguuugcaggcuguaa

SEQ ID NO: 321850 - RNA, 19 nt, Artificial Sequence
  Description of Artificial Sequence: Synthetic oligonucleotide
  Antisense Strand to SEQ ID NO: 321849
uuacagccugcaaaccagc

SEQ ID NO: 321851 - RNA, 19 nt, Artificial Sequence
  Description of Artificial Sequence: Synthetic oligonucleotide
  Sense Strand Starting at position 41 of SEQ ID NO: 316239
ggccaaucucuaggguauc

SEQ ID NO: 321852 - RNA, 19 nt, Artificial Sequence
  Description of Artificial Sequence: Synthetic oligonucleotide
  Antisense Strand to SEQ ID NO: 321851
gauacccuagagauuggcc

SEQ ID NO: 321853 - RNA, 19 nt, Artificial Sequence
  Description of Artificial Sequence: Synthetic oligonucleotide
  Sense Strand Starting at position 41 of SEQ ID NO: 316361
cagagucugguuuggaguu

SEQ ID NO: 321854 - RNA, 19 nt, Artificial Sequence
  Description of Artificial Sequence: Synthetic oligonucleotide
  Antisense Strand to SEQ ID NO: 321853
aacuccaaaccagacucug

SEQ ID NO: 321855 - RNA, 19 nt, Artificial Sequence
  Description of Artificial Sequence: Synthetic oligonucleotide
  Sense Strand Starting at position 41 of SEQ ID NO: 316371
uuuggaguuccaggucuga

SEQ ID NO: 321856 - RNA, 19 nt, Artificial Sequence
  Description of Artificial Sequence: Synthetic oligonucleotide
  Antisense Strand to SEQ ID NO: 321855
ucagaccuggaacuccaaa

SEQ ID NO: 321857 - RNA, 19 nt, Artificial Sequence
  Description of Artificial Sequence: Synthetic oligonucleotide
  Sense Strand Starting at position 41 of SEQ ID NO: 316800
cugcauuugucuccucuga

SEQ ID NO: 321858 - RNA, 19 nt, Artificial Sequence
  Description of Artificial Sequence: Synthetic oligonucleotide
  Antisense Strand to SEQ ID NO: 321857
ucagaggagacaaaugcag

SEQ ID NO: 321859 - RNA, 19 nt, Artificial Sequence
  Description of Artificial Sequence: Synthetic oligonucleotide
  Sense Strand Starting at position 41 of SEQ ID NO: 316802
gcauuugucuccucugaug

SEQ ID NO: 321860 - RNA, 19 nt, Artificial Sequence
  Description of Artificial Sequence: Synthetic oligonucleotide
  Antisense Strand to SEQ ID NO: 321859
caucagaggagacaaaugc

SEQ ID NO: 321861 - RNA, 19 nt, Artificial Sequence
  Description of Artificial Sequence: Synthetic oligonucleotide
  Sense Strand Starting at position 41 of SEQ ID NO: 316804
auuugucuccucugaugca

SEQ ID NO: 321862 - RNA, 19 nt, Artificial Sequence
  Description of Artificial Sequence: Synthetic oligonucleotide
  Antisense Strand to SEQ ID NO: 321861
ugcaucagaggagacaaau

SEQ ID NO: 321863 - RNA, 19 nt, Artificial Sequence
  Description of Artificial Sequence: Synthetic oligonucleotide
  Sense Strand Starting at position 41 of SEQ ID NO: 316850
ugucuuacuccucaguuua

SEQ ID NO: 321864 - RNA, 19 nt, Artificial Sequence
  Description of Artificial Sequence: Synthetic oligonucleotide
  Antisense Strand to SEQ ID NO: 321863
uaaacugaggaguaagaca

SEQ ID NO: 321865 - RNA, 19 nt, Artificial Sequence
  Description of Artificial Sequence: Synthetic oligonucleotide
  Sense Strand Starting at position 41 of SEQ ID NO: 316980
gggaacaucuguguucaug

SEQ ID NO: 321866 - RNA, 19 nt, Artificial Sequence
  Description of Artificial Sequence: Synthetic oligonucleotide
  Antisense Strand to SEQ ID NO: 321865
caugaacacagauguuccc

SEQ ID NO: 321867 - RNA, 19 nt, Artificial Sequence
  Description of Artificial Sequence: Synthetic oligonucleotide
  Sense Strand Starting at position 41 of SEQ ID NO: 317141
cagugaugagcccacguga

SEQ ID NO: 321868 - RNA, 19 nt, Artificial Sequence
  Description of Artificial Sequence: Synthetic oligonucleotide
  Antisense Strand to SEQ ID NO: 321867
ucacgugggcucaucacug

SEQ ID NO: 321869 - RNA, 19 nt, Artificial Sequence
  Description of Artificial Sequence: Synthetic oligonucleotide
  Sense Strand Starting at position 41 of SEQ ID NO: 317184
aggaaaugacuuggcagua

SEQ ID NO: 321870 - RNA, 19 nt, Artificial Sequence
  Description of Artificial Sequence: Synthetic oligonucleotide
  Antisense Strand to SEQ ID NO: 321869
uacugccaagucauuuccu

SEQ ID NO: 321871 - RNA, 19 nt, Artificial Sequence
  Description of Artificial Sequence: Synthetic oligonucleotide
  Sense Strand Starting at position 41 of SEQ ID NO: 317197
gcaguacagccggaggauu

SEQ ID NO: 321872 - RNA, 19 nt, Artificial Sequence
  Description of Artificial Sequence: Synthetic oligonucleotide
  Antisense Strand to SEQ ID NO: 321871
aauccuccggcuguacugc

SEQ ID NO: 321873 - RNA, 19 nt, Artificial Sequence
  Description of Artificial Sequence: Synthetic oligonucleotide
  Sense Strand Starting at position 41 of SEQ ID NO: 317216
cagggucuggacgauaguu

SEQ ID NO: 321874 - RNA, 19 nt, Artificial Sequence
  Description of Artificial Sequence: Synthetic oligonucleotide
  Antisense Strand to SEQ ID NO: 321873
aacuaucguccagacccug

SEQ ID NO: 321875 - RNA, 19 nt, Artificial Sequence
  Description of Artificial Sequence: Synthetic oligonucleotide
  Sense Strand Starting at position 41 of SEQ ID NO: 317241
gccggaggauucuucgaag

SEQ ID NO: 321876 - RNA, 19 nt, Artificial Sequence
  Description of Artificial Sequence: Synthetic oligonucleotide
  Antisense Strand to SEQ ID NO: 321875
cuucgaagaauccuccggc

SEQ ID NO: 321877 - RNA, 19 nt, Artificial Sequence
  Description of Artificial Sequence: Synthetic oligonucleotide
  Sense Strand Starting at position 41 of SEQ ID NO: 317738
cagagucccggcuguauuu

SEQ ID NO: 321878 - RNA, 19 nt, Artificial Sequence
  Description of Artificial Sequence: Synthetic oligonucleotide
  Antisense Strand to SEQ ID NO: 321877
aaauacagccgggacucug

SEQ ID NO: 321879 - RNA, 19 nt, Artificial Sequence
  Description of Artificial Sequence: Synthetic oligonucleotide
  Sense Strand Starting at position 41 of SEQ ID NO: 317748
gcuguauuuagucaaggcu

SEQ ID NO: 321880 - RNA, 19 nt, Artificial Sequence
  Description of Artificial Sequence: Synthetic oligonucleotide
  Antisense Strand to SEQ ID NO: 321879
agccuugacuaaauacagc

SEQ ID NO: 321881 - RNA, 19 nt, Artificial Sequence
  Description of Artificial Sequence: Synthetic oligonucleotide
  Sense Strand Starting at position 41 of SEQ ID NO: 317771
ggaguaagagauuguuggu

SEQ ID NO: 321882 - RNA, 19 nt, Artificial Sequence
  Description of Artificial Sequence: Synthetic oligonucleotide
  Antisense Strand to SEQ ID NO: 321881
accaacaaucucuuacucc

SEQ ID NO: 321883 - RNA, 19 nt, Artificial Sequence
  Description of Artificial Sequence: Synthetic oligonucleotide
  Sense Strand Starting at position 41 of SEQ ID NO: 317808
aagacagucccucagaguu

SEQ ID NO: 321884 - RNA, 19 nt, Artificial Sequence
  Description of Artificial Sequence: Synthetic oligonucleotide
  Antisense Strand to SEQ ID NO: 321883
aacucugagggacugucuu

SEQ ID NO: 321885 - RNA, 19 nt, Artificial Sequence
  Description of Artificial Sequence: Synthetic oligonucleotide
  Sense Strand Starting at position 41 of SEQ ID NO: 317912
aaguccuagcgcuaauuga

SEQ ID NO: 321886 - RNA, 19 nt, Artificial Sequence
  Description of Artificial Sequence: Synthetic oligonucleotide
  Antisense Strand to SEQ ID NO: 321885
ucaauuagcgcuaggacuu

SEQ ID NO: 321887 - RNA, 19 nt, Artificial Sequence
  Description of Artificial Sequence: Synthetic oligonucleotide
  Sense Strand Starting at position 41 of SEQ ID NO: 317960
cguucugagcuuuagauuc

SEQ ID NO: 321888 - RNA, 19 nt, Artificial Sequence
  Description of Artificial Sequence: Synthetic oligonucleotide
  Antisense Strand to SEQ ID NO: 321887
gaaucuaaagcucagaacg

SEQ ID NO: 321889 - RNA, 19 nt, Artificial Sequence
  Description of Artificial Sequence: Synthetic oligonucleotide
  Sense Strand Starting at position 41 of SEQ ID NO: 318024
caggcaccucgagaauaau

SEQ ID NO: 321890 - RNA, 19 nt, Artificial Sequence
  Description of Artificial Sequence: Synthetic oligonucleotide
  Antisense Strand to SEQ ID NO: 321889
auuauucucgaggugccug

SEQ ID NO: 321891 - RNA, 19 nt, Artificial Sequence
  Description of Artificial Sequence: Synthetic oligonucleotide
  Sense Strand Starting at position 41 of SEQ ID NO: 318095
gagaguccugucugaaacu

SEQ ID NO: 321892 - RNA, 19 nt, Artificial Sequence
  Description of Artificial Sequence: Synthetic oligonucleotide
  Antisense Strand to SEQ ID NO: 321891
aguuucagacaggacucuc

SEQ ID NO: 321893 - RNA, 19 nt, Artificial Sequence
  Description of Artificial Sequence: Synthetic oligonucleotide
  Sense Strand Starting at position 41 of SEQ ID NO: 318104
gucugaaacuugguccuau

SEQ ID NO: 321894 - RNA, 19 nt, Artificial Sequence
  Description of Artificial Sequence: Synthetic oligonucleotide
  Antisense Strand to SEQ ID NO: 321893
auaggaccaaguuucagac

SEQ ID NO: 321895 - RNA, 19 nt, Artificial Sequence
  Description of Artificial Sequence: Synthetic oligonucleotide
  Sense Strand Starting at position 41 of SEQ ID NO: 318105
ucugaaacuugguccuaug

SEQ ID NO: 321896 - RNA, 19 nt, Artificial Sequence
  Description of Artificial Sequence: Synthetic oligonucleotide
  Antisense Strand to SEQ ID NO: 321895
cauaggaccaaguuucaga

SEQ ID NO: 321897 - RNA, 19 nt, Artificial Sequence
  Description of Artificial Sequence: Synthetic oligonucleotide
  Sense Strand Starting at position 41 of SEQ ID NO: 318115
gguccuaugccuuagagag

SEQ ID NO: 321898 - RNA, 19 nt, Artificial Sequence
  Description of Artificial Sequence: Synthetic oligonucleotide
  Antisense Strand to SEQ ID NO: 321897
cucucuaaggcauaggacc

SEQ ID NO: 321899 - RNA, 19 nt, Artificial Sequence
  Description of Artificial Sequence: Synthetic oligonucleotide
  Sense Strand Starting at position 41 of SEQ ID NO: 318280
gcuaguaaaguuugaauga

SEQ ID NO: 321900 - RNA, 19 nt, Artificial Sequence
  Description of Artificial Sequence: Synthetic oligonucleotide
  Antisense Strand to SEQ ID NO: 321899
ucauucaaacuuuacuagc

SEQ ID NO: 321901 - RNA, 19 nt, Artificial Sequence
  Description of Artificial Sequence: Synthetic oligonucleotide
  Sense Strand Starting at position 41 of SEQ ID NO: 318353
guauguuuaagugaagucu

SEQ ID NO: 321902 - RNA, 19 nt, Artificial Sequence
  Description of Artificial Sequence: Synthetic oligonucleotide
  Antisense Strand to SEQ ID NO: 321901
agacuucacuuaaacauac

SEQ ID NO: 321903 - RNA, 19 nt, Artificial Sequence
  Description of Artificial Sequence: Synthetic oligonucleotide
  Sense Strand Starting at position 41 of SEQ ID NO: 318441
uuccacucaguuugagaaa

SEQ ID NO: 321904 - RNA, 19 nt, Artificial Sequence
  Description of Artificial Sequence: Synthetic oligonucleotide
  Antisense Strand to SEQ ID NO: 321903
uuucucaaacugaguggaa

SEQ ID NO: 321905 - RNA, 19 nt, Artificial Sequence
  Description of Artificial Sequence: Synthetic oligonucleotide
  Sense Strand Starting at position 41 of SEQ ID NO: 318459
auagaacauuacuagggau

SEQ ID NO: 321906 - RNA, 19 nt, Artificial Sequence
  Description of Artificial Sequence: Synthetic oligonucleotide
  Antisense Strand to SEQ ID NO: 321905
aucccuaguaauguucuau

SEQ ID NO: 321907 - RNA, 19 nt, Artificial Sequence
  Description of Artificial Sequence: Synthetic oligonucleotide
  Sense Strand Starting at position 41 of SEQ ID NO: 318887
gaaggaucacuugaucgca

SEQ ID NO: 321908 - RNA, 19 nt, Artificial Sequence
  Description of Artificial Sequence: Synthetic oligonucleotide
  Antisense Strand to SEQ ID NO: 321907
ugcgaucaagugauccuuc

SEQ ID NO: 321909 - RNA, 19 nt, Artificial Sequence
  Description of Artificial Sequence: Synthetic oligonucleotide
  Sense Strand Starting at position 42 of SEQ ID NO: 315550
ugcccagucuaacugaauu

SEQ ID NO: 321910 - RNA, 19 nt, Artificial Sequence
  Description of Artificial Sequence: Synthetic oligonucleotide
  Antisense Strand to SEQ ID NO: 321909
aauucaguuagacugggca

SEQ ID NO: 321911 - RNA, 19 nt, Artificial Sequence
  Description of Artificial Sequence: Synthetic oligonucleotide
  Sense Strand Starting at position 42 of SEQ ID NO: 315880
agaggauccucuguccaca

SEQ ID NO: 321912 - RNA, 19 nt, Artificial Sequence
  Description of Artificial Sequence: Synthetic oligonucleotide
  Antisense Strand to SEQ ID NO: 321911
uguggacagaggauccucu

SEQ ID NO: 321913 - RNA, 19 nt, Artificial Sequence
  Description of Artificial Sequence: Synthetic oligonucleotide
  Sense Strand Starting at position 42 of SEQ ID NO: 315985
ccuccaaccugguuuaagu

SEQ ID NO: 321914 - RNA, 19 nt, Artificial Sequence
  Description of Artificial Sequence: Synthetic oligonucleotide
  Antisense Strand to SEQ ID NO: 321913
acuuaaaccagguuggagg

SEQ ID NO: 321915 - RNA, 19 nt, Artificial Sequence
  Description of Artificial Sequence: Synthetic oligonucleotide
  Sense Strand Starting at position 42 of SEQ ID NO: 315994
ugguuuaagugacuuccua

SEQ ID NO: 321916 - RNA, 19 nt, Artificial Sequence
  Description of Artificial Sequence: Synthetic oligonucleotide
  Antisense Strand to SEQ ID NO: 321915
uaggaagucacuuaaacca

SEQ ID NO: 321917 - RNA, 19 nt, Artificial Sequence
  Description of Artificial Sequence: Synthetic oligonucleotide
  Sense Strand Starting at position 42 of SEQ ID NO: 316008
uccuaugcccuuuauggua

SEQ ID NO: 321918 - RNA, 19 nt, Artificial Sequence
  Description of Artificial Sequence: Synthetic oligonucleotide
  Antisense Strand to SEQ ID NO: 321917
uaccauaaagggcauagga

SEQ ID NO: 321919 - RNA, 19 nt, Artificial Sequence
  Description of Artificial Sequence: Synthetic oligonucleotide
  Sense Strand Starting at position 42 of SEQ ID NO: 316084
ccaggcccgaguuagaaau

SEQ ID NO: 321920 - RNA, 19 nt, Artificial Sequence
  Description of Artificial Sequence: Synthetic oligonucleotide
  Antisense Strand to SEQ ID NO: 321919
auuucuaacucgggccugg

SEQ ID NO: 321921 - RNA, 19 nt, Artificial Sequence
  Description of Artificial Sequence: Synthetic oligonucleotide
  Sense Strand Starting at position 42 of SEQ ID NO: 316462
gcauaaugcuaggcauaua

SEQ ID NO: 321922 - RNA, 19 nt, Artificial Sequence
  Description of Artificial Sequence: Synthetic oligonucleotide
  Antisense Strand to SEQ ID NO: 321921
uauaugccuagcauuaugc

SEQ ID NO: 321923 - RNA, 19 nt, Artificial Sequence
  Description of Artificial Sequence: Synthetic oligonucleotide
  Sense Strand Starting at position 42 of SEQ ID NO: 316473
ggcauauaauaagcacuaa

SEQ ID NO: 321924 - RNA, 19 nt, Artificial Sequence
  Description of Artificial Sequence: Synthetic oligonucleotide
  Antisense Strand to SEQ ID NO: 321923
uuagugcuuauuauaugcc

SEQ ID NO: 321925 - RNA, 19 nt, Artificial Sequence
  Description of Artificial Sequence: Synthetic oligonucleotide
  Sense Strand Starting at position 42 of SEQ ID NO: 316534
gugccuuaagccuagagua

SEQ ID NO: 321926 - RNA, 19 nt, Artificial Sequence
  Description of Artificial Sequence: Synthetic oligonucleotide
  Antisense Strand to SEQ ID NO: 321925
uacucuaggcuuaaggcac

SEQ ID NO: 321927 - RNA, 19 nt, Artificial Sequence
  Description of Artificial Sequence: Synthetic oligonucleotide
  Sense Strand Starting at position 42 of SEQ ID NO: 316536
gccuuaagccuagaguaua

SEQ ID NO: 321928 - RNA, 19 nt, Artificial Sequence
  Description of Artificial Sequence: Synthetic oligonucleotide
  Antisense Strand to SEQ ID NO: 321927
uauacucuaggcuuaaggc

SEQ ID NO: 321929 - RNA, 19 nt, Artificial Sequence
  Description of Artificial Sequence: Synthetic oligonucleotide
  Sense Strand Starting at position 42 of SEQ ID NO: 316576
gccaauaaugccuaaugga

SEQ ID NO: 321930 - RNA, 19 nt, Artificial Sequence
  Description of Artificial Sequence: Synthetic oligonucleotide
  Antisense Strand to SEQ ID NO: 321929
uccauuaggcauuauuggc

SEQ ID NO: 321931 - RNA, 19 nt, Artificial Sequence
  Description of Artificial Sequence: Synthetic oligonucleotide
  Sense Strand Starting at position 42 of SEQ ID NO: 316761
gcugguuugcaggcuguaa

SEQ ID NO: 321932 - RNA, 19 nt, Artificial Sequence
  Description of Artificial Sequence: Synthetic oligonucleotide
  Antisense Strand to SEQ ID NO: 321931
uuacagccugcaaaccagc

SEQ ID NO: 321933 - RNA, 19 nt, Artificial Sequence
  Description of Artificial Sequence: Synthetic oligonucleotide
  Sense Strand Starting at position 42 of SEQ ID NO: 316793
ggccaaucucuaggguauc

SEQ ID NO: 321934 - RNA, 19 nt, Artificial Sequence
  Description of Artificial Sequence: Synthetic oligonucleotide
  Antisense Strand to SEQ ID NO: 321933
gauacccuagagauuggcc

SEQ ID NO: 321935 - RNA, 19 nt, Artificial Sequence
  Description of Artificial Sequence: Synthetic oligonucleotide
  Sense Strand Starting at position 42 of SEQ ID NO: 316915
cagagucugguuuggaguu

SEQ ID NO: 321936 - RNA, 19 nt, Artificial Sequence
  Description of Artificial Sequence: Synthetic oligonucleotide
  Antisense Strand to SEQ ID NO: 321935
aacuccaaaccagacucug

SEQ ID NO: 321937 - RNA, 19 nt, Artificial Sequence
  Description of Artificial Sequence: Synthetic oligonucleotide
  Sense Strand Starting at position 42 of SEQ ID NO: 316925
uuuggaguuccaggucuga

SEQ ID NO: 321938 - RNA, 19 nt, Artificial Sequence
  Description of Artificial Sequence: Synthetic oligonucleotide
  Antisense Strand to SEQ ID NO: 321937
ucagaccuggaacuccaaa

SEQ ID NO: 321939 - RNA, 19 nt, Artificial Sequence
  Description of Artificial Sequence: Synthetic oligonucleotide
  Sense Strand Starting at position 42 of SEQ ID NO: 317354
cugcauuugucuccucuga

SEQ ID NO: 321940 - RNA, 19 nt, Artificial Sequence
  Description of Artificial Sequence: Synthetic oligonucleotide
  Antisense Strand to SEQ ID NO: 321939
ucagaggagacaaaugcag

SEQ ID NO: 321941 - RNA, 19 nt, Artificial Sequence
  Description of Artificial Sequence: Synthetic oligonucleotide
  Sense Strand Starting at position 42 of SEQ ID NO: 317356
gcauuugucuccucugaug

SEQ ID NO: 321942 - RNA, 19 nt, Artificial Sequence
  Description of Artificial Sequence: Synthetic oligonucleotide
  Antisense Strand to SEQ ID NO: 321941
caucagaggagacaaaugc

SEQ ID NO: 321943 - RNA, 19 nt, Artificial Sequence
  Description of Artificial Sequence: Synthetic oligonucleotide
  Sense Strand Starting at position 42 of SEQ ID NO: 317358
auuugucuccucugaugca

SEQ ID NO: 321944 - RNA, 19 nt, Artificial Sequence
  Description of Artificial Sequence: Synthetic oligonucleotide
  Antisense Strand to SEQ ID NO: 321943
ugcaucagaggagacaaau

SEQ ID NO: 321945 - RNA, 19 nt, Artificial Sequence
  Description of Artificial Sequence: Synthetic oligonucleotide
  Sense Strand Starting at position 42 of SEQ ID NO: 317404
ugucuuacuccucaguuua

SEQ ID NO: 321946 - RNA, 19 nt, Artificial Sequence
  Description of Artificial Sequence: Synthetic oligonucleotide
  Antisense Strand to SEQ ID NO: 321945
uaaacugaggaguaagaca

SEQ ID NO: 321947 - RNA, 19 nt, Artificial Sequence
  Description of Artificial Sequence: Synthetic oligonucleotide
  Sense Strand Starting at position 42 of SEQ ID NO: 317534
gggaacaucuguguucaug

SEQ ID NO: 321948 - RNA, 19 nt, Artificial Sequence
  Description of Artificial Sequence: Synthetic oligonucleotide
  Antisense Strand to SEQ ID NO: 321947
caugaacacagauguuccc

SEQ ID NO: 321949 - RNA, 19 nt, Artificial Sequence
  Description of Artificial Sequence: Synthetic oligonucleotide
  Sense Strand Starting at position 42 of SEQ ID NO: 317695
cagugaugagcccacguga

SEQ ID NO: 321950 - RNA, 19 nt, Artificial Sequence
  Description of Artificial Sequence: Synthetic oligonucleotide
  Antisense Strand to SEQ ID NO: 321949
ucacgugggcucaucacug

SEQ ID NO: 321951 - RNA, 19 nt, Artificial Sequence
  Description of Artificial Sequence: Synthetic oligonucleotide
  Sense Strand Starting at position 42 of SEQ ID NO: 317738
aggaaaugacuuggcagua

SEQ ID NO: 321952 - RNA, 19 nt, Artificial Sequence
  Description of Artificial Sequence: Synthetic oligonucleotide
  Antisense Strand to SEQ ID NO: 321951
uacugccaagucauuuccu

SEQ ID NO: 321953 - RNA, 19 nt, Artificial Sequence
  Description of Artificial Sequence: Synthetic oligonucleotide
  Sense Strand Starting at position 42 of SEQ ID NO: 317751
gcaguacagccggaggauu

SEQ ID NO: 321954 - RNA, 19 nt, Artificial Sequence
  Description of Artificial Sequence: Synthetic oligonucleotide
  Antisense Strand to SEQ ID NO: 321953
aauccuccggcuguacugc

SEQ ID NO: 321955 - RNA, 19 nt, Artificial Sequence
  Description of Artificial Sequence: Synthetic oligonucleotide
  Sense Strand Starting at position 42 of SEQ ID NO: 317770
cagggucuggacgauaguu

SEQ ID NO: 321956 - RNA, 19 nt, Artificial Sequence
  Description of Artificial Sequence: Synthetic oligonucleotide
  Antisense Strand to SEQ ID NO: 321955
aacuaucguccagacccug

SEQ ID NO: 321957 - RNA, 19 nt, Artificial Sequence
  Description of Artificial Sequence: Synthetic oligonucleotide
  Sense Strand Starting at position 42 of SEQ ID NO: 317795
gccggaggauucuucgaag

SEQ ID NO: 321958 - RNA, 19 nt, Artificial Sequence
  Description of Artificial Sequence: Synthetic oligonucleotide
  Antisense Strand to SEQ ID NO: 321957
cuucgaagaauccuccggc

SEQ ID NO: 321959 - RNA, 19 nt, Artificial Sequence
  Description of Artificial Sequence: Synthetic oligonucleotide
  Sense Strand Starting at position 42 of SEQ ID NO: 318292
cagagucccggcuguauuu

SEQ ID NO: 321960 - RNA, 19 nt, Artificial Sequence
  Description of Artificial Sequence: Synthetic oligonucleotide
  Antisense Strand to SEQ ID NO: 321959
aaauacagccgggacucug

SEQ ID NO: 321961 - RNA, 19 nt, Artificial Sequence
  Description of Artificial Sequence: Synthetic oligonucleotide
  Sense Strand Starting at position 42 of SEQ ID NO: 318302
gcuguauuuagucaaggcu

SEQ ID NO: 321962 - RNA, 19 nt, Artificial Sequence
  Description of Artificial Sequence: Synthetic oligonucleotide
  Antisense Strand to SEQ ID NO: 321961
agccuugacuaaauacagc

SEQ ID NO: 321963 - RNA, 19 nt, Artificial Sequence
  Description of Artificial Sequence: Synthetic oligonucleotide
  Sense Strand Starting at position 42 of SEQ ID NO: 318325
ggaguaagagauuguuggu

SEQ ID NO: 321964 - RNA, 19 nt, Artificial Sequence
  Description of Artificial Sequence: Synthetic oligonucleotide
  Antisense Strand to SEQ ID NO: 321963
accaacaaucucuuacucc

SEQ ID NO: 321965 - RNA, 19 nt, Artificial Sequence
  Description of Artificial Sequence: Synthetic oligonucleotide
  Sense Strand Starting at position 42 of SEQ ID NO: 318362
aagacagucccucagaguu

SEQ ID NO: 321966 - RNA, 19 nt, Artificial Sequence
  Description of Artificial Sequence: Synthetic oligonucleotide
  Antisense Strand to SEQ ID NO: 321965
aacucugagggacugucuu

SEQ ID NO: 321967 - RNA, 19 nt, Artificial Sequence
  Description of Artificial Sequence: Synthetic oligonucleotide
  Sense Strand Starting at position 42 of SEQ ID NO: 318466
aaguccuagcgcuaauuga

SEQ ID NO: 321968 - RNA, 19 nt, Artificial Sequence
  Description of Artificial Sequence: Synthetic oligonucleotide
  Antisense Strand to SEQ ID NO: 321967
ucaauuagcgcuaggacuu

SEQ ID NO: 321969 - RNA, 19 nt, Artificial Sequence
  Description of Artificial Sequence: Synthetic oligonucleotide
  Sense Strand Starting at position 42 of SEQ ID NO: 318514
cguucugagcuuuagauuc

SEQ ID NO: 321970 - RNA, 19 nt, Artificial Sequence
  Description of Artificial Sequence: Synthetic oligonucleotide
  Antisense Strand to SEQ ID NO: 321969
gaaucuaaagcucagaacg

SEQ ID NO: 321971 - RNA, 19 nt, Artificial Sequence
  Description of Artificial Sequence: Synthetic oligonucleotide
  Sense Strand Starting at position 42 of SEQ ID NO: 318578
caggcaccucgagaauaau

SEQ ID NO: 321972 - RNA, 19 nt, Artificial Sequence
  Description of Artificial Sequence: Synthetic oligonucleotide
  Antisense Strand to SEQ ID NO: 321971
auuauucucgaggugccug

SEQ ID NO: 321973 - RNA, 19 nt, Artificial Sequence
  Description of Artificial Sequence: Synthetic oligonucleotide
  Sense Strand Starting at position 42 of SEQ ID NO: 318649
gagaguccugucugaaacu

SEQ ID NO: 321974 - RNA, 19 nt, Artificial Sequence
  Description of Artificial Sequence: Synthetic oligonucleotide
  Antisense Strand to SEQ ID NO: 321973
aguuucagacaggacucuc

SEQ ID NO: 321975 - RNA, 19 nt, Artificial Sequence
  Description of Artificial Sequence: Synthetic oligonucleotide
  Sense Strand Starting at position 42 of SEQ ID NO: 318658
gucugaaacuugguccuau

SEQ ID NO: 321976 - RNA, 19 nt, Artificial Sequence
  Description of Artificial Sequence: Synthetic oligonucleotide
  Antisense Strand to SEQ ID NO: 321975
auaggaccaaguuucagac

SEQ ID NO: 321977 - RNA, 19 nt, Artificial Sequence
  Description of Artificial Sequence: Synthetic oligonucleotide
  Sense Strand Starting at position 42 of SEQ ID NO: 318659
ucugaaacuugguccuaug

SEQ ID NO: 321978 - RNA, 19 nt, Artificial Sequence
  Description of Artificial Sequence: Synthetic oligonucleotide
  Antisense Strand to SEQ ID NO: 321977
cauaggaccaaguuucaga

SEQ ID NO: 321979 - RNA, 19 nt, Artificial Sequence
  Description of Artificial Sequence: Synthetic oligonucleotide
  Sense Strand Starting at position 42 of SEQ ID NO: 318669
gguccuaugccuuagagag

SEQ ID NO: 321980 - RNA, 19 nt, Artificial Sequence
  Description of Artificial Sequence: Synthetic oligonucleotide
  Antisense Strand to SEQ ID NO: 321979
cucucuaaggcauaggacc

SEQ ID NO: 321981 - RNA, 19 nt, Artificial Sequence
  Description of Artificial Sequence: Synthetic oligonucleotide
  Sense Strand Starting at position 42 of SEQ ID NO: 318834
gcuaguaaaguuugaauga

SEQ ID NO: 321982 - RNA, 19 nt, Artificial Sequence
  Description of Artificial Sequence: Synthetic oligonucleotide
  Antisense Strand to SEQ ID NO: 321981
ucauucaaacuuuacuagc

SEQ ID NO: 321983 - RNA, 19 nt, Artificial Sequence
  Description of Artificial Sequence: Synthetic oligonucleotide
  Sense Strand Starting at position 42 of SEQ ID NO: 318907
guauguuuaagugaagucu

SEQ ID NO: 321984 - RNA, 19 nt, Artificial Sequence
  Description of Artificial Sequence: Synthetic oligonucleotide
  Antisense Strand to SEQ ID NO: 321983
agacuucacuuaaacauac

SEQ ID NO: 321985 - RNA, 19 nt, Artificial Sequence
  Description of Artificial Sequence: Synthetic oligonucleotide
  Sense Strand Starting at position 42 of SEQ ID NO: 318995
uuccacucaguuugagaaa

SEQ ID NO: 321986 - RNA, 19 nt, Artificial Sequence
  Description of Artificial Sequence: Synthetic oligonucleotide
  Antisense Strand to SEQ ID NO: 321985
uuucucaaacugaguggaa

SEQ ID NO: 321987 - RNA, 19 nt, Artificial Sequence
  Description of Artificial Sequence: Synthetic oligonucleotide
  Sense Strand Starting at position 42 of SEQ ID NO: 319013
auagaacauuacuagggau

SEQ ID NO: 321988 - RNA, 19 nt, Artificial Sequence
  Description of Artificial Sequence: Synthetic oligonucleotide
  Antisense Strand to SEQ ID NO: 321987
aucccuaguaauguucuau

SEQ ID NO: 321989 - RNA, 19 nt, Artificial Sequence
  Description of Artificial Sequence: Synthetic oligonucleotide
  Sense Strand Starting at position 43 of SEQ ID NO: 315517
gggaucugguccuuagacu

SEQ ID NO: 321990 - RNA, 19 nt, Artificial Sequence
  Description of Artificial Sequence: Synthetic oligonucleotide
  Antisense Strand to SEQ ID NO: 321989
agucuaaggaccagauccc

SEQ ID NO: 321991 - RNA, 19 nt, Artificial Sequence
  Description of Artificial Sequence: Synthetic oligonucleotide
  Sense Strand Starting at position 43 of SEQ ID NO: 315567
gggugaguccuccagacuc

SEQ ID NO: 321992 - RNA, 19 nt, Artificial Sequence
  Description of Artificial Sequence: Synthetic oligonucleotide
  Antisense Strand to SEQ ID NO: 321991
gagucuggaggacucaccc

SEQ ID NO: 321993 - RNA, 19 nt, Artificial Sequence
  Description of Artificial Sequence: Synthetic oligonucleotide
  Sense Strand Starting at position 43 of SEQ ID NO: 315569
gugaguccuccagacucaa

SEQ ID NO: 321994 - RNA, 19 nt, Artificial Sequence
  Description of Artificial Sequence: Synthetic oligonucleotide
  Antisense Strand to SEQ ID NO: 321993
uugagucuggaggacucac

SEQ ID NO: 321995 - RNA, 19 nt, Artificial Sequence
  Description of Artificial Sequence: Synthetic oligonucleotide
  Sense Strand Starting at position 43 of SEQ ID NO: 315595
acuguuaaucugggagucu

SEQ ID NO: 321996 - RNA, 19 nt, Artificial Sequence
  Description of Artificial Sequence: Synthetic oligonucleotide
  Antisense Strand to SEQ ID NO: 321995
agacucccagauuaacagu

SEQ ID NO: 321997 - RNA, 19 nt, Artificial Sequence
  Description of Artificial Sequence: Synthetic oligonucleotide
  Sense Strand Starting at position 43 of SEQ ID NO: 315596
cuguuaaucugggagucuu

SEQ ID NO: 321998 - RNA, 19 nt, Artificial Sequence
  Description of Artificial Sequence: Synthetic oligonucleotide
  Antisense Strand to SEQ ID NO: 321997
aagacucccagauuaacag

SEQ ID NO: 321999 - RNA, 19 nt, Artificial Sequence
  Description of Artificial Sequence: Synthetic oligonucleotide
  Sense Strand Starting at position 43 of SEQ ID NO: 315604
cugggagucuuccacaucu

SEQ ID NO: 322000 - RNA, 19 nt, Artificial Sequence
  Description of Artificial Sequence: Synthetic oligonucleotide
  Antisense Strand to SEQ ID NO: 321999
agauguggaagacucccag

SEQ ID NO: 322001 - RNA, 19 nt, Artificial Sequence
  Description of Artificial Sequence: Synthetic oligonucleotide
  Sense Strand Starting at position 43 of SEQ ID NO: 315606
gggagucuuccacaucugu

SEQ ID NO: 322002 - RNA, 19 nt, Artificial Sequence
  Description of Artificial Sequence: Synthetic oligonucleotide
  Antisense Strand to SEQ ID NO: 322001
acagauguggaagacuccc

SEQ ID NO: 322003 - RNA, 19 nt, Artificial Sequence
  Description of Artificial Sequence: Synthetic oligonucleotide
  Sense Strand Starting at position 43 of SEQ ID NO: 315638
ucuauaacccugggaaacu

SEQ ID NO: 322004 - RNA, 19 nt, Artificial Sequence
  Description of Artificial Sequence: Synthetic oligonucleotide
  Antisense Strand to SEQ ID NO: 322003
aguuucccaggguuauaga

SEQ ID NO: 322005 - RNA, 19 nt, Artificial Sequence
  Description of Artificial Sequence: Synthetic oligonucleotide
  Sense Strand Starting at position 43 of SEQ ID NO: 315737
cugggauucugguuaggug

SEQ ID NO: 322006 - RNA, 19 nt, Artificial Sequence
  Description of Artificial Sequence: Synthetic oligonucleotide
  Antisense Strand to SEQ ID NO: 322005
caccuaaccagaaucccag

SEQ ID NO: 322007 - RNA, 19 nt, Artificial Sequence
  Description of Artificial Sequence: Synthetic oligonucleotide
  Sense Strand Starting at position 43 of SEQ ID NO: 315738
ugggauucugguuagguga

SEQ ID NO: 322008 - RNA, 19 nt, Artificial Sequence
  Description of Artificial Sequence: Synthetic oligonucleotide
  Antisense Strand to SEQ ID NO: 322007
ucaccuaaccagaauccca

SEQ ID NO: 322009 - RNA, 19 nt, Artificial Sequence
  Description of Artificial Sequence: Synthetic oligonucleotide
  Sense Strand Starting at position 43 of SEQ ID NO: 315792
gggcuucauccuggaagug

SEQ ID NO: 322010 - RNA, 19 nt, Artificial Sequence
  Description of Artificial Sequence: Synthetic oligonucleotide
  Antisense Strand to SEQ ID NO: 322009
cacuuccaggaugaagccc

SEQ ID NO: 322011 - RNA, 19 nt, Artificial Sequence
  Description of Artificial Sequence: Synthetic oligonucleotide
  Sense Strand Starting at position 43 of SEQ ID NO: 315793
ggcuucauccuggaaguga

SEQ ID NO: 322012 - RNA, 19 nt, Artificial Sequence
  Description of Artificial Sequence: Synthetic oligonucleotide
  Antisense Strand to SEQ ID NO: 322011
ucacuuccaggaugaagcc

SEQ ID NO: 322013 - RNA, 19 nt, Artificial Sequence
  Description of Artificial Sequence: Synthetic oligonucleotide
  Sense Strand Starting at position 43 of SEQ ID NO: 315843
cgugaaugugcaugagugu

SEQ ID NO: 322014 - RNA, 19 nt, Artificial Sequence
  Description of Artificial Sequence: Synthetic oligonucleotide
  Antisense Strand to SEQ ID NO: 322013
acacucaugcacauucacg

SEQ ID NO: 322015 - RNA, 19 nt, Artificial Sequence
  Description of Artificial Sequence: Synthetic oligonucleotide
  Sense Strand Starting at position 43 of SEQ ID NO: 315887
ggugcugaaccuuaauaug

SEQ ID NO: 322016 - RNA, 19 nt, Artificial Sequence
  Description of Artificial Sequence: Synthetic oligonucleotide
  Antisense Strand to SEQ ID NO: 322015
cauauuaagguucagcacc

SEQ ID NO: 322017 - RNA, 19 nt, Artificial Sequence
  Description of Artificial Sequence: Synthetic oligonucleotide
  Sense Strand Starting at position 43 of SEQ ID NO: 315895
accuuaauaugaggaggau

SEQ ID NO: 322018 - RNA, 19 nt, Artificial Sequence
  Description of Artificial Sequence: Synthetic oligonucleotide
  Antisense Strand to SEQ ID NO: 322017
auccuccucauauuaaggu

SEQ ID NO: 322019 - RNA, 19 nt, Artificial Sequence
  Description of Artificial Sequence: Synthetic oligonucleotide
  Sense Strand Starting at position 43 of SEQ ID NO: 316028
acaggcugugccuaaugua

SEQ ID NO: 322020 - RNA, 19 nt, Artificial Sequence
  Description of Artificial Sequence: Synthetic oligonucleotide
  Antisense Strand to SEQ ID NO: 322019
uacauuaggcacagccugu

SEQ ID NO: 322021 - RNA, 19 nt, Artificial Sequence
  Description of Artificial Sequence: Synthetic oligonucleotide
  Sense Strand Starting at position 43 of SEQ ID NO: 316086
cagagacccuuguguagaa

SEQ ID NO: 322022 - RNA, 19 nt, Artificial Sequence
  Description of Artificial Sequence: Synthetic oligonucleotide
  Antisense Strand to SEQ ID NO: 322021
uucuacacaagggucucug

SEQ ID NO: 322023 - RNA, 19 nt, Artificial Sequence
  Description of Artificial Sequence: Synthetic oligonucleotide
  Sense Strand Starting at position 43 of SEQ ID NO: 316472
cacaccuugucgugacacu

SEQ ID NO: 322024 - RNA, 19 nt, Artificial Sequence
  Description of Artificial Sequence: Synthetic oligonucleotide
  Antisense Strand to SEQ ID NO: 322023
agugucacgacaaggugug

SEQ ID NO: 322025 - RNA, 19 nt, Artificial Sequence
  Description of Artificial Sequence: Synthetic oligonucleotide
  Sense Strand Starting at position 43 of SEQ ID NO: 316489
cucacucacucugguauuu

SEQ ID NO: 322026 - RNA, 19 nt, Artificial Sequence
  Description of Artificial Sequence: Synthetic oligonucleotide
  Antisense Strand to SEQ ID NO: 322025
aaauaccagagugagugag

SEQ ID NO: 322027 - RNA, 19 nt, Artificial Sequence
  Description of Artificial Sequence: Synthetic oligonucleotide
  Sense Strand Starting at position 43 of SEQ ID NO: 316716
agccucuuguccuagacaa

SEQ ID NO: 322028 - RNA, 19 nt, Artificial Sequence
  Description of Artificial Sequence: Synthetic oligonucleotide
  Antisense Strand to SEQ ID NO: 322027
uugucuaggacaagaggcu

SEQ ID NO: 322029 - RNA, 19 nt, Artificial Sequence
  Description of Artificial Sequence: Synthetic oligonucleotide
  Sense Strand Starting at position 43 of SEQ ID NO: 316750
gucgcauaugucccagcuu

SEQ ID NO: 322030 - RNA, 19 nt, Artificial Sequence
  Description of Artificial Sequence: Synthetic oligonucleotide
  Antisense Strand to SEQ ID NO: 322029
aagcugggacauaugcgac

SEQ ID NO: 322031 - RNA, 19 nt, Artificial Sequence
  Description of Artificial Sequence: Synthetic oligonucleotide
  Sense Strand Starting at position 43 of SEQ ID NO: 316794
cacucagucgcuggaguuu

SEQ ID NO: 322032 - RNA, 19 nt, Artificial Sequence
  Description of Artificial Sequence: Synthetic oligonucleotide
  Antisense Strand to SEQ ID NO: 322031
aaacuccagcgacugagug

SEQ ID NO: 322033 - RNA, 19 nt, Artificial Sequence
  Description of Artificial Sequence: Synthetic oligonucleotide
  Sense Strand Starting at position 43 of SEQ ID NO: 316805
uggaguuucccagacccga

SEQ ID NO: 322034 - RNA, 19 nt, Artificial Sequence
  Description of Artificial Sequence: Synthetic oligonucleotide
  Antisense Strand to SEQ ID NO: 322033
ucgggucugggaaacucca

SEQ ID NO: 322035 - RNA, 19 nt, Artificial Sequence
  Description of Artificial Sequence: Synthetic oligonucleotide
  Sense Strand Starting at position 43 of SEQ ID NO: 317352
cggguguugcucuggaguu

SEQ ID NO: 322036 - RNA, 19 nt, Artificial Sequence
  Description of Artificial Sequence: Synthetic oligonucleotide
  Antisense Strand to SEQ ID NO: 322035
aacuccagagcaacacccg

SEQ ID NO: 322037 - RNA, 19 nt, Artificial Sequence
  Description of Artificial Sequence: Synthetic oligonucleotide
  Sense Strand Starting at position 43 of SEQ ID NO: 317706
gcuguguggguucguggaa

SEQ ID NO: 322038 - RNA, 19 nt, Artificial Sequence
  Description of Artificial Sequence: Synthetic oligonucleotide
  Antisense Strand to SEQ ID NO: 322037
uuccacgaacccacacagc

SEQ ID NO: 322039 - RNA, 19 nt, Artificial Sequence
  Description of Artificial Sequence: Synthetic oligonucleotide
  Sense Strand Starting at position 43 of SEQ ID NO: 317709
guguggguucguggaacuu

SEQ ID NO: 322040 - RNA, 19 nt, Artificial Sequence
  Description of Artificial Sequence: Synthetic oligonucleotide
  Antisense Strand to SEQ ID NO: 322039
aaguuccacgaacccacac

SEQ ID NO: 322041 - RNA, 19 nt, Artificial Sequence
  Description of Artificial Sequence: Synthetic oligonucleotide
  Sense Strand Starting at position 43 of SEQ ID NO: 317875
cgcgugugcuuugugcgaa

SEQ ID NO: 322042 - RNA, 19 nt, Artificial Sequence
  Description of Artificial Sequence: Synthetic oligonucleotide
  Antisense Strand to SEQ ID NO: 322041
uucgcacaaagcacacgcg

SEQ ID NO: 322043 - RNA, 19 nt, Artificial Sequence
  Description of Artificial Sequence: Synthetic oligonucleotide
  Sense Strand Starting at position 43 of SEQ ID NO: 317917
gcugaagacuuaucuggga

SEQ ID NO: 322044 - RNA, 19 nt, Artificial Sequence
  Description of Artificial Sequence: Synthetic oligonucleotide
  Antisense Strand to SEQ ID NO: 322043
ucccagauaagucuucagc

SEQ ID NO: 322045 - RNA, 19 nt, Artificial Sequence
  Description of Artificial Sequence: Synthetic oligonucleotide
  Sense Strand Starting at position 43 of SEQ ID NO: 317920
gaagacuuaucugggacag

SEQ ID NO: 322046 - RNA, 19 nt, Artificial Sequence
  Description of Artificial Sequence: Synthetic oligonucleotide
  Antisense Strand to SEQ ID NO: 322045
cugucccagauaagucuuc

SEQ ID NO: 322047 - RNA, 19 nt, Artificial Sequence
  Description of Artificial Sequence: Synthetic oligonucleotide
  Sense Strand Starting at position 43 of SEQ ID NO: 317922
agacuuaucugggacagac

SEQ ID NO: 322048 - RNA, 19 nt, Artificial Sequence
  Description of Artificial Sequence: Synthetic oligonucleotide
  Antisense Strand to SEQ ID NO: 322047
gucugucccagauaagucu

SEQ ID NO: 322049 - RNA, 19 nt, Artificial Sequence
  Description of Artificial Sequence: Synthetic oligonucleotide
  Sense Strand Starting at position 43 of SEQ ID NO: 318260
ggaguuuacugucugccaa

SEQ ID NO: 322050 - RNA, 19 nt, Artificial Sequence
  Description of Artificial Sequence: Synthetic oligonucleotide
  Antisense Strand to SEQ ID NO: 322049
uuggcagacaguaaacucc

SEQ ID NO: 322051 - RNA, 19 nt, Artificial Sequence
  Description of Artificial Sequence: Synthetic oligonucleotide
  Sense Strand Starting at position 43 of SEQ ID NO: 318261
gaguuuacugucugccaag

SEQ ID NO: 322052 - RNA, 19 nt, Artificial Sequence
  Description of Artificial Sequence: Synthetic oligonucleotide
  Antisense Strand to SEQ ID NO: 322051
cuuggcagacaguaaacuc

SEQ ID NO: 322053 - RNA, 19 nt, Artificial Sequence
  Description of Artificial Sequence: Synthetic oligonucleotide
  Sense Strand Starting at position 43 of SEQ ID NO: 318312
gggacccuugucugaguga

SEQ ID NO: 322054 - RNA, 19 nt, Artificial Sequence
  Description of Artificial Sequence: Synthetic oligonucleotide
  Antisense Strand to SEQ ID NO: 322053
ucacucagacaaggguccc

SEQ ID NO: 322055 - RNA, 19 nt, Artificial Sequence
  Description of Artificial Sequence: Synthetic oligonucleotide
  Sense Strand Starting at position 43 of SEQ ID NO: 318869
agcgguacauucuggaaga

SEQ ID NO: 322056 - RNA, 19 nt, Artificial Sequence
  Description of Artificial Sequence: Synthetic oligonucleotide
  Antisense Strand to SEQ ID NO: 322055
ucuuccagaauguaccgcu

SEQ ID NO: 322057 - RNA, 19 nt, Artificial Sequence
  Description of Artificial Sequence: Synthetic oligonucleotide
  Sense Strand Starting at position 43 of SEQ ID NO: 318870
gcgguacauucuggaagag

SEQ ID NO: 322058 - RNA, 19 nt, Artificial Sequence
  Description of Artificial Sequence: Synthetic oligonucleotide
  Antisense Strand to SEQ ID NO: 322057
cucuuccagaauguaccgc

SEQ ID NO: 322059 - RNA, 19 nt, Artificial Sequence
  Description of Artificial Sequence: Synthetic oligonucleotide
  Sense Strand Starting at position 43 of SEQ ID NO: 318913
uccucuugcugugugauca

SEQ ID NO: 322060 - RNA, 19 nt, Artificial Sequence
  Description of Artificial Sequence: Synthetic oligonucleotide
  Antisense Strand to SEQ ID NO: 322059
ugaucacacagcaagagga

SEQ ID NO: 322061 - RNA, 19 nt, Artificial Sequence
  Description of Artificial Sequence: Synthetic oligonucleotide
  Sense Strand Starting at position 43 of SEQ ID NO: 318938
guguguggccucucuguaa

SEQ ID NO: 322062 - RNA, 19 nt, Artificial Sequence
  Description of Artificial Sequence: Synthetic oligonucleotide
  Antisense Strand to SEQ ID NO: 322061
uuacagagaggccacacac

SEQ ID NO: 322063 - RNA, 19 nt, Artificial Sequence
  Description of Artificial Sequence: Synthetic oligonucleotide
  Sense Strand Starting at position 43 of SEQ ID NO: 318942
guggccucucuguaacgua

SEQ ID NO: 322064 - RNA, 19 nt, Artificial Sequence
  Description of Artificial Sequence: Synthetic oligonucleotide
  Antisense Strand to SEQ ID NO: 322063
uacguuacagagaggccac

SEQ ID NO: 322065 - RNA, 19 nt, Artificial Sequence
  Description of Artificial Sequence: Synthetic oligonucleotide
  Sense Strand Starting at position 43 of SEQ ID NO: 319055
cagggaugagcacgguuua

SEQ ID NO: 322066 - RNA, 19 nt, Artificial Sequence
  Description of Artificial Sequence: Synthetic oligonucleotide
  Antisense Strand to SEQ ID NO: 322065
uaaaccgugcucaucccug

SEQ ID NO: 322067 - RNA, 19 nt, Artificial Sequence
  Description of Artificial Sequence: Synthetic oligonucleotide
  Sense Strand Starting at position 43 of SEQ ID NO: 319065
cacgguuuagaggaucuau

SEQ ID NO: 322068 - RNA, 19 nt, Artificial Sequence
  Description of Artificial Sequence: Synthetic oligonucleotide
  Antisense Strand to SEQ ID NO: 322067
auagauccucuaaaccgug

SEQ ID NO: 322069 - RNA, 19 nt, Artificial Sequence
  Description of Artificial Sequence: Synthetic oligonucleotide
  Sense Strand Starting at position 44 of SEQ ID NO: 315469
gggaucugguccuuagacu

SEQ ID NO: 322070 - RNA, 19 nt, Artificial Sequence
  Description of Artificial Sequence: Synthetic oligonucleotide
  Antisense Strand to SEQ ID NO: 322069
agucuaaggaccagauccc

SEQ ID NO: 322071 - RNA, 19 nt, Artificial Sequence
  Description of Artificial Sequence: Synthetic oligonucleotide
  Sense Strand Starting at position 44 of SEQ ID NO: 315519
gggugaguccuccagacuc

SEQ ID NO: 322072 - RNA, 19 nt, Artificial Sequence
  Description of Artificial Sequence: Synthetic oligonucleotide
  Antisense Strand to SEQ ID NO: 322071
gagucuggaggacucaccc

SEQ ID NO: 322073 - RNA, 19 nt, Artificial Sequence
  Description of Artificial Sequence: Synthetic oligonucleotide
  Sense Strand Starting at position 44 of SEQ ID NO: 315521
gugaguccuccagacucaa

SEQ ID NO: 322074 - RNA, 19 nt, Artificial Sequence
  Description of Artificial Sequence: Synthetic oligonucleotide
  Antisense Strand to SEQ ID NO: 322073
uugagucuggaggacucac

SEQ ID NO: 322075 - RNA, 19 nt, Artificial Sequence
  Description of Artificial Sequence: Synthetic oligonucleotide
  Sense Strand Starting at position 44 of SEQ ID NO: 315547
acuguuaaucugggagucu

SEQ ID NO: 322076 - RNA, 19 nt, Artificial Sequence
  Description of Artificial Sequence: Synthetic oligonucleotide
  Antisense Strand to SEQ ID NO: 322075
agacucccagauuaacagu

SEQ ID NO: 322077 - RNA, 19 nt, Artificial Sequence
  Description of Artificial Sequence: Synthetic oligonucleotide
  Sense Strand Starting at position 44 of SEQ ID NO: 315548
cuguuaaucugggagucuu

SEQ ID NO: 322078 - RNA, 19 nt, Artificial Sequence
  Description of Artificial Sequence: Synthetic oligonucleotide
  Antisense Strand to SEQ ID NO: 322077
aagacucccagauuaacag

SEQ ID NO: 322079 - RNA, 19 nt, Artificial Sequence
  Description of Artificial Sequence: Synthetic oligonucleotide
  Sense Strand Starting at position 44 of SEQ ID NO: 315556
cugggagucuuccacaucu

SEQ ID NO: 322080 - RNA, 19 nt, Artificial Sequence
  Description of Artificial Sequence: Synthetic oligonucleotide
  Antisense Strand to SEQ ID NO: 322079
agauguggaagacucccag

SEQ ID NO: 322081 - RNA, 19 nt, Artificial Sequence
  Description of Artificial Sequence: Synthetic oligonucleotide
  Sense Strand Starting at position 44 of SEQ ID NO: 315558
gggagucuuccacaucugu

SEQ ID NO: 322082 - RNA, 19 nt, Artificial Sequence
  Description of Artificial Sequence: Synthetic oligonucleotide
  Antisense Strand to SEQ ID NO: 322081
acagauguggaagacuccc

SEQ ID NO: 322083 - RNA, 19 nt, Artificial Sequence
  Description of Artificial Sequence: Synthetic oligonucleotide
  Sense Strand Starting at position 44 of SEQ ID NO: 315590
ucuauaacccugggaaacu

SEQ ID NO: 322084 - RNA, 19 nt, Artificial Sequence
  Description of Artificial Sequence: Synthetic oligonucleotide
  Antisense Strand to SEQ ID NO: 322083
aguuucccaggguuauaga

SEQ ID NO: 322085 - RNA, 19 nt, Artificial Sequence
  Description of Artificial Sequence: Synthetic oligonucleotide
  Sense Strand Starting at position 44 of SEQ ID NO: 315689
cugggauucugguuaggug

SEQ ID NO: 322086 - RNA, 19 nt, Artificial Sequence
  Description of Artificial Sequence: Synthetic oligonucleotide
  Antisense Strand to SEQ ID NO: 322085
caccuaaccagaaucccag

SEQ ID NO: 322087 - RNA, 19 nt, Artificial Sequence
  Description of Artificial Sequence: Synthetic oligonucleotide
  Sense Strand Starting at position 44 of SEQ ID NO: 315690
ugggauucugguuagguga

SEQ ID NO: 322088 - RNA, 19 nt, Artificial Sequence
  Description of Artificial Sequence: Synthetic oligonucleotide
  Antisense Strand to SEQ ID NO: 322087
ucaccuaaccagaauccca

SEQ ID NO: 322089 - RNA, 19 nt, Artificial Sequence
  Description of Artificial Sequence: Synthetic oligonucleotide
  Sense Strand Starting at position 44 of SEQ ID NO: 315744
gggcuucauccuggaagug

SEQ ID NO: 322090 - RNA, 19 nt, Artificial Sequence
  Description of Artificial Sequence: Synthetic oligonucleotide
  Antisense Strand to SEQ ID NO: 322089
cacuuccaggaugaagccc

SEQ ID NO: 322091 - RNA, 19 nt, Artificial Sequence
  Description of Artificial Sequence: Synthetic oligonucleotide
  Sense Strand Starting at position 44 of SEQ ID NO: 315745
ggcuucauccuggaaguga

SEQ ID NO: 322092 - RNA, 19 nt, Artificial Sequence
  Description of Artificial Sequence: Synthetic oligonucleotide
  Antisense Strand to SEQ ID NO: 322091
ucacuuccaggaugaagcc

SEQ ID NO: 322093 - RNA, 19 nt, Artificial Sequence
  Description of Artificial Sequence: Synthetic oligonucleotide
  Sense Strand Starting at position 44 of SEQ ID NO: 315795
cgugaaugugcaugagugu

SEQ ID NO: 322094 - RNA, 19 nt, Artificial Sequence
  Description of Artificial Sequence: Synthetic oligonucleotide
  Antisense Strand to SEQ ID NO: 322093
acacucaugcacauucacg

SEQ ID NO: 322095 - RNA, 19 nt, Artificial Sequence
  Description of Artificial Sequence: Synthetic oligonucleotide
  Sense Strand Starting at position 44 of SEQ ID NO: 315839
ggugcugaaccuuaauaug

SEQ ID NO: 322096 - RNA, 19 nt, Artificial Sequence
  Description of Artificial Sequence: Synthetic oligonucleotide
  Antisense Strand to SEQ ID NO: 322095
cauauuaagguucagcacc

SEQ ID NO: 322097 - RNA, 19 nt, Artificial Sequence
  Description of Artificial Sequence: Synthetic oligonucleotide
  Sense Strand Starting at position 44 of SEQ ID NO: 315847
accuuaauaugaggaggau

SEQ ID NO: 322098 - RNA, 19 nt, Artificial Sequence
  Description of Artificial Sequence: Synthetic oligonucleotide
  Antisense Strand to SEQ ID NO: 322097
auccuccucauauuaaggu

SEQ ID NO: 322099 - RNA, 19 nt, Artificial Sequence
  Description of Artificial Sequence: Synthetic oligonucleotide
  Sense Strand Starting at position 44 of SEQ ID NO: 315980
acaggcugugccuaaugua

SEQ ID NO: 322100 - RNA, 19 nt, Artificial Sequence
  Description of Artificial Sequence: Synthetic oligonucleotide
  Antisense Strand to SEQ ID NO: 322099
uacauuaggcacagccugu

SEQ ID NO: 322101 - RNA, 19 nt, Artificial Sequence
  Description of Artificial Sequence: Synthetic oligonucleotide
  Sense Strand Starting at position 44 of SEQ ID NO: 316038
cagagacccuuguguagaa

SEQ ID NO: 322102 - RNA, 19 nt, Artificial Sequence
  Description of Artificial Sequence: Synthetic oligonucleotide
  Antisense Strand to SEQ ID NO: 322101
uucuacacaagggucucug

SEQ ID NO: 322103 - RNA, 19 nt, Artificial Sequence
  Description of Artificial Sequence: Synthetic oligonucleotide
  Sense Strand Starting at position 44 of SEQ ID NO: 316441
cucacucacucugguauuu

SEQ ID NO: 322104 - RNA, 19 nt, Artificial Sequence
  Description of Artificial Sequence: Synthetic oligonucleotide
  Antisense Strand to SEQ ID NO: 322103
aaauaccagagugagugag

SEQ ID NO: 322105 - RNA, 19 nt, Artificial Sequence
  Description of Artificial Sequence: Synthetic oligonucleotide
  Sense Strand Starting at position 44 of SEQ ID NO: 316668
agccucuuguccuagacaa

SEQ ID NO: 322106 - RNA, 19 nt, Artificial Sequence
  Description of Artificial Sequence: Synthetic oligonucleotide
  Antisense Strand to SEQ ID NO: 322105
uugucuaggacaagaggcu

SEQ ID NO: 322107 - RNA, 19 nt, Artificial Sequence
  Description of Artificial Sequence: Synthetic oligonucleotide
  Sense Strand Starting at position 44 of SEQ ID NO: 316702
gucgcauaugucccagcuu

SEQ ID NO: 322108 - RNA, 19 nt, Artificial Sequence
  Description of Artificial Sequence: Synthetic oligonucleotide
  Antisense Strand to SEQ ID NO: 322107
aagcugggacauaugcgac

SEQ ID NO: 322109 - RNA, 19 nt, Artificial Sequence
  Description of Artificial Sequence: Synthetic oligonucleotide
  Sense Strand Starting at position 44 of SEQ ID NO: 316746
cacucagucgcuggaguuu

SEQ ID NO: 322110 - RNA, 19 nt, Artificial Sequence
  Description of Artificial Sequence: Synthetic oligonucleotide
  Antisense Strand to SEQ ID NO: 322109
aaacuccagcgacugagug

SEQ ID NO: 322111 - RNA, 19 nt, Artificial Sequence
  Description of Artificial Sequence: Synthetic oligonucleotide
  Sense Strand Starting at position 44 of SEQ ID NO: 316757
uggaguuucccagacccga

SEQ ID NO: 322112 - RNA, 19 nt, Artificial Sequence
  Description of Artificial Sequence: Synthetic oligonucleotide
  Antisense Strand to SEQ ID NO: 322111
ucgggucugggaaacucca

SEQ ID NO: 322113 - RNA, 19 nt, Artificial Sequence
  Description of Artificial Sequence: Synthetic oligonucleotide
  Sense Strand Starting at position 44 of SEQ ID NO: 317304
cggguguugcucuggaguu

SEQ ID NO: 322114 - RNA, 19 nt, Artificial Sequence
  Description of Artificial Sequence: Synthetic oligonucleotide
  Antisense Strand to SEQ ID NO: 322113
aacuccagagcaacacccg

SEQ ID NO: 322115 - RNA, 19 nt, Artificial Sequence
  Description of Artificial Sequence: Synthetic oligonucleotide
  Sense Strand Starting at position 44 of SEQ ID NO: 317658
gcuguguggguucguggaa

SEQ ID NO: 322116 - RNA, 19 nt, Artificial Sequence
  Description of Artificial Sequence: Synthetic oligonucleotide
  Antisense Strand to SEQ ID NO: 322115
uuccacgaacccacacagc

SEQ ID NO: 322117 - RNA, 19 nt, Artificial Sequence
  Description of Artificial Sequence: Synthetic oligonucleotide
  Sense Strand Starting at position 44 of SEQ ID NO: 317661
guguggguucguggaacuu

SEQ ID NO: 322118 - RNA, 19 nt, Artificial Sequence
  Description of Artificial Sequence: Synthetic oligonucleotide
  Antisense Strand to SEQ ID NO: 322117
aaguuccacgaacccacac

SEQ ID NO: 322119 - RNA, 19 nt, Artificial Sequence
  Description of Artificial Sequence: Synthetic oligonucleotide
  Sense Strand Starting at position 44 of SEQ ID NO: 317869
gcugaagacuuaucuggga

SEQ ID NO: 322120 - RNA, 19 nt, Artificial Sequence
  Description of Artificial Sequence: Synthetic oligonucleotide
  Antisense Strand to SEQ ID NO: 322119
ucccagauaagucuucagc

SEQ ID NO: 322121 - RNA, 19 nt, Artificial Sequence
  Description of Artificial Sequence: Synthetic oligonucleotide
  Sense Strand Starting at position 44 of SEQ ID NO: 317872
gaagacuuaucugggacag

SEQ ID NO: 322122 - RNA, 19 nt, Artificial Sequence
  Description of Artificial Sequence: Synthetic oligonucleotide
  Antisense Strand to SEQ ID NO: 322121
cugucccagauaagucuuc

SEQ ID NO: 322123 - RNA, 19 nt, Artificial Sequence
  Description of Artificial Sequence: Synthetic oligonucleotide
  Sense Strand Starting at position 44 of SEQ ID NO: 317874
agacuuaucugggacagac

SEQ ID NO: 322124 - RNA, 19 nt, Artificial Sequence
  Description of Artificial Sequence: Synthetic oligonucleotide
  Antisense Strand to SEQ ID NO: 322123
gucugucccagauaagucu

SEQ ID NO: 322125 - RNA, 19 nt, Artificial Sequence
  Description of Artificial Sequence: Synthetic oligonucleotide
  Sense Strand Starting at position 44 of SEQ ID NO: 318212
ggaguuuacugucugccaa

SEQ ID NO: 322126 - RNA, 19 nt, Artificial Sequence
  Description of Artificial Sequence: Synthetic oligonucleotide
  Antisense Strand to SEQ ID NO: 322125
uuggcagacaguaaacucc

SEQ ID NO: 322127 - RNA, 19 nt, Artificial Sequence
  Description of Artificial Sequence: Synthetic oligonucleotide
  Sense Strand Starting at position 44 of SEQ ID NO: 318213
gaguuuacugucugccaag

SEQ ID NO: 322128 - RNA, 19 nt, Artificial Sequence
  Description of Artificial Sequence: Synthetic oligonucleotide
  Antisense Strand to SEQ ID NO: 322127
cuuggcagacaguaaacuc

SEQ ID NO: 322129 - RNA, 19 nt, Artificial Sequence
  Description of Artificial Sequence: Synthetic oligonucleotide
  Sense Strand Starting at position 44 of SEQ ID NO: 318264
gggacccuugucugaguga

SEQ ID NO: 322130 - RNA, 19 nt, Artificial Sequence
  Description of Artificial Sequence: Synthetic oligonucleotide
  Antisense Strand to SEQ ID NO: 322129
ucacucagacaaggguccc

SEQ ID NO: 322131 - RNA, 19 nt, Artificial Sequence
  Description of Artificial Sequence: Synthetic oligonucleotide
  Sense Strand Starting at position 44 of SEQ ID NO: 318821
agcgguacauucuggaaga

SEQ ID NO: 322132 - RNA, 19 nt, Artificial Sequence
  Description of Artificial Sequence: Synthetic oligonucleotide
  Antisense Strand to SEQ ID NO: 322131
ucuuccagaauguaccgcu

SEQ ID NO: 322133 - RNA, 19 nt, Artificial Sequence
  Description of Artificial Sequence: Synthetic oligonucleotide
  Sense Strand Starting at position 44 of SEQ ID NO: 318865
uccucuugcugugugauca

SEQ ID NO: 322134 - RNA, 19 nt, Artificial Sequence
  Description of Artificial Sequence: Synthetic oligonucleotide
  Antisense Strand to SEQ ID NO: 322133
ugaucacacagcaagagga

SEQ ID NO: 322135 - RNA, 19 nt, Artificial Sequence
  Description of Artificial Sequence: Synthetic oligonucleotide
  Sense Strand Starting at position 44 of SEQ ID NO: 318890
guguguggccucucuguaa

SEQ ID NO: 322136 - RNA, 19 nt, Artificial Sequence
  Description of Artificial Sequence: Synthetic oligonucleotide
  Antisense Strand to SEQ ID NO: 322135
uuacagagaggccacacac

SEQ ID NO: 322137 - RNA, 19 nt, Artificial Sequence
  Description of Artificial Sequence: Synthetic oligonucleotide
  Sense Strand Starting at position 44 of SEQ ID NO: 318894
guggccucucuguaacgua

SEQ ID NO: 322138 - RNA, 19 nt, Artificial Sequence
  Description of Artificial Sequence: Synthetic oligonucleotide
  Antisense Strand to SEQ ID NO: 322137
uacguuacagagaggccac

SEQ ID NO: 322139 - RNA, 19 nt, Artificial Sequence
  Description of Artificial Sequence: Synthetic oligonucleotide
  Sense Strand Starting at position 44 of SEQ ID NO: 319007
cagggaugagcacgguuua

SEQ ID NO: 322140 - RNA, 19 nt, Artificial Sequence
  Description of Artificial Sequence: Synthetic oligonucleotide
  Antisense Strand to SEQ ID NO: 322139
uaaaccgugcucaucccug

SEQ ID NO: 322141 - RNA, 19 nt, Artificial Sequence
  Description of Artificial Sequence: Synthetic oligonucleotide
  Sense Strand Starting at position 44 of SEQ ID NO: 319017
cacgguuuagaggaucuau

SEQ ID NO: 322142 - RNA, 19 nt, Artificial Sequence
  Description of Artificial Sequence: Synthetic oligonucleotide
  Antisense Strand to SEQ ID NO: 322141
auagauccucuaaaccgug

SEQ ID NO: 322143 - RNA, 19 nt, Artificial Sequence
  Description of Artificial Sequence: Synthetic oligonucleotide
  Sense Strand Starting at position 44 of SEQ ID NO: 319180
gcaggacagaucugaucuu

SEQ ID NO: 322144 - RNA, 19 nt, Artificial Sequence
  Description of Artificial Sequence: Synthetic oligonucleotide
  Antisense Strand to SEQ ID NO: 322143
aagaucagaucuguccugc

SEQ ID NO: 322145 - RNA, 19 nt, Artificial Sequence
  Description of Artificial Sequence: Synthetic oligonucleotide
  Sense Strand Starting at position 44 of SEQ ID NO: 319181
caggacagaucugaucuua

SEQ ID NO: 322146 - RNA, 19 nt, Artificial Sequence
  Description of Artificial Sequence: Synthetic oligonucleotide
  Antisense Strand to SEQ ID NO: 322145
uaagaucagaucuguccug

SEQ ID NO: 322147 - RNA, 19 nt, Artificial Sequence
  Description of Artificial Sequence: Synthetic oligonucleotide
  Sense Strand Starting at position 44 of SEQ ID NO: 319193
gaucuuaugcuaggugucu

SEQ ID NO: 322148 - RNA, 19 nt, Artificial Sequence
  Description of Artificial Sequence: Synthetic oligonucleotide
  Antisense Strand to SEQ ID NO: 322147
agacaccuagcauaagauc

SEQ ID NO: 322149 - RNA, 19 nt, Artificial Sequence
  Description of Artificial Sequence: Synthetic oligonucleotide
  Sense Strand Starting at position 45 of SEQ ID NO: 315252
cucccugguuccucacaga

SEQ ID NO: 322150 - RNA, 19 nt, Artificial Sequence
  Description of Artificial Sequence: Synthetic oligonucleotide
  Antisense Strand to SEQ ID NO: 322149
ucugugaggaaccagggag

SEQ ID NO: 322151 - RNA, 19 nt, Artificial Sequence
  Description of Artificial Sequence: Synthetic oligonucleotide
  Sense Strand Starting at position 45 of SEQ ID NO: 315270
aacagaggucaugggucau

SEQ ID NO: 322152 - RNA, 19 nt, Artificial Sequence
  Description of Artificial Sequence: Synthetic oligonucleotide
  Antisense Strand to SEQ ID NO: 322151
augacccaugaccucuguu

SEQ ID NO: 322153 - RNA, 19 nt, Artificial Sequence
  Description of Artificial Sequence: Synthetic oligonucleotide
  Sense Strand Starting at position 45 of SEQ ID NO: 315274
gaggucaugggucauucua

SEQ ID NO: 322154 - RNA, 19 nt, Artificial Sequence
  Description of Artificial Sequence: Synthetic oligonucleotide
  Antisense Strand to SEQ ID NO: 322153
uagaaugacccaugaccuc

SEQ ID NO: 322155 - RNA, 19 nt, Artificial Sequence
  Description of Artificial Sequence: Synthetic oligonucleotide
  Sense Strand Starting at position 45 of SEQ ID NO: 315276
ggucaugggucauucuaau

SEQ ID NO: 322156 - RNA, 19 nt, Artificial Sequence
  Description of Artificial Sequence: Synthetic oligonucleotide
  Antisense Strand to SEQ ID NO: 322155
auuagaaugacccaugacc

SEQ ID NO: 322157 - RNA, 19 nt, Artificial Sequence
  Description of Artificial Sequence: Synthetic oligonucleotide
  Sense Strand Starting at position 45 of SEQ ID NO: 315282
gggucauucuaauccacaa

SEQ ID NO: 322158 - RNA, 19 nt, Artificial Sequence
  Description of Artificial Sequence: Synthetic oligonucleotide
  Antisense Strand to SEQ ID NO: 322157
uuguggauuagaaugaccc

SEQ ID NO: 322159 - RNA, 19 nt, Artificial Sequence
  Description of Artificial Sequence: Synthetic oligonucleotide
  Sense Strand Starting at position 45 of SEQ ID NO: 315310
gcacaauguuuggucaaua

SEQ ID NO: 322160 - RNA, 19 nt, Artificial Sequence
  Description of Artificial Sequence: Synthetic oligonucleotide
  Antisense Strand to SEQ ID NO: 322159
uauugaccaaacauugugc

SEQ ID NO: 322161 - RNA, 19 nt, Artificial Sequence
  Description of Artificial Sequence: Synthetic oligonucleotide
  Sense Strand Starting at position 45 of SEQ ID NO: 315311
cacaauguuuggucaauag

SEQ ID NO: 322162 - RNA, 19 nt, Artificial Sequence
  Description of Artificial Sequence: Synthetic oligonucleotide
  Antisense Strand to SEQ ID NO: 322161
cuauugaccaaacauugug

SEQ ID NO: 322163 - RNA, 19 nt, Artificial Sequence
  Description of Artificial Sequence: Synthetic oligonucleotide
  Sense Strand Starting at position 45 of SEQ ID NO: 315315
auguuuggucaauagagug

SEQ ID NO: 322164 - RNA, 19 nt, Artificial Sequence
  Description of Artificial Sequence: Synthetic oligonucleotide
  Antisense Strand to SEQ ID NO: 322163
cacucuauugaccaaacau

SEQ ID NO: 322165 - RNA, 19 nt, Artificial Sequence
  Description of Artificial Sequence: Synthetic oligonucleotide
  Sense Strand Starting at position 45 of SEQ ID NO: 315663
guuggagcuccaggauguu

SEQ ID NO: 322166 - RNA, 19 nt, Artificial Sequence
  Description of Artificial Sequence: Synthetic oligonucleotide
  Antisense Strand to SEQ ID NO: 322165
aacauccuggagcuccaac

SEQ ID NO: 322167 - RNA, 19 nt, Artificial Sequence
  Description of Artificial Sequence: Synthetic oligonucleotide
  Sense Strand Starting at position 45 of SEQ ID NO: 315672
ccaggauguuagccugaga

SEQ ID NO: 322168 - RNA, 19 nt, Artificial Sequence
  Description of Artificial Sequence: Synthetic oligonucleotide
  Antisense Strand to SEQ ID NO: 322167
ucucaggcuaacauccugg

SEQ ID NO: 322169 - RNA, 19 nt, Artificial Sequence
  Description of Artificial Sequence: Synthetic oligonucleotide
  Sense Strand Starting at position 45 of SEQ ID NO: 315675
ggauguuagccugagaauc

SEQ ID NO: 322170 - RNA, 19 nt, Artificial Sequence
  Description of Artificial Sequence: Synthetic oligonucleotide
  Antisense Strand to SEQ ID NO: 322169
gauucucaggcuaacaucc

SEQ ID NO: 322171 - RNA, 19 nt, Artificial Sequence
  Description of Artificial Sequence: Synthetic oligonucleotide
  Sense Strand Starting at position 45 of SEQ ID NO: 315685
cugagaauccagcagcaga

SEQ ID NO: 322172 - RNA, 19 nt, Artificial Sequence
  Description of Artificial Sequence: Synthetic oligonucleotide
  Antisense Strand to SEQ ID NO: 322171
ucugcugcuggauucucag

SEQ ID NO: 322173 - RNA, 19 nt, Artificial Sequence
  Description of Artificial Sequence: Synthetic oligonucleotide
  Sense Strand Starting at position 45 of SEQ ID NO: 315771
agguguguuccgaguccag

SEQ ID NO: 322174 - RNA, 19 nt, Artificial Sequence
  Description of Artificial Sequence: Synthetic oligonucleotide
  Antisense Strand to SEQ ID NO: 322173
cuggacucggaacacaccu

SEQ ID NO: 322175 - RNA, 19 nt, Artificial Sequence
  Description of Artificial Sequence: Synthetic oligonucleotide
  Sense Strand Starting at position 45 of SEQ ID NO: 316000
cagaacugaugccuggaaa

SEQ ID NO: 322176 - RNA, 19 nt, Artificial Sequence
  Description of Artificial Sequence: Synthetic oligonucleotide
  Antisense Strand to SEQ ID NO: 322175
uuuccaggcaucaguucug

SEQ ID NO: 322177 - RNA, 19 nt, Artificial Sequence
  Description of Artificial Sequence: Synthetic oligonucleotide
  Sense Strand Starting at position 45 of SEQ ID NO: 316884
gagagauggagcugaggua

SEQ ID NO: 322178 - RNA, 19 nt, Artificial Sequence
  Description of Artificial Sequence: Synthetic oligonucleotide
  Antisense Strand to SEQ ID NO: 322177
uaccucagcuccaucucuc

SEQ ID NO: 322179 - RNA, 19 nt, Artificial Sequence
  Description of Artificial Sequence: Synthetic oligonucleotide
  Sense Strand Starting at position 45 of SEQ ID NO: 316978
uggauugaaccaugcagag

SEQ ID NO: 322180 - RNA, 19 nt, Artificial Sequence
  Description of Artificial Sequence: Synthetic oligonucleotide
  Antisense Strand to SEQ ID NO: 322179
cucugcaugguucaaucca

SEQ ID NO: 322181 - RNA, 19 nt, Artificial Sequence
  Description of Artificial Sequence: Synthetic oligonucleotide
  Sense Strand Starting at position 45 of SEQ ID NO: 317044
cagagaaucuacccugcga

SEQ ID NO: 322182 - RNA, 19 nt, Artificial Sequence
  Description of Artificial Sequence: Synthetic oligonucleotide
  Antisense Strand to SEQ ID NO: 322181
ucgcaggguagauucucug

SEQ ID NO: 322183 - RNA, 19 nt, Artificial Sequence
  Description of Artificial Sequence: Synthetic oligonucleotide
  Sense Strand Starting at position 45 of SEQ ID NO: 317145
gggucuugguccaagagag

SEQ ID NO: 322184 - RNA, 19 nt, Artificial Sequence
  Description of Artificial Sequence: Synthetic oligonucleotide
  Antisense Strand to SEQ ID NO: 322183
cucucuuggaccaagaccc

SEQ ID NO: 322185 - RNA, 19 nt, Artificial Sequence
  Description of Artificial Sequence: Synthetic oligonucleotide
  Sense Strand Starting at position 45 of SEQ ID NO: 317157
aagagagaccaguguccaa

SEQ ID NO: 322186 - RNA, 19 nt, Artificial Sequence
  Description of Artificial Sequence: Synthetic oligonucleotide
  Antisense Strand to SEQ ID NO: 322185
uuggacacuggucucucuu

SEQ ID NO: 322187 - RNA, 19 nt, Artificial Sequence
  Description of Artificial Sequence: Synthetic oligonucleotide
  Sense Strand Starting at position 45 of SEQ ID NO: 317168
guguccaaagucugggauu

SEQ ID NO: 322188 - RNA, 19 nt, Artificial Sequence
  Description of Artificial Sequence: Synthetic oligonucleotide
  Antisense Strand to SEQ ID NO: 322187
aaucccagacuuuggacac

SEQ ID NO: 322189 - RNA, 19 nt, Artificial Sequence
  Description of Artificial Sequence: Synthetic oligonucleotide
  Sense Strand Starting at position 45 of SEQ ID NO: 317526
cugagucuuccucaacaga

SEQ ID NO: 322190 - RNA, 19 nt, Artificial Sequence
  Description of Artificial Sequence: Synthetic oligonucleotide
  Antisense Strand to SEQ ID NO: 322189
ucuguugaggaagacucag

SEQ ID NO: 322191 - RNA, 19 nt, Artificial Sequence
  Description of Artificial Sequence: Synthetic oligonucleotide
  Sense Strand Starting at position 45 of SEQ ID NO: 317571
gaggaacucuguuccuaca

SEQ ID NO: 322192 - RNA, 19 nt, Artificial Sequence
  Description of Artificial Sequence: Synthetic oligonucleotide
  Antisense Strand to SEQ ID NO: 322191
uguaggaacagaguuccuc

SEQ ID NO: 322193 - RNA, 19 nt, Artificial Sequence
  Description of Artificial Sequence: Synthetic oligonucleotide
  Sense Strand Starting at position 45 of SEQ ID NO: 317598
agucuauccuucucuggaa

SEQ ID NO: 322194 - RNA, 19 nt, Artificial Sequence
  Description of Artificial Sequence: Synthetic oligonucleotide
  Antisense Strand to SEQ ID NO: 322193
uuccagagaaggauagacu

SEQ ID NO: 322195 - RNA, 19 nt, Artificial Sequence
  Description of Artificial Sequence: Synthetic oligonucleotide
  Sense Strand Starting at position 45 of SEQ ID NO: 317599
gucuauccuucucuggaau

SEQ ID NO: 322196 - RNA, 19 nt, Artificial Sequence
  Description of Artificial Sequence: Synthetic oligonucleotide
  Antisense Strand to SEQ ID NO: 322195
auuccagagaaggauagac

SEQ ID NO: 322197 - RNA, 19 nt, Artificial Sequence
  Description of Artificial Sequence: Synthetic oligonucleotide
  Sense Strand Starting at position 45 of SEQ ID NO: 317612
uggaauacuccuugauaau

SEQ ID NO: 322198 - RNA, 19 nt, Artificial Sequence
  Description of Artificial Sequence: Synthetic oligonucleotide
  Antisense Strand to SEQ ID NO: 322197
auuaucaaggaguauucca

SEQ ID NO: 322199 - RNA, 19 nt, Artificial Sequence
  Description of Artificial Sequence: Synthetic oligonucleotide
  Sense Strand Starting at position 45 of SEQ ID NO: 317621
ccuugauaaugacugugau

SEQ ID NO: 322200 - RNA, 19 nt, Artificial Sequence
  Description of Artificial Sequence: Synthetic oligonucleotide
  Antisense Strand to SEQ ID NO: 322199
aucacagucauuaucaagg

SEQ ID NO: 322201 - RNA, 19 nt, Artificial Sequence
  Description of Artificial Sequence: Synthetic oligonucleotide
  Sense Strand Starting at position 45 of SEQ ID NO: 317622
cuugauaaugacugugauu

SEQ ID NO: 322202 - RNA, 19 nt, Artificial Sequence
  Description of Artificial Sequence: Synthetic oligonucleotide
  Antisense Strand to SEQ ID NO: 322201
aaucacagucauuaucaag

SEQ ID NO: 322203 - RNA, 19 nt, Artificial Sequence
  Description of Artificial Sequence: Synthetic oligonucleotide
  Sense Strand Starting at position 45 of SEQ ID NO: 317706
uuguaaaugccguaggaca

SEQ ID NO: 322204 - RNA, 19 nt, Artificial Sequence
  Description of Artificial Sequence: Synthetic oligonucleotide
  Antisense Strand to SEQ ID NO: 322203
uguccuacggcauuuacaa

SEQ ID NO: 322205 - RNA, 19 nt, Artificial Sequence
  Description of Artificial Sequence: Synthetic oligonucleotide
  Sense Strand Starting at position 45 of SEQ ID NO: 317717
guaggacaugucuacauau

SEQ ID NO: 322206 - RNA, 19 nt, Artificial Sequence
  Description of Artificial Sequence: Synthetic oligonucleotide
  Antisense Strand to SEQ ID NO: 322205
auauguagacauguccuac

SEQ ID NO: 322207 - RNA, 19 nt, Artificial Sequence
  Description of Artificial Sequence: Synthetic oligonucleotide
  Sense Strand Starting at position 45 of SEQ ID NO: 317748
agguuaacauaugcucuua

SEQ ID NO: 322208 - RNA, 19 nt, Artificial Sequence
  Description of Artificial Sequence: Synthetic oligonucleotide
  Antisense Strand to SEQ ID NO: 322207
uaagagcauauguuaaccu

SEQ ID NO: 322209 - RNA, 19 nt, Artificial Sequence
  Description of Artificial Sequence: Synthetic oligonucleotide
  Sense Strand Starting at position 45 of SEQ ID NO: 317787
guauguuugguuuguaaac

SEQ ID NO: 322210 - RNA, 19 nt, Artificial Sequence
  Description of Artificial Sequence: Synthetic oligonucleotide
  Antisense Strand to SEQ ID NO: 322209
guuuacaaaccaaacauac

SEQ ID NO: 322211 - RNA, 19 nt, Artificial Sequence
  Description of Artificial Sequence: Synthetic oligonucleotide
  Sense Strand Starting at position 45 of SEQ ID NO: 317796
guuuguaaaccguauugua

SEQ ID NO: 322212 - RNA, 19 nt, Artificial Sequence
  Description of Artificial Sequence: Synthetic oligonucleotide
  Antisense Strand to SEQ ID NO: 322211
uacaauacgguuuacaaac

SEQ ID NO: 322213 - RNA, 19 nt, Artificial Sequence
  Description of Artificial Sequence: Synthetic oligonucleotide
  Sense Strand Starting at position 45 of SEQ ID NO: 318011
agaccugagucuuugggau

SEQ ID NO: 322214 - RNA, 19 nt, Artificial Sequence
  Description of Artificial Sequence: Synthetic oligonucleotide
  Antisense Strand to SEQ ID NO: 322213
aucccaaagacucaggucu

SEQ ID NO: 322215 - RNA, 19 nt, Artificial Sequence
  Description of Artificial Sequence: Synthetic oligonucleotide
  Sense Strand Starting at position 45 of SEQ ID NO: 318017
gagucuuugggauggaaac

SEQ ID NO: 322216 - RNA, 19 nt, Artificial Sequence
  Description of Artificial Sequence: Synthetic oligonucleotide
  Antisense Strand to SEQ ID NO: 322215
guuuccaucccaaagacuc

SEQ ID NO: 322217 - RNA, 19 nt, Artificial Sequence
  Description of Artificial Sequence: Synthetic oligonucleotide
  Sense Strand Starting at position 45 of SEQ ID NO: 318290
ccuguccaucagugucaga

SEQ ID NO: 322218 - RNA, 19 nt, Artificial Sequence
  Description of Artificial Sequence: Synthetic oligonucleotide
  Antisense Strand to SEQ ID NO: 322217
ucugacacugauggacagg

SEQ ID NO: 322219 - RNA, 19 nt, Artificial Sequence
  Description of Artificial Sequence: Synthetic oligonucleotide
  Sense Strand Starting at position 45 of SEQ ID NO: 318609
uugcuccagucauuaugaa

SEQ ID NO: 322220 - RNA, 19 nt, Artificial Sequence
  Description of Artificial Sequence: Synthetic oligonucleotide
  Antisense Strand to SEQ ID NO: 322219
uucauaaugacuggagcaa

SEQ ID NO: 322221 - RNA, 19 nt, Artificial Sequence
  Description of Artificial Sequence: Synthetic oligonucleotide
  Sense Strand Starting at position 45 of SEQ ID NO: 318610
ugcuccagucauuaugaaa

SEQ ID NO: 322222 - RNA, 19 nt, Artificial Sequence
  Description of Artificial Sequence: Synthetic oligonucleotide
  Antisense Strand to SEQ ID NO: 322221
uuucauaaugacuggagca

SEQ ID NO: 322223 - RNA, 19 nt, Artificial Sequence
  Description of Artificial Sequence: Synthetic oligonucleotide
  Sense Strand Starting at position 45 of SEQ ID NO: 319059
uggugaaggugcccucaua

SEQ ID NO: 322224 - RNA, 19 nt, Artificial Sequence
  Description of Artificial Sequence: Synthetic oligonucleotide
  Antisense Strand to SEQ ID NO: 322223
uaugagggcaccuucacca

SEQ ID NO: 322225 - RNA, 19 nt, Artificial Sequence
  Description of Artificial Sequence: Synthetic oligonucleotide
  Sense Strand Starting at position 45 of SEQ ID NO: 319080
gggagucgucuucagagag

SEQ ID NO: 322226 - RNA, 19 nt, Artificial Sequence
  Description of Artificial Sequence: Synthetic oligonucleotide
  Antisense Strand to SEQ ID NO: 322225
cucucugaagacgacuccc

SEQ ID NO: 322227 - RNA, 19 nt, Artificial Sequence
  Description of Artificial Sequence: Synthetic oligonucleotide
  Sense Strand Starting at position 45 of SEQ ID NO: 319199
ggagaugugcccugacaca

SEQ ID NO: 322228 - RNA, 19 nt, Artificial Sequence
  Description of Artificial Sequence: Synthetic oligonucleotide
  Antisense Strand to SEQ ID NO: 322227
ugugucagggcacaucucc

SEQ ID NO: 322229 - RNA, 19 nt, Artificial Sequence
  Description of Artificial Sequence: Synthetic oligonucleotide
  Sense Strand Starting at position 46 of SEQ ID NO: 315303
gccaguucucuggaccgaa

SEQ ID NO: 322230 - RNA, 19 nt, Artificial Sequence
  Description of Artificial Sequence: Synthetic oligonucleotide
  Antisense Strand to SEQ ID NO: 322229
uucgguccagagaacuggc

SEQ ID NO: 322231 - RNA, 19 nt, Artificial Sequence
  Description of Artificial Sequence: Synthetic oligonucleotide
  Sense Strand Starting at position 46 of SEQ ID NO: 315448
ccuccaggguuguagagau

SEQ ID NO: 322232 - RNA, 19 nt, Artificial Sequence
  Description of Artificial Sequence: Synthetic oligonucleotide
  Antisense Strand to SEQ ID NO: 322231
aucucuacaacccuggagg

SEQ ID NO: 322233 - RNA, 19 nt, Artificial Sequence
  Description of Artificial Sequence: Synthetic oligonucleotide
  Sense Strand Starting at position 46 of SEQ ID NO: 315452
caggguuguagagaucgaa

SEQ ID NO: 322234 - RNA, 19 nt, Artificial Sequence
  Description of Artificial Sequence: Synthetic oligonucleotide
  Antisense Strand to SEQ ID NO: 322233
uucgaucucuacaacccug

SEQ ID NO: 322235 - RNA, 19 nt, Artificial Sequence
  Description of Artificial Sequence: Synthetic oligonucleotide
  Sense Strand Starting at position 46 of SEQ ID NO: 315455
gguuguagagaucgaauuc

SEQ ID NO: 322236 - RNA, 19 nt, Artificial Sequence
  Description of Artificial Sequence: Synthetic oligonucleotide
  Antisense Strand to SEQ ID NO: 322235
gaauucgaucucuacaacc

SEQ ID NO: 322237 - RNA, 19 nt, Artificial Sequence
  Description of Artificial Sequence: Synthetic oligonucleotide
  Sense Strand Starting at position 46 of SEQ ID NO: 315737
uggugaagccuguguugaa

SEQ ID NO: 322238 - RNA, 19 nt, Artificial Sequence
  Description of Artificial Sequence: Synthetic oligonucleotide
  Antisense Strand to SEQ ID NO: 322237
uucaacacaggcuucacca

SEQ ID NO: 322239 - RNA, 19 nt, Artificial Sequence
  Description of Artificial Sequence: Synthetic oligonucleotide
  Sense Strand Starting at position 46 of SEQ ID NO: 315738
ggugaagccuguguugaaa

SEQ ID NO: 322240 - RNA, 19 nt, Artificial Sequence
  Description of Artificial Sequence: Synthetic oligonucleotide
  Antisense Strand to SEQ ID NO: 322239
uuucaacacaggcuucacc

SEQ ID NO: 322241 - RNA, 19 nt, Artificial Sequence
  Description of Artificial Sequence: Synthetic oligonucleotide
  Sense Strand Starting at position 46 of SEQ ID NO: 316145
auacguacucgcgcgcaaa

SEQ ID NO: 322242 - RNA, 19 nt, Artificial Sequence
  Description of Artificial Sequence: Synthetic oligonucleotide
  Antisense Strand to SEQ ID NO: 322241
uuugcgcgcgaguacguau

SEQ ID NO: 322243 - RNA, 19 nt, Artificial Sequence
  Description of Artificial Sequence: Synthetic oligonucleotide
  Sense Strand Starting at position 46 of SEQ ID NO: 316235
aaggguuguugugcaagua

SEQ ID NO: 322244 - RNA, 19 nt, Artificial Sequence
  Description of Artificial Sequence: Synthetic oligonucleotide
  Antisense Strand to SEQ ID NO: 322243
uacuugcacaacaacccuu

SEQ ID NO: 322245 - RNA, 19 nt, Artificial Sequence
  Description of Artificial Sequence: Synthetic oligonucleotide
  Sense Strand Starting at position 46 of SEQ ID NO: 316238
gguuguugugcaaguagag

SEQ ID NO: 322246 - RNA, 19 nt, Artificial Sequence
  Description of Artificial Sequence: Synthetic oligonucleotide
  Antisense Strand to SEQ ID NO: 322245
cucuacuugcacaacaacc

SEQ ID NO: 322247 - RNA, 19 nt, Artificial Sequence
  Description of Artificial Sequence: Synthetic oligonucleotide
  Sense Strand Starting at position 46 of SEQ ID NO: 316438
aaggcaugcucguccaagu

SEQ ID NO: 322248 - RNA, 19 nt, Artificial Sequence
  Description of Artificial Sequence: Synthetic oligonucleotide
  Antisense Strand to SEQ ID NO: 322247
acuuggacgagcaugccuu

SEQ ID NO: 322249 - RNA, 19 nt, Artificial Sequence
  Description of Artificial Sequence: Synthetic oligonucleotide
  Sense Strand Starting at position 46 of SEQ ID NO: 316457
gcaccaagcgguuauugaa

SEQ ID NO: 322250 - RNA, 19 nt, Artificial Sequence
  Description of Artificial Sequence: Synthetic oligonucleotide
  Antisense Strand to SEQ ID NO: 322249
uucaauaaccgcuuggugc

SEQ ID NO: 322251 - RNA, 19 nt, Artificial Sequence
  Description of Artificial Sequence: Synthetic oligonucleotide
  Sense Strand Starting at position 46 of SEQ ID NO: 316529
cccgcaacguguuagauga

SEQ ID NO: 322252 - RNA, 19 nt, Artificial Sequence
  Description of Artificial Sequence: Synthetic oligonucleotide
  Antisense Strand to SEQ ID NO: 322251
ucaucuaacacguugcggg

SEQ ID NO: 322253 - RNA, 19 nt, Artificial Sequence
  Description of Artificial Sequence: Synthetic oligonucleotide
  Sense Strand Starting at position 46 of SEQ ID NO: 316531
cgcaacguguuagaugaua

SEQ ID NO: 322254 - RNA, 19 nt, Artificial Sequence
  Description of Artificial Sequence: Synthetic oligonucleotide
  Antisense Strand to SEQ ID NO: 322253
uaucaucuaacacguugcg

SEQ ID NO: 322255 - RNA, 19 nt, Artificial Sequence
  Description of Artificial Sequence: Synthetic oligonucleotide
  Sense Strand Starting at position 46 of SEQ ID NO: 316533
caacguguuagaugauaga

SEQ ID NO: 322256 - RNA, 19 nt, Artificial Sequence
  Description of Artificial Sequence: Synthetic oligonucleotide
  Antisense Strand to SEQ ID NO: 322255
ucuaucaucuaacacguug

SEQ ID NO: 322257 - RNA, 19 nt, Artificial Sequence
  Description of Artificial Sequence: Synthetic oligonucleotide
  Sense Strand Starting at position 46 of SEQ ID NO: 316603
ucuaguucguuguggucua

SEQ ID NO: 322258 - RNA, 19 nt, Artificial Sequence
  Description of Artificial Sequence: Synthetic oligonucleotide
  Antisense Strand to SEQ ID NO: 322257
uagaccacaacgaacuaga

SEQ ID NO: 322259 - RNA, 19 nt, Artificial Sequence
  Description of Artificial Sequence: Synthetic oligonucleotide
  Sense Strand Starting at position 46 of SEQ ID NO: 317170
ccuauugguucccguuuga

SEQ ID NO: 322260 - RNA, 19 nt, Artificial Sequence
  Description of Artificial Sequence: Synthetic oligonucleotide
  Antisense Strand to SEQ ID NO: 322259
ucaaacgggaaccaauagg

SEQ ID NO: 322261 - RNA, 19 nt, Artificial Sequence
  Description of Artificial Sequence: Synthetic oligonucleotide
  Sense Strand Starting at position 46 of SEQ ID NO: 317335
ggaagaaugucuccaagcu

SEQ ID NO: 322262 - RNA, 19 nt, Artificial Sequence
  Description of Artificial Sequence: Synthetic oligonucleotide
  Antisense Strand to SEQ ID NO: 322261
agcuuggagacauucuucc

SEQ ID NO: 322263 - RNA, 19 nt, Artificial Sequence
  Description of Artificial Sequence: Synthetic oligonucleotide
  Sense Strand Starting at position 46 of SEQ ID NO: 317336
gaagaaugucuccaagcug

SEQ ID NO: 322264 - RNA, 19 nt, Artificial Sequence
  Description of Artificial Sequence: Synthetic oligonucleotide
  Antisense Strand to SEQ ID NO: 322263
cagcuuggagacauucuuc

SEQ ID NO: 322265 - RNA, 19 nt, Artificial Sequence
  Description of Artificial Sequence: Synthetic oligonucleotide
  Sense Strand Starting at position 46 of SEQ ID NO: 317350
agcugcuguuaguguuuau

SEQ ID NO: 322266 - RNA, 19 nt, Artificial Sequence
  Description of Artificial Sequence: Synthetic oligonucleotide
  Antisense Strand to SEQ ID NO: 322265
auaaacacuaacagcagcu

SEQ ID NO: 322267 - RNA, 19 nt, Artificial Sequence
  Description of Artificial Sequence: Synthetic oligonucleotide
  Sense Strand Starting at position 46 of SEQ ID NO: 317351
gcugcuguuaguguuuauu

SEQ ID NO: 322268 - RNA, 19 nt, Artificial Sequence
  Description of Artificial Sequence: Synthetic oligonucleotide
  Antisense Strand to SEQ ID NO: 322267
aauaaacacuaacagcagc

SEQ ID NO: 322269 - RNA, 19 nt, Artificial Sequence
  Description of Artificial Sequence: Synthetic oligonucleotide
  Sense Strand Starting at position 46 of SEQ ID NO: 317354
gcuguuaguguuuauuuga

SEQ ID NO: 322270 - RNA, 19 nt, Artificial Sequence
  Description of Artificial Sequence: Synthetic oligonucleotide
  Antisense Strand to SEQ ID NO: 322269
ucaaauaaacacuaacagc

SEQ ID NO: 322271 - RNA, 19 nt, Artificial Sequence
  Description of Artificial Sequence: Synthetic oligonucleotide
  Sense Strand Starting at position 46 of SEQ ID NO: 317357
guuaguguuuauuugaagu

SEQ ID NO: 322272 - RNA, 19 nt, Artificial Sequence
  Description of Artificial Sequence: Synthetic oligonucleotide
  Antisense Strand to SEQ ID NO: 322271
acuucaaauaaacacuaac

SEQ ID NO: 322273 - RNA, 19 nt, Artificial Sequence
  Description of Artificial Sequence: Synthetic oligonucleotide
  Sense Strand Starting at position 46 of SEQ ID NO: 317359
uaguguuuauuugaaguga

SEQ ID NO: 322274 - RNA, 19 nt, Artificial Sequence
  Description of Artificial Sequence: Synthetic oligonucleotide
  Antisense Strand to SEQ ID NO: 322273
ucacuucaaauaaacacua

SEQ ID NO: 322275 - RNA, 19 nt, Artificial Sequence
  Description of Artificial Sequence: Synthetic oligonucleotide
  Sense Strand Starting at position 46 of SEQ ID NO: 317407
ggcagacucucacuaucuu

SEQ ID NO: 322276 - RNA, 19 nt, Artificial Sequence
  Description of Artificial Sequence: Synthetic oligonucleotide
  Antisense Strand to SEQ ID NO: 322275
aagauagugagagucugcc

SEQ ID NO: 322277 - RNA, 19 nt, Artificial Sequence
  Description of Artificial Sequence: Synthetic oligonucleotide
  Sense Strand Starting at position 46 of SEQ ID NO: 317436
gccugagccuucuuaaagu

SEQ ID NO: 322278 - RNA, 19 nt, Artificial Sequence
  Description of Artificial Sequence: Synthetic oligonucleotide
  Antisense Strand to SEQ ID NO: 322277
acuuuaagaaggcucaggc

SEQ ID NO: 322279 - RNA, 19 nt, Artificial Sequence
  Description of Artificial Sequence: Synthetic oligonucleotide
  Sense Strand Starting at position 46 of SEQ ID NO: 317771
uguggcaccuuacuagaau

SEQ ID NO: 322280 - RNA, 19 nt, Artificial Sequence
  Description of Artificial Sequence: Synthetic oligonucleotide
  Antisense Strand to SEQ ID NO: 322279
auucuaguaaggugccaca

SEQ ID NO: 322281 - RNA, 19 nt, Artificial Sequence
  Description of Artificial Sequence: Synthetic oligonucleotide
  Sense Strand Starting at position 46 of SEQ ID NO: 317772
guggcaccuuacuagaaua

SEQ ID NO: 322282 - RNA, 19 nt, Artificial Sequence
  Description of Artificial Sequence: Synthetic oligonucleotide
  Antisense Strand to SEQ ID NO: 322281
uauucuaguaaggugccac

SEQ ID NO: 322283 - RNA, 19 nt, Artificial Sequence
  Description of Artificial Sequence: Synthetic oligonucleotide
  Sense Strand Starting at position 46 of SEQ ID NO: 317858
ggcacuccucauuggcaau

SEQ ID NO: 322284 - RNA, 19 nt, Artificial Sequence
  Description of Artificial Sequence: Synthetic oligonucleotide
  Antisense Strand to SEQ ID NO: 322283
auugccaaugaggagugcc

SEQ ID NO: 322285 - RNA, 19 nt, Artificial Sequence
  Description of Artificial Sequence: Synthetic oligonucleotide
  Sense Strand Starting at position 46 of SEQ ID NO: 318153
aaguccuaggcugggaaua

SEQ ID NO: 322286 - RNA, 19 nt, Artificial Sequence
  Description of Artificial Sequence: Synthetic oligonucleotide
  Antisense Strand to SEQ ID NO: 322285
uauucccagccuaggacuu

SEQ ID NO: 322287 - RNA, 19 nt, Artificial Sequence
  Description of Artificial Sequence: Synthetic oligonucleotide
  Sense Strand Starting at position 46 of SEQ ID NO: 318154
aguccuaggcugggaauau

SEQ ID NO: 322288 - RNA, 19 nt, Artificial Sequence
  Description of Artificial Sequence: Synthetic oligonucleotide
  Antisense Strand to SEQ ID NO: 322287
auauucccagccuaggacu

SEQ ID NO: 322289 - RNA, 19 nt, Artificial Sequence
  Description of Artificial Sequence: Synthetic oligonucleotide
  Sense Strand Starting at position 46 of SEQ ID NO: 318155
guccuaggcugggaauauu

SEQ ID NO: 322290 - RNA, 19 nt, Artificial Sequence
  Description of Artificial Sequence: Synthetic oligonucleotide
  Antisense Strand to SEQ ID NO: 322289
aauauucccagccuaggac

SEQ ID NO: 322291 - RNA, 19 nt, Artificial Sequence
  Description of Artificial Sequence: Synthetic oligonucleotide
  Sense Strand Starting at position 46 of SEQ ID NO: 318226
ccagaugcggauuauauca

SEQ ID NO: 322292 - RNA, 19 nt, Artificial Sequence
  Description of Artificial Sequence: Synthetic oligonucleotide
  Antisense Strand to SEQ ID NO: 322291
ugauauaauccgcaucugg

SEQ ID NO: 322293 - RNA, 19 nt, Artificial Sequence
  Description of Artificial Sequence: Synthetic oligonucleotide
  Sense Strand Starting at position 46 of SEQ ID NO: 318357
acuugaauaugugugcacu

SEQ ID NO: 322294 - RNA, 19 nt, Artificial Sequence
  Description of Artificial Sequence: Synthetic oligonucleotide
  Antisense Strand to SEQ ID NO: 322293
agugcacacauauucaagu

SEQ ID NO: 322295 - RNA, 19 nt, Artificial Sequence
  Description of Artificial Sequence: Synthetic oligonucleotide
  Sense Strand Starting at position 46 of SEQ ID NO: 318521
ccacaaguccugcaaguaa

SEQ ID NO: 322296 - RNA, 19 nt, Artificial Sequence
  Description of Artificial Sequence: Synthetic oligonucleotide
  Antisense Strand to SEQ ID NO: 322295
uuacuugcaggacuugugg

SEQ ID NO: 322297 - RNA, 19 nt, Artificial Sequence
  Description of Artificial Sequence: Synthetic oligonucleotide
  Sense Strand Starting at position 46 of SEQ ID NO: 318607
uguuguagagccuguauca

SEQ ID NO: 322298 - RNA, 19 nt, Artificial Sequence
  Description of Artificial Sequence: Synthetic oligonucleotide
  Antisense Strand to SEQ ID NO: 322297
ugauacaggcucuacaaca

SEQ ID NO: 322299 - RNA, 19 nt, Artificial Sequence
  Description of Artificial Sequence: Synthetic oligonucleotide
  Sense Strand Starting at position 46 of SEQ ID NO: 319011
cagggauccugccagauga

SEQ ID NO: 322300 - RNA, 19 nt, Artificial Sequence
  Description of Artificial Sequence: Synthetic oligonucleotide
  Antisense Strand to SEQ ID NO: 322299
ucaucuggcaggaucccug

SEQ ID NO: 322301 - RNA, 19 nt, Artificial Sequence
  Description of Artificial Sequence: Synthetic oligonucleotide
  Sense Strand Starting at position 46 of SEQ ID NO: 319021
gccagaugauguccacaug

SEQ ID NO: 322302 - RNA, 19 nt, Artificial Sequence
  Description of Artificial Sequence: Synthetic oligonucleotide
  Antisense Strand to SEQ ID NO: 322301
cauguggacaucaucuggc

SEQ ID NO: 322303 - RNA, 19 nt, Artificial Sequence
  Description of Artificial Sequence: Synthetic oligonucleotide
  Sense Strand Starting at position 46 of SEQ ID NO: 319104
agggucuucugauguguca

SEQ ID NO: 322304 - RNA, 19 nt, Artificial Sequence
  Description of Artificial Sequence: Synthetic oligonucleotide
  Antisense Strand to SEQ ID NO: 322303
ugacacaucagaagacccu

SEQ ID NO: 322305 - RNA, 19 nt, Artificial Sequence
  Description of Artificial Sequence: Synthetic oligonucleotide
  Sense Strand Starting at position 46 of SEQ ID NO: 319208
cugacucgccaauagacuu

SEQ ID NO: 322306 - RNA, 19 nt, Artificial Sequence
  Description of Artificial Sequence: Synthetic oligonucleotide
  Antisense Strand to SEQ ID NO: 322305
aagucuauuggcgagucag

SEQ ID NO: 322307 - RNA, 19 nt, Artificial Sequence
  Description of Artificial Sequence: Synthetic oligonucleotide
  Sense Strand Starting at position 47 of SEQ ID NO: 315236
cgaauuugucccggccaag

SEQ ID NO: 322308 - RNA, 19 nt, Artificial Sequence
  Description of Artificial Sequence: Synthetic oligonucleotide
  Antisense Strand to SEQ ID NO: 322307
cuuggccgggacaaauucg

SEQ ID NO: 322309 - RNA, 19 nt, Artificial Sequence
  Description of Artificial Sequence: Synthetic oligonucleotide
  Sense Strand Starting at position 47 of SEQ ID NO: 315563
cggagaggucuuuaagcau

SEQ ID NO: 322310 - RNA, 19 nt, Artificial Sequence
  Description of Artificial Sequence: Synthetic oligonucleotide
  Antisense Strand to SEQ ID NO: 322309
augcuuaaagaccucuccg

SEQ ID NO: 322311 - RNA, 19 nt, Artificial Sequence
  Description of Artificial Sequence: Synthetic oligonucleotide
  Sense Strand Starting at position 47 of SEQ ID NO: 315602
ucucgagcccucuuuguuu

SEQ ID NO: 322312 - RNA, 19 nt, Artificial Sequence
  Description of Artificial Sequence: Synthetic oligonucleotide
  Antisense Strand to SEQ ID NO: 322311
aaacaaagagggcucgaga

SEQ ID NO: 322313 - RNA, 19 nt, Artificial Sequence
  Description of Artificial Sequence: Synthetic oligonucleotide
  Sense Strand Starting at position 47 of SEQ ID NO: 315691
cguggcuccagagaggauu

SEQ ID NO: 322314 - RNA, 19 nt, Artificial Sequence
  Description of Artificial Sequence: Synthetic oligonucleotide
  Antisense Strand to SEQ ID NO: 322313
aauccucucuggagccacg

SEQ ID NO: 322315 - RNA, 19 nt, Artificial Sequence
  Description of Artificial Sequence: Synthetic oligonucleotide
  Sense Strand Starting at position 47 of SEQ ID NO: 316563
ggagcugcuggagacaauu

SEQ ID NO: 322316 - RNA, 19 nt, Artificial Sequence
  Description of Artificial Sequence: Synthetic oligonucleotide
  Antisense Strand to SEQ ID NO: 322315
aauugucuccagcagcucc

SEQ ID NO: 322317 - RNA, 19 nt, Artificial Sequence
  Description of Artificial Sequence: Synthetic oligonucleotide
  Sense Strand Starting at position 47 of SEQ ID NO: 316951
cucgacaggaagugugaau

SEQ ID NO: 322318 - RNA, 19 nt, Artificial Sequence
  Description of Artificial Sequence: Synthetic oligonucleotide
  Antisense Strand to SEQ ID NO: 322317
auucacacuuccugucgag

SEQ ID NO: 322319 - RNA, 19 nt, Artificial Sequence
  Description of Artificial Sequence: Synthetic oligonucleotide
  Sense Strand Starting at position 47 of SEQ ID NO: 316962
gugugaaucuggguuggaa

SEQ ID NO: 322320 - RNA, 19 nt, Artificial Sequence
  Description of Artificial Sequence: Synthetic oligonucleotide
  Antisense Strand to SEQ ID NO: 322319
uuccaacccagauucacac

SEQ ID NO: 322321 - RNA, 19 nt, Artificial Sequence
  Description of Artificial Sequence: Synthetic oligonucleotide
  Sense Strand Starting at position 47 of SEQ ID NO: 317229
cagugagaaccagguaauc

SEQ ID NO: 322322 - RNA, 19 nt, Artificial Sequence
  Description of Artificial Sequence: Synthetic oligonucleotide
  Antisense Strand to SEQ ID NO: 322321
gauuaccugguucucacug

SEQ ID NO: 322323 - RNA, 19 nt, Artificial Sequence
  Description of Artificial Sequence: Synthetic oligonucleotide
  Sense Strand Starting at position 47 of SEQ ID NO: 317470
ggacacuuccacugcuaga

SEQ ID NO: 322324 - RNA, 19 nt, Artificial Sequence
  Description of Artificial Sequence: Synthetic oligonucleotide
  Antisense Strand to SEQ ID NO: 322323
ucuagcaguggaagugucc

SEQ ID NO: 322325 - RNA, 19 nt, Artificial Sequence
  Description of Artificial Sequence: Synthetic oligonucleotide
  Sense Strand Starting at position 47 of SEQ ID NO: 317506
gaaagcucgcucugacaca

SEQ ID NO: 322326 - RNA, 19 nt, Artificial Sequence
  Description of Artificial Sequence: Synthetic oligonucleotide
  Antisense Strand to SEQ ID NO: 322325
ugugucagagcgagcuuuc

SEQ ID NO: 322327 - RNA, 19 nt, Artificial Sequence
  Description of Artificial Sequence: Synthetic oligonucleotide
  Sense Strand Starting at position 47 of SEQ ID NO: 317712
gcuuaauugccagggacau

SEQ ID NO: 322328 - RNA, 19 nt, Artificial Sequence
  Description of Artificial Sequence: Synthetic oligonucleotide
  Antisense Strand to SEQ ID NO: 322327
augucccuggcaauuaagc

SEQ ID NO: 322329 - RNA, 19 nt, Artificial Sequence
  Description of Artificial Sequence: Synthetic oligonucleotide
  Sense Strand Starting at position 47 of SEQ ID NO: 317713
cuuaauugccagggacauu

SEQ ID NO: 322330 - RNA, 19 nt, Artificial Sequence
  Description of Artificial Sequence: Synthetic oligonucleotide
  Antisense Strand to SEQ ID NO: 322329
aaugucccuggcaauuaag

SEQ ID NO: 322331 - RNA, 19 nt, Artificial Sequence
  Description of Artificial Sequence: Synthetic oligonucleotide
  Sense Strand Starting at position 47 of SEQ ID NO: 317828
aucugagaugauugagcaa

SEQ ID NO: 322332 - RNA, 19 nt, Artificial Sequence
  Description of Artificial Sequence: Synthetic oligonucleotide
  Antisense Strand to SEQ ID NO: 322331
uugcucaaucaucucagau

SEQ ID NO: 322333 - RNA, 19 nt, Artificial Sequence
  Description of Artificial Sequence: Synthetic oligonucleotide
  Sense Strand Starting at position 47 of SEQ ID NO: 317859
ugccaagcuacgggauauu

SEQ ID NO: 322334 - RNA, 19 nt, Artificial Sequence
  Description of Artificial Sequence: Synthetic oligonucleotide
  Antisense Strand to SEQ ID NO: 322333
aauaucccguagcuuggca

SEQ ID NO: 322335 - RNA, 19 nt, Artificial Sequence
  Description of Artificial Sequence: Synthetic oligonucleotide
  Sense Strand Starting at position 47 of SEQ ID NO: 317905
agaagcugugaucaguaua

SEQ ID NO: 322336 - RNA, 19 nt, Artificial Sequence
  Description of Artificial Sequence: Synthetic oligonucleotide
  Antisense Strand to SEQ ID NO: 322335
uauacugaucacagcuucu

SEQ ID NO: 322337 - RNA, 19 nt, Artificial Sequence
  Description of Artificial Sequence: Synthetic oligonucleotide
  Sense Strand Starting at position 47 of SEQ ID NO: 317908
agcugugaucaguauacca

SEQ ID NO: 322338 - RNA, 19 nt, Artificial Sequence
  Description of Artificial Sequence: Synthetic oligonucleotide
  Antisense Strand to SEQ ID NO: 322337
ugguauacugaucacagcu

SEQ ID NO: 322339 - RNA, 19 nt, Artificial Sequence
  Description of Artificial Sequence: Synthetic oligonucleotide
  Sense Strand Starting at position 47 of SEQ ID NO: 317910
cugugaucaguauaccacu

SEQ ID NO: 322340 - RNA, 19 nt, Artificial Sequence
  Description of Artificial Sequence: Synthetic oligonucleotide
  Antisense Strand to SEQ ID NO: 322339
agugguauacugaucacag

SEQ ID NO: 322341 - RNA, 19 nt, Artificial Sequence
  Description of Artificial Sequence: Synthetic oligonucleotide
  Sense Strand Starting at position 47 of SEQ ID NO: 317976
uuaccuuauggacagcaua

SEQ ID NO: 322342 - RNA, 19 nt, Artificial Sequence
  Description of Artificial Sequence: Synthetic oligonucleotide
  Antisense Strand to SEQ ID NO: 322341
uaugcuguccauaagguaa

SEQ ID NO: 322343 - RNA, 19 nt, Artificial Sequence
  Description of Artificial Sequence: Synthetic oligonucleotide
  Sense Strand Starting at position 47 of SEQ ID NO: 317979
ccuuauggacagcauaauu

SEQ ID NO: 322344 - RNA, 19 nt, Artificial Sequence
  Description of Artificial Sequence: Synthetic oligonucleotide
  Antisense Strand to SEQ ID NO: 322343
aauuaugcuguccauaagg

SEQ ID NO: 322345 - RNA, 19 nt, Artificial Sequence
  Description of Artificial Sequence: Synthetic oligonucleotide
  Sense Strand Starting at position 47 of SEQ ID NO: 318080
ucaggcauuugggaggaua

SEQ ID NO: 322346 - RNA, 19 nt, Artificial Sequence
  Description of Artificial Sequence: Synthetic oligonucleotide
  Antisense Strand to SEQ ID NO: 322345
uauccucccaaaugccuga

SEQ ID NO: 322347 - RNA, 19 nt, Artificial Sequence
  Description of Artificial Sequence: Synthetic oligonucleotide
  Sense Strand Starting at position 47 of SEQ ID NO: 318123
ucuugagaugguugcagaa

SEQ ID NO: 322348 - RNA, 19 nt, Artificial Sequence
  Description of Artificial Sequence: Synthetic oligonucleotide
  Antisense Strand to SEQ ID NO: 322347
uucugcaaccaucucaaga

SEQ ID NO: 322349 - RNA, 19 nt, Artificial Sequence
  Description of Artificial Sequence: Synthetic oligonucleotide
  Sense Strand Starting at position 47 of SEQ ID NO: 318136
gcagaaaggcgucaguuca

SEQ ID NO: 322350 - RNA, 19 nt, Artificial Sequence
  Description of Artificial Sequence: Synthetic oligonucleotide
  Antisense Strand to SEQ ID NO: 322349
ugaacugacgccuuucugc

SEQ ID NO: 322351 - RNA, 19 nt, Artificial Sequence
  Description of Artificial Sequence: Synthetic oligonucleotide
  Sense Strand Starting at position 47 of SEQ ID NO: 318281
augagaaaugugcauguac

SEQ ID NO: 322352 - RNA, 19 nt, Artificial Sequence
  Description of Artificial Sequence: Synthetic oligonucleotide
  Antisense Strand to SEQ ID NO: 322351
guacaugcacauuucucau

SEQ ID NO: 322353 - RNA, 19 nt, Artificial Sequence
  Description of Artificial Sequence: Synthetic oligonucleotide
  Sense Strand Starting at position 47 of SEQ ID NO: 318283
gagaaaugugcauguacuu

SEQ ID NO: 322354 - RNA, 19 nt, Artificial Sequence
  Description of Artificial Sequence: Synthetic oligonucleotide
  Antisense Strand to SEQ ID NO: 322353
aaguacaugcacauuucuc

SEQ ID NO: 322355 - RNA, 19 nt, Artificial Sequence
  Description of Artificial Sequence: Synthetic oligonucleotide
  Sense Strand Starting at position 47 of SEQ ID NO: 318397
ccagcucugcaggauaguu

SEQ ID NO: 322356 - RNA, 19 nt, Artificial Sequence
  Description of Artificial Sequence: Synthetic oligonucleotide
  Antisense Strand to SEQ ID NO: 322355
aacuauccugcagagcugg

SEQ ID NO: 322357 - RNA, 19 nt, Artificial Sequence
  Description of Artificial Sequence: Synthetic oligonucleotide
  Sense Strand Starting at position 47 of SEQ ID NO: 318405
gcaggauaguugguggaga

SEQ ID NO: 322358 - RNA, 19 nt, Artificial Sequence
  Description of Artificial Sequence: Synthetic oligonucleotide
  Antisense Strand to SEQ ID NO: 322357
ucuccaccaacuauccugc

SEQ ID NO: 322359 - RNA, 19 nt, Artificial Sequence
  Description of Artificial Sequence: Synthetic oligonucleotide
  Sense Strand Starting at position 47 of SEQ ID NO: 318409
gauaguugguggagaaggu

SEQ ID NO: 322360 - RNA, 19 nt, Artificial Sequence
  Description of Artificial Sequence: Synthetic oligonucleotide
  Antisense Strand to SEQ ID NO: 322359
accuucuccaccaacuauc

SEQ ID NO: 322361 - RNA, 19 nt, Artificial Sequence
  Description of Artificial Sequence: Synthetic oligonucleotide
  Sense Strand Starting at position 47 of SEQ ID NO: 318521
gagagaggcucucuuagug

SEQ ID NO: 322362 - RNA, 19 nt, Artificial Sequence
  Description of Artificial Sequence: Synthetic oligonucleotide
  Antisense Strand to SEQ ID NO: 322361
cacuaagagagccucucuc

SEQ ID NO: 322363 - RNA, 19 nt, Artificial Sequence
  Description of Artificial Sequence: Synthetic oligonucleotide
  Sense Strand Starting at position 47 of SEQ ID NO: 318527
ggcucucuuagugagccaa

SEQ ID NO: 322364 - RNA, 19 nt, Artificial Sequence
  Description of Artificial Sequence: Synthetic oligonucleotide
  Antisense Strand to SEQ ID NO: 322363
uuggcucacuaagagagcc

SEQ ID NO: 322365 - RNA, 19 nt, Artificial Sequence
  Description of Artificial Sequence: Synthetic oligonucleotide
  Sense Strand Starting at position 47 of SEQ ID NO: 318608
ccuccuacagguuaugauu

SEQ ID NO: 322366 - RNA, 19 nt, Artificial Sequence
  Description of Artificial Sequence: Synthetic oligonucleotide
  Antisense Strand to SEQ ID NO: 322365
aaucauaaccuguaggagg

SEQ ID NO: 322367 - RNA, 19 nt, Artificial Sequence
  Description of Artificial Sequence: Synthetic oligonucleotide
  Sense Strand Starting at position 47 of SEQ ID NO: 318617
gguuaugauucuucccaga

SEQ ID NO: 322368 - RNA, 19 nt, Artificial Sequence
  Description of Artificial Sequence: Synthetic oligonucleotide
  Antisense Strand to SEQ ID NO: 322367
ucugggaagaaucauaacc

SEQ ID NO: 322369 - RNA, 19 nt, Artificial Sequence
  Description of Artificial Sequence: Synthetic oligonucleotide
  Sense Strand Starting at position 47 of SEQ ID NO: 318619
uuaugauucuucccagaug

SEQ ID NO: 322370 - RNA, 19 nt, Artificial Sequence
  Description of Artificial Sequence: Synthetic oligonucleotide
  Antisense Strand to SEQ ID NO: 322369
caucugggaagaaucauaa

SEQ ID NO: 322371 - RNA, 19 nt, Artificial Sequence
  Description of Artificial Sequence: Synthetic oligonucleotide
  Sense Strand Starting at position 47 of SEQ ID NO: 318686
gugaccuaauucucagagu

SEQ ID NO: 322372 - RNA, 19 nt, Artificial Sequence
  Description of Artificial Sequence: Synthetic oligonucleotide
  Antisense Strand to SEQ ID NO: 322371
acucugagaauuaggucac

SEQ ID NO: 322373 - RNA, 19 nt, Artificial Sequence
  Description of Artificial Sequence: Synthetic oligonucleotide
  Sense Strand Starting at position 47 of SEQ ID NO: 318717
aggccuuugcucuaggaag

SEQ ID NO: 322374 - RNA, 19 nt, Artificial Sequence
  Description of Artificial Sequence: Synthetic oligonucleotide
  Antisense Strand to SEQ ID NO: 322373
cuuccuagagcaaaggccu

SEQ ID NO: 322375 - RNA, 19 nt, Artificial Sequence
  Description of Artificial Sequence: Synthetic oligonucleotide
  Sense Strand Starting at position 47 of SEQ ID NO: 318758
gcaucauagguguguacag

SEQ ID NO: 322376 - RNA, 19 nt, Artificial Sequence
  Description of Artificial Sequence: Synthetic oligonucleotide
  Antisense Strand to SEQ ID NO: 322375
cuguacacaccuaugaugc

SEQ ID NO: 322377 - RNA, 19 nt, Artificial Sequence
  Description of Artificial Sequence: Synthetic oligonucleotide
  Sense Strand Starting at position 47 of SEQ ID NO: 318902
aagugaguucuugguggga

SEQ ID NO: 322378 - RNA, 19 nt, Artificial Sequence
  Description of Artificial Sequence: Synthetic oligonucleotide
  Antisense Strand to SEQ ID NO: 322377
ucccaccaagaacucacuu

SEQ ID NO: 322379 - RNA, 19 nt, Artificial Sequence
  Description of Artificial Sequence: Synthetic oligonucleotide
  Sense Strand Starting at position 47 of SEQ ID NO: 319025
ggaugacuguuaguuguga

SEQ ID NO: 322380 - RNA, 19 nt, Artificial Sequence
  Description of Artificial Sequence: Synthetic oligonucleotide
  Antisense Strand to SEQ ID NO: 322379
ucacaacuaacagucaucc

SEQ ID NO: 322381 - RNA, 19 nt, Artificial Sequence
  Description of Artificial Sequence: Synthetic oligonucleotide
  Sense Strand Starting at position 47 of SEQ ID NO: 319026
gaugacuguuaguugugaa

SEQ ID NO: 322382 - RNA, 19 nt, Artificial Sequence
  Description of Artificial Sequence: Synthetic oligonucleotide
  Antisense Strand to SEQ ID NO: 322381
uucacaacuaacagucauc

SEQ ID NO: 322383 - RNA, 19 nt, Artificial Sequence
  Description of Artificial Sequence: Synthetic oligonucleotide
  Sense Strand Starting at position 47 of SEQ ID NO: 319027
augacuguuaguugugaaa

SEQ ID NO: 322384 - RNA, 19 nt, Artificial Sequence
  Description of Artificial Sequence: Synthetic oligonucleotide
  Antisense Strand to SEQ ID NO: 322383
uuucacaacuaacagucau

SEQ ID NO: 322385 - RNA, 19 nt, Artificial Sequence
  Description of Artificial Sequence: Synthetic oligonucleotide
  Sense Strand Starting at position 47 of SEQ ID NO: 319205
gggacuuucuucucuuugu

SEQ ID NO: 322386 - RNA, 19 nt, Artificial Sequence
  Description of Artificial Sequence: Synthetic oligonucleotide
  Antisense Strand to SEQ ID NO: 322385
acaaagagaagaaaguccc

SEQ ID NO: 322387 - RNA, 19 nt, Artificial Sequence
  Description of Artificial Sequence: Synthetic oligonucleotide
  Sense Strand Starting at position 48 of SEQ ID NO: 315282
ucuugacaucagugucaag

SEQ ID NO: 322388 - RNA, 19 nt, Artificial Sequence
  Description of Artificial Sequence: Synthetic oligonucleotide
  Antisense Strand to SEQ ID NO: 322387
cuugacacugaugucaaga

SEQ ID NO: 322389 - RNA, 19 nt, Artificial Sequence
  Description of Artificial Sequence: Synthetic oligonucleotide
  Sense Strand Starting at position 48 of SEQ ID NO: 315340
gaggcuguugguugagaga

SEQ ID NO: 322390 - RNA, 19 nt, Artificial Sequence
  Description of Artificial Sequence: Synthetic oligonucleotide
  Antisense Strand to SEQ ID NO: 322389
ucucucaaccaacagccuc

SEQ ID NO: 322391 - RNA, 19 nt, Artificial Sequence
  Description of Artificial Sequence: Synthetic oligonucleotide
  Sense Strand Starting at position 48 of SEQ ID NO: 315386
gccuaaagugcugggagau

SEQ ID NO: 322392 - RNA, 19 nt, Artificial Sequence
  Description of Artificial Sequence: Synthetic oligonucleotide
  Antisense Strand to SEQ ID NO: 322391
aucucccagcacuuuaggc

SEQ ID NO: 322393 - RNA, 19 nt, Artificial Sequence
  Description of Artificial Sequence: Synthetic oligonucleotide
  Sense Strand Starting at position 48 of SEQ ID NO: 315387
ccuaaagugcugggagauu

SEQ ID NO: 322394 - RNA, 19 nt, Artificial Sequence
  Description of Artificial Sequence: Synthetic oligonucleotide
  Antisense Strand to SEQ ID NO: 322393
aaucucccagcacuuuagg

SEQ ID NO: 322395 - RNA, 19 nt, Artificial Sequence
  Description of Artificial Sequence: Synthetic oligonucleotide
  Sense Strand Starting at position 48 of SEQ ID NO: 315400
gagauuauaucggagaaag

SEQ ID NO: 322396 - RNA, 19 nt, Artificial Sequence
  Description of Artificial Sequence: Synthetic oligonucleotide
  Antisense Strand to SEQ ID NO: 322395
cuuucuccgauauaaucuc

SEQ ID NO: 322397 - RNA, 19 nt, Artificial Sequence
  Description of Artificial Sequence: Synthetic oligonucleotide
  Sense Strand Starting at position 48 of SEQ ID NO: 315447
ugguucauggacuggaaau

SEQ ID NO: 322398 - RNA, 19 nt, Artificial Sequence
  Description of Artificial Sequence: Synthetic oligonucleotide
  Antisense Strand to SEQ ID NO: 322397
auuuccaguccaugaacca

SEQ ID NO: 322399 - RNA, 19 nt, Artificial Sequence
  Description of Artificial Sequence: Synthetic oligonucleotide
  Sense Strand Starting at position 48 of SEQ ID NO: 315459
uggaaaucugccugccucu

SEQ ID NO: 322400 - RNA, 19 nt, Artificial Sequence
  Description of Artificial Sequence: Synthetic oligonucleotide
  Antisense Strand to SEQ ID NO: 322399
agaggcaggcagauuucca

SEQ ID NO: 322401 - RNA, 19 nt, Artificial Sequence
  Description of Artificial Sequence: Synthetic oligonucleotide
  Sense Strand Starting at position 48 of SEQ ID NO: 315682
gcagccauucccgaucuuu

SEQ ID NO: 322402 - RNA, 19 nt, Artificial Sequence
  Description of Artificial Sequence: Synthetic oligonucleotide
  Antisense Strand to SEQ ID NO: 322401
aaagaucgggaauggcugc

SEQ ID NO: 322403 - RNA, 19 nt, Artificial Sequence
  Description of Artificial Sequence: Synthetic oligonucleotide
  Sense Strand Starting at position 48 of SEQ ID NO: 315917
ggcauuuccuaugauaauc

SEQ ID NO: 322404 - RNA, 19 nt, Artificial Sequence
  Description of Artificial Sequence: Synthetic oligonucleotide
  Antisense Strand to SEQ ID NO: 322403
gauuaucauaggaaaugcc

SEQ ID NO: 322405 - RNA, 19 nt, Artificial Sequence
  Description of Artificial Sequence: Synthetic oligonucleotide
  Sense Strand Starting at position 48 of SEQ ID NO: 315944
ggccgacucccacagagaa

SEQ ID NO: 322406 - RNA, 19 nt, Artificial Sequence
  Description of Artificial Sequence: Synthetic oligonucleotide
  Antisense Strand to SEQ ID NO: 322405
uucucugugggagucggcc

SEQ ID NO: 322407 - RNA, 19 nt, Artificial Sequence
  Description of Artificial Sequence: Synthetic oligonucleotide
  Sense Strand Starting at position 48 of SEQ ID NO: 315988
cggagccuuccugacagau

SEQ ID NO: 322408 - RNA, 19 nt, Artificial Sequence
  Description of Artificial Sequence: Synthetic oligonucleotide
  Antisense Strand to SEQ ID NO: 322407
aucugucaggaaggcuccg

SEQ ID NO: 322409 - RNA, 19 nt, Artificial Sequence
  Description of Artificial Sequence: Synthetic oligonucleotide
  Sense Strand Starting at position 48 of SEQ ID NO: 316068
cgaauuugucccggccaag

SEQ ID NO: 322410 - RNA, 19 nt, Artificial Sequence
  Description of Artificial Sequence: Synthetic oligonucleotide
  Antisense Strand to SEQ ID NO: 322409
cuuggccgggacaaauucg

SEQ ID NO: 322411 - RNA, 19 nt, Artificial Sequence
  Description of Artificial Sequence: Synthetic oligonucleotide
  Sense Strand Starting at position 48 of SEQ ID NO: 316395
cggagaggucuuuaagcau

SEQ ID NO: 322412 - RNA, 19 nt, Artificial Sequence
  Description of Artificial Sequence: Synthetic oligonucleotide
  Antisense Strand to SEQ ID NO: 322411
augcuuaaagaccucuccg

SEQ ID NO: 322413 - RNA, 19 nt, Artificial Sequence
  Description of Artificial Sequence: Synthetic oligonucleotide
  Sense Strand Starting at position 48 of SEQ ID NO: 316434
ucucgagcccucuuuguuu

SEQ ID NO: 322414 - RNA, 19 nt, Artificial Sequence
  Description of Artificial Sequence: Synthetic oligonucleotide
  Antisense Strand to SEQ ID NO: 322413
aaacaaagagggcucgaga

SEQ ID NO: 322415 - RNA, 19 nt, Artificial Sequence
  Description of Artificial Sequence: Synthetic oligonucleotide
  Sense Strand Starting at position 48 of SEQ ID NO: 316494
gcugcauucuuucuaagug

SEQ ID NO: 322416 - RNA, 19 nt, Artificial Sequence
  Description of Artificial Sequence: Synthetic oligonucleotide
  Antisense Strand to SEQ ID NO: 322415
cacuuagaaagaaugcagc

SEQ ID NO: 322417 - RNA, 19 nt, Artificial Sequence
  Description of Artificial Sequence: Synthetic oligonucleotide
  Sense Strand Starting at position 48 of SEQ ID NO: 316523
cguggcuccagagaggauu

SEQ ID NO: 322418 - RNA, 19 nt, Artificial Sequence
  Description of Artificial Sequence: Synthetic oligonucleotide
  Antisense Strand to SEQ ID NO: 322417
aauccucucuggagccacg

SEQ ID NO: 322419 - RNA, 19 nt, Artificial Sequence
  Description of Artificial Sequence: Synthetic oligonucleotide
  Sense Strand Starting at position 48 of SEQ ID NO: 317395
ggagcugcuggagacaauu

SEQ ID NO: 322420 - RNA, 19 nt, Artificial Sequence
  Description of Artificial Sequence: Synthetic oligonucleotide
  Antisense Strand to SEQ ID NO: 322419
aauugucuccagcagcucc

SEQ ID NO: 322421 - RNA, 19 nt, Artificial Sequence
  Description of Artificial Sequence: Synthetic oligonucleotide
  Sense Strand Starting at position 48 of SEQ ID NO: 317783
cucgacaggaagugugaau

SEQ ID NO: 322422 - RNA, 19 nt, Artificial Sequence
  Description of Artificial Sequence: Synthetic oligonucleotide
  Antisense Strand to SEQ ID NO: 322421
auucacacuuccugucgag

SEQ ID NO: 322423 - RNA, 19 nt, Artificial Sequence
  Description of Artificial Sequence: Synthetic oligonucleotide
  Sense Strand Starting at position 48 of SEQ ID NO: 317794
gugugaaucuggguuggaa

SEQ ID NO: 322424 - RNA, 19 nt, Artificial Sequence
  Description of Artificial Sequence: Synthetic oligonucleotide
  Antisense Strand to SEQ ID NO: 322423
uuccaacccagauucacac

SEQ ID NO: 322425 - RNA, 19 nt, Artificial Sequence
  Description of Artificial Sequence: Synthetic oligonucleotide
  Sense Strand Starting at position 48 of SEQ ID NO: 317987
cuguuaucaucccuguguu

SEQ ID NO: 322426 - RNA, 19 nt, Artificial Sequence
  Description of Artificial Sequence: Synthetic oligonucleotide
  Antisense Strand to SEQ ID NO: 322425
aacacagggaugauaacag

SEQ ID NO: 322427 - RNA, 19 nt, Artificial Sequence
  Description of Artificial Sequence: Synthetic oligonucleotide
  Sense Strand Starting at position 48 of SEQ ID NO: 317990
uuaucaucccuguguugua

SEQ ID NO: 322428 - RNA, 19 nt, Artificial Sequence
  Description of Artificial Sequence: Synthetic oligonucleotide
  Antisense Strand to SEQ ID NO: 322427
uacaacacagggaugauaa

SEQ ID NO: 322429 - RNA, 19 nt, Artificial Sequence
  Description of Artificial Sequence: Synthetic oligonucleotide
  Sense Strand Starting at position 48 of SEQ ID NO: 318061
cagugagaaccagguaauc

SEQ ID NO: 322430 - RNA, 19 nt, Artificial Sequence
  Description of Artificial Sequence: Synthetic oligonucleotide
  Antisense Strand to SEQ ID NO: 322429
gauuaccugguucucacug

SEQ ID NO: 322431 - RNA, 19 nt, Artificial Sequence
  Description of Artificial Sequence: Synthetic oligonucleotide
  Sense Strand Starting at position 48 of SEQ ID NO: 318199
gcuuuagucucuucuuuac

SEQ ID NO: 322432 - RNA, 19 nt, Artificial Sequence
  Description of Artificial Sequence: Synthetic oligonucleotide
  Antisense Strand to SEQ ID NO: 322431
guaaagaagagacuaaagc

SEQ ID NO: 322433 - RNA, 19 nt, Artificial Sequence
  Description of Artificial Sequence: Synthetic oligonucleotide
  Sense Strand Starting at position 48 of SEQ ID NO: 318302
ggacacuuccacugcuaga

SEQ ID NO: 322434 - RNA, 19 nt, Artificial Sequence
  Description of Artificial Sequence: Synthetic oligonucleotide
  Antisense Strand to SEQ ID NO: 322433
ucuagcaguggaagugucc

SEQ ID NO: 322435 - RNA, 19 nt, Artificial Sequence
  Description of Artificial Sequence: Synthetic oligonucleotide
  Sense Strand Starting at position 48 of SEQ ID NO: 318338
gaaagcucgcucugacaca

SEQ ID NO: 322436 - RNA, 19 nt, Artificial Sequence
  Description of Artificial Sequence: Synthetic oligonucleotide
  Antisense Strand to SEQ ID NO: 322435
ugugucagagcgagcuuuc

SEQ ID NO: 322437 - RNA, 19 nt, Artificial Sequence
  Description of Artificial Sequence: Synthetic oligonucleotide
  Sense Strand Starting at position 48 of SEQ ID NO: 318544
gcuuaauugccagggacau

SEQ ID NO: 322438 - RNA, 19 nt, Artificial Sequence
  Description of Artificial Sequence: Synthetic oligonucleotide
  Antisense Strand to SEQ ID NO: 322437
augucccuggcaauuaagc

SEQ ID NO: 322439 - RNA, 19 nt, Artificial Sequence
  Description of Artificial Sequence: Synthetic oligonucleotide
  Sense Strand Starting at position 48 of SEQ ID NO: 318545
cuuaauugccagggacauu

SEQ ID NO: 322440 - RNA, 19 nt, Artificial Sequence
  Description of Artificial Sequence: Synthetic oligonucleotide
  Antisense Strand to SEQ ID NO: 322439
aaugucccuggcaauuaag

SEQ ID NO: 322441 - RNA, 19 nt, Artificial Sequence
  Description of Artificial Sequence: Synthetic oligonucleotide
  Sense Strand Starting at position 48 of SEQ ID NO: 318652
gugauuggaucugagauga

SEQ ID NO: 322442 - RNA, 19 nt, Artificial Sequence
  Description of Artificial Sequence: Synthetic oligonucleotide
  Antisense Strand to SEQ ID NO: 322441
ucaucucagauccaaucac

SEQ ID NO: 322443 - RNA, 19 nt, Artificial Sequence
  Description of Artificial Sequence: Synthetic oligonucleotide
  Sense Strand Starting at position 48 of SEQ ID NO: 318660
aucugagaugauugagcaa

SEQ ID NO: 322444 - RNA, 19 nt, Artificial Sequence
  Description of Artificial Sequence: Synthetic oligonucleotide
  Antisense Strand to SEQ ID NO: 322443
uugcucaaucaucucagau

SEQ ID NO: 322445 - RNA, 19 nt, Artificial Sequence
  Description of Artificial Sequence: Synthetic oligonucleotide
  Sense Strand Starting at position 48 of SEQ ID NO: 318691
ugccaagcuacgggauauu

SEQ ID NO: 322446 - RNA, 19 nt, Artificial Sequence
  Description of Artificial Sequence: Synthetic oligonucleotide
  Antisense Strand to SEQ ID NO: 322445
aauaucccguagcuuggca

SEQ ID NO: 322447 - RNA, 19 nt, Artificial Sequence
  Description of Artificial Sequence: Synthetic oligonucleotide
  Sense Strand Starting at position 48 of SEQ ID NO: 318737
agaagcugugaucaguaua

SEQ ID NO: 322448 - RNA, 19 nt, Artificial Sequence
  Description of Artificial Sequence: Synthetic oligonucleotide
  Antisense Strand to SEQ ID NO: 322447
uauacugaucacagcuucu

SEQ ID NO: 322449 - RNA, 19 nt, Artificial Sequence
  Description of Artificial Sequence: Synthetic oligonucleotide
  Sense Strand Starting at position 48 of SEQ ID NO: 318740
agcugugaucaguauacca

SEQ ID NO: 322450 - RNA, 19 nt, Artificial Sequence
  Description of Artificial Sequence: Synthetic oligonucleotide
  Antisense Strand to SEQ ID NO: 322449
ugguauacugaucacagcu

SEQ ID NO: 322451 - RNA, 19 nt, Artificial Sequence
  Description of Artificial Sequence: Synthetic oligonucleotide
  Sense Strand Starting at position 48 of SEQ ID NO: 318742
cugugaucaguauaccacu

SEQ ID NO: 322452 - RNA, 19 nt, Artificial Sequence
  Description of Artificial Sequence: Synthetic oligonucleotide
  Antisense Strand to SEQ ID NO: 322451
agugguauacugaucacag

SEQ ID NO: 322453 - RNA, 19 nt, Artificial Sequence
  Description of Artificial Sequence: Synthetic oligonucleotide
  Sense Strand Starting at position 48 of SEQ ID NO: 318808
uuaccuuauggacagcaua

SEQ ID NO: 322454 - RNA, 19 nt, Artificial Sequence
  Description of Artificial Sequence: Synthetic oligonucleotide
  Antisense Strand to SEQ ID NO: 322453
uaugcuguccauaagguaa

SEQ ID NO: 322455 - RNA, 19 nt, Artificial Sequence
  Description of Artificial Sequence: Synthetic oligonucleotide
  Sense Strand Starting at position 48 of SEQ ID NO: 318811
ccuuauggacagcauaauu

SEQ ID NO: 322456 - RNA, 19 nt, Artificial Sequence
  Description of Artificial Sequence: Synthetic oligonucleotide
  Antisense Strand to SEQ ID NO: 322455
aauuaugcuguccauaagg

SEQ ID NO: 322457 - RNA, 19 nt, Artificial Sequence
  Description of Artificial Sequence: Synthetic oligonucleotide
  Sense Strand Starting at position 48 of SEQ ID NO: 318912
ucaggcauuugggaggaua

SEQ ID NO: 322458 - RNA, 19 nt, Artificial Sequence
  Description of Artificial Sequence: Synthetic oligonucleotide
  Antisense Strand to SEQ ID NO: 322457
uauccucccaaaugccuga

SEQ ID NO: 322459 - RNA, 19 nt, Artificial Sequence
  Description of Artificial Sequence: Synthetic oligonucleotide
  Sense Strand Starting at position 48 of SEQ ID NO: 318955
ucuugagaugguugcagaa

SEQ ID NO: 322460 - RNA, 19 nt, Artificial Sequence
  Description of Artificial Sequence: Synthetic oligonucleotide
  Antisense Strand to SEQ ID NO: 322459
uucugcaaccaucucaaga

SEQ ID NO: 322461 - RNA, 19 nt, Artificial Sequence
  Description of Artificial Sequence: Synthetic oligonucleotide
  Sense Strand Starting at position 48 of SEQ ID NO: 318968
gcagaaaggcgucaguuca

SEQ ID NO: 322462 - RNA, 19 nt, Artificial Sequence
  Description of Artificial Sequence: Synthetic oligonucleotide
  Antisense Strand to SEQ ID NO: 322461
ugaacugacgccuuucugc

SEQ ID NO: 322463 - RNA, 19 nt, Artificial Sequence
  Description of Artificial Sequence: Synthetic oligonucleotide
  Sense Strand Starting at position 48 of SEQ ID NO: 319113
augagaaaugugcauguac

SEQ ID NO: 322464 - RNA, 19 nt, Artificial Sequence
  Description of Artificial Sequence: Synthetic oligonucleotide
  Antisense Strand to SEQ ID NO: 322463
guacaugcacauuucucau

SEQ ID NO: 322465 - RNA, 19 nt, Artificial Sequence
  Description of Artificial Sequence: Synthetic oligonucleotide
  Sense Strand Starting at position 48 of SEQ ID NO: 319115
gagaaaugugcauguacuu

SEQ ID NO: 322466 - RNA, 19 nt, Artificial Sequence
  Description of Artificial Sequence: Synthetic oligonucleotide
  Antisense Strand to SEQ ID NO: 322465
aaguacaugcacauuucuc

SEQ ID NO: 322467 - RNA, 19 nt, Artificial Sequence
  Description of Artificial Sequence: Synthetic oligonucleotide
  Sense Strand Starting at position 49 of SEQ ID NO: 315428
gcagcagugccugagacua

SEQ ID NO: 322468 - RNA, 19 nt, Artificial Sequence
  Description of Artificial Sequence: Synthetic oligonucleotide
  Antisense Strand to SEQ ID NO: 322467
uagucucaggcacugcugc

SEQ ID NO: 322469 - RNA, 19 nt, Artificial Sequence
  Description of Artificial Sequence: Synthetic oligonucleotide
  Sense Strand Starting at position 49 of SEQ ID NO: 315729
caggauuacagguguuuga

SEQ ID NO: 322470 - RNA, 19 nt, Artificial Sequence
  Description of Artificial Sequence: Synthetic oligonucleotide
  Antisense Strand to SEQ ID NO: 322469
ucaaacaccuguaauccug

SEQ ID NO: 322471 - RNA, 19 nt, Artificial Sequence
  Description of Artificial Sequence: Synthetic oligonucleotide
  Sense Strand Starting at position 49 of SEQ ID NO: 315733
auuacagguguuugaguca

SEQ ID NO: 322472 - RNA, 19 nt, Artificial Sequence
  Description of Artificial Sequence: Synthetic oligonucleotide
  Antisense Strand to SEQ ID NO: 322471
ugacucaaacaccuguaau

SEQ ID NO: 322473 - RNA, 19 nt, Artificial Sequence
  Description of Artificial Sequence: Synthetic oligonucleotide
  Sense Strand Starting at position 49 of SEQ ID NO: 315807
gccagagagcagcauauua

SEQ ID NO: 322474 - RNA, 19 nt, Artificial Sequence
  Description of Artificial Sequence: Synthetic oligonucleotide
  Antisense Strand to SEQ ID NO: 322473
uaauaugcugcucucuggc

SEQ ID NO: 322475 - RNA, 19 nt, Artificial Sequence
  Description of Artificial Sequence: Synthetic oligonucleotide
  Sense Strand Starting at position 49 of SEQ ID NO: 315838
ggccuccuagccugaugua

SEQ ID NO: 322476 - RNA, 19 nt, Artificial Sequence
  Description of Artificial Sequence: Synthetic oligonucleotide
  Antisense Strand to SEQ ID NO: 322475
uacaucaggcuaggaggcc

SEQ ID NO: 322477 - RNA, 19 nt, Artificial Sequence
  Description of Artificial Sequence: Synthetic oligonucleotide
  Sense Strand Starting at position 49 of SEQ ID NO: 315853
uguaguaagacugggauau

SEQ ID NO: 322478 - RNA, 19 nt, Artificial Sequence
  Description of Artificial Sequence: Synthetic oligonucleotide
  Antisense Strand to SEQ ID NO: 322477
auaucccagucuuacuaca

SEQ ID NO: 322479 - RNA, 19 nt, Artificial Sequence
  Description of Artificial Sequence: Synthetic oligonucleotide
  Sense Strand Starting at position 49 of SEQ ID NO: 315854
guaguaagacugggauauu

SEQ ID NO: 322480 - RNA, 19 nt, Artificial Sequence
  Description of Artificial Sequence: Synthetic oligonucleotide
  Antisense Strand to SEQ ID NO: 322479
aauaucccagucuuacuac

SEQ ID NO: 322481 - RNA, 19 nt, Artificial Sequence
  Description of Artificial Sequence: Synthetic oligonucleotide
  Sense Strand Starting at position 49 of SEQ ID NO: 315855
uaguaagacugggauauuc

SEQ ID NO: 322482 - RNA, 19 nt, Artificial Sequence
  Description of Artificial Sequence: Synthetic oligonucleotide
  Antisense Strand to SEQ ID NO: 322481
gaauaucccagucuuacua

SEQ ID NO: 322483 - RNA, 19 nt, Artificial Sequence
  Description of Artificial Sequence: Synthetic oligonucleotide
  Sense Strand Starting at position 49 of SEQ ID NO: 315879
ccuacaaaugucugugucu

SEQ ID NO: 322484 - RNA, 19 nt, Artificial Sequence
  Description of Artificial Sequence: Synthetic oligonucleotide
  Antisense Strand to SEQ ID NO: 322483
agacacagacauuuguagg

SEQ ID NO: 322485 - RNA, 19 nt, Artificial Sequence
  Description of Artificial Sequence: Synthetic oligonucleotide
  Sense Strand Starting at position 49 of SEQ ID NO: 315886
augucugugucucuggaaa

SEQ ID NO: 322486 - RNA, 19 nt, Artificial Sequence
  Description of Artificial Sequence: Synthetic oligonucleotide
  Antisense Strand to SEQ ID NO: 322485
uuuccagagacacagacau

SEQ ID NO: 322487 - RNA, 19 nt, Artificial Sequence
  Description of Artificial Sequence: Synthetic oligonucleotide
  Sense Strand Starting at position 49 of SEQ ID NO: 315900
ggaaaugacucagggauuc

SEQ ID NO: 322488 - RNA, 19 nt, Artificial Sequence
  Description of Artificial Sequence: Synthetic oligonucleotide
  Antisense Strand to SEQ ID NO: 322487
gaaucccugagucauuucc

SEQ ID NO: 322489 - RNA, 19 nt, Artificial Sequence
  Description of Artificial Sequence: Synthetic oligonucleotide
  Sense Strand Starting at position 49 of SEQ ID NO: 315910
cagggauucuguccaagac

SEQ ID NO: 322490 - RNA, 19 nt, Artificial Sequence
  Description of Artificial Sequence: Synthetic oligonucleotide
  Antisense Strand to SEQ ID NO: 322489
gucuuggacagaaucccug

SEQ ID NO: 322491 - RNA, 19 nt, Artificial Sequence
  Description of Artificial Sequence: Synthetic oligonucleotide
  Sense Strand Starting at position 49 of SEQ ID NO: 315914
gauucuguccaagacugca

SEQ ID NO: 322492 - RNA, 19 nt, Artificial Sequence
  Description of Artificial Sequence: Synthetic oligonucleotide
  Antisense Strand to SEQ ID NO: 322491
ugcagucuuggacagaauc

SEQ ID NO: 322493 - RNA, 19 nt, Artificial Sequence
  Description of Artificial Sequence: Synthetic oligonucleotide
  Sense Strand Starting at position 49 of SEQ ID NO: 315937
cugagaagcuguguuugac

SEQ ID NO: 322494 - RNA, 19 nt, Artificial Sequence
  Description of Artificial Sequence: Synthetic oligonucleotide
  Antisense Strand to SEQ ID NO: 322493
gucaaacacagcuucucag

SEQ ID NO: 322495 - RNA, 19 nt, Artificial Sequence
  Description of Artificial Sequence: Synthetic oligonucleotide
  Sense Strand Starting at position 49 of SEQ ID NO: 315940
agaagcuguguuugacuca

SEQ ID NO: 322496 - RNA, 19 nt, Artificial Sequence
  Description of Artificial Sequence: Synthetic oligonucleotide
  Antisense Strand to SEQ ID NO: 322495
ugagucaaacacagcuucu

SEQ ID NO: 322497 - RNA, 19 nt, Artificial Sequence
  Description of Artificial Sequence: Synthetic oligonucleotide
  Sense Strand Starting at position 49 of SEQ ID NO: 315947
guguuugacucaucucugu

SEQ ID NO: 322498 - RNA, 19 nt, Artificial Sequence
  Description of Artificial Sequence: Synthetic oligonucleotide
  Antisense Strand to SEQ ID NO: 322497
acagagaugagucaaacac

SEQ ID NO: 322499 - RNA, 19 nt, Artificial Sequence
  Description of Artificial Sequence: Synthetic oligonucleotide
  Sense Strand Starting at position 49 of SEQ ID NO: 316000
gcuggcucaugacuaagaa

SEQ ID NO: 322500 - RNA, 19 nt, Artificial Sequence
  Description of Artificial Sequence: Synthetic oligonucleotide
  Antisense Strand to SEQ ID NO: 322499
uucuuagucaugagccagc

SEQ ID NO: 322501 - RNA, 19 nt, Artificial Sequence
  Description of Artificial Sequence: Synthetic oligonucleotide
  Sense Strand Starting at position 49 of SEQ ID NO: 316055
uggucuuagcucugcaaug

SEQ ID NO: 322502 - RNA, 19 nt, Artificial Sequence
  Description of Artificial Sequence: Synthetic oligonucleotide
  Antisense Strand to SEQ ID NO: 322501
cauugcagagcuaagacca

SEQ ID NO: 322503 - RNA, 19 nt, Artificial Sequence
  Description of Artificial Sequence: Synthetic oligonucleotide
  Sense Strand Starting at position 49 of SEQ ID NO: 316057
gucuuagcucugcaauguc

SEQ ID NO: 322504 - RNA, 19 nt, Artificial Sequence
  Description of Artificial Sequence: Synthetic oligonucleotide
  Antisense Strand to SEQ ID NO: 322503
gacauugcagagcuaagac

SEQ ID NO: 322505 - RNA, 19 nt, Artificial Sequence
  Description of Artificial Sequence: Synthetic oligonucleotide
  Sense Strand Starting at position 49 of SEQ ID NO: 316257
ugguucuacacguggcaaa

SEQ ID NO: 322506 - RNA, 19 nt, Artificial Sequence
  Description of Artificial Sequence: Synthetic oligonucleotide
  Antisense Strand to SEQ ID NO: 322505
uuugccacguguagaacca

SEQ ID NO: 322507 - RNA, 19 nt, Artificial Sequence
  Description of Artificial Sequence: Synthetic oligonucleotide
  Sense Strand Starting at position 49 of SEQ ID NO: 316537
accucuagcucuucugaga

SEQ ID NO: 322508 - RNA, 19 nt, Artificial Sequence
  Description of Artificial Sequence: Synthetic oligonucleotide
  Antisense Strand to SEQ ID NO: 322507
ucucagaagagcuagaggu

SEQ ID NO: 322509 - RNA, 19 nt, Artificial Sequence
  Description of Artificial Sequence: Synthetic oligonucleotide
  Sense Strand Starting at position 49 of SEQ ID NO: 316554
gaaggcuguccuuggaauc

SEQ ID NO: 322510 - RNA, 19 nt, Artificial Sequence
  Description of Artificial Sequence: Synthetic oligonucleotide
  Antisense Strand to SEQ ID NO: 322509
gauuccaaggacagccuuc

SEQ ID NO: 322511 - RNA, 19 nt, Artificial Sequence
  Description of Artificial Sequence: Synthetic oligonucleotide
  Sense Strand Starting at position 49 of SEQ ID NO: 316666
gcauaugagacacgucaaa

SEQ ID NO: 322512 - RNA, 19 nt, Artificial Sequence
  Description of Artificial Sequence: Synthetic oligonucleotide
  Antisense Strand to SEQ ID NO: 322511
uuugacgugucucauaugc

SEQ ID NO: 322513 - RNA, 19 nt, Artificial Sequence
  Description of Artificial Sequence: Synthetic oligonucleotide
  Sense Strand Starting at position 49 of SEQ ID NO: 317335
ggcugaaaggucugaauca

SEQ ID NO: 322514 - RNA, 19 nt, Artificial Sequence
  Description of Artificial Sequence: Synthetic oligonucleotide
  Antisense Strand to SEQ ID NO: 322513
ugauucagaccuuucagcc

SEQ ID NO: 322515 - RNA, 19 nt, Artificial Sequence
  Description of Artificial Sequence: Synthetic oligonucleotide
  Sense Strand Starting at position 49 of SEQ ID NO: 317429
acaguagucuguccucaug

SEQ ID NO: 322516 - RNA, 19 nt, Artificial Sequence
  Description of Artificial Sequence: Synthetic oligonucleotide
  Antisense Strand to SEQ ID NO: 322515
caugaggacagacuacugu

SEQ ID NO: 322517 - RNA, 19 nt, Artificial Sequence
  Description of Artificial Sequence: Synthetic oligonucleotide
  Sense Strand Starting at position 49 of SEQ ID NO: 317619
gaggacuacugcuucguca

SEQ ID NO: 322518 - RNA, 19 nt, Artificial Sequence
  Description of Artificial Sequence: Synthetic oligonucleotide
  Antisense Strand to SEQ ID NO: 322517
ugacgaagcaguaguccuc

SEQ ID NO: 322519 - RNA, 19 nt, Artificial Sequence
  Description of Artificial Sequence: Synthetic oligonucleotide
  Sense Strand Starting at position 49 of SEQ ID NO: 317630
cuucgucacgcuuuccgaa

SEQ ID NO: 322520 - RNA, 19 nt, Artificial Sequence
  Description of Artificial Sequence: Synthetic oligonucleotide
  Antisense Strand to SEQ ID NO: 322519
uucggaaagcgugacgaag

SEQ ID NO: 322521 - RNA, 19 nt, Artificial Sequence
  Description of Artificial Sequence: Synthetic oligonucleotide
  Sense Strand Starting at position 49 of SEQ ID NO: 317660
gggcuauguaagugaccuu

SEQ ID NO: 322522 - RNA, 19 nt, Artificial Sequence
  Description of Artificial Sequence: Synthetic oligonucleotide
  Antisense Strand to SEQ ID NO: 322521
aaggucacuuacauagccc

SEQ ID NO: 322523 - RNA, 19 nt, Artificial Sequence
  Description of Artificial Sequence: Synthetic oligonucleotide
  Sense Strand Starting at position 49 of SEQ ID NO: 317900
cacuuaaugguuggacuga

SEQ ID NO: 322524 - RNA, 19 nt, Artificial Sequence
  Description of Artificial Sequence: Synthetic oligonucleotide
  Antisense Strand to SEQ ID NO: 322523
ucaguccaaccauuaagug

SEQ ID NO: 322525 - RNA, 19 nt, Artificial Sequence
  Description of Artificial Sequence: Synthetic oligonucleotide
  Sense Strand Starting at position 49 of SEQ ID NO: 317916
ugaguuaaugcaggacuua

SEQ ID NO: 322526 - RNA, 19 nt, Artificial Sequence
  Description of Artificial Sequence: Synthetic oligonucleotide
  Antisense Strand to SEQ ID NO: 322525
uaaguccugcauuaacuca

SEQ ID NO: 322527 - RNA, 19 nt, Artificial Sequence
  Description of Artificial Sequence: Synthetic oligonucleotide
  Sense Strand Starting at position 49 of SEQ ID NO: 317985
cacgguugaucucucauua

SEQ ID NO: 322528 - RNA, 19 nt, Artificial Sequence
  Description of Artificial Sequence: Synthetic oligonucleotide
  Antisense Strand to SEQ ID NO: 322527
uaaugagagaucaaccgug

SEQ ID NO: 322529 - RNA, 19 nt, Artificial Sequence
  Description of Artificial Sequence: Synthetic oligonucleotide
  Sense Strand Starting at position 49 of SEQ ID NO: 317989
guugaucucucauuaugcu

SEQ ID NO: 322530 - RNA, 19 nt, Artificial Sequence
  Description of Artificial Sequence: Synthetic oligonucleotide
  Antisense Strand to SEQ ID NO: 322529
agcauaaugagagaucaac

SEQ ID NO: 322531 - RNA, 19 nt, Artificial Sequence
  Description of Artificial Sequence: Synthetic oligonucleotide
  Sense Strand Starting at position 49 of SEQ ID NO: 317996
ucucauuaugcugagcaua

SEQ ID NO: 322532 - RNA, 19 nt, Artificial Sequence
  Description of Artificial Sequence: Synthetic oligonucleotide
  Antisense Strand to SEQ ID NO: 322531
uaugcucagcauaaugaga

SEQ ID NO: 322533 - RNA, 19 nt, Artificial Sequence
  Description of Artificial Sequence: Synthetic oligonucleotide
  Sense Strand Starting at position 49 of SEQ ID NO: 317998
ucauuaugcugagcauauc

SEQ ID NO: 322534 - RNA, 19 nt, Artificial Sequence
  Description of Artificial Sequence: Synthetic oligonucleotide
  Antisense Strand to SEQ ID NO: 322533
gauaugcucagcauaauga

SEQ ID NO: 322535 - RNA, 19 nt, Artificial Sequence
  Description of Artificial Sequence: Synthetic oligonucleotide
  Sense Strand Starting at position 49 of SEQ ID NO: 318006
cugagcauaucucuuggaa

SEQ ID NO: 322536 - RNA, 19 nt, Artificial Sequence
  Description of Artificial Sequence: Synthetic oligonucleotide
  Antisense Strand to SEQ ID NO: 322535
uuccaagagauaugcucag

SEQ ID NO: 322537 - RNA, 19 nt, Artificial Sequence
  Description of Artificial Sequence: Synthetic oligonucleotide
  Sense Strand Starting at position 49 of SEQ ID NO: 318009
agcauaucucuuggaaagg

SEQ ID NO: 322538 - RNA, 19 nt, Artificial Sequence
  Description of Artificial Sequence: Synthetic oligonucleotide
  Antisense Strand to SEQ ID NO: 322537
ccuuuccaagagauaugcu

SEQ ID NO: 322539 - RNA, 19 nt, Artificial Sequence
  Description of Artificial Sequence: Synthetic oligonucleotide
  Sense Strand Starting at position 49 of SEQ ID NO: 318358
agagaugugcuuugggcua

SEQ ID NO: 322540 - RNA, 19 nt, Artificial Sequence
  Description of Artificial Sequence: Synthetic oligonucleotide
  Antisense Strand to SEQ ID NO: 322539
uagcccaaagcacaucucu

SEQ ID NO: 322541 - RNA, 19 nt, Artificial Sequence
  Description of Artificial Sequence: Synthetic oligonucleotide
  Sense Strand Starting at position 49 of SEQ ID NO: 318955
cuguuucuuccucaagugu

SEQ ID NO: 322542 - RNA, 19 nt, Artificial Sequence
  Description of Artificial Sequence: Synthetic oligonucleotide
  Antisense Strand to SEQ ID NO: 322541
acacuugaggaagaaacag

SEQ ID NO: 322543 - RNA, 19 nt, Artificial Sequence
  Description of Artificial Sequence: Synthetic oligonucleotide
  Sense Strand Starting at position 49 of SEQ ID NO: 319115
cagggauucucaguaagua

SEQ ID NO: 322544 - RNA, 19 nt, Artificial Sequence
  Description of Artificial Sequence: Synthetic oligonucleotide
  Antisense Strand to SEQ ID NO: 322543
uacuuacugagaaucccug

SEQ ID NO: 322545 - RNA, 19 nt, Artificial Sequence
  Description of Artificial Sequence: Synthetic oligonucleotide
  Sense Strand Starting at position 49 of SEQ ID NO: 319209
ggagcucaugcugaaguaa

SEQ ID NO: 322546 - RNA, 19 nt, Artificial Sequence
  Description of Artificial Sequence: Synthetic oligonucleotide
  Antisense Strand to SEQ ID NO: 322545
uuacuucagcaugagcucc

SEQ ID NO: 322547 - RNA, 19 nt, Artificial Sequence
  Description of Artificial Sequence: Synthetic oligonucleotide
  Sense Strand Starting at position 50 of SEQ ID NO: 315691
cacagauuggugugggaaa

SEQ ID NO: 322548 - RNA, 19 nt, Artificial Sequence
  Description of Artificial Sequence: Synthetic oligonucleotide
  Antisense Strand to SEQ ID NO: 322547
uuucccacaccaaucugug

SEQ ID NO: 322549 - RNA, 19 nt, Artificial Sequence
  Description of Artificial Sequence: Synthetic oligonucleotide
  Sense Strand Starting at position 50 of SEQ ID NO: 315793
gggcuuaauuaauccagua

SEQ ID NO: 322550 - RNA, 19 nt, Artificial Sequence
  Description of Artificial Sequence: Synthetic oligonucleotide
  Antisense Strand to SEQ ID NO: 322549
uacuggauuaauuaagccc

SEQ ID NO: 322551 - RNA, 19 nt, Artificial Sequence
  Description of Artificial Sequence: Synthetic oligonucleotide
  Sense Strand Starting at position 50 of SEQ ID NO: 315812
cucaauaauuaaccgagua

SEQ ID NO: 322552 - RNA, 19 nt, Artificial Sequence
  Description of Artificial Sequence: Synthetic oligonucleotide
  Antisense Strand to SEQ ID NO: 322551
uacucgguuaauuauugag

SEQ ID NO: 322553 - RNA, 19 nt, Artificial Sequence
  Description of Artificial Sequence: Synthetic oligonucleotide
  Sense Strand Starting at position 50 of SEQ ID NO: 315824
ccgaguacuacccagugga

SEQ ID NO: 322554 - RNA, 19 nt, Artificial Sequence
  Description of Artificial Sequence: Synthetic oligonucleotide
  Antisense Strand to SEQ ID NO: 322553
uccacuggguaguacucgg

SEQ ID NO: 322555 - RNA, 19 nt, Artificial Sequence
  Description of Artificial Sequence: Synthetic oligonucleotide
  Sense Strand Starting at position 50 of SEQ ID NO: 315827
aguacuacccaguggauaa

SEQ ID NO: 322556 - RNA, 19 nt, Artificial Sequence
  Description of Artificial Sequence: Synthetic oligonucleotide
  Antisense Strand to SEQ ID NO: 322555
uuauccacuggguaguacu

SEQ ID NO: 322557 - RNA, 19 nt, Artificial Sequence
  Description of Artificial Sequence: Synthetic oligonucleotide
  Sense Strand Starting at position 50 of SEQ ID NO: 315949
gggauacccuucucacuuu

SEQ ID NO: 322558 - RNA, 19 nt, Artificial Sequence
  Description of Artificial Sequence: Synthetic oligonucleotide
  Antisense Strand to SEQ ID NO: 322557
aaagugagaaggguauccc

SEQ ID NO: 322559 - RNA, 19 nt, Artificial Sequence
  Description of Artificial Sequence: Synthetic oligonucleotide
  Sense Strand Starting at position 50 of SEQ ID NO: 316122
uggucaauugcucagguau

SEQ ID NO: 322560 - RNA, 19 nt, Artificial Sequence
  Description of Artificial Sequence: Synthetic oligonucleotide
  Antisense Strand to SEQ ID NO: 322559
auaccugagcaauugacca

SEQ ID NO: 322561 - RNA, 19 nt, Artificial Sequence
  Description of Artificial Sequence: Synthetic oligonucleotide
  Sense Strand Starting at position 50 of SEQ ID NO: 316173
acccaugauuccuuaguag

SEQ ID NO: 322562 - RNA, 19 nt, Artificial Sequence
  Description of Artificial Sequence: Synthetic oligonucleotide
  Antisense Strand to SEQ ID NO: 322561
cuacuaaggaaucaugggu

SEQ ID NO: 322563 - RNA, 19 nt, Artificial Sequence
  Description of Artificial Sequence: Synthetic oligonucleotide
  Sense Strand Starting at position 50 of SEQ ID NO: 316184
cuuaguagaucuuuccaca

SEQ ID NO: 322564 - RNA, 19 nt, Artificial Sequence
  Description of Artificial Sequence: Synthetic oligonucleotide
  Antisense Strand to SEQ ID NO: 322563
uguggaaagaucuacuaag

SEQ ID NO: 322565 - RNA, 19 nt, Artificial Sequence
  Description of Artificial Sequence: Synthetic oligonucleotide
  Sense Strand Starting at position 50 of SEQ ID NO: 316328
gcaggcgucagcucuugaa

SEQ ID NO: 322566 - RNA, 19 nt, Artificial Sequence
  Description of Artificial Sequence: Synthetic oligonucleotide
  Antisense Strand to SEQ ID NO: 322565
uucaagagcugacgccugc

SEQ ID NO: 322567 - RNA, 19 nt, Artificial Sequence
  Description of Artificial Sequence: Synthetic oligonucleotide
  Sense Strand Starting at position 50 of SEQ ID NO: 316747
agaugaaugucuuuccaaa

SEQ ID NO: 322568 - RNA, 19 nt, Artificial Sequence
  Description of Artificial Sequence: Synthetic oligonucleotide
  Antisense Strand to SEQ ID NO: 322567
uuuggaaagacauucaucu

SEQ ID NO: 322569 - RNA, 19 nt, Artificial Sequence
  Description of Artificial Sequence: Synthetic oligonucleotide
  Sense Strand Starting at position 50 of SEQ ID NO: 317955
aauagugaguugguuuaaa

SEQ ID NO: 322570 - RNA, 19 nt, Artificial Sequence
  Description of Artificial Sequence: Synthetic oligonucleotide
  Antisense Strand to SEQ ID NO: 322569
uuuaaaccaacucacuauu

SEQ ID NO: 322571 - RNA, 19 nt, Artificial Sequence
  Description of Artificial Sequence: Synthetic oligonucleotide
  Sense Strand Starting at position 50 of SEQ ID NO: 317985
guacaagagguacggaaau

SEQ ID NO: 322572 - RNA, 19 nt, Artificial Sequence
  Description of Artificial Sequence: Synthetic oligonucleotide
  Antisense Strand to SEQ ID NO: 322571
auuuccguaccucuuguac

SEQ ID NO: 322573 - RNA, 19 nt, Artificial Sequence
  Description of Artificial Sequence: Synthetic oligonucleotide
  Sense Strand Starting at position 50 of SEQ ID NO: 318007
gcauaaaucguggacugaa

SEQ ID NO: 322574 - RNA, 19 nt, Artificial Sequence
  Description of Artificial Sequence: Synthetic oligonucleotide
  Antisense Strand to SEQ ID NO: 322573
uucaguccacgauuuaugc

SEQ ID NO: 322575 - RNA, 19 nt, Artificial Sequence
  Description of Artificial Sequence: Synthetic oligonucleotide
  Sense Strand Starting at position 50 of SEQ ID NO: 318010
uaaaucguggacugaaauu

SEQ ID NO: 322576 - RNA, 19 nt, Artificial Sequence
  Description of Artificial Sequence: Synthetic oligonucleotide
  Antisense Strand to SEQ ID NO: 322575
aauuucaguccacgauuua

SEQ ID NO: 322577 - RNA, 19 nt, Artificial Sequence
  Description of Artificial Sequence: Synthetic oligonucleotide
  Sense Strand Starting at position 50 of SEQ ID NO: 318082
aaggacgguuucuuaggaa

SEQ ID NO: 322578 - RNA, 19 nt, Artificial Sequence
  Description of Artificial Sequence: Synthetic oligonucleotide
  Antisense Strand to SEQ ID NO: 322577
uuccuaagaaaccguccuu

SEQ ID NO: 322579 - RNA, 19 nt, Artificial Sequence
  Description of Artificial Sequence: Synthetic oligonucleotide
  Sense Strand Starting at position 50 of SEQ ID NO: 318089
guuucuuaggaacacuuua

SEQ ID NO: 322580 - RNA, 19 nt, Artificial Sequence
  Description of Artificial Sequence: Synthetic oligonucleotide
  Antisense Strand to SEQ ID NO: 322579
uaaaguguuccuaagaaac

SEQ ID NO: 322581 - RNA, 19 nt, Artificial Sequence
  Description of Artificial Sequence: Synthetic oligonucleotide
  Sense Strand Starting at position 50 of SEQ ID NO: 318241
cugauaugcacagaguagu

SEQ ID NO: 322582 - RNA, 19 nt, Artificial Sequence
  Description of Artificial Sequence: Synthetic oligonucleotide
  Antisense Strand to SEQ ID NO: 322581
acuacucugugcauaucag

SEQ ID NO: 322583 - RNA, 19 nt, Artificial Sequence
  Description of Artificial Sequence: Synthetic oligonucleotide
  Sense Strand Starting at position 50 of SEQ ID NO: 318354
uccucaagugcuugcauuu

SEQ ID NO: 322584 - RNA, 19 nt, Artificial Sequence
  Description of Artificial Sequence: Synthetic oligonucleotide
  Antisense Strand to SEQ ID NO: 322583
aaaugcaagcacuugagga

SEQ ID NO: 322585 - RNA, 19 nt, Artificial Sequence
  Description of Artificial Sequence: Synthetic oligonucleotide
  Sense Strand Starting at position 50 of SEQ ID NO: 318391
aaucauaaggaucguugau

SEQ ID NO: 322586 - RNA, 19 nt, Artificial Sequence
  Description of Artificial Sequence: Synthetic oligonucleotide
  Antisense Strand to SEQ ID NO: 322585
aucaacgauccuuaugauu

SEQ ID NO: 322587 - RNA, 19 nt, Artificial Sequence
  Description of Artificial Sequence: Synthetic oligonucleotide
  Sense Strand Starting at position 50 of SEQ ID NO: 318393
ucauaaggaucguugauua

SEQ ID NO: 322588 - RNA, 19 nt, Artificial Sequence
  Description of Artificial Sequence: Synthetic oligonucleotide
  Antisense Strand to SEQ ID NO: 322587
uaaucaacgauccuuauga

SEQ ID NO: 322589 - RNA, 19 nt, Artificial Sequence
  Description of Artificial Sequence: Synthetic oligonucleotide
  Sense Strand Starting at position 50 of SEQ ID NO: 318397
aaggaucguugauuagauu

SEQ ID NO: 322590 - RNA, 19 nt, Artificial Sequence
  Description of Artificial Sequence: Synthetic oligonucleotide
  Antisense Strand to SEQ ID NO: 322589
aaucuaaucaacgauccuu

SEQ ID NO: 322591 - RNA, 19 nt, Artificial Sequence
  Description of Artificial Sequence: Synthetic oligonucleotide
  Sense Strand Starting at position 50 of SEQ ID NO: 318454
ucuuauuuggcaugcagua

SEQ ID NO: 322592 - RNA, 19 nt, Artificial Sequence
  Description of Artificial Sequence: Synthetic oligonucleotide
  Antisense Strand to SEQ ID NO: 322591
uacugcaugccaaauaaga

SEQ ID NO: 322593 - RNA, 19 nt, Artificial Sequence
  Description of Artificial Sequence: Synthetic oligonucleotide
  Sense Strand Starting at position 50 of SEQ ID NO: 318516
uggcauuaucagugaucag

SEQ ID NO: 322594 - RNA, 19 nt, Artificial Sequence
  Description of Artificial Sequence: Synthetic oligonucleotide
  Antisense Strand to SEQ ID NO: 322593
cugaucacugauaaugcca

SEQ ID NO: 322595 - RNA, 19 nt, Artificial Sequence
  Description of Artificial Sequence: Synthetic oligonucleotide
  Sense Strand Starting at position 50 of SEQ ID NO: 318517
ggcauuaucagugaucagg

SEQ ID NO: 322596 - RNA, 19 nt, Artificial Sequence
  Description of Artificial Sequence: Synthetic oligonucleotide
  Antisense Strand to SEQ ID NO: 322595
ccugaucacugauaaugcc

SEQ ID NO: 322597 - RNA, 19 nt, Artificial Sequence
  Description of Artificial Sequence: Synthetic oligonucleotide
  Sense Strand Starting at position 50 of SEQ ID NO: 318519
cauuaucagugaucagggu

SEQ ID NO: 322598 - RNA, 19 nt, Artificial Sequence
  Description of Artificial Sequence: Synthetic oligonucleotide
  Antisense Strand to SEQ ID NO: 322597
acccugaucacugauaaug

SEQ ID NO: 322599 - RNA, 19 nt, Artificial Sequence
  Description of Artificial Sequence: Synthetic oligonucleotide
  Sense Strand Starting at position 50 of SEQ ID NO: 318523
aucagugaucaggguagua

SEQ ID NO: 322600 - RNA, 19 nt, Artificial Sequence
  Description of Artificial Sequence: Synthetic oligonucleotide
  Antisense Strand to SEQ ID NO: 322599
uacuacccugaucacugau

SEQ ID NO: 322601 - RNA, 19 nt, Artificial Sequence
  Description of Artificial Sequence: Synthetic oligonucleotide
  Sense Strand Starting at position 50 of SEQ ID NO: 318525
cagugaucaggguaguaaa

SEQ ID NO: 322602 - RNA, 19 nt, Artificial Sequence
  Description of Artificial Sequence: Synthetic oligonucleotide
  Antisense Strand to SEQ ID NO: 322601
uuuacuacccugaucacug

SEQ ID NO: 322603 - RNA, 19 nt, Artificial Sequence
  Description of Artificial Sequence: Synthetic oligonucleotide
  Sense Strand Starting at position 50 of SEQ ID NO: 318564
aguagagauuuauaaacag

SEQ ID NO: 322604 - RNA, 19 nt, Artificial Sequence
  Description of Artificial Sequence: Synthetic oligonucleotide
  Antisense Strand to SEQ ID NO: 322603
cuguuuauaaaucucuacu

SEQ ID NO: 322605 - RNA, 19 nt, Artificial Sequence
  Description of Artificial Sequence: Synthetic oligonucleotide
  Sense Strand Starting at position 50 of SEQ ID NO: 318694
uugcuuaguccuuucuguu

SEQ ID NO: 322606 - RNA, 19 nt, Artificial Sequence
  Description of Artificial Sequence: Synthetic oligonucleotide
  Antisense Strand to SEQ ID NO: 322605
aacagaaaggacuaagcaa

SEQ ID NO: 322607 - RNA, 19 nt, Artificial Sequence
  Description of Artificial Sequence: Synthetic oligonucleotide
  Sense Strand Starting at position 50 of SEQ ID NO: 318786
augucaacuugacuugaaa

SEQ ID NO: 322608 - RNA, 19 nt, Artificial Sequence
  Description of Artificial Sequence: Synthetic oligonucleotide
  Antisense Strand to SEQ ID NO: 322607
uuucaagucaaguugacau

SEQ ID NO: 322609 - RNA, 19 nt, Artificial Sequence
  Description of Artificial Sequence: Synthetic oligonucleotide
  Sense Strand Starting at position 50 of SEQ ID NO: 318846
aucuccgaucuuuauguua

SEQ ID NO: 322610 - RNA, 19 nt, Artificial Sequence
  Description of Artificial Sequence: Synthetic oligonucleotide
  Antisense Strand to SEQ ID NO: 322609
uaacauaaagaucggagau

SEQ ID NO: 322611 - RNA, 19 nt, Artificial Sequence
  Description of Artificial Sequence: Synthetic oligonucleotide
  Sense Strand Starting at position 50 of SEQ ID NO: 318849
uccgaucuuuauguuauuu

SEQ ID NO: 322612 - RNA, 19 nt, Artificial Sequence
  Description of Artificial Sequence: Synthetic oligonucleotide
  Antisense Strand to SEQ ID NO: 322611
aaauaacauaaagaucgga

SEQ ID NO: 322613 - RNA, 19 nt, Artificial Sequence
  Description of Artificial Sequence: Synthetic oligonucleotide
  Sense Strand Starting at position 50 of SEQ ID NO: 318921
acaguacugucauuacaca

SEQ ID NO: 322614 - RNA, 19 nt, Artificial Sequence
  Description of Artificial Sequence: Synthetic oligonucleotide
  Antisense Strand to SEQ ID NO: 322613
uguguaaugacaguacugu

SEQ ID NO: 322615 - RNA, 19 nt, Artificial Sequence
  Description of Artificial Sequence: Synthetic oligonucleotide
  Sense Strand Starting at position 50 of SEQ ID NO: 319020
acaauuagcuuguuugaac

SEQ ID NO: 322616 - RNA, 19 nt, Artificial Sequence
  Description of Artificial Sequence: Synthetic oligonucleotide
  Antisense Strand to SEQ ID NO: 322615
guucaaacaagcuaauugu

SEQ ID NO: 322617 - RNA, 19 nt, Artificial Sequence
  Description of Artificial Sequence: Synthetic oligonucleotide
  Sense Strand Starting at position 50 of SEQ ID NO: 319049
cagggaucugccuauugug

SEQ ID NO: 322618 - RNA, 19 nt, Artificial Sequence
  Description of Artificial Sequence: Synthetic oligonucleotide
  Antisense Strand to SEQ ID NO: 322617
cacaauaggcagaucccug

SEQ ID NO: 322619 - RNA, 19 nt, Artificial Sequence
  Description of Artificial Sequence: Synthetic oligonucleotide
  Sense Strand Starting at position 50 of SEQ ID NO: 319116
uaguuauagcuaugggauu

SEQ ID NO: 322620 - RNA, 19 nt, Artificial Sequence
  Description of Artificial Sequence: Synthetic oligonucleotide
  Antisense Strand to SEQ ID NO: 322619
aaucccauagcuauaacua

SEQ ID NO: 322621 - RNA, 19 nt, Artificial Sequence
  Description of Artificial Sequence: Synthetic oligonucleotide
  Sense Strand Starting at position 50 of SEQ ID NO: 319118
guuauagcuaugggauuag

SEQ ID NO: 322622 - RNA, 19 nt, Artificial Sequence
  Description of Artificial Sequence: Synthetic oligonucleotide
  Antisense Strand to SEQ ID NO: 322621
cuaaucccauagcuauaac

SEQ ID NO: 322623 - RNA, 19 nt, Artificial Sequence
  Description of Artificial Sequence: Synthetic oligonucleotide
  Sense Strand Starting at position 50 of SEQ ID NO: 319167
gcagauugcaucgcacagu

SEQ ID NO: 322624 - RNA, 19 nt, Artificial Sequence
  Description of Artificial Sequence: Synthetic oligonucleotide
  Antisense Strand to SEQ ID NO: 322623
acugugcgaugcaaucugc

SEQ ID NO: 322625 - RNA, 19 nt, Artificial Sequence
  Description of Artificial Sequence: Synthetic oligonucleotide
  Sense Strand Starting at position 50 of SEQ ID NO: 319211
cuuuguguccucuaaacca

SEQ ID NO: 322626 - RNA, 19 nt, Artificial Sequence
  Description of Artificial Sequence: Synthetic oligonucleotide
  Antisense Strand to SEQ ID NO: 322625
ugguuuagaggacacaaag

SEQ ID NO: 322627 - RNA, 19 nt, Artificial Sequence
  Description of Artificial Sequence: Synthetic oligonucleotide
  Sense Strand Starting at position 51 of SEQ ID NO: 315237
ucgcauaguccaguuuagu

SEQ ID NO: 322628 - RNA, 19 nt, Artificial Sequence
  Description of Artificial Sequence: Synthetic oligonucleotide
  Antisense Strand to SEQ ID NO: 322627
acuaaacuggacuaugcga

SEQ ID NO: 322629 - RNA, 19 nt, Artificial Sequence
  Description of Artificial Sequence: Synthetic oligonucleotide
  Sense Strand Starting at position 51 of SEQ ID NO: 315725
cacagauuggugugggaaa

SEQ ID NO: 322630 - RNA, 19 nt, Artificial Sequence
  Description of Artificial Sequence: Synthetic oligonucleotide
  Antisense Strand to SEQ ID NO: 322629
uuucccacaccaaucugug

SEQ ID NO: 322631 - RNA, 19 nt, Artificial Sequence
  Description of Artificial Sequence: Synthetic oligonucleotide
  Sense Strand Starting at position 51 of SEQ ID NO: 315827
gggcuuaauuaauccagua

SEQ ID NO: 322632 - RNA, 19 nt, Artificial Sequence
  Description of Artificial Sequence: Synthetic oligonucleotide
  Antisense Strand to SEQ ID NO: 322631
uacuggauuaauuaagccc

SEQ ID NO: 322633 - RNA, 19 nt, Artificial Sequence
  Description of Artificial Sequence: Synthetic oligonucleotide
  Sense Strand Starting at position 51 of SEQ ID NO: 315846
cucaauaauuaaccgagua

SEQ ID NO: 322634 - RNA, 19 nt, Artificial Sequence
  Description of Artificial Sequence: Synthetic oligonucleotide
  Antisense Strand to SEQ ID NO: 322633
uacucgguuaauuauugag

SEQ ID NO: 322635 - RNA, 19 nt, Artificial Sequence
  Description of Artificial Sequence: Synthetic oligonucleotide
  Sense Strand Starting at position 51 of SEQ ID NO: 315858
ccgaguacuacccagugga

SEQ ID NO: 322636 - RNA, 19 nt, Artificial Sequence
  Description of Artificial Sequence: Synthetic oligonucleotide
  Antisense Strand to SEQ ID NO: 322635
uccacuggguaguacucgg

SEQ ID NO: 322637 - RNA, 19 nt, Artificial Sequence
  Description of Artificial Sequence: Synthetic oligonucleotide
  Sense Strand Starting at position 51 of SEQ ID NO: 315861
aguacuacccaguggauaa

SEQ ID NO: 322638 - RNA, 19 nt, Artificial Sequence
  Description of Artificial Sequence: Synthetic oligonucleotide
  Antisense Strand to SEQ ID NO: 322637
uuauccacuggguaguacu

SEQ ID NO: 322639 - RNA, 19 nt, Artificial Sequence
  Description of Artificial Sequence: Synthetic oligonucleotide
  Sense Strand Starting at position 51 of SEQ ID NO: 315983
gggauacccuucucacuuu

SEQ ID NO: 322640 - RNA, 19 nt, Artificial Sequence
  Description of Artificial Sequence: Synthetic oligonucleotide
  Antisense Strand to SEQ ID NO: 322639
aaagugagaaggguauccc

SEQ ID NO: 322641 - RNA, 19 nt, Artificial Sequence
  Description of Artificial Sequence: Synthetic oligonucleotide
  Sense Strand Starting at position 51 of SEQ ID NO: 316156
uggucaauugcucagguau

SEQ ID NO: 322642 - RNA, 19 nt, Artificial Sequence
  Description of Artificial Sequence: Synthetic oligonucleotide
  Antisense Strand to SEQ ID NO: 322641
auaccugagcaauugacca

SEQ ID NO: 322643 - RNA, 19 nt, Artificial Sequence
  Description of Artificial Sequence: Synthetic oligonucleotide
  Sense Strand Starting at position 51 of SEQ ID NO: 316207
acccaugauuccuuaguag

SEQ ID NO: 322644 - RNA, 19 nt, Artificial Sequence
  Description of Artificial Sequence: Synthetic oligonucleotide
  Antisense Strand to SEQ ID NO: 322643
cuacuaaggaaucaugggu

SEQ ID NO: 322645 - RNA, 19 nt, Artificial Sequence
  Description of Artificial Sequence: Synthetic oligonucleotide
  Sense Strand Starting at position 51 of SEQ ID NO: 316218
cuuaguagaucuuuccaca

SEQ ID NO: 322646 - RNA, 19 nt, Artificial Sequence
  Description of Artificial Sequence: Synthetic oligonucleotide
  Antisense Strand to SEQ ID NO: 322645
uguggaaagaucuacuaag

SEQ ID NO: 322647 - RNA, 19 nt, Artificial Sequence
  Description of Artificial Sequence: Synthetic oligonucleotide
  Sense Strand Starting at position 51 of SEQ ID NO: 316362
gcaggcgucagcucuugaa

SEQ ID NO: 322648 - RNA, 19 nt, Artificial Sequence
  Description of Artificial Sequence: Synthetic oligonucleotide
  Antisense Strand to SEQ ID NO: 322647
uucaagagcugacgccugc

SEQ ID NO: 322649 - RNA, 19 nt, Artificial Sequence
  Description of Artificial Sequence: Synthetic oligonucleotide
  Sense Strand Starting at position 51 of SEQ ID NO: 316781
agaugaaugucuuuccaaa

SEQ ID NO: 322650 - RNA, 19 nt, Artificial Sequence
  Description of Artificial Sequence: Synthetic oligonucleotide
  Antisense Strand to SEQ ID NO: 322649
uuuggaaagacauucaucu

SEQ ID NO: 322651 - RNA, 19 nt, Artificial Sequence
  Description of Artificial Sequence: Synthetic oligonucleotide
  Sense Strand Starting at position 51 of SEQ ID NO: 317989
aauagugaguugguuuaaa

SEQ ID NO: 322652 - RNA, 19 nt, Artificial Sequence
  Description of Artificial Sequence: Synthetic oligonucleotide
  Antisense Strand to SEQ ID NO: 322651
uuuaaaccaacucacuauu

SEQ ID NO: 322653 - RNA, 19 nt, Artificial Sequence
  Description of Artificial Sequence: Synthetic oligonucleotide
  Sense Strand Starting at position 51 of SEQ ID NO: 318019
guacaagagguacggaaau

SEQ ID NO: 322654 - RNA, 19 nt, Artificial Sequence
  Description of Artificial Sequence: Synthetic oligonucleotide
  Antisense Strand to SEQ ID NO: 322653
auuuccguaccucuuguac

SEQ ID NO: 322655 - RNA, 19 nt, Artificial Sequence
  Description of Artificial Sequence: Synthetic oligonucleotide
  Sense Strand Starting at position 51 of SEQ ID NO: 318041
gcauaaaucguggacugaa

SEQ ID NO: 322656 - RNA, 19 nt, Artificial Sequence
  Description of Artificial Sequence: Synthetic oligonucleotide
  Antisense Strand to SEQ ID NO: 322655
uucaguccacgauuuaugc

SEQ ID NO: 322657 - RNA, 19 nt, Artificial Sequence
  Description of Artificial Sequence: Synthetic oligonucleotide
  Sense Strand Starting at position 51 of SEQ ID NO: 318044
uaaaucguggacugaaauu

SEQ ID NO: 322658 - RNA, 19 nt, Artificial Sequence
  Description of Artificial Sequence: Synthetic oligonucleotide
  Antisense Strand to SEQ ID NO: 322657
aauuucaguccacgauuua

SEQ ID NO: 322659 - RNA, 19 nt, Artificial Sequence
  Description of Artificial Sequence: Synthetic oligonucleotide
  Sense Strand Starting at position 51 of SEQ ID NO: 318116
aaggacgguuucuuaggaa

SEQ ID NO: 322660 - RNA, 19 nt, Artificial Sequence
  Description of Artificial Sequence: Synthetic oligonucleotide
  Antisense Strand to SEQ ID NO: 322659
uuccuaagaaaccguccuu

SEQ ID NO: 322661 - RNA, 19 nt, Artificial Sequence
  Description of Artificial Sequence: Synthetic oligonucleotide
  Sense Strand Starting at position 51 of SEQ ID NO: 318123
guuucuuaggaacacuuua

SEQ ID NO: 322662 - RNA, 19 nt, Artificial Sequence
  Description of Artificial Sequence: Synthetic oligonucleotide
  Antisense Strand to SEQ ID NO: 322661
uaaaguguuccuaagaaac

SEQ ID NO: 322663 - RNA, 19 nt, Artificial Sequence
  Description of Artificial Sequence: Synthetic oligonucleotide
  Sense Strand Starting at position 51 of SEQ ID NO: 318275
cugauaugcacagaguagu

SEQ ID NO: 322664 - RNA, 19 nt, Artificial Sequence
  Description of Artificial Sequence: Synthetic oligonucleotide
  Antisense Strand to SEQ ID NO: 322663
acuacucugugcauaucag

SEQ ID NO: 322665 - RNA, 19 nt, Artificial Sequence
  Description of Artificial Sequence: Synthetic oligonucleotide
  Sense Strand Starting at position 51 of SEQ ID NO: 318388
uccucaagugcuugcauuu

SEQ ID NO: 322666 - RNA, 19 nt, Artificial Sequence
  Description of Artificial Sequence: Synthetic oligonucleotide
  Antisense Strand to SEQ ID NO: 322665
aaaugcaagcacuugagga

SEQ ID NO: 322667 - RNA, 19 nt, Artificial Sequence
  Description of Artificial Sequence: Synthetic oligonucleotide
  Sense Strand Starting at position 51 of SEQ ID NO: 318425
aaucauaaggaucguugau

SEQ ID NO: 322668 - RNA, 19 nt, Artificial Sequence
  Description of Artificial Sequence: Synthetic oligonucleotide
  Antisense Strand to SEQ ID NO: 322667
aucaacgauccuuaugauu

SEQ ID NO: 322669 - RNA, 19 nt, Artificial Sequence
  Description of Artificial Sequence: Synthetic oligonucleotide
  Sense Strand Starting at position 51 of SEQ ID NO: 318427
ucauaaggaucguugauua

SEQ ID NO: 322670 - RNA, 19 nt, Artificial Sequence
  Description of Artificial Sequence: Synthetic oligonucleotide
  Antisense Strand to SEQ ID NO: 322669
uaaucaacgauccuuauga

SEQ ID NO: 322671 - RNA, 19 nt, Artificial Sequence
  Description of Artificial Sequence: Synthetic oligonucleotide
  Sense Strand Starting at position 51 of SEQ ID NO: 318431
aaggaucguugauuagauu

SEQ ID NO: 322672 - RNA, 19 nt, Artificial Sequence
  Description of Artificial Sequence: Synthetic oligonucleotide
  Antisense Strand to SEQ ID NO: 322671
aaucuaaucaacgauccuu

SEQ ID NO: 322673 - RNA, 19 nt, Artificial Sequence
  Description of Artificial Sequence: Synthetic oligonucleotide
  Sense Strand Starting at position 51 of SEQ ID NO: 318488
ucuuauuuggcaugcagua

SEQ ID NO: 322674 - RNA, 19 nt, Artificial Sequence
  Description of Artificial Sequence: Synthetic oligonucleotide
  Antisense Strand to SEQ ID NO: 322673
uacugcaugccaaauaaga

SEQ ID NO: 322675 - RNA, 19 nt, Artificial Sequence
  Description of Artificial Sequence: Synthetic oligonucleotide
  Sense Strand Starting at position 51 of SEQ ID NO: 318550
uggcauuaucagugaucag

SEQ ID NO: 322676 - RNA, 19 nt, Artificial Sequence
  Description of Artificial Sequence: Synthetic oligonucleotide
  Antisense Strand to SEQ ID NO: 322675
cugaucacugauaaugcca

SEQ ID NO: 322677 - RNA, 19 nt, Artificial Sequence
  Description of Artificial Sequence: Synthetic oligonucleotide
  Sense Strand Starting at position 51 of SEQ ID NO: 318551
ggcauuaucagugaucagg

SEQ ID NO: 322678 - RNA, 19 nt, Artificial Sequence
  Description of Artificial Sequence: Synthetic oligonucleotide
  Antisense Strand to SEQ ID NO: 322677
ccugaucacugauaaugcc

SEQ ID NO: 322679 - RNA, 19 nt, Artificial Sequence
  Description of Artificial Sequence: Synthetic oligonucleotide
  Sense Strand Starting at position 51 of SEQ ID NO: 318553
cauuaucagugaucagggu

SEQ ID NO: 322680 - RNA, 19 nt, Artificial Sequence
  Description of Artificial Sequence: Synthetic oligonucleotide
  Antisense Strand to SEQ ID NO: 322679
acccugaucacugauaaug

SEQ ID NO: 322681 - RNA, 19 nt, Artificial Sequence
  Description of Artificial Sequence: Synthetic oligonucleotide
  Sense Strand Starting at position 51 of SEQ ID NO: 318557
aucagugaucaggguagua

SEQ ID NO: 322682 - RNA, 19 nt, Artificial Sequence
  Description of Artificial Sequence: Synthetic oligonucleotide
  Antisense Strand to SEQ ID NO: 322681
uacuacccugaucacugau

SEQ ID NO: 322683 - RNA, 19 nt, Artificial Sequence
  Description of Artificial Sequence: Synthetic oligonucleotide
  Sense Strand Starting at position 51 of SEQ ID NO: 318559
cagugaucaggguaguaaa

SEQ ID NO: 322684 - RNA, 19 nt, Artificial Sequence
  Description of Artificial Sequence: Synthetic oligonucleotide
  Antisense Strand to SEQ ID NO: 322683
uuuacuacccugaucacug

SEQ ID NO: 322685 - RNA, 19 nt, Artificial Sequence
  Description of Artificial Sequence: Synthetic oligonucleotide
  Sense Strand Starting at position 51 of SEQ ID NO: 318598
aguagagauuuauaaacag

SEQ ID NO: 322686 - RNA, 19 nt, Artificial Sequence
  Description of Artificial Sequence: Synthetic oligonucleotide
  Antisense Strand to SEQ ID NO: 322685
cuguuuauaaaucucuacu

SEQ ID NO: 322687 - RNA, 19 nt, Artificial Sequence
  Description of Artificial Sequence: Synthetic oligonucleotide
  Sense Strand Starting at position 51 of SEQ ID NO: 318728
uugcuuaguccuuucuguu

SEQ ID NO: 322688 - RNA, 19 nt, Artificial Sequence
  Description of Artificial Sequence: Synthetic oligonucleotide
  Antisense Strand to SEQ ID NO: 322687
aacagaaaggacuaagcaa

SEQ ID NO: 322689 - RNA, 19 nt, Artificial Sequence
  Description of Artificial Sequence: Synthetic oligonucleotide
  Sense Strand Starting at position 51 of SEQ ID NO: 318820
augucaacuugacuugaaa

SEQ ID NO: 322690 - RNA, 19 nt, Artificial Sequence
  Description of Artificial Sequence: Synthetic oligonucleotide
  Antisense Strand to SEQ ID NO: 322689
uuucaagucaaguugacau

SEQ ID NO: 322691 - RNA, 19 nt, Artificial Sequence
  Description of Artificial Sequence: Synthetic oligonucleotide
  Sense Strand Starting at position 51 of SEQ ID NO: 318880
aucuccgaucuuuauguua

SEQ ID NO: 322692 - RNA, 19 nt, Artificial Sequence
  Description of Artificial Sequence: Synthetic oligonucleotide
  Antisense Strand to SEQ ID NO: 322691
uaacauaaagaucggagau

SEQ ID NO: 322693 - RNA, 19 nt, Artificial Sequence
  Description of Artificial Sequence: Synthetic oligonucleotide
  Sense Strand Starting at position 51 of SEQ ID NO: 318883
uccgaucuuuauguuauuu

SEQ ID NO: 322694 - RNA, 19 nt, Artificial Sequence
  Description of Artificial Sequence: Synthetic oligonucleotide
  Antisense Strand to SEQ ID NO: 322693
aaauaacauaaagaucgga

SEQ ID NO: 322695 - RNA, 19 nt, Artificial Sequence
  Description of Artificial Sequence: Synthetic oligonucleotide
  Sense Strand Starting at position 51 of SEQ ID NO: 318955
acaguacugucauuacaca

SEQ ID NO: 322696 - RNA, 19 nt, Artificial Sequence
  Description of Artificial Sequence: Synthetic oligonucleotide
  Antisense Strand to SEQ ID NO: 322695
uguguaaugacaguacugu

SEQ ID NO: 322697 - RNA, 19 nt, Artificial Sequence
  Description of Artificial Sequence: Synthetic oligonucleotide
  Sense Strand Starting at position 51 of SEQ ID NO: 319054
acaauuagcuuguuugaac

SEQ ID NO: 322698 - RNA, 19 nt, Artificial Sequence
  Description of Artificial Sequence: Synthetic oligonucleotide
  Antisense Strand to SEQ ID NO: 322697
guucaaacaagcuaauugu

SEQ ID NO: 322699 - RNA, 19 nt, Artificial Sequence
  Description of Artificial Sequence: Synthetic oligonucleotide
  Sense Strand Starting at position 51 of SEQ ID NO: 319083
cagggaucugccuauugug

SEQ ID NO: 322700 - RNA, 19 nt, Artificial Sequence
  Description of Artificial Sequence: Synthetic oligonucleotide
  Antisense Strand to SEQ ID NO: 322699
cacaauaggcagaucccug

SEQ ID NO: 322701 - RNA, 19 nt, Artificial Sequence
  Description of Artificial Sequence: Synthetic oligonucleotide
  Sense Strand Starting at position 51 of SEQ ID NO: 319150
uaguuauagcuaugggauu

SEQ ID NO: 322702 - RNA, 19 nt, Artificial Sequence
  Description of Artificial Sequence: Synthetic oligonucleotide
  Antisense Strand to SEQ ID NO: 322701
aaucccauagcuauaacua

SEQ ID NO: 322703 - RNA, 19 nt, Artificial Sequence
  Description of Artificial Sequence: Synthetic oligonucleotide
  Sense Strand Starting at position 51 of SEQ ID NO: 319152
guuauagcuaugggauuag

SEQ ID NO: 322704 - RNA, 19 nt, Artificial Sequence
  Description of Artificial Sequence: Synthetic oligonucleotide
  Antisense Strand to SEQ ID NO: 322703
cuaaucccauagcuauaac

SEQ ID NO: 322705 - RNA, 19 nt, Artificial Sequence
  Description of Artificial Sequence: Synthetic oligonucleotide
  Sense Strand Starting at position 51 of SEQ ID NO: 319201
gcagauugcaucgcacagu

SEQ ID NO: 322706 - RNA, 19 nt, Artificial Sequence
  Description of Artificial Sequence: Synthetic oligonucleotide
  Antisense Strand to SEQ ID NO: 322705
acugugcgaugcaaucugc

SEQ ID NO: 322707 - RNA, 19 nt, Artificial Sequence
  Description of Artificial Sequence: Synthetic oligonucleotide
  Sense Strand Starting at position 52 of SEQ ID NO: 315693
cacagauuggugugggaaa

SEQ ID NO: 322708 - RNA, 19 nt, Artificial Sequence
  Description of Artificial Sequence: Synthetic oligonucleotide
  Antisense Strand to SEQ ID NO: 322707
uuucccacaccaaucugug

SEQ ID NO: 322709 - RNA, 19 nt, Artificial Sequence
  Description of Artificial Sequence: Synthetic oligonucleotide
  Sense Strand Starting at position 52 of SEQ ID NO: 315795
gggcuuaauuaauccagua

SEQ ID NO: 322710 - RNA, 19 nt, Artificial Sequence
  Description of Artificial Sequence: Synthetic oligonucleotide
  Antisense Strand to SEQ ID NO: 322709
uacuggauuaauuaagccc

SEQ ID NO: 322711 - RNA, 19 nt, Artificial Sequence
  Description of Artificial Sequence: Synthetic oligonucleotide
  Sense Strand Starting at position 52 of SEQ ID NO: 315814
cucaauaauuaaccgagua

SEQ ID NO: 322712 - RNA, 19 nt, Artificial Sequence
  Description of Artificial Sequence: Synthetic oligonucleotide
  Antisense Strand to SEQ ID NO: 322711
uacucgguuaauuauugag

SEQ ID NO: 322713 - RNA, 19 nt, Artificial Sequence
  Description of Artificial Sequence: Synthetic oligonucleotide
  Sense Strand Starting at position 52 of SEQ ID NO: 315826
ccgaguacuacccagugga

SEQ ID NO: 322714 - RNA, 19 nt, Artificial Sequence
  Description of Artificial Sequence: Synthetic oligonucleotide
  Antisense Strand to SEQ ID NO: 322713
uccacuggguaguacucgg

SEQ ID NO: 322715 - RNA, 19 nt, Artificial Sequence
  Description of Artificial Sequence: Synthetic oligonucleotide
  Sense Strand Starting at position 52 of SEQ ID NO: 315829
aguacuacccaguggauaa

SEQ ID NO: 322716 - RNA, 19 nt, Artificial Sequence
  Description of Artificial Sequence: Synthetic oligonucleotide
  Antisense Strand to SEQ ID NO: 322715
uuauccacuggguaguacu

SEQ ID NO: 322717 - RNA, 19 nt, Artificial Sequence
  Description of Artificial Sequence: Synthetic oligonucleotide
  Sense Strand Starting at position 52 of SEQ ID NO: 315951
gggauacccuucucacuuu

SEQ ID NO: 322718 - RNA, 19 nt, Artificial Sequence
  Description of Artificial Sequence: Synthetic oligonucleotide
  Antisense Strand to SEQ ID NO: 322717
aaagugagaaggguauccc

SEQ ID NO: 322719 - RNA, 19 nt, Artificial Sequence
  Description of Artificial Sequence: Synthetic oligonucleotide
  Sense Strand Starting at position 52 of SEQ ID NO: 316124
uggucaauugcucagguau

SEQ ID NO: 322720 - RNA, 19 nt, Artificial Sequence
  Description of Artificial Sequence: Synthetic oligonucleotide
  Antisense Strand to SEQ ID NO: 322719
auaccugagcaauugacca

SEQ ID NO: 322721 - RNA, 19 nt, Artificial Sequence
  Description of Artificial Sequence: Synthetic oligonucleotide
  Sense Strand Starting at position 52 of SEQ ID NO: 316175
acccaugauuccuuaguag

SEQ ID NO: 322722 - RNA, 19 nt, Artificial Sequence
  Description of Artificial Sequence: Synthetic oligonucleotide
  Antisense Strand to SEQ ID NO: 322721
cuacuaaggaaucaugggu

SEQ ID NO: 322723 - RNA, 19 nt, Artificial Sequence
  Description of Artificial Sequence: Synthetic oligonucleotide
  Sense Strand Starting at position 52 of SEQ ID NO: 316186
cuuaguagaucuuuccaca

SEQ ID NO: 322724 - RNA, 19 nt, Artificial Sequence
  Description of Artificial Sequence: Synthetic oligonucleotide
  Antisense Strand to SEQ ID NO: 322723
uguggaaagaucuacuaag

SEQ ID NO: 322725 - RNA, 19 nt, Artificial Sequence
  Description of Artificial Sequence: Synthetic oligonucleotide
  Sense Strand Starting at position 52 of SEQ ID NO: 316330
gcaggcgucagcucuugaa

SEQ ID NO: 322726 - RNA, 19 nt, Artificial Sequence
  Description of Artificial Sequence: Synthetic oligonucleotide
  Antisense Strand to SEQ ID NO: 322725
uucaagagcugacgccugc

SEQ ID NO: 322727 - RNA, 19 nt, Artificial Sequence
  Description of Artificial Sequence: Synthetic oligonucleotide
  Sense Strand Starting at position 52 of SEQ ID NO: 316749
agaugaaugucuuuccaaa

SEQ ID NO: 322728 - RNA, 19 nt, Artificial Sequence
  Description of Artificial Sequence: Synthetic oligonucleotide
  Antisense Strand to SEQ ID NO: 322727
uuuggaaagacauucaucu

SEQ ID NO: 322729 - RNA, 19 nt, Artificial Sequence
  Description of Artificial Sequence: Synthetic oligonucleotide
  Sense Strand Starting at position 52 of SEQ ID NO: 317957
aauagugaguugguuuaaa

SEQ ID NO: 322730 - RNA, 19 nt, Artificial Sequence
  Description of Artificial Sequence: Synthetic oligonucleotide
  Antisense Strand to SEQ ID NO: 322729
uuuaaaccaacucacuauu

SEQ ID NO: 322731 - RNA, 19 nt, Artificial Sequence
  Description of Artificial Sequence: Synthetic oligonucleotide
  Sense Strand Starting at position 52 of SEQ ID NO: 317987
guacaagagguacggaaau

SEQ ID NO: 322732 - RNA, 19 nt, Artificial Sequence
  Description of Artificial Sequence: Synthetic oligonucleotide
  Antisense Strand to SEQ ID NO: 322731
auuuccguaccucuuguac

SEQ ID NO: 322733 - RNA, 19 nt, Artificial Sequence
  Description of Artificial Sequence: Synthetic oligonucleotide
  Sense Strand Starting at position 52 of SEQ ID NO: 318009
gcauaaaucguggacugaa

SEQ ID NO: 322734 - RNA, 19 nt, Artificial Sequence
  Description of Artificial Sequence: Synthetic oligonucleotide
  Antisense Strand to SEQ ID NO: 322733
uucaguccacgauuuaugc

SEQ ID NO: 322735 - RNA, 19 nt, Artificial Sequence
  Description of Artificial Sequence: Synthetic oligonucleotide
  Sense Strand Starting at position 52 of SEQ ID NO: 318012
uaaaucguggacugaaauu

SEQ ID NO: 322736 - RNA, 19 nt, Artificial Sequence
  Description of Artificial Sequence: Synthetic oligonucleotide
  Antisense Strand to SEQ ID NO: 322735
aauuucaguccacgauuua

SEQ ID NO: 322737 - RNA, 19 nt, Artificial Sequence
  Description of Artificial Sequence: Synthetic oligonucleotide
  Sense Strand Starting at position 52 of SEQ ID NO: 318084
aaggacgguuucuuaggaa

SEQ ID NO: 322738 - RNA, 19 nt, Artificial Sequence
  Description of Artificial Sequence: Synthetic oligonucleotide
  Antisense Strand to SEQ ID NO: 322737
uuccuaagaaaccguccuu

SEQ ID NO: 322739 - RNA, 19 nt, Artificial Sequence
  Description of Artificial Sequence: Synthetic oligonucleotide
  Sense Strand Starting at position 52 of SEQ ID NO: 318091
guuucuuaggaacacuuua

SEQ ID NO: 322740 - RNA, 19 nt, Artificial Sequence
  Description of Artificial Sequence: Synthetic oligonucleotide
  Antisense Strand to SEQ ID NO: 322739
uaaaguguuccuaagaaac

SEQ ID NO: 322741 - RNA, 19 nt, Artificial Sequence
  Description of Artificial Sequence: Synthetic oligonucleotide
  Sense Strand Starting at position 52 of SEQ ID NO: 318243
cugauaugcacagaguagu

SEQ ID NO: 322742 - RNA, 19 nt, Artificial Sequence
  Description of Artificial Sequence: Synthetic oligonucleotide
  Antisense Strand to SEQ ID NO: 322741
acuacucugugcauaucag

SEQ ID NO: 322743 - RNA, 19 nt, Artificial Sequence
  Description of Artificial Sequence: Synthetic oligonucleotide
  Sense Strand Starting at position 52 of SEQ ID NO: 318356
uccucaagugcuugcauuu

SEQ ID NO: 322744 - RNA, 19 nt, Artificial Sequence
  Description of Artificial Sequence: Synthetic oligonucleotide
  Antisense Strand to SEQ ID NO: 322743
aaaugcaagcacuugagga

SEQ ID NO: 322745 - RNA, 19 nt, Artificial Sequence
  Description of Artificial Sequence: Synthetic oligonucleotide
  Sense Strand Starting at position 52 of SEQ ID NO: 318393
aaucauaaggaucguugau

SEQ ID NO: 322746 - RNA, 19 nt, Artificial Sequence
  Description of Artificial Sequence: Synthetic oligonucleotide
  Antisense Strand to SEQ ID NO: 322745
aucaacgauccuuaugauu

SEQ ID NO: 322747 - RNA, 19 nt, Artificial Sequence
  Description of Artificial Sequence: Synthetic oligonucleotide
  Sense Strand Starting at position 52 of SEQ ID NO: 318395
ucauaaggaucguugauua

SEQ ID NO: 322748 - RNA, 19 nt, Artificial Sequence
  Description of Artificial Sequence: Synthetic oligonucleotide
  Antisense Strand to SEQ ID NO: 322747
uaaucaacgauccuuauga

SEQ ID NO: 322749 - RNA, 19 nt, Artificial Sequence
  Description of Artificial Sequence: Synthetic oligonucleotide
  Sense Strand Starting at position 52 of SEQ ID NO: 318399
aaggaucguugauuagauu

SEQ ID NO: 322750 - RNA, 19 nt, Artificial Sequence
  Description of Artificial Sequence: Synthetic oligonucleotide
  Antisense Strand to SEQ ID NO: 322749
aaucuaaucaacgauccuu

SEQ ID NO: 322751 - RNA, 19 nt, Artificial Sequence
  Description of Artificial Sequence: Synthetic oligonucleotide
  Sense Strand Starting at position 52 of SEQ ID NO: 318456
ucuuauuuggcaugcagua

SEQ ID NO: 322752 - RNA, 19 nt, Artificial Sequence
  Description of Artificial Sequence: Synthetic oligonucleotide
  Antisense Strand to SEQ ID NO: 322751
uacugcaugccaaauaaga

SEQ ID NO: 322753 - RNA, 19 nt, Artificial Sequence
  Description of Artificial Sequence: Synthetic oligonucleotide
  Sense Strand Starting at position 52 of SEQ ID NO: 318518
uggcauuaucagugaucag

SEQ ID NO: 322754 - RNA, 19 nt, Artificial Sequence
  Description of Artificial Sequence: Synthetic oligonucleotide
  Antisense Strand to SEQ ID NO: 322753
cugaucacugauaaugcca

SEQ ID NO: 322755 - RNA, 19 nt, Artificial Sequence
  Description of Artificial Sequence: Synthetic oligonucleotide
  Sense Strand Starting at position 52 of SEQ ID NO: 318519
ggcauuaucagugaucagg

SEQ ID NO: 322756 - RNA, 19 nt, Artificial Sequence
  Description of Artificial Sequence: Synthetic oligonucleotide
  Antisense Strand to SEQ ID NO: 322755
ccugaucacugauaaugcc

SEQ ID NO: 322757 - RNA, 19 nt, Artificial Sequence
  Description of Artificial Sequence: Synthetic oligonucleotide
  Sense Strand Starting at position 52 of SEQ ID NO: 318521
cauuaucagugaucagggu

SEQ ID NO: 322758 - RNA, 19 nt, Artificial Sequence
  Description of Artificial Sequence: Synthetic oligonucleotide
  Antisense Strand to SEQ ID NO: 322757
acccugaucacugauaaug

SEQ ID NO: 322759 - RNA, 19 nt, Artificial Sequence
  Description of Artificial Sequence: Synthetic oligonucleotide
  Sense Strand Starting at position 52 of SEQ ID NO: 318525
aucagugaucaggguagua

SEQ ID NO: 322760 - RNA, 19 nt, Artificial Sequence
  Description of Artificial Sequence: Synthetic oligonucleotide
  Antisense Strand to SEQ ID NO: 322759
uacuacccugaucacugau

SEQ ID NO: 322761 - RNA, 19 nt, Artificial Sequence
  Description of Artificial Sequence: Synthetic oligonucleotide
  Sense Strand Starting at position 52 of SEQ ID NO: 318527
cagugaucaggguaguaaa

SEQ ID NO: 322762 - RNA, 19 nt, Artificial Sequence
  Description of Artificial Sequence: Synthetic oligonucleotide
  Antisense Strand to SEQ ID NO: 322761
uuuacuacccugaucacug

SEQ ID NO: 322763 - RNA, 19 nt, Artificial Sequence
  Description of Artificial Sequence: Synthetic oligonucleotide
  Sense Strand Starting at position 52 of SEQ ID NO: 318566
aguagagauuuauaaacag

SEQ ID NO: 322764 - RNA, 19 nt, Artificial Sequence
  Description of Artificial Sequence: Synthetic oligonucleotide
  Antisense Strand to SEQ ID NO: 322763
cuguuuauaaaucucuacu

SEQ ID NO: 322765 - RNA, 19 nt, Artificial Sequence
  Description of Artificial Sequence: Synthetic oligonucleotide
  Sense Strand Starting at position 52 of SEQ ID NO: 318696
uugcuuaguccuuucuguu

SEQ ID NO: 322766 - RNA, 19 nt, Artificial Sequence
  Description of Artificial Sequence: Synthetic oligonucleotide
  Antisense Strand to SEQ ID NO: 322765
aacagaaaggacuaagcaa

SEQ ID NO: 322767 - RNA, 19 nt, Artificial Sequence
  Description of Artificial Sequence: Synthetic oligonucleotide
  Sense Strand Starting at position 52 of SEQ ID NO: 318788
augucaacuugacuugaaa

SEQ ID NO: 322768 - RNA, 19 nt, Artificial Sequence
  Description of Artificial Sequence: Synthetic oligonucleotide
  Antisense Strand to SEQ ID NO: 322767
uuucaagucaaguugacau

SEQ ID NO: 322769 - RNA, 19 nt, Artificial Sequence
  Description of Artificial Sequence: Synthetic oligonucleotide
  Sense Strand Starting at position 52 of SEQ ID NO: 318848
aucuccgaucuuuauguua

SEQ ID NO: 322770 - RNA, 19 nt, Artificial Sequence
  Description of Artificial Sequence: Synthetic oligonucleotide
  Antisense Strand to SEQ ID NO: 322769
uaacauaaagaucggagau

SEQ ID NO: 322771 - RNA, 19 nt, Artificial Sequence
  Description of Artificial Sequence: Synthetic oligonucleotide
  Sense Strand Starting at position 52 of SEQ ID NO: 318851
uccgaucuuuauguuauuu

SEQ ID NO: 322772 - RNA, 19 nt, Artificial Sequence
  Description of Artificial Sequence: Synthetic oligonucleotide
  Antisense Strand to SEQ ID NO: 322771
aaauaacauaaagaucgga

SEQ ID NO: 322773 - RNA, 19 nt, Artificial Sequence
  Description of Artificial Sequence: Synthetic oligonucleotide
  Sense Strand Starting at position 52 of SEQ ID NO: 318923
acaguacugucauuacaca

SEQ ID NO: 322774 - RNA, 19 nt, Artificial Sequence
  Description of Artificial Sequence: Synthetic oligonucleotide
  Antisense Strand to SEQ ID NO: 322773
uguguaaugacaguacugu

SEQ ID NO: 322775 - RNA, 19 nt, Artificial Sequence
  Description of Artificial Sequence: Synthetic oligonucleotide
  Sense Strand Starting at position 52 of SEQ ID NO: 319022
acaauuagcuuguuugaac

SEQ ID NO: 322776 - RNA, 19 nt, Artificial Sequence
  Description of Artificial Sequence: Synthetic oligonucleotide
  Antisense Strand to SEQ ID NO: 322775
guucaaacaagcuaauugu

SEQ ID NO: 322777 - RNA, 19 nt, Artificial Sequence
  Description of Artificial Sequence: Synthetic oligonucleotide
  Sense Strand Starting at position 52 of SEQ ID NO: 319051
cagggaucugccuauugug

SEQ ID NO: 322778 - RNA, 19 nt, Artificial Sequence
  Description of Artificial Sequence: Synthetic oligonucleotide
  Antisense Strand to SEQ ID NO: 322777
cacaauaggcagaucccug

SEQ ID NO: 322779 - RNA, 19 nt, Artificial Sequence
  Description of Artificial Sequence: Synthetic oligonucleotide
  Sense Strand Starting at position 52 of SEQ ID NO: 319118
uaguuauagcuaugggauu

SEQ ID NO: 322780 - RNA, 19 nt, Artificial Sequence
  Description of Artificial Sequence: Synthetic oligonucleotide
  Antisense Strand to SEQ ID NO: 322779
aaucccauagcuauaacua

SEQ ID NO: 322781 - RNA, 19 nt, Artificial Sequence
  Description of Artificial Sequence: Synthetic oligonucleotide
  Sense Strand Starting at position 52 of SEQ ID NO: 319120
guuauagcuaugggauuag

SEQ ID NO: 322782 - RNA, 19 nt, Artificial Sequence
  Description of Artificial Sequence: Synthetic oligonucleotide
  Antisense Strand to SEQ ID NO: 322781
cuaaucccauagcuauaac

SEQ ID NO: 322783 - RNA, 19 nt, Artificial Sequence
  Description of Artificial Sequence: Synthetic oligonucleotide
  Sense Strand Starting at position 52 of SEQ ID NO: 319169
gcagauugcaucgcacagu

SEQ ID NO: 322784 - RNA, 19 nt, Artificial Sequence
  Description of Artificial Sequence: Synthetic oligonucleotide
  Antisense Strand to SEQ ID NO: 322783
acugugcgaugcaaucugc

SEQ ID NO: 322785 - RNA, 19 nt, Artificial Sequence
  Description of Artificial Sequence: Synthetic oligonucleotide
  Sense Strand Starting at position 52 of SEQ ID NO: 319213
cuuuguguccucuaaacca

SEQ ID NO: 322786 - RNA, 19 nt, Artificial Sequence
  Description of Artificial Sequence: Synthetic oligonucleotide
  Antisense Strand to SEQ ID NO: 322785
ugguuuagaggacacaaag

SEQ ID NO: 322787 - RNA, 19 nt, Artificial Sequence
  Description of Artificial Sequence: Synthetic oligonucleotide
  Sense Strand Starting at position 53 of SEQ ID NO: 315254
cugaaauguuaucucagca

SEQ ID NO: 322788 - RNA, 19 nt, Artificial Sequence
  Description of Artificial Sequence: Synthetic oligonucleotide
  Antisense Strand to SEQ ID NO: 322787
ugcugagauaacauuucag

SEQ ID NO: 322789 - RNA, 19 nt, Artificial Sequence
  Description of Artificial Sequence: Synthetic oligonucleotide
  Sense Strand Starting at position 53 of SEQ ID NO: 315319
gcaucauaucuacacacgu

SEQ ID NO: 322790 - RNA, 19 nt, Artificial Sequence
  Description of Artificial Sequence: Synthetic oligonucleotide
  Antisense Strand to SEQ ID NO: 322789
acguguguagauaugaugc

SEQ ID NO: 322791 - RNA, 19 nt, Artificial Sequence
  Description of Artificial Sequence: Synthetic oligonucleotide
  Sense Strand Starting at position 53 of SEQ ID NO: 315472
gguggagaauguagggauu

SEQ ID NO: 322792 - RNA, 19 nt, Artificial Sequence
  Description of Artificial Sequence: Synthetic oligonucleotide
  Antisense Strand to SEQ ID NO: 322791
aaucccuacauucuccacc

SEQ ID NO: 322793 - RNA, 19 nt, Artificial Sequence
  Description of Artificial Sequence: Synthetic oligonucleotide
  Sense Strand Starting at position 53 of SEQ ID NO: 315499
uguggcaauuuagaaauga

SEQ ID NO: 322794 - RNA, 19 nt, Artificial Sequence
  Description of Artificial Sequence: Synthetic oligonucleotide
  Antisense Strand to SEQ ID NO: 322793
ucauuucuaaauugccaca

SEQ ID NO: 322795 - RNA, 19 nt, Artificial Sequence
  Description of Artificial Sequence: Synthetic oligonucleotide
  Sense Strand Starting at position 53 of SEQ ID NO: 315593
auuccaagcuaugugauaa

SEQ ID NO: 322796 - RNA, 19 nt, Artificial Sequence
  Description of Artificial Sequence: Synthetic oligonucleotide
  Antisense Strand to SEQ ID NO: 322795
uuaucacauagcuuggaau

SEQ ID NO: 322797 - RNA, 19 nt, Artificial Sequence
  Description of Artificial Sequence: Synthetic oligonucleotide
  Sense Strand Starting at position 53 of SEQ ID NO: 315799
guuggauuacugcaauacu

SEQ ID NO: 322798 - RNA, 19 nt, Artificial Sequence
  Description of Artificial Sequence: Synthetic oligonucleotide
  Antisense Strand to SEQ ID NO: 322797
aguauugcaguaauccaac

SEQ ID NO: 322799 - RNA, 19 nt, Artificial Sequence
  Description of Artificial Sequence: Synthetic oligonucleotide
  Sense Strand Starting at position 53 of SEQ ID NO: 315988
aaacaacugcugugacaga

SEQ ID NO: 322800 - RNA, 19 nt, Artificial Sequence
  Description of Artificial Sequence: Synthetic oligonucleotide
  Antisense Strand to SEQ ID NO: 322799
ucugucacagcaguuguuu

SEQ ID NO: 322801 - RNA, 19 nt, Artificial Sequence
  Description of Artificial Sequence: Synthetic oligonucleotide
  Sense Strand Starting at position 53 of SEQ ID NO: 315995
ugcugugacagagaugauc

SEQ ID NO: 322802 - RNA, 19 nt, Artificial Sequence
  Description of Artificial Sequence: Synthetic oligonucleotide
  Antisense Strand to SEQ ID NO: 322801
gaucaucucugucacagca

SEQ ID NO: 322803 - RNA, 19 nt, Artificial Sequence
  Description of Artificial Sequence: Synthetic oligonucleotide
  Sense Strand Starting at position 53 of SEQ ID NO: 316039
aggucauauaguuaccagu

SEQ ID NO: 322804 - RNA, 19 nt, Artificial Sequence
  Description of Artificial Sequence: Synthetic oligonucleotide
  Antisense Strand to SEQ ID NO: 322803
acugguaacuauaugaccu

SEQ ID NO: 322805 - RNA, 19 nt, Artificial Sequence
  Description of Artificial Sequence: Synthetic oligonucleotide
  Sense Strand Starting at position 53 of SEQ ID NO: 316041
gucauauaguuaccaguag

SEQ ID NO: 322806 - RNA, 19 nt, Artificial Sequence
  Description of Artificial Sequence: Synthetic oligonucleotide
  Antisense Strand to SEQ ID NO: 322805
cuacugguaacuauaugac

SEQ ID NO: 322807 - RNA, 19 nt, Artificial Sequence
  Description of Artificial Sequence: Synthetic oligonucleotide
  Sense Strand Starting at position 53 of SEQ ID NO: 316142
ugguuuaaugcagauacua

SEQ ID NO: 322808 - RNA, 19 nt, Artificial Sequence
  Description of Artificial Sequence: Synthetic oligonucleotide
  Antisense Strand to SEQ ID NO: 322807
uaguaucugcauuaaacca

SEQ ID NO: 322809 - RNA, 19 nt, Artificial Sequence
  Description of Artificial Sequence: Synthetic oligonucleotide
  Sense Strand Starting at position 53 of SEQ ID NO: 316176
ucuagagcucagcacaaau

SEQ ID NO: 322810 - RNA, 19 nt, Artificial Sequence
  Description of Artificial Sequence: Synthetic oligonucleotide
  Antisense Strand to SEQ ID NO: 322809
auuugugcugagcucuaga

SEQ ID NO: 322811 - RNA, 19 nt, Artificial Sequence
  Description of Artificial Sequence: Synthetic oligonucleotide
  Sense Strand Starting at position 53 of SEQ ID NO: 316302
uacguuuacaugugaugag

SEQ ID NO: 322812 - RNA, 19 nt, Artificial Sequence
  Description of Artificial Sequence: Synthetic oligonucleotide
  Antisense Strand to SEQ ID NO: 322811
cucaucacauguaaacgua

SEQ ID NO: 322813 - RNA, 19 nt, Artificial Sequence
  Description of Artificial Sequence: Synthetic oligonucleotide
  Sense Strand Starting at position 53 of SEQ ID NO: 316512
aaugguguuaguggagaau

SEQ ID NO: 322814 - RNA, 19 nt, Artificial Sequence
  Description of Artificial Sequence: Synthetic oligonucleotide
  Antisense Strand to SEQ ID NO: 322813
auucuccacuaacaccauu

SEQ ID NO: 322815 - RNA, 19 nt, Artificial Sequence
  Description of Artificial Sequence: Synthetic oligonucleotide
  Sense Strand Starting at position 53 of SEQ ID NO: 316515
gguguuaguggagaauccu

SEQ ID NO: 322816 - RNA, 19 nt, Artificial Sequence
  Description of Artificial Sequence: Synthetic oligonucleotide
  Antisense Strand to SEQ ID NO: 322815
aggauucuccacuaacacc

SEQ ID NO: 322817 - RNA, 19 nt, Artificial Sequence
  Description of Artificial Sequence: Synthetic oligonucleotide
  Sense Strand Starting at position 53 of SEQ ID NO: 316544
gcaggcugugaaggaauua

SEQ ID NO: 322818 - RNA, 19 nt, Artificial Sequence
  Description of Artificial Sequence: Synthetic oligonucleotide
  Antisense Strand to SEQ ID NO: 322817
uaauuccuucacagccugc

SEQ ID NO: 322819 - RNA, 19 nt, Artificial Sequence
  Description of Artificial Sequence: Synthetic oligonucleotide
  Sense Strand Starting at position 53 of SEQ ID NO: 316836
uuuccuguuccucagauga

SEQ ID NO: 322820 - RNA, 19 nt, Artificial Sequence
  Description of Artificial Sequence: Synthetic oligonucleotide
  Antisense Strand to SEQ ID NO: 322819
ucaucugaggaacaggaaa

SEQ ID NO: 322821 - RNA, 19 nt, Artificial Sequence
  Description of Artificial Sequence: Synthetic oligonucleotide
  Sense Strand Starting at position 53 of SEQ ID NO: 316879
ccaaaugaguagguccuua

SEQ ID NO: 322822 - RNA, 19 nt, Artificial Sequence
  Description of Artificial Sequence: Synthetic oligonucleotide
  Antisense Strand to SEQ ID NO: 322821
uaaggaccuacucauuugg

SEQ ID NO: 322823 - RNA, 19 nt, Artificial Sequence
  Description of Artificial Sequence: Synthetic oligonucleotide
  Sense Strand Starting at position 53 of SEQ ID NO: 316908
auagaaccucaguaucagu

SEQ ID NO: 322824 - RNA, 19 nt, Artificial Sequence
  Description of Artificial Sequence: Synthetic oligonucleotide
  Antisense Strand to SEQ ID NO: 322823
acugauacugagguucuau

SEQ ID NO: 322825 - RNA, 19 nt, Artificial Sequence
  Description of Artificial Sequence: Synthetic oligonucleotide
  Sense Strand Starting at position 53 of SEQ ID NO: 316933
gaagcauuccaacggagca

SEQ ID NO: 322826 - RNA, 19 nt, Artificial Sequence
  Description of Artificial Sequence: Synthetic oligonucleotide
  Antisense Strand to SEQ ID NO: 322825
ugcuccguuggaaugcuuc

SEQ ID NO: 322827 - RNA, 19 nt, Artificial Sequence
  Description of Artificial Sequence: Synthetic oligonucleotide
  Sense Strand Starting at position 53 of SEQ ID NO: 316994
ccuaguaaugcucacaugu

SEQ ID NO: 322828 - RNA, 19 nt, Artificial Sequence
  Description of Artificial Sequence: Synthetic oligonucleotide
  Antisense Strand to SEQ ID NO: 322827
acaugugagcauuacuagg

SEQ ID NO: 322829 - RNA, 19 nt, Artificial Sequence
  Description of Artificial Sequence: Synthetic oligonucleotide
  Sense Strand Starting at position 53 of SEQ ID NO: 317009
auguuacacuuaccagaga

SEQ ID NO: 322830 - RNA, 19 nt, Artificial Sequence
  Description of Artificial Sequence: Synthetic oligonucleotide
  Antisense Strand to SEQ ID NO: 322829
ucucugguaaguguaacau

SEQ ID NO: 322831 - RNA, 19 nt, Artificial Sequence
  Description of Artificial Sequence: Synthetic oligonucleotide
  Sense Strand Starting at position 53 of SEQ ID NO: 317033
gcuacuucucgggauguaa

SEQ ID NO: 322832 - RNA, 19 nt, Artificial Sequence
  Description of Artificial Sequence: Synthetic oligonucleotide
  Antisense Strand to SEQ ID NO: 322831
uuacaucccgagaaguagc

SEQ ID NO: 322833 - RNA, 19 nt, Artificial Sequence
  Description of Artificial Sequence: Synthetic oligonucleotide
  Sense Strand Starting at position 53 of SEQ ID NO: 317035
uacuucucgggauguaacu

SEQ ID NO: 322834 - RNA, 19 nt, Artificial Sequence
  Description of Artificial Sequence: Synthetic oligonucleotide
  Antisense Strand to SEQ ID NO: 322833
aguuacaucccgagaagua

SEQ ID NO: 322835 - RNA, 19 nt, Artificial Sequence
  Description of Artificial Sequence: Synthetic oligonucleotide
  Sense Strand Starting at position 53 of SEQ ID NO: 317052
cuuccucuagcaggagaaa

SEQ ID NO: 322836 - RNA, 19 nt, Artificial Sequence
  Description of Artificial Sequence: Synthetic oligonucleotide
  Antisense Strand to SEQ ID NO: 322835
uuucuccugcuagaggaag

SEQ ID NO: 322837 - RNA, 19 nt, Artificial Sequence
  Description of Artificial Sequence: Synthetic oligonucleotide
  Sense Strand Starting at position 53 of SEQ ID NO: 317264
ggcuuaacugcuuucgugu

SEQ ID NO: 322838 - RNA, 19 nt, Artificial Sequence
  Description of Artificial Sequence: Synthetic oligonucleotide
  Antisense Strand to SEQ ID NO: 322837
acacgaaagcaguuaagcc

SEQ ID NO: 322839 - RNA, 19 nt, Artificial Sequence
  Description of Artificial Sequence: Synthetic oligonucleotide
  Sense Strand Starting at position 53 of SEQ ID NO: 317272
ugcuuucguguguuacaau

SEQ ID NO: 322840 - RNA, 19 nt, Artificial Sequence
  Description of Artificial Sequence: Synthetic oligonucleotide
  Antisense Strand to SEQ ID NO: 322839
auuguaacacacgaaagca

SEQ ID NO: 322841 - RNA, 19 nt, Artificial Sequence
  Description of Artificial Sequence: Synthetic oligonucleotide
  Sense Strand Starting at position 53 of SEQ ID NO: 317328
agaauaugccugcaaugga

SEQ ID NO: 322842 - RNA, 19 nt, Artificial Sequence
  Description of Artificial Sequence: Synthetic oligonucleotide
  Antisense Strand to SEQ ID NO: 322841
uccauugcaggcauauucu

SEQ ID NO: 322843 - RNA, 19 nt, Artificial Sequence
  Description of Artificial Sequence: Synthetic oligonucleotide
  Sense Strand Starting at position 53 of SEQ ID NO: 317649
ccauuuggauagggaauaa

SEQ ID NO: 322844 - RNA, 19 nt, Artificial Sequence
  Description of Artificial Sequence: Synthetic oligonucleotide
  Antisense Strand to SEQ ID NO: 322843
uuauucccuauccaaaugg

SEQ ID NO: 322845 - RNA, 19 nt, Artificial Sequence
  Description of Artificial Sequence: Synthetic oligonucleotide
  Sense Strand Starting at position 53 of SEQ ID NO: 317970
uuugaacaucugugauaug

SEQ ID NO: 322846 - RNA, 19 nt, Artificial Sequence
  Description of Artificial Sequence: Synthetic oligonucleotide
  Antisense Strand to SEQ ID NO: 322845
cauaucacagauguucaaa

SEQ ID NO: 322847 - RNA, 19 nt, Artificial Sequence
  Description of Artificial Sequence: Synthetic oligonucleotide
  Sense Strand Starting at position 53 of SEQ ID NO: 317994
ugcuguacauucucauuua

SEQ ID NO: 322848 - RNA, 19 nt, Artificial Sequence
  Description of Artificial Sequence: Synthetic oligonucleotide
  Antisense Strand to SEQ ID NO: 322847
uaaaugagaauguacagca

SEQ ID NO: 322849 - RNA, 19 nt, Artificial Sequence
  Description of Artificial Sequence: Synthetic oligonucleotide
  Sense Strand Starting at position 53 of SEQ ID NO: 318027
cuguauucccauuauagag

SEQ ID NO: 322850 - RNA, 19 nt, Artificial Sequence
  Description of Artificial Sequence: Synthetic oligonucleotide
  Antisense Strand to SEQ ID NO: 322849
cucuauaaugggaauacag

SEQ ID NO: 322851 - RNA, 19 nt, Artificial Sequence
  Description of Artificial Sequence: Synthetic oligonucleotide
  Sense Strand Starting at position 53 of SEQ ID NO: 318142
ugcuaucacugaguacaca

SEQ ID NO: 322852 - RNA, 19 nt, Artificial Sequence
  Description of Artificial Sequence: Synthetic oligonucleotide
  Antisense Strand to SEQ ID NO: 322851
uguguacucagugauagca

SEQ ID NO: 322853 - RNA, 19 nt, Artificial Sequence
  Description of Artificial Sequence: Synthetic oligonucleotide
  Sense Strand Starting at position 53 of SEQ ID NO: 318252
accuauaaagguugugaaa

SEQ ID NO: 322854 - RNA, 19 nt, Artificial Sequence
  Description of Artificial Sequence: Synthetic oligonucleotide
  Antisense Strand to SEQ ID NO: 322853
uuucacaaccuuuauaggu

SEQ ID NO: 322855 - RNA, 19 nt, Artificial Sequence
  Description of Artificial Sequence: Synthetic oligonucleotide
  Sense Strand Starting at position 53 of SEQ ID NO: 318450
uguaucaaucuauggaaga

SEQ ID NO: 322856 - RNA, 19 nt, Artificial Sequence
  Description of Artificial Sequence: Synthetic oligonucleotide
  Antisense Strand to SEQ ID NO: 322855
ucuuccauagauugauaca

SEQ ID NO: 322857 - RNA, 19 nt, Artificial Sequence
  Description of Artificial Sequence: Synthetic oligonucleotide
  Sense Strand Starting at position 53 of SEQ ID NO: 318779
uagacuuaagcagguacau

SEQ ID NO: 322858 - RNA, 19 nt, Artificial Sequence
  Description of Artificial Sequence: Synthetic oligonucleotide
  Antisense Strand to SEQ ID NO: 322857
auguaccugcuuaagucua

SEQ ID NO: 322859 - RNA, 19 nt, Artificial Sequence
  Description of Artificial Sequence: Synthetic oligonucleotide
  Sense Strand Starting at position 53 of SEQ ID NO: 318934
gaauucugucgucacgaga

SEQ ID NO: 322860 - RNA, 19 nt, Artificial Sequence
  Description of Artificial Sequence: Synthetic oligonucleotide
  Antisense Strand to SEQ ID NO: 322859
ucucgugacgacagaauuc

SEQ ID NO: 322861 - RNA, 19 nt, Artificial Sequence
  Description of Artificial Sequence: Synthetic oligonucleotide
  Sense Strand Starting at position 53 of SEQ ID NO: 318962
gguggagauuuauaaacaa

SEQ ID NO: 322862 - RNA, 19 nt, Artificial Sequence
  Description of Artificial Sequence: Synthetic oligonucleotide
  Antisense Strand to SEQ ID NO: 322861
uuguuuauaaaucuccacc

SEQ ID NO: 322863 - RNA, 19 nt, Artificial Sequence
  Description of Artificial Sequence: Synthetic oligonucleotide
  Sense Strand Starting at position 53 of SEQ ID NO: 318993
uguguugguauacauauau

SEQ ID NO: 322864 - RNA, 19 nt, Artificial Sequence
  Description of Artificial Sequence: Synthetic oligonucleotide
  Antisense Strand to SEQ ID NO: 322863
auauauguauaccaacaca

SEQ ID NO: 322865 - RNA, 19 nt, Artificial Sequence
  Description of Artificial Sequence: Synthetic oligonucleotide
  Sense Strand Starting at position 53 of SEQ ID NO: 319032
ggcauuaaggugcaacaaa

SEQ ID NO: 322866 - RNA, 19 nt, Artificial Sequence
  Description of Artificial Sequence: Synthetic oligonucleotide
  Antisense Strand to SEQ ID NO: 322865
uuuguugcaccuuaaugcc

SEQ ID NO: 322867 - RNA, 19 nt, Artificial Sequence
  Description of Artificial Sequence: Synthetic oligonucleotide
  Sense Strand Starting at position 54 of SEQ ID NO: 315251
aaagaaacuugugcauagu

SEQ ID NO: 322868 - RNA, 19 nt, Artificial Sequence
  Description of Artificial Sequence: Synthetic oligonucleotide
  Antisense Strand to SEQ ID NO: 322867
acuaugcacaaguuucuuu

SEQ ID NO: 322869 - RNA, 19 nt, Artificial Sequence
  Description of Artificial Sequence: Synthetic oligonucleotide
  Sense Strand Starting at position 54 of SEQ ID NO: 315252
aagaaacuugugcauagua

SEQ ID NO: 322870 - RNA, 19 nt, Artificial Sequence
  Description of Artificial Sequence: Synthetic oligonucleotide
  Antisense Strand to SEQ ID NO: 322869
uacuaugcacaaguuucuu

SEQ ID NO: 322871 - RNA, 19 nt, Artificial Sequence
  Description of Artificial Sequence: Synthetic oligonucleotide
  Sense Strand Starting at position 54 of SEQ ID NO: 315254
gaaacuugugcauaguaua

SEQ ID NO: 322872 - RNA, 19 nt, Artificial Sequence
  Description of Artificial Sequence: Synthetic oligonucleotide
  Antisense Strand to SEQ ID NO: 322871
uauacuaugcacaaguuuc

SEQ ID NO: 322873 - RNA, 19 nt, Artificial Sequence
  Description of Artificial Sequence: Synthetic oligonucleotide
  Sense Strand Starting at position 54 of SEQ ID NO: 315343
guacuacuguauuugcuua

SEQ ID NO: 322874 - RNA, 19 nt, Artificial Sequence
  Description of Artificial Sequence: Synthetic oligonucleotide
  Antisense Strand to SEQ ID NO: 322873
uaagcaaauacaguaguac

SEQ ID NO: 322875 - RNA, 19 nt, Artificial Sequence
  Description of Artificial Sequence: Synthetic oligonucleotide
  Sense Strand Starting at position 54 of SEQ ID NO: 315411
gugcuuauacguuuguguu

SEQ ID NO: 322876 - RNA, 19 nt, Artificial Sequence
  Description of Artificial Sequence: Synthetic oligonucleotide
  Antisense Strand to SEQ ID NO: 322875
aacacaaacguauaagcac

SEQ ID NO: 322877 - RNA, 19 nt, Artificial Sequence
  Description of Artificial Sequence: Synthetic oligonucleotide
  Sense Strand Starting at position 54 of SEQ ID NO: 315464
gagguacuaggguaguaau

SEQ ID NO: 322878 - RNA, 19 nt, Artificial Sequence
  Description of Artificial Sequence: Synthetic oligonucleotide
  Antisense Strand to SEQ ID NO: 322877
auuacuacccuaguaccuc

SEQ ID NO: 322879 - RNA, 19 nt, Artificial Sequence
  Description of Artificial Sequence: Synthetic oligonucleotide
  Sense Strand Starting at position 54 of SEQ ID NO: 315472
aggguaguaaugcaacuuu

SEQ ID NO: 322880 - RNA, 19 nt, Artificial Sequence
  Description of Artificial Sequence: Synthetic oligonucleotide
  Antisense Strand to SEQ ID NO: 322879
aaaguugcauuacuacccu

SEQ ID NO: 322881 - RNA, 19 nt, Artificial Sequence
  Description of Artificial Sequence: Synthetic oligonucleotide
  Sense Strand Starting at position 54 of SEQ ID NO: 315860
cuaagagccuaaucaaaug

SEQ ID NO: 322882 - RNA, 19 nt, Artificial Sequence
  Description of Artificial Sequence: Synthetic oligonucleotide
  Antisense Strand to SEQ ID NO: 322881
cauuugauuaggcucuuag

SEQ ID NO: 322883 - RNA, 19 nt, Artificial Sequence
  Description of Artificial Sequence: Synthetic oligonucleotide
  Sense Strand Starting at position 54 of SEQ ID NO: 315925
gcuauaucugagggcaaca

SEQ ID NO: 322884 - RNA, 19 nt, Artificial Sequence
  Description of Artificial Sequence: Synthetic oligonucleotide
  Antisense Strand to SEQ ID NO: 322883
uguugcccucagauauagc

SEQ ID NO: 322885 - RNA, 19 nt, Artificial Sequence
  Description of Artificial Sequence: Synthetic oligonucleotide
  Sense Strand Starting at position 54 of SEQ ID NO: 316038
guuggcuguguuccuguaa

SEQ ID NO: 322886 - RNA, 19 nt, Artificial Sequence
  Description of Artificial Sequence: Synthetic oligonucleotide
  Antisense Strand to SEQ ID NO: 322885
uuacaggaacacagccaac

SEQ ID NO: 322887 - RNA, 19 nt, Artificial Sequence
  Description of Artificial Sequence: Synthetic oligonucleotide
  Sense Strand Starting at position 54 of SEQ ID NO: 316153
aguucuguuccacacagaa

SEQ ID NO: 322888 - RNA, 19 nt, Artificial Sequence
  Description of Artificial Sequence: Synthetic oligonucleotide
  Antisense Strand to SEQ ID NO: 322887
uucuguguggaacagaacu

SEQ ID NO: 322889 - RNA, 19 nt, Artificial Sequence
  Description of Artificial Sequence: Synthetic oligonucleotide
  Sense Strand Starting at position 54 of SEQ ID NO: 316264
ucaauagcuaguuggagua

SEQ ID NO: 322890 - RNA, 19 nt, Artificial Sequence
  Description of Artificial Sequence: Synthetic oligonucleotide
  Antisense Strand to SEQ ID NO: 322889
uacuccaacuagcuauuga

SEQ ID NO: 322891 - RNA, 19 nt, Artificial Sequence
  Description of Artificial Sequence: Synthetic oligonucleotide
  Sense Strand Starting at position 54 of SEQ ID NO: 316427
ugcccucuacaugguagaa

SEQ ID NO: 322892 - RNA, 19 nt, Artificial Sequence
  Description of Artificial Sequence: Synthetic oligonucleotide
  Antisense Strand to SEQ ID NO: 322891
uucuaccauguagagggca

SEQ ID NO: 322893 - RNA, 19 nt, Artificial Sequence
  Description of Artificial Sequence: Synthetic oligonucleotide
  Sense Strand Starting at position 54 of SEQ ID NO: 316458
gguuuauaaggaugaccuu

SEQ ID NO: 322894 - RNA, 19 nt, Artificial Sequence
  Description of Artificial Sequence: Synthetic oligonucleotide
  Antisense Strand to SEQ ID NO: 322893
aaggucauccuuauaaacc

SEQ ID NO: 322895 - RNA, 19 nt, Artificial Sequence
  Description of Artificial Sequence: Synthetic oligonucleotide
  Sense Strand Starting at position 54 of SEQ ID NO: 316551
ccuugucauuuguugaagu

SEQ ID NO: 322896 - RNA, 19 nt, Artificial Sequence
  Description of Artificial Sequence: Synthetic oligonucleotide
  Antisense Strand to SEQ ID NO: 322895
acuucaacaaaugacaagg

SEQ ID NO: 322897 - RNA, 19 nt, Artificial Sequence
  Description of Artificial Sequence: Synthetic oligonucleotide
  Sense Strand Starting at position 54 of SEQ ID NO: 316645
aagauaccaucagugagua

SEQ ID NO: 322898 - RNA, 19 nt, Artificial Sequence
  Description of Artificial Sequence: Synthetic oligonucleotide
  Antisense Strand to SEQ ID NO: 322897
uacucacugaugguaucuu

SEQ ID NO: 322899 - RNA, 19 nt, Artificial Sequence
  Description of Artificial Sequence: Synthetic oligonucleotide
  Sense Strand Starting at position 54 of SEQ ID NO: 316650
accaucagugaguacuaua

SEQ ID NO: 322900 - RNA, 19 nt, Artificial Sequence
  Description of Artificial Sequence: Synthetic oligonucleotide
  Antisense Strand to SEQ ID NO: 322899
uauaguacucacugauggu

SEQ ID NO: 322901 - RNA, 19 nt, Artificial Sequence
  Description of Artificial Sequence: Synthetic oligonucleotide
  Sense Strand Starting at position 54 of SEQ ID NO: 316720
aaugguuauguccaacugu

SEQ ID NO: 322902 - RNA, 19 nt, Artificial Sequence
  Description of Artificial Sequence: Synthetic oligonucleotide
  Antisense Strand to SEQ ID NO: 322901
acaguuggacauaaccauu

SEQ ID NO: 322903 - RNA, 19 nt, Artificial Sequence
  Description of Artificial Sequence: Synthetic oligonucleotide
  Sense Strand Starting at position 54 of SEQ ID NO: 316866
agaguagagaugugacuga

SEQ ID NO: 322904 - RNA, 19 nt, Artificial Sequence
  Description of Artificial Sequence: Synthetic oligonucleotide
  Antisense Strand to SEQ ID NO: 322903
ucagucacaucucuacucu

SEQ ID NO: 322905 - RNA, 19 nt, Artificial Sequence
  Description of Artificial Sequence: Synthetic oligonucleotide
  Sense Strand Starting at position 54 of SEQ ID NO: 316870
uagagaugugacugaguuu

SEQ ID NO: 322906 - RNA, 19 nt, Artificial Sequence
  Description of Artificial Sequence: Synthetic oligonucleotide
  Antisense Strand to SEQ ID NO: 322905
aaacucagucacaucucua

SEQ ID NO: 322907 - RNA, 19 nt, Artificial Sequence
  Description of Artificial Sequence: Synthetic oligonucleotide
  Sense Strand Starting at position 54 of SEQ ID NO: 316877
gugacugaguuucugauau

SEQ ID NO: 322908 - RNA, 19 nt, Artificial Sequence
  Description of Artificial Sequence: Synthetic oligonucleotide
  Antisense Strand to SEQ ID NO: 322907
auaucagaaacucagucac

SEQ ID NO: 322909 - RNA, 19 nt, Artificial Sequence
  Description of Artificial Sequence: Synthetic oligonucleotide
  Sense Strand Starting at position 54 of SEQ ID NO: 317098
agaauuaaaugucuagcua

SEQ ID NO: 322910 - RNA, 19 nt, Artificial Sequence
  Description of Artificial Sequence: Synthetic oligonucleotide
  Antisense Strand to SEQ ID NO: 322909
uagcuagacauuuaauucu

SEQ ID NO: 322911 - RNA, 19 nt, Artificial Sequence
  Description of Artificial Sequence: Synthetic oligonucleotide
  Sense Strand Starting at position 54 of SEQ ID NO: 317203
ugaagagaggucuaacguu

SEQ ID NO: 322912 - RNA, 19 nt, Artificial Sequence
  Description of Artificial Sequence: Synthetic oligonucleotide
  Antisense Strand to SEQ ID NO: 322911
aacguuagaccucucuuca

SEQ ID NO: 322913 - RNA, 19 nt, Artificial Sequence
  Description of Artificial Sequence: Synthetic oligonucleotide
  Sense Strand Starting at position 54 of SEQ ID NO: 317227
gacacagucauggguuagu

SEQ ID NO: 322914 - RNA, 19 nt, Artificial Sequence
  Description of Artificial Sequence: Synthetic oligonucleotide
  Antisense Strand to SEQ ID NO: 322913
acuaacccaugacuguguc

SEQ ID NO: 322915 - RNA, 19 nt, Artificial Sequence
  Description of Artificial Sequence: Synthetic oligonucleotide
  Sense Strand Starting at position 54 of SEQ ID NO: 317263
aggagagauacgugaucuc

SEQ ID NO: 322916 - RNA, 19 nt, Artificial Sequence
  Description of Artificial Sequence: Synthetic oligonucleotide
  Antisense Strand to SEQ ID NO: 322915
gagaucacguaucucuccu

SEQ ID NO: 322917 - RNA, 19 nt, Artificial Sequence
  Description of Artificial Sequence: Synthetic oligonucleotide
  Sense Strand Starting at position 54 of SEQ ID NO: 317266
agagauacgugaucucaua

SEQ ID NO: 322918 - RNA, 19 nt, Artificial Sequence
  Description of Artificial Sequence: Synthetic oligonucleotide
  Antisense Strand to SEQ ID NO: 322917
uaugagaucacguaucucu

SEQ ID NO: 322919 - RNA, 19 nt, Artificial Sequence
  Description of Artificial Sequence: Synthetic oligonucleotide
  Sense Strand Starting at position 54 of SEQ ID NO: 317277
aucucauaauggcuguaua

SEQ ID NO: 322920 - RNA, 19 nt, Artificial Sequence
  Description of Artificial Sequence: Synthetic oligonucleotide
  Antisense Strand to SEQ ID NO: 322919
uauacagccauuaugagau

SEQ ID NO: 322921 - RNA, 19 nt, Artificial Sequence
  Description of Artificial Sequence: Synthetic oligonucleotide
  Sense Strand Starting at position 54 of SEQ ID NO: 317278
ucucauaauggcuguauaa

SEQ ID NO: 322922 - RNA, 19 nt, Artificial Sequence
  Description of Artificial Sequence: Synthetic oligonucleotide
  Antisense Strand to SEQ ID NO: 322921
uuauacagccauuaugaga

SEQ ID NO: 322923 - RNA, 19 nt, Artificial Sequence
  Description of Artificial Sequence: Synthetic oligonucleotide
  Sense Strand Starting at position 54 of SEQ ID NO: 317280
ucauaauggcuguauaacu

SEQ ID NO: 322924 - RNA, 19 nt, Artificial Sequence
  Description of Artificial Sequence: Synthetic oligonucleotide
  Antisense Strand to SEQ ID NO: 322923
aguuauacagccauuauga

SEQ ID NO: 322925 - RNA, 19 nt, Artificial Sequence
  Description of Artificial Sequence: Synthetic oligonucleotide
  Sense Strand Starting at position 54 of SEQ ID NO: 317305
cugugugaccuggaagugu

SEQ ID NO: 322926 - RNA, 19 nt, Artificial Sequence
  Description of Artificial Sequence: Synthetic oligonucleotide
  Antisense Strand to SEQ ID NO: 322925
acacuuccaggucacacag

SEQ ID NO: 322927 - RNA, 19 nt, Artificial Sequence
  Description of Artificial Sequence: Synthetic oligonucleotide
  Sense Strand Starting at position 54 of SEQ ID NO: 317307
gugugaccuggaaguguuu

SEQ ID NO: 322928 - RNA, 19 nt, Artificial Sequence
  Description of Artificial Sequence: Synthetic oligonucleotide
  Antisense Strand to SEQ ID NO: 322927
aaacacuuccaggucacac

SEQ ID NO: 322929 - RNA, 19 nt, Artificial Sequence
  Description of Artificial Sequence: Synthetic oligonucleotide
  Sense Strand Starting at position 54 of SEQ ID NO: 317496
uucuauuaggaguauccca

SEQ ID NO: 322930 - RNA, 19 nt, Artificial Sequence
  Description of Artificial Sequence: Synthetic oligonucleotide
  Antisense Strand to SEQ ID NO: 322929
ugggauacuccuaauagaa

SEQ ID NO: 322931 - RNA, 19 nt, Artificial Sequence
  Description of Artificial Sequence: Synthetic oligonucleotide
  Sense Strand Starting at position 54 of SEQ ID NO: 317501
uuaggaguaucccauuuga

SEQ ID NO: 322932 - RNA, 19 nt, Artificial Sequence
  Description of Artificial Sequence: Synthetic oligonucleotide
  Antisense Strand to SEQ ID NO: 322931
ucaaaugggauacuccuaa

SEQ ID NO: 322933 - RNA, 19 nt, Artificial Sequence
  Description of Artificial Sequence: Synthetic oligonucleotide
  Sense Strand Starting at position 54 of SEQ ID NO: 318026
ggucaacuauaccuguaaa

SEQ ID NO: 322934 - RNA, 19 nt, Artificial Sequence
  Description of Artificial Sequence: Synthetic oligonucleotide
  Antisense Strand to SEQ ID NO: 322933
uuuacagguauaguugacc

SEQ ID NO: 322935 - RNA, 19 nt, Artificial Sequence
  Description of Artificial Sequence: Synthetic oligonucleotide
  Sense Strand Starting at position 54 of SEQ ID NO: 318145
cuugucaaauggucugaau

SEQ ID NO: 322936 - RNA, 19 nt, Artificial Sequence
  Description of Artificial Sequence: Synthetic oligonucleotide
  Antisense Strand to SEQ ID NO: 322935
auucagaccauuugacaag

SEQ ID NO: 322937 - RNA, 19 nt, Artificial Sequence
  Description of Artificial Sequence: Synthetic oligonucleotide
  Sense Strand Starting at position 54 of SEQ ID NO: 318236
ugagguaauugggucauga

SEQ ID NO: 322938 - RNA, 19 nt, Artificial Sequence
  Description of Artificial Sequence: Synthetic oligonucleotide
  Antisense Strand to SEQ ID NO: 322937
ucaugacccaauuaccuca

SEQ ID NO: 322939 - RNA, 19 nt, Artificial Sequence
  Description of Artificial Sequence: Synthetic oligonucleotide
  Sense Strand Starting at position 54 of SEQ ID NO: 318633
agaguugaauggccuguaa

SEQ ID NO: 322940 - RNA, 19 nt, Artificial Sequence
  Description of Artificial Sequence: Synthetic oligonucleotide
  Antisense Strand to SEQ ID NO: 322939
uuacaggccauucaacucu

SEQ ID NO: 322941 - RNA, 19 nt, Artificial Sequence
  Description of Artificial Sequence: Synthetic oligonucleotide
  Sense Strand Starting at position 54 of SEQ ID NO: 318730
aggcuaagaacuugauagu

SEQ ID NO: 322942 - RNA, 19 nt, Artificial Sequence
  Description of Artificial Sequence: Synthetic oligonucleotide
  Antisense Strand to SEQ ID NO: 322941
acuaucaaguucuuagccu

SEQ ID NO: 322943 - RNA, 19 nt, Artificial Sequence
  Description of Artificial Sequence: Synthetic oligonucleotide
  Sense Strand Starting at position 54 of SEQ ID NO: 318739
acuugauaguagguacuau

SEQ ID NO: 322944 - RNA, 19 nt, Artificial Sequence
  Description of Artificial Sequence: Synthetic oligonucleotide
  Antisense Strand to SEQ ID NO: 322943
auaguaccuacuaucaagu

SEQ ID NO: 322945 - RNA, 19 nt, Artificial Sequence
  Description of Artificial Sequence: Synthetic oligonucleotide
  Sense Strand Starting at position 54 of SEQ ID NO: 319089
aagaguguuguggauacca

SEQ ID NO: 322946 - RNA, 19 nt, Artificial Sequence
  Description of Artificial Sequence: Synthetic oligonucleotide
  Antisense Strand to SEQ ID NO: 322945
ugguauccacaacacucuu

SEQ ID NO: 322947 - RNA, 19 nt, Artificial Sequence
  Description of Artificial Sequence: Synthetic oligonucleotide
  Sense Strand Starting at position 55 of SEQ ID NO: 315415
acaauccuguuucuguuaa

SEQ ID NO: 322948 - RNA, 19 nt, Artificial Sequence
  Description of Artificial Sequence: Synthetic oligonucleotide
  Antisense Strand to SEQ ID NO: 322947
uuaacagaaacaggauugu

SEQ ID NO: 322949 - RNA, 19 nt, Artificial Sequence
  Description of Artificial Sequence: Synthetic oligonucleotide
  Sense Strand Starting at position 55 of SEQ ID NO: 315610
ugguaaagguuacuggaaa

SEQ ID NO: 322950 - RNA, 19 nt, Artificial Sequence
  Description of Artificial Sequence: Synthetic oligonucleotide
  Antisense Strand to SEQ ID NO: 322949
uuuccaguaaccuuuacca

SEQ ID NO: 322951 - RNA, 19 nt, Artificial Sequence
  Description of Artificial Sequence: Synthetic oligonucleotide
  Sense Strand Starting at position 55 of SEQ ID NO: 315670
acggacuguacuggaauua

SEQ ID NO: 322952 - RNA, 19 nt, Artificial Sequence
  Description of Artificial Sequence: Synthetic oligonucleotide
  Antisense Strand to SEQ ID NO: 322951
uaauuccaguacaguccgu

SEQ ID NO: 322953 - RNA, 19 nt, Artificial Sequence
  Description of Artificial Sequence: Synthetic oligonucleotide
  Sense Strand Starting at position 55 of SEQ ID NO: 315690
cagaaaugguuccugcuau

SEQ ID NO: 322954 - RNA, 19 nt, Artificial Sequence
  Description of Artificial Sequence: Synthetic oligonucleotide
  Antisense Strand to SEQ ID NO: 322953
auagcaggaaccauuucug

SEQ ID NO: 322955 - RNA, 19 nt, Artificial Sequence
  Description of Artificial Sequence: Synthetic oligonucleotide
  Sense Strand Starting at position 55 of SEQ ID NO: 315817
augucuacugagcacuuaa

SEQ ID NO: 322956 - RNA, 19 nt, Artificial Sequence
  Description of Artificial Sequence: Synthetic oligonucleotide
  Antisense Strand to SEQ ID NO: 322955
uuaagugcucaguagacau

SEQ ID NO: 322957 - RNA, 19 nt, Artificial Sequence
  Description of Artificial Sequence: Synthetic oligonucleotide
  Sense Strand Starting at position 55 of SEQ ID NO: 315853
uauggaacuugguuuaauu

SEQ ID NO: 322958 - RNA, 19 nt, Artificial Sequence
  Description of Artificial Sequence: Synthetic oligonucleotide
  Antisense Strand to SEQ ID NO: 322957
aauuaaaccaaguuccaua

SEQ ID NO: 322959 - RNA, 19 nt, Artificial Sequence
  Description of Artificial Sequence: Synthetic oligonucleotide
  Sense Strand Starting at position 55 of SEQ ID NO: 315899
ggcucucuuauaggacaga

SEQ ID NO: 322960 - RNA, 19 nt, Artificial Sequence
  Description of Artificial Sequence: Synthetic oligonucleotide
  Antisense Strand to SEQ ID NO: 322959
ucuguccuauaagagagcc

SEQ ID NO: 322961 - RNA, 19 nt, Artificial Sequence
  Description of Artificial Sequence: Synthetic oligonucleotide
  Sense Strand Starting at position 55 of SEQ ID NO: 315976
aaaguaucaugaccugaug

SEQ ID NO: 322962 - RNA, 19 nt, Artificial Sequence
  Description of Artificial Sequence: Synthetic oligonucleotide
  Antisense Strand to SEQ ID NO: 322961
caucaggucaugauacuuu

SEQ ID NO: 322963 - RNA, 19 nt, Artificial Sequence
  Description of Artificial Sequence: Synthetic oligonucleotide
  Sense Strand Starting at position 55 of SEQ ID NO: 315979
guaucaugaccugauguua

SEQ ID NO: 322964 - RNA, 19 nt, Artificial Sequence
  Description of Artificial Sequence: Synthetic oligonucleotide
  Antisense Strand to SEQ ID NO: 322963
uaacaucaggucaugauac

SEQ ID NO: 322965 - RNA, 19 nt, Artificial Sequence
  Description of Artificial Sequence: Synthetic oligonucleotide
  Sense Strand Starting at position 55 of SEQ ID NO: 316040
cugcgaucagccuaaacau

SEQ ID NO: 322966 - RNA, 19 nt, Artificial Sequence
  Description of Artificial Sequence: Synthetic oligonucleotide
  Antisense Strand to SEQ ID NO: 322965
auguuuaggcugaucgcag

SEQ ID NO: 322967 - RNA, 19 nt, Artificial Sequence
  Description of Artificial Sequence: Synthetic oligonucleotide
  Sense Strand Starting at position 55 of SEQ ID NO: 316107
aggugcaaucuuuauuaag

SEQ ID NO: 322968 - RNA, 19 nt, Artificial Sequence
  Description of Artificial Sequence: Synthetic oligonucleotide
  Antisense Strand to SEQ ID NO: 322967
cuuaauaaagauugcaccu

SEQ ID NO: 322969 - RNA, 19 nt, Artificial Sequence
  Description of Artificial Sequence: Synthetic oligonucleotide
  Sense Strand Starting at position 55 of SEQ ID NO: 316267
auaaguugucaacacuagu

SEQ ID NO: 322970 - RNA, 19 nt, Artificial Sequence
  Description of Artificial Sequence: Synthetic oligonucleotide
  Antisense Strand to SEQ ID NO: 322969
acuaguguugacaacuuau

SEQ ID NO: 322971 - RNA, 19 nt, Artificial Sequence
  Description of Artificial Sequence: Synthetic oligonucleotide
  Sense Strand Starting at position 55 of SEQ ID NO: 316287
aguguccugcgacaaauua

SEQ ID NO: 322972 - RNA, 19 nt, Artificial Sequence
  Description of Artificial Sequence: Synthetic oligonucleotide
  Antisense Strand to SEQ ID NO: 322971
uaauuugucgcaggacacu

SEQ ID NO: 322973 - RNA, 19 nt, Artificial Sequence
  Description of Artificial Sequence: Synthetic oligonucleotide
  Sense Strand Starting at position 55 of SEQ ID NO: 316403
ccaaauguuuagguguaca

SEQ ID NO: 322974 - RNA, 19 nt, Artificial Sequence
  Description of Artificial Sequence: Synthetic oligonucleotide
  Antisense Strand to SEQ ID NO: 322973
uguacaccuaaacauuugg

SEQ ID NO: 322975 - RNA, 19 nt, Artificial Sequence
  Description of Artificial Sequence: Synthetic oligonucleotide
  Sense Strand Starting at position 55 of SEQ ID NO: 316440
gcgauuucguuccuagaua

SEQ ID NO: 322976 - RNA, 19 nt, Artificial Sequence
  Description of Artificial Sequence: Synthetic oligonucleotide
  Antisense Strand to SEQ ID NO: 322975
uaucuaggaacgaaaucgc

SEQ ID NO: 322977 - RNA, 19 nt, Artificial Sequence
  Description of Artificial Sequence: Synthetic oligonucleotide
  Sense Strand Starting at position 55 of SEQ ID NO: 316496
uuugacuuguauucuuuga

SEQ ID NO: 322978 - RNA, 19 nt, Artificial Sequence
  Description of Artificial Sequence: Synthetic oligonucleotide
  Antisense Strand to SEQ ID NO: 322977
ucaaagaauacaagucaaa

SEQ ID NO: 322979 - RNA, 19 nt, Artificial Sequence
  Description of Artificial Sequence: Synthetic oligonucleotide
  Sense Strand Starting at position 55 of SEQ ID NO: 316580
ggaaacuugcauugaguaa

SEQ ID NO: 322980 - RNA, 19 nt, Artificial Sequence
  Description of Artificial Sequence: Synthetic oligonucleotide
  Antisense Strand to SEQ ID NO: 322979
uuacucaaugcaaguuucc

SEQ ID NO: 322981 - RNA, 19 nt, Artificial Sequence
  Description of Artificial Sequence: Synthetic oligonucleotide
  Sense Strand Starting at position 55 of SEQ ID NO: 316595
guaacuagucgcuaagagg

SEQ ID NO: 322982 - RNA, 19 nt, Artificial Sequence
  Description of Artificial Sequence: Synthetic oligonucleotide
  Antisense Strand to SEQ ID NO: 322981
ccucuuagcgacuaguuac

SEQ ID NO: 322983 - RNA, 19 nt, Artificial Sequence
  Description of Artificial Sequence: Synthetic oligonucleotide
  Sense Strand Starting at position 55 of SEQ ID NO: 316611
aggaaucaauugccuuuaa

SEQ ID NO: 322984 - RNA, 19 nt, Artificial Sequence
  Description of Artificial Sequence: Synthetic oligonucleotide
  Antisense Strand to SEQ ID NO: 322983
uuaaaggcaauugauuccu

SEQ ID NO: 322985 - RNA, 19 nt, Artificial Sequence
  Description of Artificial Sequence: Synthetic oligonucleotide
  Sense Strand Starting at position 55 of SEQ ID NO: 316612
ggaaucaauugccuuuaac

SEQ ID NO: 322986 - RNA, 19 nt, Artificial Sequence
  Description of Artificial Sequence: Synthetic oligonucleotide
  Antisense Strand to SEQ ID NO: 322985
guuaaaggcaauugauucc

SEQ ID NO: 322987 - RNA, 19 nt, Artificial Sequence
  Description of Artificial Sequence: Synthetic oligonucleotide
  Sense Strand Starting at position 55 of SEQ ID NO: 316621
ugccuuuaacccggagaga

SEQ ID NO: 322988 - RNA, 19 nt, Artificial Sequence
  Description of Artificial Sequence: Synthetic oligonucleotide
  Antisense Strand to SEQ ID NO: 322987
ucucuccggguuaaaggca

SEQ ID NO: 322989 - RNA, 19 nt, Artificial Sequence
  Description of Artificial Sequence: Synthetic oligonucleotide
  Sense Strand Starting at position 55 of SEQ ID NO: 317934
ggacuugcacguggagaaa

SEQ ID NO: 322990 - RNA, 19 nt, Artificial Sequence
  Description of Artificial Sequence: Synthetic oligonucleotide
  Antisense Strand to SEQ ID NO: 322989
uuucuccacgugcaagucc

SEQ ID NO: 322991 - RNA, 19 nt, Artificial Sequence
  Description of Artificial Sequence: Synthetic oligonucleotide
  Sense Strand Starting at position 55 of SEQ ID NO: 318446
gcucgugugggagaagauu

SEQ ID NO: 322992 - RNA, 19 nt, Artificial Sequence
  Description of Artificial Sequence: Synthetic oligonucleotide
  Antisense Strand to SEQ ID NO: 322991
aaucuucucccacacgagc

SEQ ID NO: 322993 - RNA, 19 nt, Artificial Sequence
  Description of Artificial Sequence: Synthetic oligonucleotide
  Sense Strand Starting at position 55 of SEQ ID NO: 318515
aaaggugcagaugguuaaa

SEQ ID NO: 322994 - RNA, 19 nt, Artificial Sequence
  Description of Artificial Sequence: Synthetic oligonucleotide
  Antisense Strand to SEQ ID NO: 322993
uuuaaccaucugcaccuuu

SEQ ID NO: 322995 - RNA, 19 nt, Artificial Sequence
  Description of Artificial Sequence: Synthetic oligonucleotide
  Sense Strand Starting at position 55 of SEQ ID NO: 318652
uggagaucuucgucaggac

SEQ ID NO: 322996 - RNA, 19 nt, Artificial Sequence
  Description of Artificial Sequence: Synthetic oligonucleotide
  Antisense Strand to SEQ ID NO: 322995
guccugacgaagaucucca

SEQ ID NO: 322997 - RNA, 19 nt, Artificial Sequence
  Description of Artificial Sequence: Synthetic oligonucleotide
  Sense Strand Starting at position 55 of SEQ ID NO: 318653
ggagaucuucgucaggacu

SEQ ID NO: 322998 - RNA, 19 nt, Artificial Sequence
  Description of Artificial Sequence: Synthetic oligonucleotide
  Antisense Strand to SEQ ID NO: 322997
aguccugacgaagaucucc

SEQ ID NO: 322999 - RNA, 19 nt, Artificial Sequence
  Description of Artificial Sequence: Synthetic oligonucleotide
  Sense Strand Starting at position 55 of SEQ ID NO: 318659
cuucgucaggacuaucaga

SEQ ID NO: 323000 - RNA, 19 nt, Artificial Sequence
  Description of Artificial Sequence: Synthetic oligonucleotide
  Antisense Strand to SEQ ID NO: 322999
ucugauaguccugacgaag

SEQ ID NO: 323001 - RNA, 19 nt, Artificial Sequence
  Description of Artificial Sequence: Synthetic oligonucleotide
  Sense Strand Starting at position 55 of SEQ ID NO: 318808
uugagauauccaugcuaug

SEQ ID NO: 323002 - RNA, 19 nt, Artificial Sequence
  Description of Artificial Sequence: Synthetic oligonucleotide
  Antisense Strand to SEQ ID NO: 323001
cauagcauggauaucucaa

SEQ ID NO: 323003 - RNA, 19 nt, Artificial Sequence
  Description of Artificial Sequence: Synthetic oligonucleotide
  Sense Strand Starting at position 55 of SEQ ID NO: 318857
uaugucccucgucaugaua

SEQ ID NO: 323004 - RNA, 19 nt, Artificial Sequence
  Description of Artificial Sequence: Synthetic oligonucleotide
  Antisense Strand to SEQ ID NO: 323003
uaucaugacgagggacaua

SEQ ID NO: 323005 - RNA, 19 nt, Artificial Sequence
  Description of Artificial Sequence: Synthetic oligonucleotide
  Sense Strand Starting at position 55 of SEQ ID NO: 318910
ugaucuaaccgucauaaug

SEQ ID NO: 323006 - RNA, 19 nt, Artificial Sequence
  Description of Artificial Sequence: Synthetic oligonucleotide
  Antisense Strand to SEQ ID NO: 323005
cauuaugacgguuagauca

SEQ ID NO: 323007 - RNA, 19 nt, Artificial Sequence
  Description of Artificial Sequence: Synthetic oligonucleotide
  Sense Strand Starting at position 55 of SEQ ID NO: 319048
caguucagugagggugaau

SEQ ID NO: 323008 - RNA, 19 nt, Artificial Sequence
  Description of Artificial Sequence: Synthetic oligonucleotide
  Antisense Strand to SEQ ID NO: 323007
auucacccucacugaacug

SEQ ID NO: 323009 - RNA, 19 nt, Artificial Sequence
  Description of Artificial Sequence: Synthetic oligonucleotide
  Sense Strand Starting at position 55 of SEQ ID NO: 319057
gagggugaaugaguuaaug

SEQ ID NO: 323010 - RNA, 19 nt, Artificial Sequence
  Description of Artificial Sequence: Synthetic oligonucleotide
  Antisense Strand to SEQ ID NO: 323009
cauuaacucauucacccuc

SEQ ID NO: 323011 - RNA, 19 nt, Artificial Sequence
  Description of Artificial Sequence: Synthetic oligonucleotide
  Sense Strand Starting at position 55 of SEQ ID NO: 319059
gggugaaugaguuaauguc

SEQ ID NO: 323012 - RNA, 19 nt, Artificial Sequence
  Description of Artificial Sequence: Synthetic oligonucleotide
  Antisense Strand to SEQ ID NO: 323011
gacauuaacucauucaccc

SEQ ID NO: 323013 - RNA, 19 nt, Artificial Sequence
  Description of Artificial Sequence: Synthetic oligonucleotide
  Sense Strand Starting at position 55 of SEQ ID NO: 319113
gugauaauauuacuacagu

SEQ ID NO: 323014 - RNA, 19 nt, Artificial Sequence
  Description of Artificial Sequence: Synthetic oligonucleotide
  Antisense Strand to SEQ ID NO: 323013
acuguaguaauauuaucac

SEQ ID NO: 323015 - RNA, 19 nt, Artificial Sequence
  Description of Artificial Sequence: Synthetic oligonucleotide
  Sense Strand Starting at position 55 of SEQ ID NO: 319124
acuacaguacuuugugauu

SEQ ID NO: 323016 - RNA, 19 nt, Artificial Sequence
  Description of Artificial Sequence: Synthetic oligonucleotide
  Antisense Strand to SEQ ID NO: 323015
aaucacaaaguacuguagu

SEQ ID NO: 323017 - RNA, 19 nt, Artificial Sequence
  Description of Artificial Sequence: Synthetic oligonucleotide
  Sense Strand Starting at position 55 of SEQ ID NO: 319130
guacuuugugauuacaagu

SEQ ID NO: 323018 - RNA, 19 nt, Artificial Sequence
  Description of Artificial Sequence: Synthetic oligonucleotide
  Antisense Strand to SEQ ID NO: 323017
acuuguaaucacaaaguac

SEQ ID NO: 323019 - RNA, 19 nt, Artificial Sequence
  Description of Artificial Sequence: Synthetic oligonucleotide
  Sense Strand Starting at position 55 of SEQ ID NO: 319172
gugccauauccagucgugu

SEQ ID NO: 323020 - RNA, 19 nt, Artificial Sequence
  Description of Artificial Sequence: Synthetic oligonucleotide
  Antisense Strand to SEQ ID NO: 323019
acacgacuggauauggcac

SEQ ID NO: 323021 - RNA, 19 nt, Artificial Sequence
  Description of Artificial Sequence: Synthetic oligonucleotide
  Sense Strand Starting at position 55 of SEQ ID NO: 319173
ugccauauccagucguguu

SEQ ID NO: 323022 - RNA, 19 nt, Artificial Sequence
  Description of Artificial Sequence: Synthetic oligonucleotide
  Antisense Strand to SEQ ID NO: 323021
aacacgacuggauauggca

SEQ ID NO: 323023 - RNA, 19 nt, Artificial Sequence
  Description of Artificial Sequence: Synthetic oligonucleotide
  Sense Strand Starting at position 55 of SEQ ID NO: 319180
uccagucguguucuaucuu

SEQ ID NO: 323024 - RNA, 19 nt, Artificial Sequence
  Description of Artificial Sequence: Synthetic oligonucleotide
  Antisense Strand to SEQ ID NO: 323023
aagauagaacacgacugga

SEQ ID NO: 323025 - RNA, 19 nt, Artificial Sequence
  Description of Artificial Sequence: Synthetic oligonucleotide
  Sense Strand Starting at position 55 of SEQ ID NO: 319191
ucuaucuuggccuaggagu

SEQ ID NO: 323026 - RNA, 19 nt, Artificial Sequence
  Description of Artificial Sequence: Synthetic oligonucleotide
  Antisense Strand to SEQ ID NO: 323025
acuccuaggccaagauaga

SEQ ID NO: 323027 - RNA, 19 nt, Artificial Sequence
  Description of Artificial Sequence: Synthetic oligonucleotide
  Sense Strand Starting at position 56 of SEQ ID NO: 315245
cuccaacuguccuuuagag

SEQ ID NO: 323028 - RNA, 19 nt, Artificial Sequence
  Description of Artificial Sequence: Synthetic oligonucleotide
  Antisense Strand to SEQ ID NO: 323027
cucuaaaggacaguuggag

SEQ ID NO: 323029 - RNA, 19 nt, Artificial Sequence
  Description of Artificial Sequence: Synthetic oligonucleotide
  Sense Strand Starting at position 56 of SEQ ID NO: 315247
ccaacuguccuuuagagca

SEQ ID NO: 323030 - RNA, 19 nt, Artificial Sequence
  Description of Artificial Sequence: Synthetic oligonucleotide
  Antisense Strand to SEQ ID NO: 323029
ugcucuaaaggacaguugg

SEQ ID NO: 323031 - RNA, 19 nt, Artificial Sequence
  Description of Artificial Sequence: Synthetic oligonucleotide
  Sense Strand Starting at position 56 of SEQ ID NO: 315364
acaguacauccuuacguua

SEQ ID NO: 323032 - RNA, 19 nt, Artificial Sequence
  Description of Artificial Sequence: Synthetic oligonucleotide
  Antisense Strand to SEQ ID NO: 323031
uaacguaaggauguacugu

SEQ ID NO: 323033 - RNA, 19 nt, Artificial Sequence
  Description of Artificial Sequence: Synthetic oligonucleotide
  Sense Strand Starting at position 56 of SEQ ID NO: 315369
acauccuuacguuacuaga

SEQ ID NO: 323034 - RNA, 19 nt, Artificial Sequence
  Description of Artificial Sequence: Synthetic oligonucleotide
  Antisense Strand to SEQ ID NO: 323033
ucuaguaacguaaggaugu

SEQ ID NO: 323035 - RNA, 19 nt, Artificial Sequence
  Description of Artificial Sequence: Synthetic oligonucleotide
  Sense Strand Starting at position 56 of SEQ ID NO: 315422
uccucugggcauuauaauu

SEQ ID NO: 323036 - RNA, 19 nt, Artificial Sequence
  Description of Artificial Sequence: Synthetic oligonucleotide
  Antisense Strand to SEQ ID NO: 323035
aauuauaaugcccagagga

SEQ ID NO: 323037 - RNA, 19 nt, Artificial Sequence
  Description of Artificial Sequence: Synthetic oligonucleotide
  Sense Strand Starting at position 56 of SEQ ID NO: 315430
gcauuauaauuguuuggga

SEQ ID NO: 323038 - RNA, 19 nt, Artificial Sequence
  Description of Artificial Sequence: Synthetic oligonucleotide
  Antisense Strand to SEQ ID NO: 323037
ucccaaacaauuauaaugc

SEQ ID NO: 323039 - RNA, 19 nt, Artificial Sequence
  Description of Artificial Sequence: Synthetic oligonucleotide
  Sense Strand Starting at position 56 of SEQ ID NO: 315432
auuauaauuguuugggaca

SEQ ID NO: 323040 - RNA, 19 nt, Artificial Sequence
  Description of Artificial Sequence: Synthetic oligonucleotide
  Antisense Strand to SEQ ID NO: 323039
ugucccaaacaauuauaau

SEQ ID NO: 323041 - RNA, 19 nt, Artificial Sequence
  Description of Artificial Sequence: Synthetic oligonucleotide
  Sense Strand Starting at position 56 of SEQ ID NO: 315584
acauguaggcagcaaauua

SEQ ID NO: 323042 - RNA, 19 nt, Artificial Sequence
  Description of Artificial Sequence: Synthetic oligonucleotide
  Antisense Strand to SEQ ID NO: 323041
uaauuugcugccuacaugu

SEQ ID NO: 323043 - RNA, 19 nt, Artificial Sequence
  Description of Artificial Sequence: Synthetic oligonucleotide
  Sense Strand Starting at position 56 of SEQ ID NO: 315746
uagaacuuguuaguuaaug

SEQ ID NO: 323044 - RNA, 19 nt, Artificial Sequence
  Description of Artificial Sequence: Synthetic oligonucleotide
  Antisense Strand to SEQ ID NO: 323043
cauuaacuaacaaguucua

SEQ ID NO: 323045 - RNA, 19 nt, Artificial Sequence
  Description of Artificial Sequence: Synthetic oligonucleotide
  Sense Strand Starting at position 56 of SEQ ID NO: 315747
agaacuuguuaguuaaugu

SEQ ID NO: 323046 - RNA, 19 nt, Artificial Sequence
  Description of Artificial Sequence: Synthetic oligonucleotide
  Antisense Strand to SEQ ID NO: 323045
acauuaacuaacaaguucu

SEQ ID NO: 323047 - RNA, 19 nt, Artificial Sequence
  Description of Artificial Sequence: Synthetic oligonucleotide
  Sense Strand Starting at position 56 of SEQ ID NO: 315771
uuaggaaguccacauguca

SEQ ID NO: 323048 - RNA, 19 nt, Artificial Sequence
  Description of Artificial Sequence: Synthetic oligonucleotide
  Antisense Strand to SEQ ID NO: 323047
ugacauguggacuuccuaa

SEQ ID NO: 323049 - RNA, 19 nt, Artificial Sequence
  Description of Artificial Sequence: Synthetic oligonucleotide
  Sense Strand Starting at position 56 of SEQ ID NO: 316068
auuugaugaucagaaacua

SEQ ID NO: 323050 - RNA, 19 nt, Artificial Sequence
  Description of Artificial Sequence: Synthetic oligonucleotide
  Antisense Strand to SEQ ID NO: 323049
uaguuucugaucaucaaau

SEQ ID NO: 323051 - RNA, 19 nt, Artificial Sequence
  Description of Artificial Sequence: Synthetic oligonucleotide
  Sense Strand Starting at position 56 of SEQ ID NO: 316177
cugugauccuagguaagau

SEQ ID NO: 323052 - RNA, 19 nt, Artificial Sequence
  Description of Artificial Sequence: Synthetic oligonucleotide
  Antisense Strand to SEQ ID NO: 323051
aucuuaccuaggaucacag

SEQ ID NO: 323053 - RNA, 19 nt, Artificial Sequence
  Description of Artificial Sequence: Synthetic oligonucleotide
  Sense Strand Starting at position 56 of SEQ ID NO: 316246
gcucacaaguucucuaaag

SEQ ID NO: 323054 - RNA, 19 nt, Artificial Sequence
  Description of Artificial Sequence: Synthetic oligonucleotide
  Antisense Strand to SEQ ID NO: 323053
cuuuagagaacuugugagc

SEQ ID NO: 323055 - RNA, 19 nt, Artificial Sequence
  Description of Artificial Sequence: Synthetic oligonucleotide
  Sense Strand Starting at position 56 of SEQ ID NO: 316247
cucacaaguucucuaaagu

SEQ ID NO: 323056 - RNA, 19 nt, Artificial Sequence
  Description of Artificial Sequence: Synthetic oligonucleotide
  Antisense Strand to SEQ ID NO: 323055
acuuuagagaacuugugag

SEQ ID NO: 323057 - RNA, 19 nt, Artificial Sequence
  Description of Artificial Sequence: Synthetic oligonucleotide
  Sense Strand Starting at position 56 of SEQ ID NO: 316248
ucacaaguucucuaaaguc

SEQ ID NO: 323058 - RNA, 19 nt, Artificial Sequence
  Description of Artificial Sequence: Synthetic oligonucleotide
  Antisense Strand to SEQ ID NO: 323057
gacuuuagagaacuuguga

SEQ ID NO: 323059 - RNA, 19 nt, Artificial Sequence
  Description of Artificial Sequence: Synthetic oligonucleotide
  Sense Strand Starting at position 56 of SEQ ID NO: 316318
agacauuuaucugaugacu

SEQ ID NO: 323060 - RNA, 19 nt, Artificial Sequence
  Description of Artificial Sequence: Synthetic oligonucleotide
  Antisense Strand to SEQ ID NO: 323059
agucaucagauaaaugucu

SEQ ID NO: 323061 - RNA, 19 nt, Artificial Sequence
  Description of Artificial Sequence: Synthetic oligonucleotide
  Sense Strand Starting at position 56 of SEQ ID NO: 316506
cuaccagaguuacuaucuu

SEQ ID NO: 323062 - RNA, 19 nt, Artificial Sequence
  Description of Artificial Sequence: Synthetic oligonucleotide
  Antisense Strand to SEQ ID NO: 323061
aagauaguaacucugguag

SEQ ID NO: 323063 - RNA, 19 nt, Artificial Sequence
  Description of Artificial Sequence: Synthetic oligonucleotide
  Sense Strand Starting at position 56 of SEQ ID NO: 316665
gugguuugggaacgaagua

SEQ ID NO: 323064 - RNA, 19 nt, Artificial Sequence
  Description of Artificial Sequence: Synthetic oligonucleotide
  Antisense Strand to SEQ ID NO: 323063
uacuucguucccaaaccac

SEQ ID NO: 323065 - RNA, 19 nt, Artificial Sequence
  Description of Artificial Sequence: Synthetic oligonucleotide
  Sense Strand Starting at position 56 of SEQ ID NO: 316826
ucuccuggauggcuagaaa

SEQ ID NO: 323066 - RNA, 19 nt, Artificial Sequence
  Description of Artificial Sequence: Synthetic oligonucleotide
  Antisense Strand to SEQ ID NO: 323065
uuucuagccauccaggaga

SEQ ID NO: 323067 - RNA, 19 nt, Artificial Sequence
  Description of Artificial Sequence: Synthetic oligonucleotide
  Sense Strand Starting at position 56 of SEQ ID NO: 316912
uaaguuguagaaugugaag

SEQ ID NO: 323068 - RNA, 19 nt, Artificial Sequence
  Description of Artificial Sequence: Synthetic oligonucleotide
  Antisense Strand to SEQ ID NO: 323067
cuucacauucuacaacuua

SEQ ID NO: 323069 - RNA, 19 nt, Artificial Sequence
  Description of Artificial Sequence: Synthetic oligonucleotide
  Sense Strand Starting at position 56 of SEQ ID NO: 316974
agcuacuuuggaggaaaua

SEQ ID NO: 323070 - RNA, 19 nt, Artificial Sequence
  Description of Artificial Sequence: Synthetic oligonucleotide
  Antisense Strand to SEQ ID NO: 323069
uauuuccuccaaaguagcu

SEQ ID NO: 323071 - RNA, 19 nt, Artificial Sequence
  Description of Artificial Sequence: Synthetic oligonucleotide
  Sense Strand Starting at position 56 of SEQ ID NO: 317174
aaguacagcugauugaaga

SEQ ID NO: 323072 - RNA, 19 nt, Artificial Sequence
  Description of Artificial Sequence: Synthetic oligonucleotide
  Antisense Strand to SEQ ID NO: 323071
ucuucaaucagcuguacuu

SEQ ID NO: 323073 - RNA, 19 nt, Artificial Sequence
  Description of Artificial Sequence: Synthetic oligonucleotide
  Sense Strand Starting at position 56 of SEQ ID NO: 317175
aguacagcugauugaagaa

SEQ ID NO: 323074 - RNA, 19 nt, Artificial Sequence
  Description of Artificial Sequence: Synthetic oligonucleotide
  Antisense Strand to SEQ ID NO: 323073
uucuucaaucagcuguacu

SEQ ID NO: 323075 - RNA, 19 nt, Artificial Sequence
  Description of Artificial Sequence: Synthetic oligonucleotide
  Sense Strand Starting at position 56 of SEQ ID NO: 317266
ugugauaauccugaaaguu

SEQ ID NO: 323076 - RNA, 19 nt, Artificial Sequence
  Description of Artificial Sequence: Synthetic oligonucleotide
  Antisense Strand to SEQ ID NO: 323075
aacuuucaggauuaucaca

SEQ ID NO: 323077 - RNA, 19 nt, Artificial Sequence
  Description of Artificial Sequence: Synthetic oligonucleotide
  Sense Strand Starting at position 56 of SEQ ID NO: 317274
uccugaaaguucucuguaa

SEQ ID NO: 323078 - RNA, 19 nt, Artificial Sequence
  Description of Artificial Sequence: Synthetic oligonucleotide
  Antisense Strand to SEQ ID NO: 323077
uuacagagaacuuucagga

SEQ ID NO: 323079 - RNA, 19 nt, Artificial Sequence
  Description of Artificial Sequence: Synthetic oligonucleotide
  Sense Strand Starting at position 56 of SEQ ID NO: 317275
ccugaaaguucucuguaaa

SEQ ID NO: 323080 - RNA, 19 nt, Artificial Sequence
  Description of Artificial Sequence: Synthetic oligonucleotide
  Antisense Strand to SEQ ID NO: 323079
uuuacagagaacuuucagg

SEQ ID NO: 323081 - RNA, 19 nt, Artificial Sequence
  Description of Artificial Sequence: Synthetic oligonucleotide
  Sense Strand Starting at position 56 of SEQ ID NO: 317276
cugaaaguucucuguaaau

SEQ ID NO: 323082 - RNA, 19 nt, Artificial Sequence
  Description of Artificial Sequence: Synthetic oligonucleotide
  Antisense Strand to SEQ ID NO: 323081
auuuacagagaacuuucag

SEQ ID NO: 323083 - RNA, 19 nt, Artificial Sequence
  Description of Artificial Sequence: Synthetic oligonucleotide
  Sense Strand Starting at position 56 of SEQ ID NO: 317406
gaugaauguguaggcaaau

SEQ ID NO: 323084 - RNA, 19 nt, Artificial Sequence
  Description of Artificial Sequence: Synthetic oligonucleotide
  Antisense Strand to SEQ ID NO: 323083
auuugccuacacauucauc

SEQ ID NO: 323085 - RNA, 19 nt, Artificial Sequence
  Description of Artificial Sequence: Synthetic oligonucleotide
  Sense Strand Starting at position 56 of SEQ ID NO: 317460
agaaucugcugaguagcaa

SEQ ID NO: 323086 - RNA, 19 nt, Artificial Sequence
  Description of Artificial Sequence: Synthetic oligonucleotide
  Antisense Strand to SEQ ID NO: 323085
uugcuacucagcagauucu

SEQ ID NO: 323087 - RNA, 19 nt, Artificial Sequence
  Description of Artificial Sequence: Synthetic oligonucleotide
  Sense Strand Starting at position 56 of SEQ ID NO: 317559
cacuuaguguugguggaaa

SEQ ID NO: 323088 - RNA, 19 nt, Artificial Sequence
  Description of Artificial Sequence: Synthetic oligonucleotide
  Antisense Strand to SEQ ID NO: 323087
uuuccaccaacacuaagug

SEQ ID NO: 323089 - RNA, 19 nt, Artificial Sequence
  Description of Artificial Sequence: Synthetic oligonucleotide
  Sense Strand Starting at position 56 of SEQ ID NO: 317593
ucaauaagcgagcaaauaa

SEQ ID NO: 323090 - RNA, 19 nt, Artificial Sequence
  Description of Artificial Sequence: Synthetic oligonucleotide
  Antisense Strand to SEQ ID NO: 323089
uuauuugcucgcuuauuga

SEQ ID NO: 323091 - RNA, 19 nt, Artificial Sequence
  Description of Artificial Sequence: Synthetic oligonucleotide
  Sense Strand Starting at position 56 of SEQ ID NO: 318216
guaagagccguauaacaua

SEQ ID NO: 323092 - RNA, 19 nt, Artificial Sequence
  Description of Artificial Sequence: Synthetic oligonucleotide
  Antisense Strand to SEQ ID NO: 323091
uauguuauacggcucuuac

SEQ ID NO: 323093 - RNA, 19 nt, Artificial Sequence
  Description of Artificial Sequence: Synthetic oligonucleotide
  Sense Strand Starting at position 56 of SEQ ID NO: 318271
gaacaaguggcagguauau

SEQ ID NO: 323094 - RNA, 19 nt, Artificial Sequence
  Description of Artificial Sequence: Synthetic oligonucleotide
  Antisense Strand to SEQ ID NO: 323093
auauaccugccacuuguuc

SEQ ID NO: 323095 - RNA, 19 nt, Artificial Sequence
  Description of Artificial Sequence: Synthetic oligonucleotide
  Sense Strand Starting at position 56 of SEQ ID NO: 318273
acaaguggcagguauauca

SEQ ID NO: 323096 - RNA, 19 nt, Artificial Sequence
  Description of Artificial Sequence: Synthetic oligonucleotide
  Antisense Strand to SEQ ID NO: 323095
ugauauaccugccacuugu

SEQ ID NO: 323097 - RNA, 19 nt, Artificial Sequence
  Description of Artificial Sequence: Synthetic oligonucleotide
  Sense Strand Starting at position 56 of SEQ ID NO: 318283
gguauaucauaaccuugga

SEQ ID NO: 323098 - RNA, 19 nt, Artificial Sequence
  Description of Artificial Sequence: Synthetic oligonucleotide
  Antisense Strand to SEQ ID NO: 323097
uccaagguuaugauauacc

SEQ ID NO: 323099 - RNA, 19 nt, Artificial Sequence
  Description of Artificial Sequence: Synthetic oligonucleotide
  Sense Strand Starting at position 56 of SEQ ID NO: 318395
uguuuauguaagcaagaug

SEQ ID NO: 323100 - RNA, 19 nt, Artificial Sequence
  Description of Artificial Sequence: Synthetic oligonucleotide
  Antisense Strand to SEQ ID NO: 323099
caucuugcuuacauaaaca

SEQ ID NO: 323101 - RNA, 19 nt, Artificial Sequence
  Description of Artificial Sequence: Synthetic oligonucleotide
  Sense Strand Starting at position 56 of SEQ ID NO: 318398
uuauguaagcaagaugguu

SEQ ID NO: 323102 - RNA, 19 nt, Artificial Sequence
  Description of Artificial Sequence: Synthetic oligonucleotide
  Antisense Strand to SEQ ID NO: 323101
aaccaucuugcuuacauaa

SEQ ID NO: 323103 - RNA, 19 nt, Artificial Sequence
  Description of Artificial Sequence: Synthetic oligonucleotide
  Sense Strand Starting at position 56 of SEQ ID NO: 318488
agucaccuacuagauguua

SEQ ID NO: 323104 - RNA, 19 nt, Artificial Sequence
  Description of Artificial Sequence: Synthetic oligonucleotide
  Antisense Strand to SEQ ID NO: 323103
uaacaucuaguaggugacu

SEQ ID NO: 323105 - RNA, 19 nt, Artificial Sequence
  Description of Artificial Sequence: Synthetic oligonucleotide
  Sense Strand Starting at position 56 of SEQ ID NO: 318644
cuaacuaaucaguggaggu

SEQ ID NO: 323106 - RNA, 19 nt, Artificial Sequence
  Description of Artificial Sequence: Synthetic oligonucleotide
  Antisense Strand to SEQ ID NO: 323105
accuccacugauuaguuag

SEQ ID NO: 323107 - RNA, 19 nt, Artificial Sequence
  Description of Artificial Sequence: Synthetic oligonucleotide
  Sense Strand Starting at position 57 of SEQ ID NO: 315257
ucaugcaagccaugacaaa

SEQ ID NO: 323108 - RNA, 19 nt, Artificial Sequence
  Description of Artificial Sequence: Synthetic oligonucleotide
  Antisense Strand to SEQ ID NO: 323107
uuugucauggcuugcauga

SEQ ID NO: 323109 - RNA, 19 nt, Artificial Sequence
  Description of Artificial Sequence: Synthetic oligonucleotide
  Sense Strand Starting at position 57 of SEQ ID NO: 315634
ucuuccaaguugucuacaa

SEQ ID NO: 323110 - RNA, 19 nt, Artificial Sequence
  Description of Artificial Sequence: Synthetic oligonucleotide
  Antisense Strand to SEQ ID NO: 323109
uuguagacaacuuggaaga

SEQ ID NO: 323111 - RNA, 19 nt, Artificial Sequence
  Description of Artificial Sequence: Synthetic oligonucleotide
  Sense Strand Starting at position 57 of SEQ ID NO: 315635
cuuccaaguugucuacaau

SEQ ID NO: 323112 - RNA, 19 nt, Artificial Sequence
  Description of Artificial Sequence: Synthetic oligonucleotide
  Antisense Strand to SEQ ID NO: 323111
auuguagacaacuuggaag

SEQ ID NO: 323113 - RNA, 19 nt, Artificial Sequence
  Description of Artificial Sequence: Synthetic oligonucleotide
  Sense Strand Starting at position 57 of SEQ ID NO: 315636
uuccaaguugucuacaaug

SEQ ID NO: 323114 - RNA, 19 nt, Artificial Sequence
  Description of Artificial Sequence: Synthetic oligonucleotide
  Antisense Strand to SEQ ID NO: 323113
cauuguagacaacuuggaa

SEQ ID NO: 323115 - RNA, 19 nt, Artificial Sequence
  Description of Artificial Sequence: Synthetic oligonucleotide
  Sense Strand Starting at position 57 of SEQ ID NO: 315638
ccaaguugucuacaaugaa

SEQ ID NO: 323116 - RNA, 19 nt, Artificial Sequence
  Description of Artificial Sequence: Synthetic oligonucleotide
  Antisense Strand to SEQ ID NO: 323115
uucauuguagacaacuugg

SEQ ID NO: 323117 - RNA, 19 nt, Artificial Sequence
  Description of Artificial Sequence: Synthetic oligonucleotide
  Sense Strand Starting at position 57 of SEQ ID NO: 316156
ccucuagauuuguaugacu

SEQ ID NO: 323118 - RNA, 19 nt, Artificial Sequence
  Description of Artificial Sequence: Synthetic oligonucleotide
  Antisense Strand to SEQ ID NO: 323117
agucauacaaaucuagagg

SEQ ID NO: 323119 - RNA, 19 nt, Artificial Sequence
  Description of Artificial Sequence: Synthetic oligonucleotide
  Sense Strand Starting at position 57 of SEQ ID NO: 316159
cuagauuuguaugacuuua

SEQ ID NO: 323120 - RNA, 19 nt, Artificial Sequence
  Description of Artificial Sequence: Synthetic oligonucleotide
  Antisense Strand to SEQ ID NO: 323119
uaaagucauacaaaucuag

SEQ ID NO: 323121 - RNA, 19 nt, Artificial Sequence
  Description of Artificial Sequence: Synthetic oligonucleotide
  Sense Strand Starting at position 57 of SEQ ID NO: 316199
aguggauuuaaccgcuuua

SEQ ID NO: 323122 - RNA, 19 nt, Artificial Sequence
  Description of Artificial Sequence: Synthetic oligonucleotide
  Antisense Strand to SEQ ID NO: 323121
uaaagcgguuaaauccacu

SEQ ID NO: 323123 - RNA, 19 nt, Artificial Sequence
  Description of Artificial Sequence: Synthetic oligonucleotide
  Sense Strand Starting at position 57 of SEQ ID NO: 316265
auacaacugugucuugagu

SEQ ID NO: 323124 - RNA, 19 nt, Artificial Sequence
  Description of Artificial Sequence: Synthetic oligonucleotide
  Antisense Strand to SEQ ID NO: 323123
acucaagacacaguuguau

SEQ ID NO: 323125 - RNA, 19 nt, Artificial Sequence
  Description of Artificial Sequence: Synthetic oligonucleotide
  Sense Strand Starting at position 57 of SEQ ID NO: 316273
gugucuugagucugaauaa

SEQ ID NO: 323126 - RNA, 19 nt, Artificial Sequence
  Description of Artificial Sequence: Synthetic oligonucleotide
  Antisense Strand to SEQ ID NO: 323125
uuauucagacucaagacac

SEQ ID NO: 323127 - RNA, 19 nt, Artificial Sequence
  Description of Artificial Sequence: Synthetic oligonucleotide
  Sense Strand Starting at position 57 of SEQ ID NO: 316328
caccguccugcuggaauau

SEQ ID NO: 323128 - RNA, 19 nt, Artificial Sequence
  Description of Artificial Sequence: Synthetic oligonucleotide
  Antisense Strand to SEQ ID NO: 323127
auauuccagcaggacggug

SEQ ID NO: 323129 - RNA, 19 nt, Artificial Sequence
  Description of Artificial Sequence: Synthetic oligonucleotide
  Sense Strand Starting at position 57 of SEQ ID NO: 316329
accguccugcuggaauaua

SEQ ID NO: 323130 - RNA, 19 nt, Artificial Sequence
  Description of Artificial Sequence: Synthetic oligonucleotide
  Antisense Strand to SEQ ID NO: 323129
uauauuccagcaggacggu

SEQ ID NO: 323131 - RNA, 19 nt, Artificial Sequence
  Description of Artificial Sequence: Synthetic oligonucleotide
  Sense Strand Starting at position 57 of SEQ ID NO: 316448
ucaggugucccaggcacua

SEQ ID NO: 323132 - RNA, 19 nt, Artificial Sequence
  Description of Artificial Sequence: Synthetic oligonucleotide
  Antisense Strand to SEQ ID NO: 323131
uagugccugggacaccuga

SEQ ID NO: 323133 - RNA, 19 nt, Artificial Sequence
  Description of Artificial Sequence: Synthetic oligonucleotide
  Sense Strand Starting at position 57 of SEQ ID NO: 316461
gcacuagccagacagguau

SEQ ID NO: 323134 - RNA, 19 nt, Artificial Sequence
  Description of Artificial Sequence: Synthetic oligonucleotide
  Antisense Strand to SEQ ID NO: 323133
auaccugucuggcuagugc

SEQ ID NO: 323135 - RNA, 19 nt, Artificial Sequence
  Description of Artificial Sequence: Synthetic oligonucleotide
  Sense Strand Starting at position 57 of SEQ ID NO: 316468
ccagacagguaucuauuau

SEQ ID NO: 323136 - RNA, 19 nt, Artificial Sequence
  Description of Artificial Sequence: Synthetic oligonucleotide
  Antisense Strand to SEQ ID NO: 323135
auaauagauaccugucugg

SEQ ID NO: 323137 - RNA, 19 nt, Artificial Sequence
  Description of Artificial Sequence: Synthetic oligonucleotide
  Sense Strand Starting at position 57 of SEQ ID NO: 316525
cucagucaccucgauguga

SEQ ID NO: 323138 - RNA, 19 nt, Artificial Sequence
  Description of Artificial Sequence: Synthetic oligonucleotide
  Antisense Strand to SEQ ID NO: 323137
ucacaucgaggugacugag

SEQ ID NO: 323139 - RNA, 19 nt, Artificial Sequence
  Description of Artificial Sequence: Synthetic oligonucleotide
  Sense Strand Starting at position 57 of SEQ ID NO: 316533
ccucgaugugagcauuauc

SEQ ID NO: 323140 - RNA, 19 nt, Artificial Sequence
  Description of Artificial Sequence: Synthetic oligonucleotide
  Antisense Strand to SEQ ID NO: 323139
gauaaugcucacaucgagg

SEQ ID NO: 323141 - RNA, 19 nt, Artificial Sequence
  Description of Artificial Sequence: Synthetic oligonucleotide
  Sense Strand Starting at position 57 of SEQ ID NO: 316567
ggccaaaccugcuuggaga

SEQ ID NO: 323142 - RNA, 19 nt, Artificial Sequence
  Description of Artificial Sequence: Synthetic oligonucleotide
  Antisense Strand to SEQ ID NO: 323141
ucuccaagcagguuuggcc

SEQ ID NO: 323143 - RNA, 19 nt, Artificial Sequence
  Description of Artificial Sequence: Synthetic oligonucleotide
  Sense Strand Starting at position 57 of SEQ ID NO: 317398
ugggcugucgccuggaaca

SEQ ID NO: 323144 - RNA, 19 nt, Artificial Sequence
  Description of Artificial Sequence: Synthetic oligonucleotide
  Antisense Strand to SEQ ID NO: 323143
uguuccaggcgacagccca

SEQ ID NO: 323145 - RNA, 19 nt, Artificial Sequence
  Description of Artificial Sequence: Synthetic oligonucleotide
  Sense Strand Starting at position 57 of SEQ ID NO: 318346
uuuaguuacccagggucua

SEQ ID NO: 323146 - RNA, 19 nt, Artificial Sequence
  Description of Artificial Sequence: Synthetic oligonucleotide
  Antisense Strand to SEQ ID NO: 323145
uagacccuggguaacuaaa

SEQ ID NO: 323147 - RNA, 19 nt, Artificial Sequence
  Description of Artificial Sequence: Synthetic oligonucleotide
  Sense Strand Starting at position 57 of SEQ ID NO: 318592
ucaagcauccacuguggau

SEQ ID NO: 323148 - RNA, 19 nt, Artificial Sequence
  Description of Artificial Sequence: Synthetic oligonucleotide
  Antisense Strand to SEQ ID NO: 323147
auccacaguggaugcuuga

SEQ ID NO: 323149 - RNA, 19 nt, Artificial Sequence
  Description of Artificial Sequence: Synthetic oligonucleotide
  Sense Strand Starting at position 57 of SEQ ID NO: 318606
uggaucuuggaauguaucu

SEQ ID NO: 323150 - RNA, 19 nt, Artificial Sequence
  Description of Artificial Sequence: Synthetic oligonucleotide
  Antisense Strand to SEQ ID NO: 323149
agauacauuccaagaucca

SEQ ID NO: 323151 - RNA, 19 nt, Artificial Sequence
  Description of Artificial Sequence: Synthetic oligonucleotide
  Sense Strand Starting at position 57 of SEQ ID NO: 318653
caauguuuagaacaguguu

SEQ ID NO: 323152 - RNA, 19 nt, Artificial Sequence
  Description of Artificial Sequence: Synthetic oligonucleotide
  Antisense Strand to SEQ ID NO: 323151
aacacuguucuaaacauug

SEQ ID NO: 323153 - RNA, 19 nt, Artificial Sequence
  Description of Artificial Sequence: Synthetic oligonucleotide
  Sense Strand Starting at position 57 of SEQ ID NO: 318665
caguguuagguccauagca

SEQ ID NO: 323154 - RNA, 19 nt, Artificial Sequence
  Description of Artificial Sequence: Synthetic oligonucleotide
  Antisense Strand to SEQ ID NO: 323153
ugcuauggaccuaacacug

SEQ ID NO: 323155 - RNA, 19 nt, Artificial Sequence
  Description of Artificial Sequence: Synthetic oligonucleotide
  Sense Strand Starting at position 57 of SEQ ID NO: 318667
guguuagguccauagcaga

SEQ ID NO: 323156 - RNA, 19 nt, Artificial Sequence
  Description of Artificial Sequence: Synthetic oligonucleotide
  Antisense Strand to SEQ ID NO: 323155
ucugcuauggaccuaacac

SEQ ID NO: 323157 - RNA, 19 nt, Artificial Sequence
  Description of Artificial Sequence: Synthetic oligonucleotide
  Sense Strand Starting at position 57 of SEQ ID NO: 318747
uccagcuuuggccagauca

SEQ ID NO: 323158 - RNA, 19 nt, Artificial Sequence
  Description of Artificial Sequence: Synthetic oligonucleotide
  Antisense Strand to SEQ ID NO: 323157
ugaucuggccaaagcugga

SEQ ID NO: 323159 - RNA, 19 nt, Artificial Sequence
  Description of Artificial Sequence: Synthetic oligonucleotide
  Sense Strand Starting at position 57 of SEQ ID NO: 318788
ggagaaggcuggucuguuc

SEQ ID NO: 323160 - RNA, 19 nt, Artificial Sequence
  Description of Artificial Sequence: Synthetic oligonucleotide
  Antisense Strand to SEQ ID NO: 323159
gaacagaccagccuucucc

SEQ ID NO: 323161 - RNA, 19 nt, Artificial Sequence
  Description of Artificial Sequence: Synthetic oligonucleotide
  Sense Strand Starting at position 57 of SEQ ID NO: 318874
gcagaagacucguuacuug

SEQ ID NO: 323162 - RNA, 19 nt, Artificial Sequence
  Description of Artificial Sequence: Synthetic oligonucleotide
  Antisense Strand to SEQ ID NO: 323161
caaguaacgagucuucugc

SEQ ID NO: 323163 - RNA, 19 nt, Artificial Sequence
  Description of Artificial Sequence: Synthetic oligonucleotide
  Sense Strand Starting at position 57 of SEQ ID NO: 318877
gaagacucguuacuuggua

SEQ ID NO: 323164 - RNA, 19 nt, Artificial Sequence
  Description of Artificial Sequence: Synthetic oligonucleotide
  Antisense Strand to SEQ ID NO: 323163
uaccaaguaacgagucuuc

SEQ ID NO: 323165 - RNA, 19 nt, Artificial Sequence
  Description of Artificial Sequence: Synthetic oligonucleotide
  Sense Strand Starting at position 57 of SEQ ID NO: 318893
guaggagcaguuugucauu

SEQ ID NO: 323166 - RNA, 19 nt, Artificial Sequence
  Description of Artificial Sequence: Synthetic oligonucleotide
  Antisense Strand to SEQ ID NO: 323165
aaugacaaacugcuccuac

SEQ ID NO: 323167 - RNA, 19 nt, Artificial Sequence
  Description of Artificial Sequence: Synthetic oligonucleotide
  Sense Strand Starting at position 57 of SEQ ID NO: 318895
aggagcaguuugucauucu

SEQ ID NO: 323168 - RNA, 19 nt, Artificial Sequence
  Description of Artificial Sequence: Synthetic oligonucleotide
  Antisense Strand to SEQ ID NO: 323167
agaaugacaaacugcuccu

SEQ ID NO: 323169 - RNA, 19 nt, Artificial Sequence
  Description of Artificial Sequence: Synthetic oligonucleotide
  Sense Strand Starting at position 57 of SEQ ID NO: 318898
agcaguuugucauucuuuc

SEQ ID NO: 323170 - RNA, 19 nt, Artificial Sequence
  Description of Artificial Sequence: Synthetic oligonucleotide
  Antisense Strand to SEQ ID NO: 323169
gaaagaaugacaaacugcu

SEQ ID NO: 323171 - RNA, 19 nt, Artificial Sequence
  Description of Artificial Sequence: Synthetic oligonucleotide
  Sense Strand Starting at position 57 of SEQ ID NO: 318902
guuugucauucuuucuagu

SEQ ID NO: 323172 - RNA, 19 nt, Artificial Sequence
  Description of Artificial Sequence: Synthetic oligonucleotide
  Antisense Strand to SEQ ID NO: 323171
acuagaaagaaugacaaac

SEQ ID NO: 323173 - RNA, 19 nt, Artificial Sequence
  Description of Artificial Sequence: Synthetic oligonucleotide
  Sense Strand Starting at position 57 of SEQ ID NO: 318937
ggcagcucacaacauuauu

SEQ ID NO: 323174 - RNA, 19 nt, Artificial Sequence
  Description of Artificial Sequence: Synthetic oligonucleotide
  Antisense Strand to SEQ ID NO: 323173
aauaauguugugagcugcc

SEQ ID NO: 323175 - RNA, 19 nt, Artificial Sequence
  Description of Artificial Sequence: Synthetic oligonucleotide
  Sense Strand Starting at position 57 of SEQ ID NO: 318983
guagguccugugugguuau

SEQ ID NO: 323176 - RNA, 19 nt, Artificial Sequence
  Description of Artificial Sequence: Synthetic oligonucleotide
  Antisense Strand to SEQ ID NO: 323175
auaaccacacaggaccuac

SEQ ID NO: 323177 - RNA, 19 nt, Artificial Sequence
  Description of Artificial Sequence: Synthetic oligonucleotide
  Sense Strand Starting at position 57 of SEQ ID NO: 318986
gguccugugugguuauguu

SEQ ID NO: 323178 - RNA, 19 nt, Artificial Sequence
  Description of Artificial Sequence: Synthetic oligonucleotide
  Antisense Strand to SEQ ID NO: 323177
aacauaaccacacaggacc

SEQ ID NO: 323179 - RNA, 19 nt, Artificial Sequence
  Description of Artificial Sequence: Synthetic oligonucleotide
  Sense Strand Starting at position 57 of SEQ ID NO: 318990
cugugugguuauguucaga

SEQ ID NO: 323180 - RNA, 19 nt, Artificial Sequence
  Description of Artificial Sequence: Synthetic oligonucleotide
  Antisense Strand to SEQ ID NO: 323179
ucugaacauaaccacacag

SEQ ID NO: 323181 - RNA, 19 nt, Artificial Sequence
  Description of Artificial Sequence: Synthetic oligonucleotide
  Sense Strand Starting at position 57 of SEQ ID NO: 318993
ugugguuauguucagaagu

SEQ ID NO: 323182 - RNA, 19 nt, Artificial Sequence
  Description of Artificial Sequence: Synthetic oligonucleotide
  Antisense Strand to SEQ ID NO: 323181
acuucugaacauaaccaca

SEQ ID NO: 323183 - RNA, 19 nt, Artificial Sequence
  Description of Artificial Sequence: Synthetic oligonucleotide
  Sense Strand Starting at position 57 of SEQ ID NO: 319054
ucaauaaguuuagacauga

SEQ ID NO: 323184 - RNA, 19 nt, Artificial Sequence
  Description of Artificial Sequence: Synthetic oligonucleotide
  Antisense Strand to SEQ ID NO: 323183
ucaugucuaaacuuauuga

SEQ ID NO: 323185 - RNA, 19 nt, Artificial Sequence
  Description of Artificial Sequence: Synthetic oligonucleotide
  Sense Strand Starting at position 57 of SEQ ID NO: 319133
acggccauccuccauauaa

SEQ ID NO: 323186 - RNA, 19 nt, Artificial Sequence
  Description of Artificial Sequence: Synthetic oligonucleotide
  Antisense Strand to SEQ ID NO: 323185
uuauauggaggauggccgu

SEQ ID NO: 323187 - RNA, 19 nt, Artificial Sequence
  Description of Artificial Sequence: Synthetic oligonucleotide
  Sense Strand Starting at position 58 of SEQ ID NO: 315294
cuguuuauuccacacuaga

SEQ ID NO: 323188 - RNA, 19 nt, Artificial Sequence
  Description of Artificial Sequence: Synthetic oligonucleotide
  Antisense Strand to SEQ ID NO: 323187
ucuaguguggaauaaacag

SEQ ID NO: 323189 - RNA, 19 nt, Artificial Sequence
  Description of Artificial Sequence: Synthetic oligonucleotide
  Sense Strand Starting at position 58 of SEQ ID NO: 315413
cagcacugagcucaggaau

SEQ ID NO: 323190 - RNA, 19 nt, Artificial Sequence
  Description of Artificial Sequence: Synthetic oligonucleotide
  Antisense Strand to SEQ ID NO: 323189
auuccugagcucagugcug

SEQ ID NO: 323191 - RNA, 19 nt, Artificial Sequence
  Description of Artificial Sequence: Synthetic oligonucleotide
  Sense Strand Starting at position 58 of SEQ ID NO: 315562
aggcauaaccuuuagagca

SEQ ID NO: 323192 - RNA, 19 nt, Artificial Sequence
  Description of Artificial Sequence: Synthetic oligonucleotide
  Antisense Strand to SEQ ID NO: 323191
ugcucuaaagguuaugccu

SEQ ID NO: 323193 - RNA, 19 nt, Artificial Sequence
  Description of Artificial Sequence: Synthetic oligonucleotide
  Sense Strand Starting at position 58 of SEQ ID NO: 315935
aucugaaaucgugauucca

SEQ ID NO: 323194 - RNA, 19 nt, Artificial Sequence
  Description of Artificial Sequence: Synthetic oligonucleotide
  Antisense Strand to SEQ ID NO: 323193
uggaaucacgauuucagau

SEQ ID NO: 323195 - RNA, 19 nt, Artificial Sequence
  Description of Artificial Sequence: Synthetic oligonucleotide
  Sense Strand Starting at position 58 of SEQ ID NO: 316007
augucaggaugccugaauu

SEQ ID NO: 323196 - RNA, 19 nt, Artificial Sequence
  Description of Artificial Sequence: Synthetic oligonucleotide
  Antisense Strand to SEQ ID NO: 323195
aauucaggcauccugacau

SEQ ID NO: 323197 - RNA, 19 nt, Artificial Sequence
  Description of Artificial Sequence: Synthetic oligonucleotide
  Sense Strand Starting at position 58 of SEQ ID NO: 316027
uccaaauuauuugggucaa

SEQ ID NO: 323198 - RNA, 19 nt, Artificial Sequence
  Description of Artificial Sequence: Synthetic oligonucleotide
  Antisense Strand to SEQ ID NO: 323197
uugacccaaauaauuugga

SEQ ID NO: 323199 - RNA, 19 nt, Artificial Sequence
  Description of Artificial Sequence: Synthetic oligonucleotide
  Sense Strand Starting at position 58 of SEQ ID NO: 316028
ccaaauuauuugggucaaa

SEQ ID NO: 323200 - RNA, 19 nt, Artificial Sequence
  Description of Artificial Sequence: Synthetic oligonucleotide
  Antisense Strand to SEQ ID NO: 323199
uuugacccaaauaauuugg

SEQ ID NO: 323201 - RNA, 19 nt, Artificial Sequence
  Description of Artificial Sequence: Synthetic oligonucleotide
  Sense Strand Starting at position 58 of SEQ ID NO: 316094
cuggauuagcccugguauu

SEQ ID NO: 323202 - RNA, 19 nt, Artificial Sequence
  Description of Artificial Sequence: Synthetic oligonucleotide
  Antisense Strand to SEQ ID NO: 323201
aauaccagggcuaauccag

SEQ ID NO: 323203 - RNA, 19 nt, Artificial Sequence
  Description of Artificial Sequence: Synthetic oligonucleotide
  Sense Strand Starting at position 58 of SEQ ID NO: 316095
uggauuagcccugguauua

SEQ ID NO: 323204 - RNA, 19 nt, Artificial Sequence
  Description of Artificial Sequence: Synthetic oligonucleotide
  Antisense Strand to SEQ ID NO: 323203
uaauaccagggcuaaucca

SEQ ID NO: 323205 - RNA, 19 nt, Artificial Sequence
  Description of Artificial Sequence: Synthetic oligonucleotide
  Sense Strand Starting at position 58 of SEQ ID NO: 316291
gcaccaaguccacagguau

SEQ ID NO: 323206 - RNA, 19 nt, Artificial Sequence
  Description of Artificial Sequence: Synthetic oligonucleotide
  Antisense Strand to SEQ ID NO: 323205
auaccuguggacuuggugc

SEQ ID NO: 323207 - RNA, 19 nt, Artificial Sequence
  Description of Artificial Sequence: Synthetic oligonucleotide
  Sense Strand Starting at position 58 of SEQ ID NO: 316462
agguaaggguuuccaguau

SEQ ID NO: 323208 - RNA, 19 nt, Artificial Sequence
  Description of Artificial Sequence: Synthetic oligonucleotide
  Antisense Strand to SEQ ID NO: 323207
auacuggaaacccuuaccu

SEQ ID NO: 323209 - RNA, 19 nt, Artificial Sequence
  Description of Artificial Sequence: Synthetic oligonucleotide
  Sense Strand Starting at position 58 of SEQ ID NO: 316520
ggaacugacaguggugaau

SEQ ID NO: 323210 - RNA, 19 nt, Artificial Sequence
  Description of Artificial Sequence: Synthetic oligonucleotide
  Antisense Strand to SEQ ID NO: 323209
auucaccacugucaguucc

SEQ ID NO: 323211 - RNA, 19 nt, Artificial Sequence
  Description of Artificial Sequence: Synthetic oligonucleotide
  Sense Strand Starting at position 58 of SEQ ID NO: 316571
gguucaggugcagaguaau

SEQ ID NO: 323212 - RNA, 19 nt, Artificial Sequence
  Description of Artificial Sequence: Synthetic oligonucleotide
  Antisense Strand to SEQ ID NO: 323211
auuacucugcaccugaacc

SEQ ID NO: 323213 - RNA, 19 nt, Artificial Sequence
  Description of Artificial Sequence: Synthetic oligonucleotide
  Sense Strand Starting at position 58 of SEQ ID NO: 316583
gaguaaugagaggguggua

SEQ ID NO: 323214 - RNA, 19 nt, Artificial Sequence
  Description of Artificial Sequence: Synthetic oligonucleotide
  Antisense Strand to SEQ ID NO: 323213
uaccacccucucauuacuc

SEQ ID NO: 323215 - RNA, 19 nt, Artificial Sequence
  Description of Artificial Sequence: Synthetic oligonucleotide
  Sense Strand Starting at position 58 of SEQ ID NO: 316726
gcgugagaccugucacggu

SEQ ID NO: 323216 - RNA, 19 nt, Artificial Sequence
  Description of Artificial Sequence: Synthetic oligonucleotide
  Antisense Strand to SEQ ID NO: 323215
accgugacaggucucacgc

SEQ ID NO: 323217 - RNA, 19 nt, Artificial Sequence
  Description of Artificial Sequence: Synthetic oligonucleotide
  Sense Strand Starting at position 58 of SEQ ID NO: 316853
guuccugcucugggaggau

SEQ ID NO: 323218 - RNA, 19 nt, Artificial Sequence
  Description of Artificial Sequence: Synthetic oligonucleotide
  Antisense Strand to SEQ ID NO: 323217
auccucccagagcaggaac

SEQ ID NO: 323219 - RNA, 19 nt, Artificial Sequence
  Description of Artificial Sequence: Synthetic oligonucleotide
  Sense Strand Starting at position 58 of SEQ ID NO: 316866
gaggauuccaagcgguauc

SEQ ID NO: 323220 - RNA, 19 nt, Artificial Sequence
  Description of Artificial Sequence: Synthetic oligonucleotide
  Antisense Strand to SEQ ID NO: 323219
gauaccgcuuggaauccuc

SEQ ID NO: 323221 - RNA, 19 nt, Artificial Sequence
  Description of Artificial Sequence: Synthetic oligonucleotide
  Sense Strand Starting at position 58 of SEQ ID NO: 317356
accgacugccuucgagaaa

SEQ ID NO: 323222 - RNA, 19 nt, Artificial Sequence
  Description of Artificial Sequence: Synthetic oligonucleotide
  Antisense Strand to SEQ ID NO: 323221
uuucucgaaggcagucggu

SEQ ID NO: 323223 - RNA, 19 nt, Artificial Sequence
  Description of Artificial Sequence: Synthetic oligonucleotide
  Sense Strand Starting at position 58 of SEQ ID NO: 317546
uuguguucuggagagcuuu

SEQ ID NO: 323224 - RNA, 19 nt, Artificial Sequence
  Description of Artificial Sequence: Synthetic oligonucleotide
  Antisense Strand to SEQ ID NO: 323223
aaagcucuccagaacacaa

SEQ ID NO: 323225 - RNA, 19 nt, Artificial Sequence
  Description of Artificial Sequence: Synthetic oligonucleotide
  Sense Strand Starting at position 58 of SEQ ID NO: 317552
ucuggagagcuuugggaua

SEQ ID NO: 323226 - RNA, 19 nt, Artificial Sequence
  Description of Artificial Sequence: Synthetic oligonucleotide
  Antisense Strand to SEQ ID NO: 323225
uaucccaaagcucuccaga

SEQ ID NO: 323227 - RNA, 19 nt, Artificial Sequence
  Description of Artificial Sequence: Synthetic oligonucleotide
  Sense Strand Starting at position 58 of SEQ ID NO: 317566
ggauauuaaugccauuugu

SEQ ID NO: 323228 - RNA, 19 nt, Artificial Sequence
  Description of Artificial Sequence: Synthetic oligonucleotide
  Antisense Strand to SEQ ID NO: 323227
acaaauggcauuaauaucc

SEQ ID NO: 323229 - RNA, 19 nt, Artificial Sequence
  Description of Artificial Sequence: Synthetic oligonucleotide
  Sense Strand Starting at position 58 of SEQ ID NO: 317594
ucuguuaagccuuggauug

SEQ ID NO: 323230 - RNA, 19 nt, Artificial Sequence
  Description of Artificial Sequence: Synthetic oligonucleotide
  Antisense Strand to SEQ ID NO: 323229
caauccaaggcuuaacaga

SEQ ID NO: 323231 - RNA, 19 nt, Artificial Sequence
  Description of Artificial Sequence: Synthetic oligonucleotide
  Sense Strand Starting at position 58 of SEQ ID NO: 317690
agaaguguuugugcugaau

SEQ ID NO: 323232 - RNA, 19 nt, Artificial Sequence
  Description of Artificial Sequence: Synthetic oligonucleotide
  Antisense Strand to SEQ ID NO: 323231
auucagcacaaacacuucu

SEQ ID NO: 323233 - RNA, 19 nt, Artificial Sequence
  Description of Artificial Sequence: Synthetic oligonucleotide
  Sense Strand Starting at position 58 of SEQ ID NO: 317693
aguguuugugcugaauuua

SEQ ID NO: 323234 - RNA, 19 nt, Artificial Sequence
  Description of Artificial Sequence: Synthetic oligonucleotide
  Antisense Strand to SEQ ID NO: 323233
uaaauucagcacaaacacu

SEQ ID NO: 323235 - RNA, 19 nt, Artificial Sequence
  Description of Artificial Sequence: Synthetic oligonucleotide
  Sense Strand Starting at position 58 of SEQ ID NO: 317821
aggcgacuacuuggaagaa

SEQ ID NO: 323236 - RNA, 19 nt, Artificial Sequence
  Description of Artificial Sequence: Synthetic oligonucleotide
  Antisense Strand to SEQ ID NO: 323235
uucuuccaaguagucgccu

SEQ ID NO: 323237 - RNA, 19 nt, Artificial Sequence
  Description of Artificial Sequence: Synthetic oligonucleotide
  Sense Strand Starting at position 58 of SEQ ID NO: 317915
cgauguucuccuuagcuau

SEQ ID NO: 323238 - RNA, 19 nt, Artificial Sequence
  Description of Artificial Sequence: Synthetic oligonucleotide
  Antisense Strand to SEQ ID NO: 323237
auagcuaaggagaacaucg

SEQ ID NO: 323239 - RNA, 19 nt, Artificial Sequence
  Description of Artificial Sequence: Synthetic oligonucleotide
  Sense Strand Starting at position 58 of SEQ ID NO: 317958
uagugacaggcauauaugu

SEQ ID NO: 323240 - RNA, 19 nt, Artificial Sequence
  Description of Artificial Sequence: Synthetic oligonucleotide
  Antisense Strand to SEQ ID NO: 323239
acauauaugccugucacua

SEQ ID NO: 323241 - RNA, 19 nt, Artificial Sequence
  Description of Artificial Sequence: Synthetic oligonucleotide
  Sense Strand Starting at position 58 of SEQ ID NO: 317968
cauauauguugcuuagaag

SEQ ID NO: 323242 - RNA, 19 nt, Artificial Sequence
  Description of Artificial Sequence: Synthetic oligonucleotide
  Antisense Strand to SEQ ID NO: 323241
cuucuaagcaacauauaug

SEQ ID NO: 323243 - RNA, 19 nt, Artificial Sequence
  Description of Artificial Sequence: Synthetic oligonucleotide
  Sense Strand Starting at position 58 of SEQ ID NO: 317969
auauauguugcuuagaaga

SEQ ID NO: 323244 - RNA, 19 nt, Artificial Sequence
  Description of Artificial Sequence: Synthetic oligonucleotide
  Antisense Strand to SEQ ID NO: 323243
ucuucuaagcaacauauau

SEQ ID NO: 323245 - RNA, 19 nt, Artificial Sequence
  Description of Artificial Sequence: Synthetic oligonucleotide
  Sense Strand Starting at position 58 of SEQ ID NO: 317982
agaagacguucgaagaguu

SEQ ID NO: 323246 - RNA, 19 nt, Artificial Sequence
  Description of Artificial Sequence: Synthetic oligonucleotide
  Antisense Strand to SEQ ID NO: 323245
aacucuucgaacgucuucu

SEQ ID NO: 323247 - RNA, 19 nt, Artificial Sequence
  Description of Artificial Sequence: Synthetic oligonucleotide
  Sense Strand Starting at position 58 of SEQ ID NO: 318002
aauuuaguuugacauggga

SEQ ID NO: 323248 - RNA, 19 nt, Artificial Sequence
  Description of Artificial Sequence: Synthetic oligonucleotide
  Antisense Strand to SEQ ID NO: 323247
ucccaugucaaacuaaauu

SEQ ID NO: 323249 - RNA, 19 nt, Artificial Sequence
  Description of Artificial Sequence: Synthetic oligonucleotide
  Sense Strand Starting at position 58 of SEQ ID NO: 318004
uuuaguuugacaugggauu

SEQ ID NO: 323250 - RNA, 19 nt, Artificial Sequence
  Description of Artificial Sequence: Synthetic oligonucleotide
  Antisense Strand to SEQ ID NO: 323249
aaucccaugucaaacuaaa

SEQ ID NO: 323251 - RNA, 19 nt, Artificial Sequence
  Description of Artificial Sequence: Synthetic oligonucleotide
  Sense Strand Starting at position 58 of SEQ ID NO: 318142
cucuuucuguaggcagaga

SEQ ID NO: 323252 - RNA, 19 nt, Artificial Sequence
  Description of Artificial Sequence: Synthetic oligonucleotide
  Antisense Strand to SEQ ID NO: 323251
ucucugccuacagaaagag

SEQ ID NO: 323253 - RNA, 19 nt, Artificial Sequence
  Description of Artificial Sequence: Synthetic oligonucleotide
  Sense Strand Starting at position 58 of SEQ ID NO: 318143
ucuuucuguaggcagagau

SEQ ID NO: 323254 - RNA, 19 nt, Artificial Sequence
  Description of Artificial Sequence: Synthetic oligonucleotide
  Antisense Strand to SEQ ID NO: 323253
aucucugccuacagaaaga

SEQ ID NO: 323255 - RNA, 19 nt, Artificial Sequence
  Description of Artificial Sequence: Synthetic oligonucleotide
  Sense Strand Starting at position 58 of SEQ ID NO: 318189
acgccugucaugggaggaa

SEQ ID NO: 323256 - RNA, 19 nt, Artificial Sequence
  Description of Artificial Sequence: Synthetic oligonucleotide
  Antisense Strand to SEQ ID NO: 323255
uuccucccaugacaggcgu

SEQ ID NO: 323257 - RNA, 19 nt, Artificial Sequence
  Description of Artificial Sequence: Synthetic oligonucleotide
  Sense Strand Starting at position 58 of SEQ ID NO: 318223
gacagaucugguugcaaau

SEQ ID NO: 323258 - RNA, 19 nt, Artificial Sequence
  Description of Artificial Sequence: Synthetic oligonucleotide
  Antisense Strand to SEQ ID NO: 323257
auuugcaaccagaucuguc

SEQ ID NO: 323259 - RNA, 19 nt, Artificial Sequence
  Description of Artificial Sequence: Synthetic oligonucleotide
  Sense Strand Starting at position 58 of SEQ ID NO: 318322
gccugaagucauuaaguga

SEQ ID NO: 323260 - RNA, 19 nt, Artificial Sequence
  Description of Artificial Sequence: Synthetic oligonucleotide
  Antisense Strand to SEQ ID NO: 323259
ucacuuaaugacuucaggc

SEQ ID NO: 323261 - RNA, 19 nt, Artificial Sequence
  Description of Artificial Sequence: Synthetic oligonucleotide
  Sense Strand Starting at position 58 of SEQ ID NO: 318329
gucauuaagugacugaaua

SEQ ID NO: 323262 - RNA, 19 nt, Artificial Sequence
  Description of Artificial Sequence: Synthetic oligonucleotide
  Antisense Strand to SEQ ID NO: 323261
uauucagucacuuaaugac

SEQ ID NO: 323263 - RNA, 19 nt, Artificial Sequence
  Description of Artificial Sequence: Synthetic oligonucleotide
  Sense Strand Starting at position 58 of SEQ ID NO: 318330
ucauuaagugacugaauac

SEQ ID NO: 323264 - RNA, 19 nt, Artificial Sequence
  Description of Artificial Sequence: Synthetic oligonucleotide
  Antisense Strand to SEQ ID NO: 323263
guauucagucacuuaauga

SEQ ID NO: 323265 - RNA, 19 nt, Artificial Sequence
  Description of Artificial Sequence: Synthetic oligonucleotide
  Sense Strand Starting at position 58 of SEQ ID NO: 318432
gcuaccaauuuagaguaaa

SEQ ID NO: 323266 - RNA, 19 nt, Artificial Sequence
  Description of Artificial Sequence: Synthetic oligonucleotide
  Antisense Strand to SEQ ID NO: 323265
uuuacucuaaauugguagc

SEQ ID NO: 323267 - RNA, 19 nt, Artificial Sequence
  Description of Artificial Sequence: Synthetic oligonucleotide
  Sense Strand Starting at position 59 of SEQ ID NO: 315349
ugaggacaucugggcauua

SEQ ID NO: 323268 - RNA, 19 nt, Artificial Sequence
  Description of Artificial Sequence: Synthetic oligonucleotide
  Antisense Strand to SEQ ID NO: 323267
uaaugcccagauguccuca

SEQ ID NO: 323269 - RNA, 19 nt, Artificial Sequence
  Description of Artificial Sequence: Synthetic oligonucleotide
  Sense Strand Starting at position 59 of SEQ ID NO: 315368
ggcuguuugcccgcuaaca

SEQ ID NO: 323270 - RNA, 19 nt, Artificial Sequence
  Description of Artificial Sequence: Synthetic oligonucleotide
  Antisense Strand to SEQ ID NO: 323269
uguuagcgggcaaacagcc

SEQ ID NO: 323271 - RNA, 19 nt, Artificial Sequence
  Description of Artificial Sequence: Synthetic oligonucleotide
  Sense Strand Starting at position 59 of SEQ ID NO: 315370
cuguuugcccgcuaacaga

SEQ ID NO: 323272 - RNA, 19 nt, Artificial Sequence
  Description of Artificial Sequence: Synthetic oligonucleotide
  Antisense Strand to SEQ ID NO: 323271
ucuguuagcgggcaaacag

SEQ ID NO: 323273 - RNA, 19 nt, Artificial Sequence
  Description of Artificial Sequence: Synthetic oligonucleotide
  Sense Strand Starting at position 59 of SEQ ID NO: 315381
cuaacagagccuuaucugu

SEQ ID NO: 323274 - RNA, 19 nt, Artificial Sequence
  Description of Artificial Sequence: Synthetic oligonucleotide
  Antisense Strand to SEQ ID NO: 323273
acagauaaggcucuguuag

SEQ ID NO: 323275 - RNA, 19 nt, Artificial Sequence
  Description of Artificial Sequence: Synthetic oligonucleotide
  Sense Strand Starting at position 59 of SEQ ID NO: 315570
aggauuaucuugcaauaac

SEQ ID NO: 323276 - RNA, 19 nt, Artificial Sequence
  Description of Artificial Sequence: Synthetic oligonucleotide
  Antisense Strand to SEQ ID NO: 323275
guuauugcaagauaauccu

SEQ ID NO: 323277 - RNA, 19 nt, Artificial Sequence
  Description of Artificial Sequence: Synthetic oligonucleotide
  Sense Strand Starting at position 59 of SEQ ID NO: 315607
gggcacaccucuuaggaga

SEQ ID NO: 323278 - RNA, 19 nt, Artificial Sequence
  Description of Artificial Sequence: Synthetic oligonucleotide
  Antisense Strand to SEQ ID NO: 323277
ucuccuaagaggugugccc

SEQ ID NO: 323279 - RNA, 19 nt, Artificial Sequence
  Description of Artificial Sequence: Synthetic oligonucleotide
  Sense Strand Starting at position 59 of SEQ ID NO: 315610
cacaccucuuaggagagau

SEQ ID NO: 323280 - RNA, 19 nt, Artificial Sequence
  Description of Artificial Sequence: Synthetic oligonucleotide
  Antisense Strand to SEQ ID NO: 323279
aucucuccuaagaggugug

SEQ ID NO: 323281 - RNA, 19 nt, Artificial Sequence
  Description of Artificial Sequence: Synthetic oligonucleotide
  Sense Strand Starting at position 59 of SEQ ID NO: 315681
gccuuuccucccugaggca

SEQ ID NO: 323282 - RNA, 19 nt, Artificial Sequence
  Description of Artificial Sequence: Synthetic oligonucleotide
  Antisense Strand to SEQ ID NO: 323281
ugccucagggaggaaaggc

SEQ ID NO: 323283 - RNA, 19 nt, Artificial Sequence
  Description of Artificial Sequence: Synthetic oligonucleotide
  Sense Strand Starting at position 59 of SEQ ID NO: 315780
caggccaugucaccagaaa

SEQ ID NO: 323284 - RNA, 19 nt, Artificial Sequence
  Description of Artificial Sequence: Synthetic oligonucleotide
  Antisense Strand to SEQ ID NO: 323283
uuucuggugacauggccug

SEQ ID NO: 323285 - RNA, 19 nt, Artificial Sequence
  Description of Artificial Sequence: Synthetic oligonucleotide
  Sense Strand Starting at position 59 of SEQ ID NO: 316068
gcaugagacugcucaccuu

SEQ ID NO: 323286 - RNA, 19 nt, Artificial Sequence
  Description of Artificial Sequence: Synthetic oligonucleotide
  Antisense Strand to SEQ ID NO: 323285
aaggugagcagucucaugc

SEQ ID NO: 323287 - RNA, 19 nt, Artificial Sequence
  Description of Artificial Sequence: Synthetic oligonucleotide
  Sense Strand Starting at position 59 of SEQ ID NO: 316248
gacagccucuuugagagaa

SEQ ID NO: 323288 - RNA, 19 nt, Artificial Sequence
  Description of Artificial Sequence: Synthetic oligonucleotide
  Antisense Strand to SEQ ID NO: 323287
uucucucaaagaggcuguc

SEQ ID NO: 323289 - RNA, 19 nt, Artificial Sequence
  Description of Artificial Sequence: Synthetic oligonucleotide
  Sense Strand Starting at position 59 of SEQ ID NO: 316394
ccgucaucucgugcacuca

SEQ ID NO: 323290 - RNA, 19 nt, Artificial Sequence
  Description of Artificial Sequence: Synthetic oligonucleotide
  Antisense Strand to SEQ ID NO: 323289
ugagugcacgagaugacgg

SEQ ID NO: 323291 - RNA, 19 nt, Artificial Sequence
  Description of Artificial Sequence: Synthetic oligonucleotide
  Sense Strand Starting at position 59 of SEQ ID NO: 317316
accaaugagucuuugagga

SEQ ID NO: 323292 - RNA, 19 nt, Artificial Sequence
  Description of Artificial Sequence: Synthetic oligonucleotide
  Antisense Strand to SEQ ID NO: 323291
uccucaaagacucauuggu

SEQ ID NO: 323293 - RNA, 19 nt, Artificial Sequence
  Description of Artificial Sequence: Synthetic oligonucleotide
  Sense Strand Starting at position 59 of SEQ ID NO: 317318
caaugagucuuugaggaug

SEQ ID NO: 323294 - RNA, 19 nt, Artificial Sequence
  Description of Artificial Sequence: Synthetic oligonucleotide
  Antisense Strand to SEQ ID NO: 323293
cauccucaaagacucauug

SEQ ID NO: 323295 - RNA, 19 nt, Artificial Sequence
  Description of Artificial Sequence: Synthetic oligonucleotide
  Sense Strand Starting at position 59 of SEQ ID NO: 317565
gggaguuccacgcagacga

SEQ ID NO: 323296 - RNA, 19 nt, Artificial Sequence
  Description of Artificial Sequence: Synthetic oligonucleotide
  Antisense Strand to SEQ ID NO: 323295
ucgucugcguggaacuccc

SEQ ID NO: 323297 - RNA, 19 nt, Artificial Sequence
  Description of Artificial Sequence: Synthetic oligonucleotide
  Sense Strand Starting at position 59 of SEQ ID NO: 317666
gggugcugcccggacuuau

SEQ ID NO: 323298 - RNA, 19 nt, Artificial Sequence
  Description of Artificial Sequence: Synthetic oligonucleotide
  Antisense Strand to SEQ ID NO: 323297
auaaguccgggcagcaccc

SEQ ID NO: 323299 - RNA, 19 nt, Artificial Sequence
  Description of Artificial Sequence: Synthetic oligonucleotide
  Sense Strand Starting at position 59 of SEQ ID NO: 317698
ugccgcaagagcuaucuau

SEQ ID NO: 323300 - RNA, 19 nt, Artificial Sequence
  Description of Artificial Sequence: Synthetic oligonucleotide
  Antisense Strand to SEQ ID NO: 323299
auagauagcucuugcggca

SEQ ID NO: 323301 - RNA, 19 nt, Artificial Sequence
  Description of Artificial Sequence: Synthetic oligonucleotide
  Sense Strand Starting at position 59 of SEQ ID NO: 317804
cugagcucuugggugugaa

SEQ ID NO: 323302 - RNA, 19 nt, Artificial Sequence
  Description of Artificial Sequence: Synthetic oligonucleotide
  Antisense Strand to SEQ ID NO: 323301
uucacacccaagagcucag

SEQ ID NO: 323303 - RNA, 19 nt, Artificial Sequence
  Description of Artificial Sequence: Synthetic oligonucleotide
  Sense Strand Starting at position 59 of SEQ ID NO: 317805
ugagcucuugggugugaaa

SEQ ID NO: 323304 - RNA, 19 nt, Artificial Sequence
  Description of Artificial Sequence: Synthetic oligonucleotide
  Antisense Strand to SEQ ID NO: 323303
uuucacacccaagagcuca

SEQ ID NO: 323305 - RNA, 19 nt, Artificial Sequence
  Description of Artificial Sequence: Synthetic oligonucleotide
  Sense Strand Starting at position 59 of SEQ ID NO: 317908
acaggauuggcugggcuaa

SEQ ID NO: 323306 - RNA, 19 nt, Artificial Sequence
  Description of Artificial Sequence: Synthetic oligonucleotide
  Antisense Strand to SEQ ID NO: 323305
uuagcccagccaauccugu

SEQ ID NO: 323307 - RNA, 19 nt, Artificial Sequence
  Description of Artificial Sequence: Synthetic oligonucleotide
  Sense Strand Starting at position 59 of SEQ ID NO: 317962
ggauguucccuccauauac

SEQ ID NO: 323308 - RNA, 19 nt, Artificial Sequence
  Description of Artificial Sequence: Synthetic oligonucleotide
  Antisense Strand to SEQ ID NO: 323307
guauauggagggaacaucc

SEQ ID NO: 323309 - RNA, 19 nt, Artificial Sequence
  Description of Artificial Sequence: Synthetic oligonucleotide
  Sense Strand Starting at position 59 of SEQ ID NO: 318031
gcgugcuugugauugagag

SEQ ID NO: 323310 - RNA, 19 nt, Artificial Sequence
  Description of Artificial Sequence: Synthetic oligonucleotide
  Antisense Strand to SEQ ID NO: 323309
cucucaaucacaagcacgc

SEQ ID NO: 323311 - RNA, 19 nt, Artificial Sequence
  Description of Artificial Sequence: Synthetic oligonucleotide
  Sense Strand Starting at position 59 of SEQ ID NO: 318032
cgugcuugugauugagagu

SEQ ID NO: 323312 - RNA, 19 nt, Artificial Sequence
  Description of Artificial Sequence: Synthetic oligonucleotide
  Antisense Strand to SEQ ID NO: 323311
acucucaaucacaagcacg

SEQ ID NO: 323313 - RNA, 19 nt, Artificial Sequence
  Description of Artificial Sequence: Synthetic oligonucleotide
  Sense Strand Starting at position 59 of SEQ ID NO: 318033
gugcuugugauugagaguc

SEQ ID NO: 323314 - RNA, 19 nt, Artificial Sequence
  Description of Artificial Sequence: Synthetic oligonucleotide
  Antisense Strand to SEQ ID NO: 323313
gacucucaaucacaagcac

SEQ ID NO: 323315 - RNA, 19 nt, Artificial Sequence
  Description of Artificial Sequence: Synthetic oligonucleotide
  Sense Strand Starting at position 59 of SEQ ID NO: 318777
gccacugcauuugucagua

SEQ ID NO: 323316 - RNA, 19 nt, Artificial Sequence
  Description of Artificial Sequence: Synthetic oligonucleotide
  Antisense Strand to SEQ ID NO: 323315
uacugacaaaugcaguggc

SEQ ID NO: 323317 - RNA, 19 nt, Artificial Sequence
  Description of Artificial Sequence: Synthetic oligonucleotide
  Sense Strand Starting at position 59 of SEQ ID NO: 318781
cugcauuugucaguaugua

SEQ ID NO: 323318 - RNA, 19 nt, Artificial Sequence
  Description of Artificial Sequence: Synthetic oligonucleotide
  Antisense Strand to SEQ ID NO: 323317
uacauacugacaaaugcag

SEQ ID NO: 323319 - RNA, 19 nt, Artificial Sequence
  Description of Artificial Sequence: Synthetic oligonucleotide
  Sense Strand Starting at position 59 of SEQ ID NO: 318782
ugcauuugucaguauguac

SEQ ID NO: 323320 - RNA, 19 nt, Artificial Sequence
  Description of Artificial Sequence: Synthetic oligonucleotide
  Antisense Strand to SEQ ID NO: 323319
guacauacugacaaaugca

SEQ ID NO: 323321 - RNA, 19 nt, Artificial Sequence
  Description of Artificial Sequence: Synthetic oligonucleotide
  Sense Strand Starting at position 59 of SEQ ID NO: 318922
agugccuguuccuuagauu

SEQ ID NO: 323322 - RNA, 19 nt, Artificial Sequence
  Description of Artificial Sequence: Synthetic oligonucleotide
  Antisense Strand to SEQ ID NO: 323321
aaucuaaggaacaggcacu

SEQ ID NO: 323323 - RNA, 19 nt, Artificial Sequence
  Description of Artificial Sequence: Synthetic oligonucleotide
  Sense Strand Starting at position 59 of SEQ ID NO: 318923
gugccuguuccuuagauug

SEQ ID NO: 323324 - RNA, 19 nt, Artificial Sequence
  Description of Artificial Sequence: Synthetic oligonucleotide
  Antisense Strand to SEQ ID NO: 323323
caaucuaaggaacaggcac

SEQ ID NO: 323325 - RNA, 19 nt, Artificial Sequence
  Description of Artificial Sequence: Synthetic oligonucleotide
  Sense Strand Starting at position 59 of SEQ ID NO: 318945
gugguagacuggcuaugaa

SEQ ID NO: 323326 - RNA, 19 nt, Artificial Sequence
  Description of Artificial Sequence: Synthetic oligonucleotide
  Antisense Strand to SEQ ID NO: 323325
uucauagccagucuaccac

SEQ ID NO: 323327 - RNA, 19 nt, Artificial Sequence
  Description of Artificial Sequence: Synthetic oligonucleotide
  Sense Strand Starting at position 59 of SEQ ID NO: 318948
guagacuggcuaugaacua

SEQ ID NO: 323328 - RNA, 19 nt, Artificial Sequence
  Description of Artificial Sequence: Synthetic oligonucleotide
  Antisense Strand to SEQ ID NO: 323327
uaguucauagccagucuac

SEQ ID NO: 323329 - RNA, 19 nt, Artificial Sequence
  Description of Artificial Sequence: Synthetic oligonucleotide
  Sense Strand Starting at position 59 of SEQ ID NO: 318961
gaacuaaugguguaucucu

SEQ ID NO: 323330 - RNA, 19 nt, Artificial Sequence
  Description of Artificial Sequence: Synthetic oligonucleotide
  Antisense Strand to SEQ ID NO: 323329
agagauacaccauuaguuc

SEQ ID NO: 323331 - RNA, 19 nt, Artificial Sequence
  Description of Artificial Sequence: Synthetic oligonucleotide
  Sense Strand Starting at position 59 of SEQ ID NO: 318969
gguguaucucucuggaggu

SEQ ID NO: 323332 - RNA, 19 nt, Artificial Sequence
  Description of Artificial Sequence: Synthetic oligonucleotide
  Antisense Strand to SEQ ID NO: 323331
accuccagagagauacacc

SEQ ID NO: 323333 - RNA, 19 nt, Artificial Sequence
  Description of Artificial Sequence: Synthetic oligonucleotide
  Sense Strand Starting at position 59 of SEQ ID NO: 318983
gagguugagcacuggaaga

SEQ ID NO: 323334 - RNA, 19 nt, Artificial Sequence
  Description of Artificial Sequence: Synthetic oligonucleotide
  Antisense Strand to SEQ ID NO: 323333
ucuuccagugcucaaccuc

SEQ ID NO: 323335 - RNA, 19 nt, Artificial Sequence
  Description of Artificial Sequence: Synthetic oligonucleotide
  Sense Strand Starting at position 59 of SEQ ID NO: 319015
accugaaauaaacguggaa

SEQ ID NO: 323336 - RNA, 19 nt, Artificial Sequence
  Description of Artificial Sequence: Synthetic oligonucleotide
  Antisense Strand to SEQ ID NO: 323335
uuccacguuuauuucaggu

SEQ ID NO: 323337 - RNA, 19 nt, Artificial Sequence
  Description of Artificial Sequence: Synthetic oligonucleotide
  Sense Strand Starting at position 59 of SEQ ID NO: 319017
cugaaauaaacguggaaau

SEQ ID NO: 323338 - RNA, 19 nt, Artificial Sequence
  Description of Artificial Sequence: Synthetic oligonucleotide
  Antisense Strand to SEQ ID NO: 323337
auuuccacguuuauuucag

SEQ ID NO: 323339 - RNA, 19 nt, Artificial Sequence
  Description of Artificial Sequence: Synthetic oligonucleotide
  Sense Strand Starting at position 59 of SEQ ID NO: 319167
gggauuccuguuuaucugu

SEQ ID NO: 323340 - RNA, 19 nt, Artificial Sequence
  Description of Artificial Sequence: Synthetic oligonucleotide
  Antisense Strand to SEQ ID NO: 323339
acagauaaacaggaauccc

SEQ ID NO: 323341 - RNA, 19 nt, Artificial Sequence
  Description of Artificial Sequence: Synthetic oligonucleotide
  Sense Strand Starting at position 59 of SEQ ID NO: 319172
uccuguuuaucuguguuaa

SEQ ID NO: 323342 - RNA, 19 nt, Artificial Sequence
  Description of Artificial Sequence: Synthetic oligonucleotide
  Antisense Strand to SEQ ID NO: 323341
uuaacacagauaaacagga

SEQ ID NO: 323343 - RNA, 19 nt, Artificial Sequence
  Description of Artificial Sequence: Synthetic oligonucleotide
  Sense Strand Starting at position 59 of SEQ ID NO: 319173
ccuguuuaucuguguuaaa

SEQ ID NO: 323344 - RNA, 19 nt, Artificial Sequence
  Description of Artificial Sequence: Synthetic oligonucleotide
  Antisense Strand to SEQ ID NO: 323343
uuuaacacagauaaacagg

SEQ ID NO: 323345 - RNA, 19 nt, Artificial Sequence
  Description of Artificial Sequence: Synthetic oligonucleotide
  Sense Strand Starting at position 59 of SEQ ID NO: 319217
uagcaacucugggugacuu

SEQ ID NO: 323346 - RNA, 19 nt, Artificial Sequence
  Description of Artificial Sequence: Synthetic oligonucleotide
  Antisense Strand to SEQ ID NO: 323345
aagucacccagaguugcua

SEQ ID NO: 323347 - RNA, 19 nt, Artificial Sequence
  Description of Artificial Sequence: Synthetic oligonucleotide
  Sense Strand Starting at position 60 of SEQ ID NO: 315327
uuacuuauugagcauguua

SEQ ID NO: 323348 - RNA, 19 nt, Artificial Sequence
  Description of Artificial Sequence: Synthetic oligonucleotide
  Antisense Strand to SEQ ID NO: 323347
uaacaugcucaauaaguaa

SEQ ID NO: 323349 - RNA, 19 nt, Artificial Sequence
  Description of Artificial Sequence: Synthetic oligonucleotide
  Sense Strand Starting at position 60 of SEQ ID NO: 315345
auuaauguguacuuaagac

SEQ ID NO: 323350 - RNA, 19 nt, Artificial Sequence
  Description of Artificial Sequence: Synthetic oligonucleotide
  Antisense Strand to SEQ ID NO: 323349
gucuuaaguacacauuaau

SEQ ID NO: 323351 - RNA, 19 nt, Artificial Sequence
  Description of Artificial Sequence: Synthetic oligonucleotide
  Sense Strand Starting at position 60 of SEQ ID NO: 315354
uacuuaagacuuuggguaa

SEQ ID NO: 323352 - RNA, 19 nt, Artificial Sequence
  Description of Artificial Sequence: Synthetic oligonucleotide
  Antisense Strand to SEQ ID NO: 323351
uuacccaaagucuuaagua

SEQ ID NO: 323353 - RNA, 19 nt, Artificial Sequence
  Description of Artificial Sequence: Synthetic oligonucleotide
  Sense Strand Starting at position 60 of SEQ ID NO: 315357
uuaagacuuuggguaacau

SEQ ID NO: 323354 - RNA, 19 nt, Artificial Sequence
  Description of Artificial Sequence: Synthetic oligonucleotide
  Antisense Strand to SEQ ID NO: 323353
auguuacccaaagucuuaa

SEQ ID NO: 323355 - RNA, 19 nt, Artificial Sequence
  Description of Artificial Sequence: Synthetic oligonucleotide
  Sense Strand Starting at position 60 of SEQ ID NO: 315365
uuggguaacauauggauua

SEQ ID NO: 323356 - RNA, 19 nt, Artificial Sequence
  Description of Artificial Sequence: Synthetic oligonucleotide
  Antisense Strand to SEQ ID NO: 323355
uaauccauauguuacccaa

SEQ ID NO: 323357 - RNA, 19 nt, Artificial Sequence
  Description of Artificial Sequence: Synthetic oligonucleotide
  Sense Strand Starting at position 60 of SEQ ID NO: 315421
auaggaagauuguucuuau

SEQ ID NO: 323358 - RNA, 19 nt, Artificial Sequence
  Description of Artificial Sequence: Synthetic oligonucleotide
  Antisense Strand to SEQ ID NO: 323357
auaagaacaaucuuccuau

SEQ ID NO: 323359 - RNA, 19 nt, Artificial Sequence
  Description of Artificial Sequence: Synthetic oligonucleotide
  Sense Strand Starting at position 60 of SEQ ID NO: 315422
uaggaagauuguucuuaug

SEQ ID NO: 323360 - RNA, 19 nt, Artificial Sequence
  Description of Artificial Sequence: Synthetic oligonucleotide
  Antisense Strand to SEQ ID NO: 323359
cauaagaacaaucuuccua

SEQ ID NO: 323361 - RNA, 19 nt, Artificial Sequence
  Description of Artificial Sequence: Synthetic oligonucleotide
  Sense Strand Starting at position 60 of SEQ ID NO: 315424
ggaagauuguucuuaugag

SEQ ID NO: 323362 - RNA, 19 nt, Artificial Sequence
  Description of Artificial Sequence: Synthetic oligonucleotide
  Antisense Strand to SEQ ID NO: 323361
cucauaagaacaaucuucc

SEQ ID NO: 323363 - RNA, 19 nt, Artificial Sequence
  Description of Artificial Sequence: Synthetic oligonucleotide
  Sense Strand Starting at position 60 of SEQ ID NO: 315431
uguucuuaugaggaguuua

SEQ ID NO: 323364 - RNA, 19 nt, Artificial Sequence
  Description of Artificial Sequence: Synthetic oligonucleotide
  Antisense Strand to SEQ ID NO: 323363
uaaacuccucauaagaaca

SEQ ID NO: 323365 - RNA, 19 nt, Artificial Sequence
  Description of Artificial Sequence: Synthetic oligonucleotide
  Sense Strand Starting at position 60 of SEQ ID NO: 316065
ggaaaucacugcuccacuu

SEQ ID NO: 323366 - RNA, 19 nt, Artificial Sequence
  Description of Artificial Sequence: Synthetic oligonucleotide
  Antisense Strand to SEQ ID NO: 323365
aaguggagcagugauuucc

SEQ ID NO: 323367 - RNA, 19 nt, Artificial Sequence
  Description of Artificial Sequence: Synthetic oligonucleotide
  Sense Strand Starting at position 60 of SEQ ID NO: 316201
aggugaauuugcccggguu

SEQ ID NO: 323368 - RNA, 19 nt, Artificial Sequence
  Description of Artificial Sequence: Synthetic oligonucleotide
  Antisense Strand to SEQ ID NO: 323367
aacccgggcaaauucaccu

SEQ ID NO: 323369 - RNA, 19 nt, Artificial Sequence
  Description of Artificial Sequence: Synthetic oligonucleotide
  Sense Strand Starting at position 60 of SEQ ID NO: 316202
ggugaauuugcccggguua

SEQ ID NO: 323370 - RNA, 19 nt, Artificial Sequence
  Description of Artificial Sequence: Synthetic oligonucleotide
  Antisense Strand to SEQ ID NO: 323369
uaacccgggcaaauucacc

SEQ ID NO: 323371 - RNA, 19 nt, Artificial Sequence
  Description of Artificial Sequence: Synthetic oligonucleotide
  Sense Strand Starting at position 60 of SEQ ID NO: 316203
gugaauuugcccggguuac

SEQ ID NO: 323372 - RNA, 19 nt, Artificial Sequence
  Description of Artificial Sequence: Synthetic oligonucleotide
  Antisense Strand to SEQ ID NO: 323371
guaacccgggcaaauucac

SEQ ID NO: 323373 - RNA, 19 nt, Artificial Sequence
  Description of Artificial Sequence: Synthetic oligonucleotide
  Sense Strand Starting at position 60 of SEQ ID NO: 316204
ugaauuugcccggguuacu

SEQ ID NO: 323374 - RNA, 19 nt, Artificial Sequence
  Description of Artificial Sequence: Synthetic oligonucleotide
  Antisense Strand to SEQ ID NO: 323373
aguaacccgggcaaauuca

SEQ ID NO: 323375 - RNA, 19 nt, Artificial Sequence
  Description of Artificial Sequence: Synthetic oligonucleotide
  Sense Strand Starting at position 60 of SEQ ID NO: 316335
ccucaaagaucugcagaac

SEQ ID NO: 323376 - RNA, 19 nt, Artificial Sequence
  Description of Artificial Sequence: Synthetic oligonucleotide
  Antisense Strand to SEQ ID NO: 323375
guucugcagaucuuugagg

SEQ ID NO: 323377 - RNA, 19 nt, Artificial Sequence
  Description of Artificial Sequence: Synthetic oligonucleotide
  Sense Strand Starting at position 60 of SEQ ID NO: 316401
ccaauaagucauuaggucu

SEQ ID NO: 323378 - RNA, 19 nt, Artificial Sequence
  Description of Artificial Sequence: Synthetic oligonucleotide
  Antisense Strand to SEQ ID NO: 323377
agaccuaaugacuuauugg

SEQ ID NO: 323379 - RNA, 19 nt, Artificial Sequence
  Description of Artificial Sequence: Synthetic oligonucleotide
  Sense Strand Starting at position 60 of SEQ ID NO: 316404
auaagucauuaggucucaa

SEQ ID NO: 323380 - RNA, 19 nt, Artificial Sequence
  Description of Artificial Sequence: Synthetic oligonucleotide
  Antisense Strand to SEQ ID NO: 323379
uugagaccuaaugacuuau

SEQ ID NO: 323381 - RNA, 19 nt, Artificial Sequence
  Description of Artificial Sequence: Synthetic oligonucleotide
  Sense Strand Starting at position 60 of SEQ ID NO: 316584
cgguguuugugcauggaaa

SEQ ID NO: 323382 - RNA, 19 nt, Artificial Sequence
  Description of Artificial Sequence: Synthetic oligonucleotide
  Antisense Strand to SEQ ID NO: 323381
uuuccaugcacaaacaccg

SEQ ID NO: 323383 - RNA, 19 nt, Artificial Sequence
  Description of Artificial Sequence: Synthetic oligonucleotide
  Sense Strand Starting at position 60 of SEQ ID NO: 316702
ucagcuuuaucacuggaaa

SEQ ID NO: 323384 - RNA, 19 nt, Artificial Sequence
  Description of Artificial Sequence: Synthetic oligonucleotide
  Antisense Strand to SEQ ID NO: 323383
uuuccagugauaaagcuga

SEQ ID NO: 323385 - RNA, 19 nt, Artificial Sequence
  Description of Artificial Sequence: Synthetic oligonucleotide
  Sense Strand Starting at position 60 of SEQ ID NO: 316732
ugauaccuaccuuguacau

SEQ ID NO: 323386 - RNA, 19 nt, Artificial Sequence
  Description of Artificial Sequence: Synthetic oligonucleotide
  Antisense Strand to SEQ ID NO: 323385
auguacaagguagguauca

SEQ ID NO: 323387 - RNA, 19 nt, Artificial Sequence
  Description of Artificial Sequence: Synthetic oligonucleotide
  Sense Strand Starting at position 60 of SEQ ID NO: 316939
ugcagaaucagccgauuug

SEQ ID NO: 323388 - RNA, 19 nt, Artificial Sequence
  Description of Artificial Sequence: Synthetic oligonucleotide
  Antisense Strand to SEQ ID NO: 323387
caaaucggcugauucugca

SEQ ID NO: 323389 - RNA, 19 nt, Artificial Sequence
  Description of Artificial Sequence: Synthetic oligonucleotide
  Sense Strand Starting at position 60 of SEQ ID NO: 316949
gccgauuugagaugccugu

SEQ ID NO: 323390 - RNA, 19 nt, Artificial Sequence
  Description of Artificial Sequence: Synthetic oligonucleotide
  Antisense Strand to SEQ ID NO: 323389
acaggcaucucaaaucggc

SEQ ID NO: 323391 - RNA, 19 nt, Artificial Sequence
  Description of Artificial Sequence: Synthetic oligonucleotide
  Sense Strand Starting at position 60 of SEQ ID NO: 317476
gguaauggcgcgaggguua

SEQ ID NO: 323392 - RNA, 19 nt, Artificial Sequence
  Description of Artificial Sequence: Synthetic oligonucleotide
  Antisense Strand to SEQ ID NO: 323391
uaacccucgcgccauuacc

SEQ ID NO: 323393 - RNA, 19 nt, Artificial Sequence
  Description of Artificial Sequence: Synthetic oligonucleotide
  Sense Strand Starting at position 60 of SEQ ID NO: 317829
ugacucuugugagugagau

SEQ ID NO: 323394 - RNA, 19 nt, Artificial Sequence
  Description of Artificial Sequence: Synthetic oligonucleotide
  Antisense Strand to SEQ ID NO: 323393
aucucacucacaagaguca

SEQ ID NO: 323395 - RNA, 19 nt, Artificial Sequence
  Description of Artificial Sequence: Synthetic oligonucleotide
  Sense Strand Starting at position 60 of SEQ ID NO: 317830
gacucuugugagugagauu

SEQ ID NO: 323396 - RNA, 19 nt, Artificial Sequence
  Description of Artificial Sequence: Synthetic oligonucleotide
  Antisense Strand to SEQ ID NO: 323395
aaucucacucacaagaguc

SEQ ID NO: 323397 - RNA, 19 nt, Artificial Sequence
  Description of Artificial Sequence: Synthetic oligonucleotide
  Sense Strand Starting at position 60 of SEQ ID NO: 317831
acucuugugagugagauuc

SEQ ID NO: 323398 - RNA, 19 nt, Artificial Sequence
  Description of Artificial Sequence: Synthetic oligonucleotide
  Antisense Strand to SEQ ID NO: 323397
gaaucucacucacaagagu

SEQ ID NO: 323399 - RNA, 19 nt, Artificial Sequence
  Description of Artificial Sequence: Synthetic oligonucleotide
  Sense Strand Starting at position 60 of SEQ ID NO: 318029
uugugagcgcuuucuuuaa

SEQ ID NO: 323400 - RNA, 19 nt, Artificial Sequence
  Description of Artificial Sequence: Synthetic oligonucleotide
  Antisense Strand to SEQ ID NO: 323399
uuaaagaaagcgcucacaa

SEQ ID NO: 323401 - RNA, 19 nt, Artificial Sequence
  Description of Artificial Sequence: Synthetic oligonucleotide
  Sense Strand Starting at position 60 of SEQ ID NO: 318393
cuaagugcucaguaaauac

SEQ ID NO: 323402 - RNA, 19 nt, Artificial Sequence
  Description of Artificial Sequence: Synthetic oligonucleotide
  Antisense Strand to SEQ ID NO: 323401
guauuuacugagcacuuag

SEQ ID NO: 323403 - RNA, 19 nt, Artificial Sequence
  Description of Artificial Sequence: Synthetic oligonucleotide
  Sense Strand Starting at position 60 of SEQ ID NO: 318438
agaacuuaaugaguuucua

SEQ ID NO: 323404 - RNA, 19 nt, Artificial Sequence
  Description of Artificial Sequence: Synthetic oligonucleotide
  Antisense Strand to SEQ ID NO: 323403
uagaaacucauuaaguucu

SEQ ID NO: 323405 - RNA, 19 nt, Artificial Sequence
  Description of Artificial Sequence: Synthetic oligonucleotide
  Sense Strand Starting at position 60 of SEQ ID NO: 318442
cuuaaugaguuucuaagau

SEQ ID NO: 323406 - RNA, 19 nt, Artificial Sequence
  Description of Artificial Sequence: Synthetic oligonucleotide
  Antisense Strand to SEQ ID NO: 323405
aucuuagaaacucauuaag

SEQ ID NO: 323407 - RNA, 19 nt, Artificial Sequence
  Description of Artificial Sequence: Synthetic oligonucleotide
  Sense Strand Starting at position 60 of SEQ ID NO: 318575
aauugccugucauugaaga

SEQ ID NO: 323408 - RNA, 19 nt, Artificial Sequence
  Description of Artificial Sequence: Synthetic oligonucleotide
  Antisense Strand to SEQ ID NO: 323407
ucuucaaugacaggcaauu

SEQ ID NO: 323409 - RNA, 19 nt, Artificial Sequence
  Description of Artificial Sequence: Synthetic oligonucleotide
  Sense Strand Starting at position 60 of SEQ ID NO: 318576
auugccugucauugaagaa

SEQ ID NO: 323410 - RNA, 19 nt, Artificial Sequence
  Description of Artificial Sequence: Synthetic oligonucleotide
  Antisense Strand to SEQ ID NO: 323409
uucuucaaugacaggcaau

SEQ ID NO: 323411 - RNA, 19 nt, Artificial Sequence
  Description of Artificial Sequence: Synthetic oligonucleotide
  Sense Strand Starting at position 60 of SEQ ID NO: 318687
uccaaauauguauguugga

SEQ ID NO: 323412 - RNA, 19 nt, Artificial Sequence
  Description of Artificial Sequence: Synthetic oligonucleotide
  Antisense Strand to SEQ ID NO: 323411
uccaacauacauauuugga

SEQ ID NO: 323413 - RNA, 19 nt, Artificial Sequence
  Description of Artificial Sequence: Synthetic oligonucleotide
  Sense Strand Starting at position 60 of SEQ ID NO: 318697
uauguuggaguuggagaua

SEQ ID NO: 323414 - RNA, 19 nt, Artificial Sequence
  Description of Artificial Sequence: Synthetic oligonucleotide
  Antisense Strand to SEQ ID NO: 323413
uaucuccaacuccaacaua

SEQ ID NO: 323415 - RNA, 19 nt, Artificial Sequence
  Description of Artificial Sequence: Synthetic oligonucleotide
  Sense Strand Starting at position 60 of SEQ ID NO: 318706
guuggagauaucuauguau

SEQ ID NO: 323416 - RNA, 19 nt, Artificial Sequence
  Description of Artificial Sequence: Synthetic oligonucleotide
  Antisense Strand to SEQ ID NO: 323415
auacauagauaucuccaac

SEQ ID NO: 323417 - RNA, 19 nt, Artificial Sequence
  Description of Artificial Sequence: Synthetic oligonucleotide
  Sense Strand Starting at position 60 of SEQ ID NO: 318737
cacugaagucggcaaccau

SEQ ID NO: 323418 - RNA, 19 nt, Artificial Sequence
  Description of Artificial Sequence: Synthetic oligonucleotide
  Antisense Strand to SEQ ID NO: 323417
augguugccgacuucagug

SEQ ID NO: 323419 - RNA, 19 nt, Artificial Sequence
  Description of Artificial Sequence: Synthetic oligonucleotide
  Sense Strand Starting at position 60 of SEQ ID NO: 318848
gugauauauuccuuaggga

SEQ ID NO: 323420 - RNA, 19 nt, Artificial Sequence
  Description of Artificial Sequence: Synthetic oligonucleotide
  Antisense Strand to SEQ ID NO: 323419
ucccuaaggaauauaucac

SEQ ID NO: 323421 - RNA, 19 nt, Artificial Sequence
  Description of Artificial Sequence: Synthetic oligonucleotide
  Sense Strand Starting at position 60 of SEQ ID NO: 318888
uggaauguauagccaguaa

SEQ ID NO: 323422 - RNA, 19 nt, Artificial Sequence
  Description of Artificial Sequence: Synthetic oligonucleotide
  Antisense Strand to SEQ ID NO: 323421
uuacuggcuauacauucca

SEQ ID NO: 323423 - RNA, 19 nt, Artificial Sequence
  Description of Artificial Sequence: Synthetic oligonucleotide
  Sense Strand Starting at position 60 of SEQ ID NO: 318892
auguauagccaguaacaaa

SEQ ID NO: 323424 - RNA, 19 nt, Artificial Sequence
  Description of Artificial Sequence: Synthetic oligonucleotide
  Antisense Strand to SEQ ID NO: 323423
uuuguuacuggcuauacau

SEQ ID NO: 323425 - RNA, 19 nt, Artificial Sequence
  Description of Artificial Sequence: Synthetic oligonucleotide
  Sense Strand Starting at position 60 of SEQ ID NO: 319105
cuauacagaucccuaugua

SEQ ID NO: 323426 - RNA, 19 nt, Artificial Sequence
  Description of Artificial Sequence: Synthetic oligonucleotide
  Antisense Strand to SEQ ID NO: 323425
uacauagggaucuguauag

SEQ ID NO: 323427 - RNA, 19 nt, Artificial Sequence
  Description of Artificial Sequence: Synthetic oligonucleotide
  Sense Strand Starting at position 61 of SEQ ID NO: 315338
cagcauagguguuccagga

SEQ ID NO: 323428 - RNA, 19 nt, Artificial Sequence
  Description of Artificial Sequence: Synthetic oligonucleotide
  Antisense Strand to SEQ ID NO: 323427
uccuggaacaccuaugcug

SEQ ID NO: 323429 - RNA, 19 nt, Artificial Sequence
  Description of Artificial Sequence: Synthetic oligonucleotide
  Sense Strand Starting at position 61 of SEQ ID NO: 315342
auagguguuccaggacaca

SEQ ID NO: 323430 - RNA, 19 nt, Artificial Sequence
  Description of Artificial Sequence: Synthetic oligonucleotide
  Antisense Strand to SEQ ID NO: 323429
uguguccuggaacaccuau

SEQ ID NO: 323431 - RNA, 19 nt, Artificial Sequence
  Description of Artificial Sequence: Synthetic oligonucleotide
  Sense Strand Starting at position 61 of SEQ ID NO: 315355
gacacagugcacuacgaua

SEQ ID NO: 323432 - RNA, 19 nt, Artificial Sequence
  Description of Artificial Sequence: Synthetic oligonucleotide
  Antisense Strand to SEQ ID NO: 323431
uaucguagugcacuguguc

SEQ ID NO: 323433 - RNA, 19 nt, Artificial Sequence
  Description of Artificial Sequence: Synthetic oligonucleotide
  Sense Strand Starting at position 61 of SEQ ID NO: 315368
acgauagugucugugaaca

SEQ ID NO: 323434 - RNA, 19 nt, Artificial Sequence
  Description of Artificial Sequence: Synthetic oligonucleotide
  Antisense Strand to SEQ ID NO: 323433
uguucacagacacuaucgu

SEQ ID NO: 323435 - RNA, 19 nt, Artificial Sequence
  Description of Artificial Sequence: Synthetic oligonucleotide
  Sense Strand Starting at position 61 of SEQ ID NO: 315511
guuguaaacuaaucuggca

SEQ ID NO: 323436 - RNA, 19 nt, Artificial Sequence
  Description of Artificial Sequence: Synthetic oligonucleotide
  Antisense Strand to SEQ ID NO: 323435
ugccagauuaguuuacaac

SEQ ID NO: 323437 - RNA, 19 nt, Artificial Sequence
  Description of Artificial Sequence: Synthetic oligonucleotide
  Sense Strand Starting at position 61 of SEQ ID NO: 315550
gagucaagaguuuaucucu

SEQ ID NO: 323438 - RNA, 19 nt, Artificial Sequence
  Description of Artificial Sequence: Synthetic oligonucleotide
  Antisense Strand to SEQ ID NO: 323437
agagauaaacucuugacuc

SEQ ID NO: 323439 - RNA, 19 nt, Artificial Sequence
  Description of Artificial Sequence: Synthetic oligonucleotide
  Sense Strand Starting at position 61 of SEQ ID NO: 315619
uagucuuuaugggcuauua

SEQ ID NO: 323440 - RNA, 19 nt, Artificial Sequence
  Description of Artificial Sequence: Synthetic oligonucleotide
  Antisense Strand to SEQ ID NO: 323439
uaauagcccauaaagacua

SEQ ID NO: 323441 - RNA, 19 nt, Artificial Sequence
  Description of Artificial Sequence: Synthetic oligonucleotide
  Sense Strand Starting at position 61 of SEQ ID NO: 315621
gucuuuaugggcuauuaaa

SEQ ID NO: 323442 - RNA, 19 nt, Artificial Sequence
  Description of Artificial Sequence: Synthetic oligonucleotide
  Antisense Strand to SEQ ID NO: 323441
uuuaauagcccauaaagac

SEQ ID NO: 323443 - RNA, 19 nt, Artificial Sequence
  Description of Artificial Sequence: Synthetic oligonucleotide
  Sense Strand Starting at position 61 of SEQ ID NO: 315967
ggcaauuaacauuggcaca

SEQ ID NO: 323444 - RNA, 19 nt, Artificial Sequence
  Description of Artificial Sequence: Synthetic oligonucleotide
  Antisense Strand to SEQ ID NO: 323443
ugugccaauguuaauugcc

SEQ ID NO: 323445 - RNA, 19 nt, Artificial Sequence
  Description of Artificial Sequence: Synthetic oligonucleotide
  Sense Strand Starting at position 61 of SEQ ID NO: 316129
ucuaaauaguguccaacca

SEQ ID NO: 323446 - RNA, 19 nt, Artificial Sequence
  Description of Artificial Sequence: Synthetic oligonucleotide
  Antisense Strand to SEQ ID NO: 323445
ugguuggacacuauuuaga

SEQ ID NO: 323447 - RNA, 19 nt, Artificial Sequence
  Description of Artificial Sequence: Synthetic oligonucleotide
  Sense Strand Starting at position 61 of SEQ ID NO: 316185
acggcuuagagaugaaguu

SEQ ID NO: 323448 - RNA, 19 nt, Artificial Sequence
  Description of Artificial Sequence: Synthetic oligonucleotide
  Antisense Strand to SEQ ID NO: 323447
aacuucaucucuaagccgu

SEQ ID NO: 323449 - RNA, 19 nt, Artificial Sequence
  Description of Artificial Sequence: Synthetic oligonucleotide
  Sense Strand Starting at position 61 of SEQ ID NO: 316186
cggcuuagagaugaaguuu

SEQ ID NO: 323450 - RNA, 19 nt, Artificial Sequence
  Description of Artificial Sequence: Synthetic oligonucleotide
  Antisense Strand to SEQ ID NO: 323449
aaacuucaucucuaagccg

SEQ ID NO: 323451 - RNA, 19 nt, Artificial Sequence
  Description of Artificial Sequence: Synthetic oligonucleotide
  Sense Strand Starting at position 61 of SEQ ID NO: 316695
aaauuccaggaucgagauu

SEQ ID NO: 323452 - RNA, 19 nt, Artificial Sequence
  Description of Artificial Sequence: Synthetic oligonucleotide
  Antisense Strand to SEQ ID NO: 323451
aaucucgauccuggaauuu

SEQ ID NO: 323453 - RNA, 19 nt, Artificial Sequence
  Description of Artificial Sequence: Synthetic oligonucleotide
  Sense Strand Starting at position 61 of SEQ ID NO: 316720
cucacaucaccgcgauaaa

SEQ ID NO: 323454 - RNA, 19 nt, Artificial Sequence
  Description of Artificial Sequence: Synthetic oligonucleotide
  Antisense Strand to SEQ ID NO: 323453
uuuaucgcggugaugugag

SEQ ID NO: 323455 - RNA, 19 nt, Artificial Sequence
  Description of Artificial Sequence: Synthetic oligonucleotide
  Sense Strand Starting at position 61 of SEQ ID NO: 317665
ggugcugacuaacucagau

SEQ ID NO: 323456 - RNA, 19 nt, Artificial Sequence
  Description of Artificial Sequence: Synthetic oligonucleotide
  Antisense Strand to SEQ ID NO: 323455
aucugaguuagucagcacc

SEQ ID NO: 323457 - RNA, 19 nt, Artificial Sequence
  Description of Artificial Sequence: Synthetic oligonucleotide
  Sense Strand Starting at position 61 of SEQ ID NO: 317674
uaacucagaugucugagau

SEQ ID NO: 323458 - RNA, 19 nt, Artificial Sequence
  Description of Artificial Sequence: Synthetic oligonucleotide
  Antisense Strand to SEQ ID NO: 323457
aucucagacaucugaguua

SEQ ID NO: 323459 - RNA, 19 nt, Artificial Sequence
  Description of Artificial Sequence: Synthetic oligonucleotide
  Sense Strand Starting at position 61 of SEQ ID NO: 317675
aacucagaugucugagauc

SEQ ID NO: 323460 - RNA, 19 nt, Artificial Sequence
  Description of Artificial Sequence: Synthetic oligonucleotide
  Antisense Strand to SEQ ID NO: 323459
gaucucagacaucugaguu

SEQ ID NO: 323461 - RNA, 19 nt, Artificial Sequence
  Description of Artificial Sequence: Synthetic oligonucleotide
  Sense Strand Starting at position 61 of SEQ ID NO: 317692
uccgcagcugugucaauaa

SEQ ID NO: 323462 - RNA, 19 nt, Artificial Sequence
  Description of Artificial Sequence: Synthetic oligonucleotide
  Antisense Strand to SEQ ID NO: 323461
uuauugacacagcugcgga

SEQ ID NO: 323463 - RNA, 19 nt, Artificial Sequence
  Description of Artificial Sequence: Synthetic oligonucleotide
  Sense Strand Starting at position 61 of SEQ ID NO: 317733
gaacguaggcucgaaauug

SEQ ID NO: 323464 - RNA, 19 nt, Artificial Sequence
  Description of Artificial Sequence: Synthetic oligonucleotide
  Antisense Strand to SEQ ID NO: 323463
caauuucgagccuacguuc

SEQ ID NO: 323465 - RNA, 19 nt, Artificial Sequence
  Description of Artificial Sequence: Synthetic oligonucleotide
  Sense Strand Starting at position 61 of SEQ ID NO: 317763
gcuugaauaucaguauauu

SEQ ID NO: 323466 - RNA, 19 nt, Artificial Sequence
  Description of Artificial Sequence: Synthetic oligonucleotide
  Antisense Strand to SEQ ID NO: 323465
aauauacugauauucaagc

SEQ ID NO: 323467 - RNA, 19 nt, Artificial Sequence
  Description of Artificial Sequence: Synthetic oligonucleotide
  Sense Strand Starting at position 61 of SEQ ID NO: 317835
cgaggucaguccuucagga

SEQ ID NO: 323468 - RNA, 19 nt, Artificial Sequence
  Description of Artificial Sequence: Synthetic oligonucleotide
  Antisense Strand to SEQ ID NO: 323467
uccugaaggacugaccucg

SEQ ID NO: 323469 - RNA, 19 nt, Artificial Sequence
  Description of Artificial Sequence: Synthetic oligonucleotide
  Sense Strand Starting at position 61 of SEQ ID NO: 317939
guuaguaacuaauuggcau

SEQ ID NO: 323470 - RNA, 19 nt, Artificial Sequence
  Description of Artificial Sequence: Synthetic oligonucleotide
  Antisense Strand to SEQ ID NO: 323469
augccaauuaguuacuaac

SEQ ID NO: 323471 - RNA, 19 nt, Artificial Sequence
  Description of Artificial Sequence: Synthetic oligonucleotide
  Sense Strand Starting at position 61 of SEQ ID NO: 318014
uaaagugaagcucaaaguu

SEQ ID NO: 323472 - RNA, 19 nt, Artificial Sequence
  Description of Artificial Sequence: Synthetic oligonucleotide
  Antisense Strand to SEQ ID NO: 323471
aacuuugagcuucacuuua

SEQ ID NO: 323473 - RNA, 19 nt, Artificial Sequence
  Description of Artificial Sequence: Synthetic oligonucleotide
  Sense Strand Starting at position 61 of SEQ ID NO: 318109
cucguuuaugucucuguau

SEQ ID NO: 323474 - RNA, 19 nt, Artificial Sequence
  Description of Artificial Sequence: Synthetic oligonucleotide
  Antisense Strand to SEQ ID NO: 323473
auacagagacauaaacgag

SEQ ID NO: 323475 - RNA, 19 nt, Artificial Sequence
  Description of Artificial Sequence: Synthetic oligonucleotide
  Sense Strand Starting at position 61 of SEQ ID NO: 318236
cagagaugcugaguaaaga

SEQ ID NO: 323476 - RNA, 19 nt, Artificial Sequence
  Description of Artificial Sequence: Synthetic oligonucleotide
  Antisense Strand to SEQ ID NO: 323475
ucuuuacucagcaucucug

SEQ ID NO: 323477 - RNA, 19 nt, Artificial Sequence
  Description of Artificial Sequence: Synthetic oligonucleotide
  Sense Strand Starting at position 61 of SEQ ID NO: 318275
acagauacaugggaacaaa

SEQ ID NO: 323478 - RNA, 19 nt, Artificial Sequence
  Description of Artificial Sequence: Synthetic oligonucleotide
  Antisense Strand to SEQ ID NO: 323477
uuuguucccauguaucugu

SEQ ID NO: 323479 - RNA, 19 nt, Artificial Sequence
  Description of Artificial Sequence: Synthetic oligonucleotide
  Sense Strand Starting at position 61 of SEQ ID NO: 318482
cccuuagauuguuuaucag

SEQ ID NO: 323480 - RNA, 19 nt, Artificial Sequence
  Description of Artificial Sequence: Synthetic oligonucleotide
  Antisense Strand to SEQ ID NO: 323479
cugauaaacaaucuaaggg

SEQ ID NO: 323481 - RNA, 19 nt, Artificial Sequence
  Description of Artificial Sequence: Synthetic oligonucleotide
  Sense Strand Starting at position 61 of SEQ ID NO: 318485
uuagauuguuuaucagcca

SEQ ID NO: 323482 - RNA, 19 nt, Artificial Sequence
  Description of Artificial Sequence: Synthetic oligonucleotide
  Antisense Strand to SEQ ID NO: 323481
uggcugauaaacaaucuaa

SEQ ID NO: 323483 - RNA, 19 nt, Artificial Sequence
  Description of Artificial Sequence: Synthetic oligonucleotide
  Sense Strand Starting at position 61 of SEQ ID NO: 318683
ugaccuuccugauugaacu

SEQ ID NO: 323484 - RNA, 19 nt, Artificial Sequence
  Description of Artificial Sequence: Synthetic oligonucleotide
  Antisense Strand to SEQ ID NO: 323483
aguucaaucaggaagguca

SEQ ID NO: 323485 - RNA, 19 nt, Artificial Sequence
  Description of Artificial Sequence: Synthetic oligonucleotide
  Sense Strand Starting at position 61 of SEQ ID NO: 318749
ggaguaagugaggagugua

SEQ ID NO: 323486 - RNA, 19 nt, Artificial Sequence
  Description of Artificial Sequence: Synthetic oligonucleotide
  Antisense Strand to SEQ ID NO: 323485
uacacuccucacuuacucc

SEQ ID NO: 323487 - RNA, 19 nt, Artificial Sequence
  Description of Artificial Sequence: Synthetic oligonucleotide
  Sense Strand Starting at position 61 of SEQ ID NO: 318752
guaagugaggaguguaaac

SEQ ID NO: 323488 - RNA, 19 nt, Artificial Sequence
  Description of Artificial Sequence: Synthetic oligonucleotide
  Antisense Strand to SEQ ID NO: 323487
guuuacacuccucacuuac

SEQ ID NO: 323489 - RNA, 19 nt, Artificial Sequence
  Description of Artificial Sequence: Synthetic oligonucleotide
  Sense Strand Starting at position 61 of SEQ ID NO: 318761
gaguguaaacaauguauaa

SEQ ID NO: 323490 - RNA, 19 nt, Artificial Sequence
  Description of Artificial Sequence: Synthetic oligonucleotide
  Antisense Strand to SEQ ID NO: 323489
uuauacauuguuuacacuc

SEQ ID NO: 323491 - RNA, 19 nt, Artificial Sequence
  Description of Artificial Sequence: Synthetic oligonucleotide
  Sense Strand Starting at position 61 of SEQ ID NO: 318980
gcaggagacucaguugaag

SEQ ID NO: 323492 - RNA, 19 nt, Artificial Sequence
  Description of Artificial Sequence: Synthetic oligonucleotide
  Antisense Strand to SEQ ID NO: 323491
cuucaacugagucuccugc

SEQ ID NO: 323493 - RNA, 19 nt, Artificial Sequence
  Description of Artificial Sequence: Synthetic oligonucleotide
  Sense Strand Starting at position 61 of SEQ ID NO: 319058
gagcaagacuacguaucaa

SEQ ID NO: 323494 - RNA, 19 nt, Artificial Sequence
  Description of Artificial Sequence: Synthetic oligonucleotide
  Antisense Strand to SEQ ID NO: 323493
uugauacguagucuugcuc

SEQ ID NO: 323495 - RNA, 19 nt, Artificial Sequence
  Description of Artificial Sequence: Synthetic oligonucleotide
  Sense Strand Starting at position 61 of SEQ ID NO: 319157
uucgauuaguuaucugaau

SEQ ID NO: 323496 - RNA, 19 nt, Artificial Sequence
  Description of Artificial Sequence: Synthetic oligonucleotide
  Antisense Strand to SEQ ID NO: 323495
auucagauaacuaaucgaa

SEQ ID NO: 323497 - RNA, 19 nt, Artificial Sequence
  Description of Artificial Sequence: Synthetic oligonucleotide
  Sense Strand Starting at position 61 of SEQ ID NO: 319158
ucgauuaguuaucugaauu

SEQ ID NO: 323498 - RNA, 19 nt, Artificial Sequence
  Description of Artificial Sequence: Synthetic oligonucleotide
  Antisense Strand to SEQ ID NO: 323497
aauucagauaacuaaucga

SEQ ID NO: 323499 - RNA, 19 nt, Artificial Sequence
  Description of Artificial Sequence: Synthetic oligonucleotide
  Sense Strand Starting at position 61 of SEQ ID NO: 319168
aucugaauuaucugggugu

SEQ ID NO: 323500 - RNA, 19 nt, Artificial Sequence
  Description of Artificial Sequence: Synthetic oligonucleotide
  Antisense Strand to SEQ ID NO: 323499
acacccagauaauucagau

SEQ ID NO: 323501 - RNA, 19 nt, Artificial Sequence
  Description of Artificial Sequence: Synthetic oligonucleotide
  Sense Strand Starting at position 61 of SEQ ID NO: 319171
ugaauuaucuggguguggu

SEQ ID NO: 323502 - RNA, 19 nt, Artificial Sequence
  Description of Artificial Sequence: Synthetic oligonucleotide
  Antisense Strand to SEQ ID NO: 323501
accacacccagauaauuca

SEQ ID NO: 323503 - RNA, 19 nt, Artificial Sequence
  Description of Artificial Sequence: Synthetic oligonucleotide
  Sense Strand Starting at position 61 of SEQ ID NO: 319172
gaauuaucuggguguggua

SEQ ID NO: 323504 - RNA, 19 nt, Artificial Sequence
  Description of Artificial Sequence: Synthetic oligonucleotide
  Antisense Strand to SEQ ID NO: 323503
uaccacacccagauaauuc

SEQ ID NO: 323505 - RNA, 19 nt, Artificial Sequence
  Description of Artificial Sequence: Synthetic oligonucleotide
  Sense Strand Starting at position 61 of SEQ ID NO: 319218
guauguuauguacaucuaa

SEQ ID NO: 323506 - RNA, 19 nt, Artificial Sequence
  Description of Artificial Sequence: Synthetic oligonucleotide
  Antisense Strand to SEQ ID NO: 323505
uuagauguacauaacauac

SEQ ID NO: 323507 - RNA, 19 nt, Artificial Sequence
  Description of Artificial Sequence: Synthetic oligonucleotide
  Sense Strand Starting at position 62 of SEQ ID NO: 315282
aaguguaaguacgcuaaga

SEQ ID NO: 323508 - RNA, 19 nt, Artificial Sequence
  Description of Artificial Sequence: Synthetic oligonucleotide
  Antisense Strand to SEQ ID NO: 323507
ucuuagcguacuuacacuu

SEQ ID NO: 323509 - RNA, 19 nt, Artificial Sequence
  Description of Artificial Sequence: Synthetic oligonucleotide
  Sense Strand Starting at position 62 of SEQ ID NO: 315355
auuacagaagcuuguguuu

SEQ ID NO: 323510 - RNA, 19 nt, Artificial Sequence
  Description of Artificial Sequence: Synthetic oligonucleotide
  Antisense Strand to SEQ ID NO: 323509
aaacacaagcuucuguaau

SEQ ID NO: 323511 - RNA, 19 nt, Artificial Sequence
  Description of Artificial Sequence: Synthetic oligonucleotide
  Sense Strand Starting at position 62 of SEQ ID NO: 315816
ggagcucagcugugaugua

SEQ ID NO: 323512 - RNA, 19 nt, Artificial Sequence
  Description of Artificial Sequence: Synthetic oligonucleotide
  Antisense Strand to SEQ ID NO: 323511
uacaucacagcugagcucc

SEQ ID NO: 323513 - RNA, 19 nt, Artificial Sequence
  Description of Artificial Sequence: Synthetic oligonucleotide
  Sense Strand Starting at position 62 of SEQ ID NO: 315829
gauguagacugcuuacagu

SEQ ID NO: 323514 - RNA, 19 nt, Artificial Sequence
  Description of Artificial Sequence: Synthetic oligonucleotide
  Antisense Strand to SEQ ID NO: 323513
acuguaagcagucuacauc

SEQ ID NO: 323515 - RNA, 19 nt, Artificial Sequence
  Description of Artificial Sequence: Synthetic oligonucleotide
  Sense Strand Starting at position 62 of SEQ ID NO: 316249
caaagugagcgcugaagga

SEQ ID NO: 323516 - RNA, 19 nt, Artificial Sequence
  Description of Artificial Sequence: Synthetic oligonucleotide
  Antisense Strand to SEQ ID NO: 323515
uccuucagcgcucacuuug

SEQ ID NO: 323517 - RNA, 19 nt, Artificial Sequence
  Description of Artificial Sequence: Synthetic oligonucleotide
  Sense Strand Starting at position 62 of SEQ ID NO: 316267
acuccagacucuucggaaa

SEQ ID NO: 323518 - RNA, 19 nt, Artificial Sequence
  Description of Artificial Sequence: Synthetic oligonucleotide
  Antisense Strand to SEQ ID NO: 323517
uuuccgaagagucuggagu

SEQ ID NO: 323519 - RNA, 19 nt, Artificial Sequence
  Description of Artificial Sequence: Synthetic oligonucleotide
  Sense Strand Starting at position 62 of SEQ ID NO: 316353
cuuacauaccaauggagua

SEQ ID NO: 323520 - RNA, 19 nt, Artificial Sequence
  Description of Artificial Sequence: Synthetic oligonucleotide
  Antisense Strand to SEQ ID NO: 323519
uacuccauugguauguaag

SEQ ID NO: 323521 - RNA, 19 nt, Artificial Sequence
  Description of Artificial Sequence: Synthetic oligonucleotide
  Sense Strand Starting at position 62 of SEQ ID NO: 316499
aguguuugcuucccagagu

SEQ ID NO: 323522 - RNA, 19 nt, Artificial Sequence
  Description of Artificial Sequence: Synthetic oligonucleotide
  Antisense Strand to SEQ ID NO: 323521
acucugggaagcaaacacu

SEQ ID NO: 323523 - RNA, 19 nt, Artificial Sequence
  Description of Artificial Sequence: Synthetic oligonucleotide
  Sense Strand Starting at position 62 of SEQ ID NO: 316589
aaagaaaucuugcccgaag

SEQ ID NO: 323524 - RNA, 19 nt, Artificial Sequence
  Description of Artificial Sequence: Synthetic oligonucleotide
  Antisense Strand to SEQ ID NO: 323523
cuucgggcaagauuucuuu

SEQ ID NO: 323525 - RNA, 19 nt, Artificial Sequence
  Description of Artificial Sequence: Synthetic oligonucleotide
  Sense Strand Starting at position 62 of SEQ ID NO: 316679
ccuuaagaauuccuuccga

SEQ ID NO: 323526 - RNA, 19 nt, Artificial Sequence
  Description of Artificial Sequence: Synthetic oligonucleotide
  Antisense Strand to SEQ ID NO: 323525
ucggaaggaauucuuaagg

SEQ ID NO: 323527 - RNA, 19 nt, Artificial Sequence
  Description of Artificial Sequence: Synthetic oligonucleotide
  Sense Strand Starting at position 62 of SEQ ID NO: 316844
uugccaaauagucgggaga

SEQ ID NO: 323528 - RNA, 19 nt, Artificial Sequence
  Description of Artificial Sequence: Synthetic oligonucleotide
  Antisense Strand to SEQ ID NO: 323527
ucucccgacuauuuggcaa

SEQ ID NO: 323529 - RNA, 19 nt, Artificial Sequence
  Description of Artificial Sequence: Synthetic oligonucleotide
  Sense Strand Starting at position 62 of SEQ ID NO: 316845
ugccaaauagucgggagaa

SEQ ID NO: 323530 - RNA, 19 nt, Artificial Sequence
  Description of Artificial Sequence: Synthetic oligonucleotide
  Antisense Strand to SEQ ID NO: 323529
uucucccgacuauuuggca

SEQ ID NO: 323531 - RNA, 19 nt, Artificial Sequence
  Description of Artificial Sequence: Synthetic oligonucleotide
  Sense Strand Starting at position 62 of SEQ ID NO: 316891
gguaguggcacuugugaug

SEQ ID NO: 323532 - RNA, 19 nt, Artificial Sequence
  Description of Artificial Sequence: Synthetic oligonucleotide
  Antisense Strand to SEQ ID NO: 323531
caucacaagugccacuacc

SEQ ID NO: 323533 - RNA, 19 nt, Artificial Sequence
  Description of Artificial Sequence: Synthetic oligonucleotide
  Sense Strand Starting at position 62 of SEQ ID NO: 317388
cgcuucgucacugccaaau

SEQ ID NO: 323534 - RNA, 19 nt, Artificial Sequence
  Description of Artificial Sequence: Synthetic oligonucleotide
  Antisense Strand to SEQ ID NO: 323533
auuuggcagugacgaagcg

SEQ ID NO: 323535 - RNA, 19 nt, Artificial Sequence
  Description of Artificial Sequence: Synthetic oligonucleotide
  Sense Strand Starting at position 62 of SEQ ID NO: 317451
gggugauaguccuugcuuc

SEQ ID NO: 323536 - RNA, 19 nt, Artificial Sequence
  Description of Artificial Sequence: Synthetic oligonucleotide
  Antisense Strand to SEQ ID NO: 323535
gaagcaaggacuaucaccc

SEQ ID NO: 323537 - RNA, 19 nt, Artificial Sequence
  Description of Artificial Sequence: Synthetic oligonucleotide
  Sense Strand Starting at position 62 of SEQ ID NO: 317483
ugagcauuauggguuaggu

SEQ ID NO: 323538 - RNA, 19 nt, Artificial Sequence
  Description of Artificial Sequence: Synthetic oligonucleotide
  Antisense Strand to SEQ ID NO: 323537
accuaacccauaaugcuca

SEQ ID NO: 323539 - RNA, 19 nt, Artificial Sequence
  Description of Artificial Sequence: Synthetic oligonucleotide
  Sense Strand Starting at position 62 of SEQ ID NO: 317485
agcauuauggguuagguga

SEQ ID NO: 323540 - RNA, 19 nt, Artificial Sequence
  Description of Artificial Sequence: Synthetic oligonucleotide
  Antisense Strand to SEQ ID NO: 323539
ucaccuaacccauaaugcu

SEQ ID NO: 323541 - RNA, 19 nt, Artificial Sequence
  Description of Artificial Sequence: Synthetic oligonucleotide
  Sense Strand Starting at position 62 of SEQ ID NO: 317538
uggguauucccugaugcca

SEQ ID NO: 323542 - RNA, 19 nt, Artificial Sequence
  Description of Artificial Sequence: Synthetic oligonucleotide
  Antisense Strand to SEQ ID NO: 323541
uggcaucagggaauaccca

SEQ ID NO: 323543 - RNA, 19 nt, Artificial Sequence
  Description of Artificial Sequence: Synthetic oligonucleotide
  Sense Strand Starting at position 62 of SEQ ID NO: 317546
cccugaugccaugaacuua

SEQ ID NO: 323544 - RNA, 19 nt, Artificial Sequence
  Description of Artificial Sequence: Synthetic oligonucleotide
  Antisense Strand to SEQ ID NO: 323543
uaaguucauggcaucaggg

SEQ ID NO: 323545 - RNA, 19 nt, Artificial Sequence
  Description of Artificial Sequence: Synthetic oligonucleotide
  Sense Strand Starting at position 62 of SEQ ID NO: 317580
ggaccagacgcuugcuuua

SEQ ID NO: 323546 - RNA, 19 nt, Artificial Sequence
  Description of Artificial Sequence: Synthetic oligonucleotide
  Antisense Strand to SEQ ID NO: 323545
uaaagcaagcgucuggucc

SEQ ID NO: 323547 - RNA, 19 nt, Artificial Sequence
  Description of Artificial Sequence: Synthetic oligonucleotide
  Sense Strand Starting at position 62 of SEQ ID NO: 317585
agacgcuugcuuuaguuga

SEQ ID NO: 323548 - RNA, 19 nt, Artificial Sequence
  Description of Artificial Sequence: Synthetic oligonucleotide
  Antisense Strand to SEQ ID NO: 323547
ucaacuaaagcaagcgucu

SEQ ID NO: 323549 - RNA, 19 nt, Artificial Sequence
  Description of Artificial Sequence: Synthetic oligonucleotide
  Sense Strand Starting at position 62 of SEQ ID NO: 317596
uuaguugacgcaugaagac

SEQ ID NO: 323550 - RNA, 19 nt, Artificial Sequence
  Description of Artificial Sequence: Synthetic oligonucleotide
  Antisense Strand to SEQ ID NO: 323549
gucuucaugcgucaacuaa

SEQ ID NO: 323551 - RNA, 19 nt, Artificial Sequence
  Description of Artificial Sequence: Synthetic oligonucleotide
  Sense Strand Starting at position 62 of SEQ ID NO: 317651
ugacuugugggccgagaaa

SEQ ID NO: 323552 - RNA, 19 nt, Artificial Sequence
  Description of Artificial Sequence: Synthetic oligonucleotide
  Antisense Strand to SEQ ID NO: 323551
uuucucggcccacaaguca

SEQ ID NO: 323553 - RNA, 19 nt, Artificial Sequence
  Description of Artificial Sequence: Synthetic oligonucleotide
  Sense Strand Starting at position 62 of SEQ ID NO: 317715
ccaagugauucugaagauc

SEQ ID NO: 323554 - RNA, 19 nt, Artificial Sequence
  Description of Artificial Sequence: Synthetic oligonucleotide
  Antisense Strand to SEQ ID NO: 323553
gaucuucagaaucacuugg

SEQ ID NO: 323555 - RNA, 19 nt, Artificial Sequence
  Description of Artificial Sequence: Synthetic oligonucleotide
  Sense Strand Starting at position 62 of SEQ ID NO: 317736
uaauucugucaaggcgaga

SEQ ID NO: 323556 - RNA, 19 nt, Artificial Sequence
  Description of Artificial Sequence: Synthetic oligonucleotide
  Antisense Strand to SEQ ID NO: 323555
ucucgccuugacagaauua

SEQ ID NO: 323557 - RNA, 19 nt, Artificial Sequence
  Description of Artificial Sequence: Synthetic oligonucleotide
  Sense Strand Starting at position 62 of SEQ ID NO: 317971
ugauaaauguauuagacuc

SEQ ID NO: 323558 - RNA, 19 nt, Artificial Sequence
  Description of Artificial Sequence: Synthetic oligonucleotide
  Antisense Strand to SEQ ID NO: 323557
gagucuaauacauuuauca

SEQ ID NO: 323559 - RNA, 19 nt, Artificial Sequence
  Description of Artificial Sequence: Synthetic oligonucleotide
  Sense Strand Starting at position 62 of SEQ ID NO: 317979
guauuagacucauugccag

SEQ ID NO: 323560 - RNA, 19 nt, Artificial Sequence
  Description of Artificial Sequence: Synthetic oligonucleotide
  Antisense Strand to SEQ ID NO: 323559
cuggcaaugagucuaauac

SEQ ID NO: 323561 - RNA, 19 nt, Artificial Sequence
  Description of Artificial Sequence: Synthetic oligonucleotide
  Sense Strand Starting at position 62 of SEQ ID NO: 318019
ucuaguagugccguccuau

SEQ ID NO: 323562 - RNA, 19 nt, Artificial Sequence
  Description of Artificial Sequence: Synthetic oligonucleotide
  Antisense Strand to SEQ ID NO: 323561
auaggacggcacuacuaga

SEQ ID NO: 323563 - RNA, 19 nt, Artificial Sequence
  Description of Artificial Sequence: Synthetic oligonucleotide
  Sense Strand Starting at position 62 of SEQ ID NO: 318020
cuaguagugccguccuaug

SEQ ID NO: 323564 - RNA, 19 nt, Artificial Sequence
  Description of Artificial Sequence: Synthetic oligonucleotide
  Antisense Strand to SEQ ID NO: 323563
cauaggacggcacuacuag

SEQ ID NO: 323565 - RNA, 19 nt, Artificial Sequence
  Description of Artificial Sequence: Synthetic oligonucleotide
  Sense Strand Starting at position 62 of SEQ ID NO: 318063
cugguauauuuccauagga

SEQ ID NO: 323566 - RNA, 19 nt, Artificial Sequence
  Description of Artificial Sequence: Synthetic oligonucleotide
  Antisense Strand to SEQ ID NO: 323565
uccuauggaaauauaccag

SEQ ID NO: 323567 - RNA, 19 nt, Artificial Sequence
  Description of Artificial Sequence: Synthetic oligonucleotide
  Sense Strand Starting at position 62 of SEQ ID NO: 318139
uuugaaggcuugcugagua

SEQ ID NO: 323568 - RNA, 19 nt, Artificial Sequence
  Description of Artificial Sequence: Synthetic oligonucleotide
  Antisense Strand to SEQ ID NO: 323567
uacucagcaagccuucaaa

SEQ ID NO: 323569 - RNA, 19 nt, Artificial Sequence
  Description of Artificial Sequence: Synthetic oligonucleotide
  Sense Strand Starting at position 62 of SEQ ID NO: 318198
acuguuauuucuuaggagu

SEQ ID NO: 323570 - RNA, 19 nt, Artificial Sequence
  Description of Artificial Sequence: Synthetic oligonucleotide
  Antisense Strand to SEQ ID NO: 323569
acuccuaagaaauaacagu

SEQ ID NO: 323571 - RNA, 19 nt, Artificial Sequence
  Description of Artificial Sequence: Synthetic oligonucleotide
  Sense Strand Starting at position 62 of SEQ ID NO: 318239
aaacuucuggccgggcaua

SEQ ID NO: 323572 - RNA, 19 nt, Artificial Sequence
  Description of Artificial Sequence: Synthetic oligonucleotide
  Antisense Strand to SEQ ID NO: 323571
uaugcccggccagaaguuu

SEQ ID NO: 323573 - RNA, 19 nt, Artificial Sequence
  Description of Artificial Sequence: Synthetic oligonucleotide
  Sense Strand Starting at position 62 of SEQ ID NO: 318582
ccuccuuugcauuggagau

SEQ ID NO: 323574 - RNA, 19 nt, Artificial Sequence
  Description of Artificial Sequence: Synthetic oligonucleotide
  Antisense Strand to SEQ ID NO: 323573
aucuccaaugcaaaggagg

SEQ ID NO: 323575 - RNA, 19 nt, Artificial Sequence
  Description of Artificial Sequence: Synthetic oligonucleotide
  Sense Strand Starting at position 62 of SEQ ID NO: 318586
cuuugcauuggagauacau

SEQ ID NO: 323576 - RNA, 19 nt, Artificial Sequence
  Description of Artificial Sequence: Synthetic oligonucleotide
  Antisense Strand to SEQ ID NO: 323575
auguaucuccaaugcaaag

SEQ ID NO: 323577 - RNA, 19 nt, Artificial Sequence
  Description of Artificial Sequence: Synthetic oligonucleotide
  Sense Strand Starting at position 62 of SEQ ID NO: 318604
uguaaagaguugcuuagca

SEQ ID NO: 323578 - RNA, 19 nt, Artificial Sequence
  Description of Artificial Sequence: Synthetic oligonucleotide
  Antisense Strand to SEQ ID NO: 323577
ugcuaagcaacucuuuaca

SEQ ID NO: 323579 - RNA, 19 nt, Artificial Sequence
  Description of Artificial Sequence: Synthetic oligonucleotide
  Sense Strand Starting at position 62 of SEQ ID NO: 318606
uaaagaguugcuuagcagu

SEQ ID NO: 323580 - RNA, 19 nt, Artificial Sequence
  Description of Artificial Sequence: Synthetic oligonucleotide
  Antisense Strand to SEQ ID NO: 323579
acugcuaagcaacucuuua

SEQ ID NO: 323581 - RNA, 19 nt, Artificial Sequence
  Description of Artificial Sequence: Synthetic oligonucleotide
  Sense Strand Starting at position 62 of SEQ ID NO: 318649
gaagcuugcuaagugacaa

SEQ ID NO: 323582 - RNA, 19 nt, Artificial Sequence
  Description of Artificial Sequence: Synthetic oligonucleotide
  Antisense Strand to SEQ ID NO: 323581
uugucacuuagcaagcuuc

SEQ ID NO: 323583 - RNA, 19 nt, Artificial Sequence
  Description of Artificial Sequence: Synthetic oligonucleotide
  Sense Strand Starting at position 62 of SEQ ID NO: 318776
ggaggucuuguagacaugu

SEQ ID NO: 323584 - RNA, 19 nt, Artificial Sequence
  Description of Artificial Sequence: Synthetic oligonucleotide
  Antisense Strand to SEQ ID NO: 323583
acaugucuacaagaccucc

SEQ ID NO: 323585 - RNA, 19 nt, Artificial Sequence
  Description of Artificial Sequence: Synthetic oligonucleotide
  Sense Strand Starting at position 62 of SEQ ID NO: 318939
gagcuuccagggcauagau

SEQ ID NO: 323586 - RNA, 19 nt, Artificial Sequence
  Description of Artificial Sequence: Synthetic oligonucleotide
  Antisense Strand to SEQ ID NO: 323585
aucuaugcccuggaagcuc

SEQ ID NO: 323587 - RNA, 19 nt, Artificial Sequence
  Description of Artificial Sequence: Synthetic oligonucleotide
  Sense Strand Starting at position 63 of SEQ ID NO: 315268
ugacaucuugcauguuauu

SEQ ID NO: 323588 - RNA, 19 nt, Artificial Sequence
  Description of Artificial Sequence: Synthetic oligonucleotide
  Antisense Strand to SEQ ID NO: 323587
aauaacaugcaagauguca

SEQ ID NO: 323589 - RNA, 19 nt, Artificial Sequence
  Description of Artificial Sequence: Synthetic oligonucleotide
  Sense Strand Starting at position 63 of SEQ ID NO: 315368
gcaaaugaccaguauguaa

SEQ ID NO: 323590 - RNA, 19 nt, Artificial Sequence
  Description of Artificial Sequence: Synthetic oligonucleotide
  Antisense Strand to SEQ ID NO: 323589
uuacauacuggucauuugc

SEQ ID NO: 323591 - RNA, 19 nt, Artificial Sequence
  Description of Artificial Sequence: Synthetic oligonucleotide
  Sense Strand Starting at position 63 of SEQ ID NO: 315370
aaaugaccaguauguaaug

SEQ ID NO: 323592 - RNA, 19 nt, Artificial Sequence
  Description of Artificial Sequence: Synthetic oligonucleotide
  Antisense Strand to SEQ ID NO: 323591
cauuacauacuggucauuu

SEQ ID NO: 323593 - RNA, 19 nt, Artificial Sequence
  Description of Artificial Sequence: Synthetic oligonucleotide
  Sense Strand Starting at position 63 of SEQ ID NO: 315916
gcaucauaucuguaugagg

SEQ ID NO: 323594 - RNA, 19 nt, Artificial Sequence
  Description of Artificial Sequence: Synthetic oligonucleotide
  Antisense Strand to SEQ ID NO: 323593
ccucauacagauaugaugc

SEQ ID NO: 323595 - RNA, 19 nt, Artificial Sequence
  Description of Artificial Sequence: Synthetic oligonucleotide
  Sense Strand Starting at position 63 of SEQ ID NO: 315918
aucauaucuguaugagguc

SEQ ID NO: 323596 - RNA, 19 nt, Artificial Sequence
  Description of Artificial Sequence: Synthetic oligonucleotide
  Antisense Strand to SEQ ID NO: 323595
gaccucauacagauaugau

SEQ ID NO: 323597 - RNA, 19 nt, Artificial Sequence
  Description of Artificial Sequence: Synthetic oligonucleotide
  Sense Strand Starting at position 63 of SEQ ID NO: 316168
uaugguaaauaucuaggua

SEQ ID NO: 323598 - RNA, 19 nt, Artificial Sequence
  Description of Artificial Sequence: Synthetic oligonucleotide
  Antisense Strand to SEQ ID NO: 323597
uaccuagauauuuaccaua

SEQ ID NO: 323599 - RNA, 19 nt, Artificial Sequence
  Description of Artificial Sequence: Synthetic oligonucleotide
  Sense Strand Starting at position 63 of SEQ ID NO: 316171
gguaaauaucuagguauau

SEQ ID NO: 323600 - RNA, 19 nt, Artificial Sequence
  Description of Artificial Sequence: Synthetic oligonucleotide
  Antisense Strand to SEQ ID NO: 323599
auauaccuagauauuuacc

SEQ ID NO: 323601 - RNA, 19 nt, Artificial Sequence
  Description of Artificial Sequence: Synthetic oligonucleotide
  Sense Strand Starting at position 63 of SEQ ID NO: 316172
guaaauaucuagguauauc

SEQ ID NO: 323602 - RNA, 19 nt, Artificial Sequence
  Description of Artificial Sequence: Synthetic oligonucleotide
  Antisense Strand to SEQ ID NO: 323601
gauauaccuagauauuuac

SEQ ID NO: 323603 - RNA, 19 nt, Artificial Sequence
  Description of Artificial Sequence: Synthetic oligonucleotide
  Sense Strand Starting at position 63 of SEQ ID NO: 316286
gccuaaggcuuagcauuua

SEQ ID NO: 323604 - RNA, 19 nt, Artificial Sequence
  Description of Artificial Sequence: Synthetic oligonucleotide
  Antisense Strand to SEQ ID NO: 323603
uaaaugcuaagccuuaggc

SEQ ID NO: 323605 - RNA, 19 nt, Artificial Sequence
  Description of Artificial Sequence: Synthetic oligonucleotide
  Sense Strand Starting at position 63 of SEQ ID NO: 316394
uuaggauaccgucagacau

SEQ ID NO: 323606 - RNA, 19 nt, Artificial Sequence
  Description of Artificial Sequence: Synthetic oligonucleotide
  Antisense Strand to SEQ ID NO: 323605
augucugacgguauccuaa

SEQ ID NO: 323607 - RNA, 19 nt, Artificial Sequence
  Description of Artificial Sequence: Synthetic oligonucleotide
  Sense Strand Starting at position 63 of SEQ ID NO: 316435
ucaugugauccucgacaaa

SEQ ID NO: 323608 - RNA, 19 nt, Artificial Sequence
  Description of Artificial Sequence: Synthetic oligonucleotide
  Antisense Strand to SEQ ID NO: 323607
uuugucgaggaucacauga

SEQ ID NO: 323609 - RNA, 19 nt, Artificial Sequence
  Description of Artificial Sequence: Synthetic oligonucleotide
  Sense Strand Starting at position 63 of SEQ ID NO: 316534
gaagcauagcugggaauga

SEQ ID NO: 323610 - RNA, 19 nt, Artificial Sequence
  Description of Artificial Sequence: Synthetic oligonucleotide
  Antisense Strand to SEQ ID NO: 323609
ucauucccagcuaugcuuc

SEQ ID NO: 323611 - RNA, 19 nt, Artificial Sequence
  Description of Artificial Sequence: Synthetic oligonucleotide
  Sense Strand Starting at position 63 of SEQ ID NO: 316618
gagagucuguagcuuaaac

SEQ ID NO: 323612 - RNA, 19 nt, Artificial Sequence
  Description of Artificial Sequence: Synthetic oligonucleotide
  Antisense Strand to SEQ ID NO: 323611
guuuaagcuacagacucuc

SEQ ID NO: 323613 - RNA, 19 nt, Artificial Sequence
  Description of Artificial Sequence: Synthetic oligonucleotide
  Sense Strand Starting at position 63 of SEQ ID NO: 316620
gagucuguagcuuaaacua

SEQ ID NO: 323614 - RNA, 19 nt, Artificial Sequence
  Description of Artificial Sequence: Synthetic oligonucleotide
  Antisense Strand to SEQ ID NO: 323613
uaguuuaagcuacagacuc

SEQ ID NO: 323615 - RNA, 19 nt, Artificial Sequence
  Description of Artificial Sequence: Synthetic oligonucleotide
  Sense Strand Starting at position 63 of SEQ ID NO: 316682
agugcuuucccugaucgag

SEQ ID NO: 323616 - RNA, 19 nt, Artificial Sequence
  Description of Artificial Sequence: Synthetic oligonucleotide
  Antisense Strand to SEQ ID NO: 323615
cucgaucagggaaagcacu

SEQ ID NO: 323617 - RNA, 19 nt, Artificial Sequence
  Description of Artificial Sequence: Synthetic oligonucleotide
  Sense Strand Starting at position 63 of SEQ ID NO: 316697
cgaggcuaucaagagcaua

SEQ ID NO: 323618 - RNA, 19 nt, Artificial Sequence
  Description of Artificial Sequence: Synthetic oligonucleotide
  Antisense Strand to SEQ ID NO: 323617
uaugcucuugauagccucg

SEQ ID NO: 323619 - RNA, 19 nt, Artificial Sequence
  Description of Artificial Sequence: Synthetic oligonucleotide
  Sense Strand Starting at position 63 of SEQ ID NO: 316787
cuuacauaggucuguggau

SEQ ID NO: 323620 - RNA, 19 nt, Artificial Sequence
  Description of Artificial Sequence: Synthetic oligonucleotide
  Antisense Strand to SEQ ID NO: 323619
auccacagaccuauguaag

SEQ ID NO: 323621 - RNA, 19 nt, Artificial Sequence
  Description of Artificial Sequence: Synthetic oligonucleotide
  Sense Strand Starting at position 63 of SEQ ID NO: 316788
uuacauaggucuguggauu

SEQ ID NO: 323622 - RNA, 19 nt, Artificial Sequence
  Description of Artificial Sequence: Synthetic oligonucleotide
  Antisense Strand to SEQ ID NO: 323621
aauccacagaccuauguaa

SEQ ID NO: 323623 - RNA, 19 nt, Artificial Sequence
  Description of Artificial Sequence: Synthetic oligonucleotide
  Sense Strand Starting at position 63 of SEQ ID NO: 316801
uggauucugcaaugaacga

SEQ ID NO: 323624 - RNA, 19 nt, Artificial Sequence
  Description of Artificial Sequence: Synthetic oligonucleotide
  Antisense Strand to SEQ ID NO: 323623
ucguucauugcagaaucca

SEQ ID NO: 323625 - RNA, 19 nt, Artificial Sequence
  Description of Artificial Sequence: Synthetic oligonucleotide
  Sense Strand Starting at position 63 of SEQ ID NO: 316833
aguugcuaugauggaguuu

SEQ ID NO: 323626 - RNA, 19 nt, Artificial Sequence
  Description of Artificial Sequence: Synthetic oligonucleotide
  Antisense Strand to SEQ ID NO: 323625
aaacuccaucauagcaacu

SEQ ID NO: 323627 - RNA, 19 nt, Artificial Sequence
  Description of Artificial Sequence: Synthetic oligonucleotide
  Sense Strand Starting at position 63 of SEQ ID NO: 316834
guugcuaugauggaguuua

SEQ ID NO: 323628 - RNA, 19 nt, Artificial Sequence
  Description of Artificial Sequence: Synthetic oligonucleotide
  Antisense Strand to SEQ ID NO: 323627
uaaacuccaucauagcaac

SEQ ID NO: 323629 - RNA, 19 nt, Artificial Sequence
  Description of Artificial Sequence: Synthetic oligonucleotide
  Sense Strand Starting at position 63 of SEQ ID NO: 317054
ugguuugcauccuuuaaua

SEQ ID NO: 323630 - RNA, 19 nt, Artificial Sequence
  Description of Artificial Sequence: Synthetic oligonucleotide
  Antisense Strand to SEQ ID NO: 323629
uauuaaaggaugcaaacca

SEQ ID NO: 323631 - RNA, 19 nt, Artificial Sequence
  Description of Artificial Sequence: Synthetic oligonucleotide
  Sense Strand Starting at position 63 of SEQ ID NO: 317230
uguguccucaugcagaaga

SEQ ID NO: 323632 - RNA, 19 nt, Artificial Sequence
  Description of Artificial Sequence: Synthetic oligonucleotide
  Antisense Strand to SEQ ID NO: 323631
ucuucugcaugaggacaca

SEQ ID NO: 323633 - RNA, 19 nt, Artificial Sequence
  Description of Artificial Sequence: Synthetic oligonucleotide
  Sense Strand Starting at position 63 of SEQ ID NO: 317362
augcuuagagcauagugua

SEQ ID NO: 323634 - RNA, 19 nt, Artificial Sequence
  Description of Artificial Sequence: Synthetic oligonucleotide
  Antisense Strand to SEQ ID NO: 323633
uacacuaugcucuaagcau

SEQ ID NO: 323635 - RNA, 19 nt, Artificial Sequence
  Description of Artificial Sequence: Synthetic oligonucleotide
  Sense Strand Starting at position 63 of SEQ ID NO: 317551
uggucugaguuauucggga

SEQ ID NO: 323636 - RNA, 19 nt, Artificial Sequence
  Description of Artificial Sequence: Synthetic oligonucleotide
  Antisense Strand to SEQ ID NO: 323635
ucccgaauaacucagacca

SEQ ID NO: 323637 - RNA, 19 nt, Artificial Sequence
  Description of Artificial Sequence: Synthetic oligonucleotide
  Sense Strand Starting at position 63 of SEQ ID NO: 317556
ugaguuauucgggaggcug

SEQ ID NO: 323638 - RNA, 19 nt, Artificial Sequence
  Description of Artificial Sequence: Synthetic oligonucleotide
  Antisense Strand to SEQ ID NO: 323637
cagccucccgaauaacuca

SEQ ID NO: 323639 - RNA, 19 nt, Artificial Sequence
  Description of Artificial Sequence: Synthetic oligonucleotide
  Sense Strand Starting at position 63 of SEQ ID NO: 317701
uuaggaguguaucuuuaaa

SEQ ID NO: 323640 - RNA, 19 nt, Artificial Sequence
  Description of Artificial Sequence: Synthetic oligonucleotide
  Antisense Strand to SEQ ID NO: 323639
uuuaaagauacacuccuaa

SEQ ID NO: 323641 - RNA, 19 nt, Artificial Sequence
  Description of Artificial Sequence: Synthetic oligonucleotide
  Sense Strand Starting at position 63 of SEQ ID NO: 317757
ccauuuauguuugauagga

SEQ ID NO: 323642 - RNA, 19 nt, Artificial Sequence
  Description of Artificial Sequence: Synthetic oligonucleotide
  Antisense Strand to SEQ ID NO: 323641
uccuaucaaacauaaaugg

SEQ ID NO: 323643 - RNA, 19 nt, Artificial Sequence
  Description of Artificial Sequence: Synthetic oligonucleotide
  Sense Strand Starting at position 63 of SEQ ID NO: 317761
uuauguuugauaggauaag

SEQ ID NO: 323644 - RNA, 19 nt, Artificial Sequence
  Description of Artificial Sequence: Synthetic oligonucleotide
  Antisense Strand to SEQ ID NO: 323643
cuuauccuaucaaacauaa

SEQ ID NO: 323645 - RNA, 19 nt, Artificial Sequence
  Description of Artificial Sequence: Synthetic oligonucleotide
  Sense Strand Starting at position 63 of SEQ ID NO: 318295
auacaaugcagucguauag

SEQ ID NO: 323646 - RNA, 19 nt, Artificial Sequence
  Description of Artificial Sequence: Synthetic oligonucleotide
  Antisense Strand to SEQ ID NO: 323645
cuauacgacugcauuguau

SEQ ID NO: 323647 - RNA, 19 nt, Artificial Sequence
  Description of Artificial Sequence: Synthetic oligonucleotide
  Sense Strand Starting at position 63 of SEQ ID NO: 318301
ugcagucguauaggaagaa

SEQ ID NO: 323648 - RNA, 19 nt, Artificial Sequence
  Description of Artificial Sequence: Synthetic oligonucleotide
  Antisense Strand to SEQ ID NO: 323647
uucuuccuauacgacugca

SEQ ID NO: 323649 - RNA, 19 nt, Artificial Sequence
  Description of Artificial Sequence: Synthetic oligonucleotide
  Sense Strand Starting at position 63 of SEQ ID NO: 318455
ucucaaaugguauguaagu

SEQ ID NO: 323650 - RNA, 19 nt, Artificial Sequence
  Description of Artificial Sequence: Synthetic oligonucleotide
  Antisense Strand to SEQ ID NO: 323649
acuuacauaccauuugaga

SEQ ID NO: 323651 - RNA, 19 nt, Artificial Sequence
  Description of Artificial Sequence: Synthetic oligonucleotide
  Sense Strand Starting at position 63 of SEQ ID NO: 318456
cucaaaugguauguaaguu

SEQ ID NO: 323652 - RNA, 19 nt, Artificial Sequence
  Description of Artificial Sequence: Synthetic oligonucleotide
  Antisense Strand to SEQ ID NO: 323651
aacuuacauaccauuugag

SEQ ID NO: 323653 - RNA, 19 nt, Artificial Sequence
  Description of Artificial Sequence: Synthetic oligonucleotide
  Sense Strand Starting at position 63 of SEQ ID NO: 318517
uuuguuuagagaugguauu

SEQ ID NO: 323654 - RNA, 19 nt, Artificial Sequence
  Description of Artificial Sequence: Synthetic oligonucleotide
  Antisense Strand to SEQ ID NO: 323653
aauaccaucucuaaacaaa

SEQ ID NO: 323655 - RNA, 19 nt, Artificial Sequence
  Description of Artificial Sequence: Synthetic oligonucleotide
  Sense Strand Starting at position 63 of SEQ ID NO: 318593
ccuccugggcuagaaugau

SEQ ID NO: 323656 - RNA, 19 nt, Artificial Sequence
  Description of Artificial Sequence: Synthetic oligonucleotide
  Antisense Strand to SEQ ID NO: 323655
aucauucuagcccaggagg

SEQ ID NO: 323657 - RNA, 19 nt, Artificial Sequence
  Description of Artificial Sequence: Synthetic oligonucleotide
  Sense Strand Starting at position 63 of SEQ ID NO: 318878
accauauguuuaucaagua

SEQ ID NO: 323658 - RNA, 19 nt, Artificial Sequence
  Description of Artificial Sequence: Synthetic oligonucleotide
  Antisense Strand to SEQ ID NO: 323657
uacuugauaaacauauggu

SEQ ID NO: 323659 - RNA, 19 nt, Artificial Sequence
  Description of Artificial Sequence: Synthetic oligonucleotide
  Sense Strand Starting at position 63 of SEQ ID NO: 319039
ugcauaauagguuagguga

SEQ ID NO: 323660 - RNA, 19 nt, Artificial Sequence
  Description of Artificial Sequence: Synthetic oligonucleotide
  Antisense Strand to SEQ ID NO: 323659
ucaccuaaccuauuaugca

SEQ ID NO: 323661 - RNA, 19 nt, Artificial Sequence
  Description of Artificial Sequence: Synthetic oligonucleotide
  Sense Strand Starting at position 63 of SEQ ID NO: 319042
auaauagguuaggugagua

SEQ ID NO: 323662 - RNA, 19 nt, Artificial Sequence
  Description of Artificial Sequence: Synthetic oligonucleotide
  Antisense Strand to SEQ ID NO: 323661
uacucaccuaaccuauuau

SEQ ID NO: 323663 - RNA, 19 nt, Artificial Sequence
  Description of Artificial Sequence: Synthetic oligonucleotide
  Sense Strand Starting at position 63 of SEQ ID NO: 319046
uagguuaggugaguacaga

SEQ ID NO: 323664 - RNA, 19 nt, Artificial Sequence
  Description of Artificial Sequence: Synthetic oligonucleotide
  Antisense Strand to SEQ ID NO: 323663
ucuguacucaccuaaccua

SEQ ID NO: 323665 - RNA, 19 nt, Artificial Sequence
  Description of Artificial Sequence: Synthetic oligonucleotide
  Sense Strand Starting at position 63 of SEQ ID NO: 319115
gguaauuguucucuacucu

SEQ ID NO: 323666 - RNA, 19 nt, Artificial Sequence
  Description of Artificial Sequence: Synthetic oligonucleotide
  Antisense Strand to SEQ ID NO: 323665
agaguagagaacaauuacc

SEQ ID NO: 323667 - RNA, 19 nt, Artificial Sequence
  Description of Artificial Sequence: Synthetic oligonucleotide
  Sense Strand Starting at position 64 of SEQ ID NO: 315474
ugaaaugcauauucgauau

SEQ ID NO: 323668 - RNA, 19 nt, Artificial Sequence
  Description of Artificial Sequence: Synthetic oligonucleotide
  Antisense Strand to SEQ ID NO: 323667
auaucgaauaugcauuuca

SEQ ID NO: 323669 - RNA, 19 nt, Artificial Sequence
  Description of Artificial Sequence: Synthetic oligonucleotide
  Sense Strand Starting at position 64 of SEQ ID NO: 315478
augcauauucgauauggac

SEQ ID NO: 323670 - RNA, 19 nt, Artificial Sequence
  Description of Artificial Sequence: Synthetic oligonucleotide
  Antisense Strand to SEQ ID NO: 323669
guccauaucgaauaugcau

SEQ ID NO: 323671 - RNA, 19 nt, Artificial Sequence
  Description of Artificial Sequence: Synthetic oligonucleotide
  Sense Strand Starting at position 64 of SEQ ID NO: 315480
gcauauucgauauggacua

SEQ ID NO: 323672 - RNA, 19 nt, Artificial Sequence
  Description of Artificial Sequence: Synthetic oligonucleotide
  Antisense Strand to SEQ ID NO: 323671
uaguccauaucgaauaugc

SEQ ID NO: 323673 - RNA, 19 nt, Artificial Sequence
  Description of Artificial Sequence: Synthetic oligonucleotide
  Sense Strand Starting at position 64 of SEQ ID NO: 315533
agaauuauuccgcacgguu

SEQ ID NO: 323674 - RNA, 19 nt, Artificial Sequence
  Description of Artificial Sequence: Synthetic oligonucleotide
  Antisense Strand to SEQ ID NO: 323673
aaccgugcggaauaauucu

SEQ ID NO: 323675 - RNA, 19 nt, Artificial Sequence
  Description of Artificial Sequence: Synthetic oligonucleotide
  Sense Strand Starting at position 64 of SEQ ID NO: 315597
acacauggccuauauagua

SEQ ID NO: 323676 - RNA, 19 nt, Artificial Sequence
  Description of Artificial Sequence: Synthetic oligonucleotide
  Antisense Strand to SEQ ID NO: 323675
uacuauauaggccaugugu

SEQ ID NO: 323677 - RNA, 19 nt, Artificial Sequence
  Description of Artificial Sequence: Synthetic oligonucleotide
  Sense Strand Starting at position 64 of SEQ ID NO: 315749
gcucaaacgcuguuauugu

SEQ ID NO: 323678 - RNA, 19 nt, Artificial Sequence
  Description of Artificial Sequence: Synthetic oligonucleotide
  Antisense Strand to SEQ ID NO: 323677
acaauaacagcguuugagc

SEQ ID NO: 323679 - RNA, 19 nt, Artificial Sequence
  Description of Artificial Sequence: Synthetic oligonucleotide
  Sense Strand Starting at position 64 of SEQ ID NO: 315758
cuguuauuguaaucuagau

SEQ ID NO: 323680 - RNA, 19 nt, Artificial Sequence
  Description of Artificial Sequence: Synthetic oligonucleotide
  Antisense Strand to SEQ ID NO: 323679
aucuagauuacaauaacag

SEQ ID NO: 323681 - RNA, 19 nt, Artificial Sequence
  Description of Artificial Sequence: Synthetic oligonucleotide
  Sense Strand Starting at position 64 of SEQ ID NO: 315764
uuguaaucuagaugguguu

SEQ ID NO: 323682 - RNA, 19 nt, Artificial Sequence
  Description of Artificial Sequence: Synthetic oligonucleotide
  Antisense Strand to SEQ ID NO: 323681
aacaccaucuagauuacaa

SEQ ID NO: 323683 - RNA, 19 nt, Artificial Sequence
  Description of Artificial Sequence: Synthetic oligonucleotide
  Sense Strand Starting at position 64 of SEQ ID NO: 315765
uguaaucuagaugguguuu

SEQ ID NO: 323684 - RNA, 19 nt, Artificial Sequence
  Description of Artificial Sequence: Synthetic oligonucleotide
  Antisense Strand to SEQ ID NO: 323683
aaacaccaucuagauuaca

SEQ ID NO: 323685 - RNA, 19 nt, Artificial Sequence
  Description of Artificial Sequence: Synthetic oligonucleotide
  Sense Strand Starting at position 64 of SEQ ID NO: 315942
acacucuucuugucugaca

SEQ ID NO: 323686 - RNA, 19 nt, Artificial Sequence
  Description of Artificial Sequence: Synthetic oligonucleotide
  Antisense Strand to SEQ ID NO: 323685
ugucagacaagaagagugu

SEQ ID NO: 323687 - RNA, 19 nt, Artificial Sequence
  Description of Artificial Sequence: Synthetic oligonucleotide
  Sense Strand Starting at position 64 of SEQ ID NO: 315944
acucuucuugucugacaca

SEQ ID NO: 323688 - RNA, 19 nt, Artificial Sequence
  Description of Artificial Sequence: Synthetic oligonucleotide
  Antisense Strand to SEQ ID NO: 323687
ugugucagacaagaagagu

SEQ ID NO: 323689 - RNA, 19 nt, Artificial Sequence
  Description of Artificial Sequence: Synthetic oligonucleotide
  Sense Strand Starting at position 64 of SEQ ID NO: 316051
uuggcaucagcucagaaau

SEQ ID NO: 323690 - RNA, 19 nt, Artificial Sequence
  Description of Artificial Sequence: Synthetic oligonucleotide
  Antisense Strand to SEQ ID NO: 323689
auuucugagcugaugccaa

SEQ ID NO: 323691 - RNA, 19 nt, Artificial Sequence
  Description of Artificial Sequence: Synthetic oligonucleotide
  Sense Strand Starting at position 64 of SEQ ID NO: 316070
ucagaaauguuugugcaac

SEQ ID NO: 323692 - RNA, 19 nt, Artificial Sequence
  Description of Artificial Sequence: Synthetic oligonucleotide
  Antisense Strand to SEQ ID NO: 323691
guugcacaaacauuucuga

SEQ ID NO: 323693 - RNA, 19 nt, Artificial Sequence
  Description of Artificial Sequence: Synthetic oligonucleotide
  Sense Strand Starting at position 64 of SEQ ID NO: 316072
agaaauguuugugcaacca

SEQ ID NO: 323694 - RNA, 19 nt, Artificial Sequence
  Description of Artificial Sequence: Synthetic oligonucleotide
  Antisense Strand to SEQ ID NO: 323693
ugguugcacaaacauuucu

SEQ ID NO: 323695 - RNA, 19 nt, Artificial Sequence
  Description of Artificial Sequence: Synthetic oligonucleotide
  Sense Strand Starting at position 64 of SEQ ID NO: 316194
agcuaaggcggucaugauu

SEQ ID NO: 323696 - RNA, 19 nt, Artificial Sequence
  Description of Artificial Sequence: Synthetic oligonucleotide
  Antisense Strand to SEQ ID NO: 323695
aaucaugaccgccuuagcu

SEQ ID NO: 323697 - RNA, 19 nt, Artificial Sequence
  Description of Artificial Sequence: Synthetic oligonucleotide
  Sense Strand Starting at position 64 of SEQ ID NO: 316433
ccuuaagaaucguuuaugu

SEQ ID NO: 323698 - RNA, 19 nt, Artificial Sequence
  Description of Artificial Sequence: Synthetic oligonucleotide
  Antisense Strand to SEQ ID NO: 323697
acauaaacgauucuuaagg

SEQ ID NO: 323699 - RNA, 19 nt, Artificial Sequence
  Description of Artificial Sequence: Synthetic oligonucleotide
  Sense Strand Starting at position 64 of SEQ ID NO: 316435
uuaagaaucguuuauguuc

SEQ ID NO: 323700 - RNA, 19 nt, Artificial Sequence
  Description of Artificial Sequence: Synthetic oligonucleotide
  Antisense Strand to SEQ ID NO: 323699
gaacauaaacgauucuuaa

SEQ ID NO: 323701 - RNA, 19 nt, Artificial Sequence
  Description of Artificial Sequence: Synthetic oligonucleotide
  Sense Strand Starting at position 64 of SEQ ID NO: 316499
ggaauacauuaacuuguga

SEQ ID NO: 323702 - RNA, 19 nt, Artificial Sequence
  Description of Artificial Sequence: Synthetic oligonucleotide
  Antisense Strand to SEQ ID NO: 323701
ucacaaguuaauguauucc

SEQ ID NO: 323703 - RNA, 19 nt, Artificial Sequence
  Description of Artificial Sequence: Synthetic oligonucleotide
  Sense Strand Starting at position 64 of SEQ ID NO: 317400
cgcguucucccgagagcag

SEQ ID NO: 323704 - RNA, 19 nt, Artificial Sequence
  Description of Artificial Sequence: Synthetic oligonucleotide
  Antisense Strand to SEQ ID NO: 323703
cugcucucgggagaacgcg

SEQ ID NO: 323705 - RNA, 19 nt, Artificial Sequence
  Description of Artificial Sequence: Synthetic oligonucleotide
  Sense Strand Starting at position 64 of SEQ ID NO: 317422
ugcgacuccagagauaacu

SEQ ID NO: 323706 - RNA, 19 nt, Artificial Sequence
  Description of Artificial Sequence: Synthetic oligonucleotide
  Antisense Strand to SEQ ID NO: 323705
aguuaucucuggagucgca

SEQ ID NO: 323707 - RNA, 19 nt, Artificial Sequence
  Description of Artificial Sequence: Synthetic oligonucleotide
  Sense Strand Starting at position 64 of SEQ ID NO: 317657
cuacgcaaauacuuaaaga

SEQ ID NO: 323708 - RNA, 19 nt, Artificial Sequence
  Description of Artificial Sequence: Synthetic oligonucleotide
  Antisense Strand to SEQ ID NO: 323707
ucuuuaaguauuugcguag

SEQ ID NO: 323709 - RNA, 19 nt, Artificial Sequence
  Description of Artificial Sequence: Synthetic oligonucleotide
  Sense Strand Starting at position 64 of SEQ ID NO: 317956
uuaagaugccucugacaca

SEQ ID NO: 323710 - RNA, 19 nt, Artificial Sequence
  Description of Artificial Sequence: Synthetic oligonucleotide
  Antisense Strand to SEQ ID NO: 323709
ugugucagaggcaucuuaa

SEQ ID NO: 323711 - RNA, 19 nt, Artificial Sequence
  Description of Artificial Sequence: Synthetic oligonucleotide
  Sense Strand Starting at position 64 of SEQ ID NO: 318027
guuucaagagggcauguuu

SEQ ID NO: 323712 - RNA, 19 nt, Artificial Sequence
  Description of Artificial Sequence: Synthetic oligonucleotide
  Antisense Strand to SEQ ID NO: 323711
aaacaugcccucuugaaac

SEQ ID NO: 323713 - RNA, 19 nt, Artificial Sequence
  Description of Artificial Sequence: Synthetic oligonucleotide
  Sense Strand Starting at position 64 of SEQ ID NO: 318104
gcacucaaauucuugugau

SEQ ID NO: 323714 - RNA, 19 nt, Artificial Sequence
  Description of Artificial Sequence: Synthetic oligonucleotide
  Antisense Strand to SEQ ID NO: 323713
aucacaagaauuugagugc

SEQ ID NO: 323715 - RNA, 19 nt, Artificial Sequence
  Description of Artificial Sequence: Synthetic oligonucleotide
  Sense Strand Starting at position 64 of SEQ ID NO: 318140
agaugaaacuuccuguaua

SEQ ID NO: 323716 - RNA, 19 nt, Artificial Sequence
  Description of Artificial Sequence: Synthetic oligonucleotide
  Antisense Strand to SEQ ID NO: 323715
uauacaggaaguuucaucu

SEQ ID NO: 323717 - RNA, 19 nt, Artificial Sequence
  Description of Artificial Sequence: Synthetic oligonucleotide
  Sense Strand Starting at position 64 of SEQ ID NO: 318245
gguacugaaucccuuuaca

SEQ ID NO: 323718 - RNA, 19 nt, Artificial Sequence
  Description of Artificial Sequence: Synthetic oligonucleotide
  Antisense Strand to SEQ ID NO: 323717
uguaaagggauucaguacc

SEQ ID NO: 323719 - RNA, 19 nt, Artificial Sequence
  Description of Artificial Sequence: Synthetic oligonucleotide
  Sense Strand Starting at position 64 of SEQ ID NO: 318356
ccagaucuggcccauagau

SEQ ID NO: 323720 - RNA, 19 nt, Artificial Sequence
  Description of Artificial Sequence: Synthetic oligonucleotide
  Antisense Strand to SEQ ID NO: 323719
aucuaugggccagaucugg

SEQ ID NO: 323721 - RNA, 19 nt, Artificial Sequence
  Description of Artificial Sequence: Synthetic oligonucleotide
  Sense Strand Starting at position 64 of SEQ ID NO: 318358
agaucuggcccauagaugu

SEQ ID NO: 323722 - RNA, 19 nt, Artificial Sequence
  Description of Artificial Sequence: Synthetic oligonucleotide
  Antisense Strand to SEQ ID NO: 323721
acaucuaugggccagaucu

SEQ ID NO: 323723 - RNA, 19 nt, Artificial Sequence
  Description of Artificial Sequence: Synthetic oligonucleotide
  Sense Strand Starting at position 64 of SEQ ID NO: 318372
gauguacuuggcuggcaga

SEQ ID NO: 323724 - RNA, 19 nt, Artificial Sequence
  Description of Artificial Sequence: Synthetic oligonucleotide
  Antisense Strand to SEQ ID NO: 323723
ucugccagccaaguacauc

SEQ ID NO: 323725 - RNA, 19 nt, Artificial Sequence
  Description of Artificial Sequence: Synthetic oligonucleotide
  Sense Strand Starting at position 64 of SEQ ID NO: 318507
agugcauucccauauggca

SEQ ID NO: 323726 - RNA, 19 nt, Artificial Sequence
  Description of Artificial Sequence: Synthetic oligonucleotide
  Antisense Strand to SEQ ID NO: 323725
ugccauaugggaaugcacu

SEQ ID NO: 323727 - RNA, 19 nt, Artificial Sequence
  Description of Artificial Sequence: Synthetic oligonucleotide
  Sense Strand Starting at position 64 of SEQ ID NO: 318561
gaggcacccucuuuagaga

SEQ ID NO: 323728 - RNA, 19 nt, Artificial Sequence
  Description of Artificial Sequence: Synthetic oligonucleotide
  Antisense Strand to SEQ ID NO: 323727
ucucuaaagagggugccuc

SEQ ID NO: 323729 - RNA, 19 nt, Artificial Sequence
  Description of Artificial Sequence: Synthetic oligonucleotide
  Sense Strand Starting at position 64 of SEQ ID NO: 318664
gcccaaccucuaugaauug

SEQ ID NO: 323730 - RNA, 19 nt, Artificial Sequence
  Description of Artificial Sequence: Synthetic oligonucleotide
  Antisense Strand to SEQ ID NO: 323729
caauucauagagguugggc

SEQ ID NO: 323731 - RNA, 19 nt, Artificial Sequence
  Description of Artificial Sequence: Synthetic oligonucleotide
  Sense Strand Starting at position 64 of SEQ ID NO: 318702
uccaucucucagugacacu

SEQ ID NO: 323732 - RNA, 19 nt, Artificial Sequence
  Description of Artificial Sequence: Synthetic oligonucleotide
  Antisense Strand to SEQ ID NO: 323731
agugucacugagagaugga

SEQ ID NO: 323733 - RNA, 19 nt, Artificial Sequence
  Description of Artificial Sequence: Synthetic oligonucleotide
  Sense Strand Starting at position 64 of SEQ ID NO: 318734
cccagucaucuuggugaaa

SEQ ID NO: 323734 - RNA, 19 nt, Artificial Sequence
  Description of Artificial Sequence: Synthetic oligonucleotide
  Antisense Strand to SEQ ID NO: 323733
uuucaccaagaugacuggg

SEQ ID NO: 323735 - RNA, 19 nt, Artificial Sequence
  Description of Artificial Sequence: Synthetic oligonucleotide
  Sense Strand Starting at position 64 of SEQ ID NO: 318735
ccagucaucuuggugaaau

SEQ ID NO: 323736 - RNA, 19 nt, Artificial Sequence
  Description of Artificial Sequence: Synthetic oligonucleotide
  Antisense Strand to SEQ ID NO: 323735
auuucaccaagaugacugg

SEQ ID NO: 323737 - RNA, 19 nt, Artificial Sequence
  Description of Artificial Sequence: Synthetic oligonucleotide
  Sense Strand Starting at position 64 of SEQ ID NO: 318737
agucaucuuggugaaaugu

SEQ ID NO: 323738 - RNA, 19 nt, Artificial Sequence
  Description of Artificial Sequence: Synthetic oligonucleotide
  Antisense Strand to SEQ ID NO: 323737
acauuucaccaagaugacu

SEQ ID NO: 323739 - RNA, 19 nt, Artificial Sequence
  Description of Artificial Sequence: Synthetic oligonucleotide
  Sense Strand Starting at position 64 of SEQ ID NO: 319078
uuuguaaacugcuuggaga

SEQ ID NO: 323740 - RNA, 19 nt, Artificial Sequence
  Description of Artificial Sequence: Synthetic oligonucleotide
  Antisense Strand to SEQ ID NO: 323739
ucuccaagcaguuuacaaa

SEQ ID NO: 323741 - RNA, 19 nt, Artificial Sequence
  Description of Artificial Sequence: Synthetic oligonucleotide
  Sense Strand Starting at position 64 of SEQ ID NO: 319080
uguaaacugcuuggagagu

SEQ ID NO: 323742 - RNA, 19 nt, Artificial Sequence
  Description of Artificial Sequence: Synthetic oligonucleotide
  Antisense Strand to SEQ ID NO: 323741
acucuccaagcaguuuaca

SEQ ID NO: 323743 - RNA, 19 nt, Artificial Sequence
  Description of Artificial Sequence: Synthetic oligonucleotide
  Sense Strand Starting at position 64 of SEQ ID NO: 319105
uaagguauuugguacaaug

SEQ ID NO: 323744 - RNA, 19 nt, Artificial Sequence
  Description of Artificial Sequence: Synthetic oligonucleotide
  Antisense Strand to SEQ ID NO: 323743
cauuguaccaaauaccuua

SEQ ID NO: 323745 - RNA, 19 nt, Artificial Sequence
  Description of Artificial Sequence: Synthetic oligonucleotide
  Sense Strand Starting at position 64 of SEQ ID NO: 319183
uuagcauuugcuuagcagu

SEQ ID NO: 323746 - RNA, 19 nt, Artificial Sequence
  Description of Artificial Sequence: Synthetic oligonucleotide
  Antisense Strand to SEQ ID NO: 323745
acugcuaagcaaaugcuaa

SEQ ID NO: 323747 - RNA, 19 nt, Artificial Sequence
  Description of Artificial Sequence: Synthetic oligonucleotide
  Sense Strand Starting at position 65 of SEQ ID NO: 316285
gaguuagucuugccuaaag

SEQ ID NO: 323748 - RNA, 19 nt, Artificial Sequence
  Description of Artificial Sequence: Synthetic oligonucleotide
  Antisense Strand to SEQ ID NO: 323747
cuuuaggcaagacuaacuc

SEQ ID NO: 323749 - RNA, 19 nt, Artificial Sequence
  Description of Artificial Sequence: Synthetic oligonucleotide
  Sense Strand Starting at position 65 of SEQ ID NO: 316287
guuagucuugccuaaagag

SEQ ID NO: 323750 - RNA, 19 nt, Artificial Sequence
  Description of Artificial Sequence: Synthetic oligonucleotide
  Antisense Strand to SEQ ID NO: 323749
cucuuuaggcaagacuaac

SEQ ID NO: 323751 - RNA, 19 nt, Artificial Sequence
  Description of Artificial Sequence: Synthetic oligonucleotide
  Sense Strand Starting at position 65 of SEQ ID NO: 316456
gcgcgguucccggcagaaa

SEQ ID NO: 323752 - RNA, 19 nt, Artificial Sequence
  Description of Artificial Sequence: Synthetic oligonucleotide
  Antisense Strand to SEQ ID NO: 323751
uuucugccgggaaccgcgc

SEQ ID NO: 323753 - RNA, 19 nt, Artificial Sequence
  Description of Artificial Sequence: Synthetic oligonucleotide
  Sense Strand Starting at position 65 of SEQ ID NO: 316458
gcgguucccggcagaaauc

SEQ ID NO: 323754 - RNA, 19 nt, Artificial Sequence
  Description of Artificial Sequence: Synthetic oligonucleotide
  Antisense Strand to SEQ ID NO: 323753
gauuucugccgggaaccgc

SEQ ID NO: 323755 - RNA, 19 nt, Artificial Sequence
  Description of Artificial Sequence: Synthetic oligonucleotide
  Sense Strand Starting at position 65 of SEQ ID NO: 317229
agaguucuaacgcagaguc

SEQ ID NO: 323756 - RNA, 19 nt, Artificial Sequence
  Description of Artificial Sequence: Synthetic oligonucleotide
  Antisense Strand to SEQ ID NO: 323755
gacucugcguuagaacucu

SEQ ID NO: 323757 - RNA, 19 nt, Artificial Sequence
  Description of Artificial Sequence: Synthetic oligonucleotide
  Sense Strand Starting at position 65 of SEQ ID NO: 317231
aguucuaacgcagagucau

SEQ ID NO: 323758 - RNA, 19 nt, Artificial Sequence
  Description of Artificial Sequence: Synthetic oligonucleotide
  Antisense Strand to SEQ ID NO: 323757
augacucugcguuagaacu

SEQ ID NO: 323759 - RNA, 19 nt, Artificial Sequence
  Description of Artificial Sequence: Synthetic oligonucleotide
  Sense Strand Starting at position 65 of SEQ ID NO: 317286
gcucgucccagugcugaaa

SEQ ID NO: 323760 - RNA, 19 nt, Artificial Sequence
  Description of Artificial Sequence: Synthetic oligonucleotide
  Antisense Strand to SEQ ID NO: 323759
uuucagcacugggacgagc

SEQ ID NO: 323761 - RNA, 19 nt, Artificial Sequence
  Description of Artificial Sequence: Synthetic oligonucleotide
  Sense Strand Starting at position 65 of SEQ ID NO: 317324
gauagaugggcuuguuugu

SEQ ID NO: 323762 - RNA, 19 nt, Artificial Sequence
  Description of Artificial Sequence: Synthetic oligonucleotide
  Antisense Strand to SEQ ID NO: 323761
acaaacaagcccaucuauc

SEQ ID NO: 323763 - RNA, 19 nt, Artificial Sequence
  Description of Artificial Sequence: Synthetic oligonucleotide
  Sense Strand Starting at position 65 of SEQ ID NO: 317346
uagagucuuuccguaggaa

SEQ ID NO: 323764 - RNA, 19 nt, Artificial Sequence
  Description of Artificial Sequence: Synthetic oligonucleotide
  Antisense Strand to SEQ ID NO: 323763
uuccuacggaaagacucua

SEQ ID NO: 323765 - RNA, 19 nt, Artificial Sequence
  Description of Artificial Sequence: Synthetic oligonucleotide
  Sense Strand Starting at position 65 of SEQ ID NO: 317347
agagucuuuccguaggaaa

SEQ ID NO: 323766 - RNA, 19 nt, Artificial Sequence
  Description of Artificial Sequence: Synthetic oligonucleotide
  Antisense Strand to SEQ ID NO: 323765
uuuccuacggaaagacucu

SEQ ID NO: 323767 - RNA, 19 nt, Artificial Sequence
  Description of Artificial Sequence: Synthetic oligonucleotide
  Sense Strand Starting at position 65 of SEQ ID NO: 317349
agucuuuccguaggaaaga

SEQ ID NO: 323768 - RNA, 19 nt, Artificial Sequence
  Description of Artificial Sequence: Synthetic oligonucleotide
  Antisense Strand to SEQ ID NO: 323767
ucuuuccuacggaaagacu

SEQ ID NO: 323769 - RNA, 19 nt, Artificial Sequence
  Description of Artificial Sequence: Synthetic oligonucleotide
  Sense Strand Starting at position 65 of SEQ ID NO: 317511
auugguuuccaacaguaca

SEQ ID NO: 323770 - RNA, 19 nt, Artificial Sequence
  Description of Artificial Sequence: Synthetic oligonucleotide
  Antisense Strand to SEQ ID NO: 323769
uguacuguuggaaaccaau

SEQ ID NO: 323771 - RNA, 19 nt, Artificial Sequence
  Description of Artificial Sequence: Synthetic oligonucleotide
  Sense Strand Starting at position 65 of SEQ ID NO: 317593
agccuagucuuuccuccau

SEQ ID NO: 323772 - RNA, 19 nt, Artificial Sequence
  Description of Artificial Sequence: Synthetic oligonucleotide
  Antisense Strand to SEQ ID NO: 323771
auggaggaaagacuaggcu

SEQ ID NO: 323773 - RNA, 19 nt, Artificial Sequence
  Description of Artificial Sequence: Synthetic oligonucleotide
  Sense Strand Starting at position 65 of SEQ ID NO: 317690
acuugucacugcgucagaa

SEQ ID NO: 323774 - RNA, 19 nt, Artificial Sequence
  Description of Artificial Sequence: Synthetic oligonucleotide
  Antisense Strand to SEQ ID NO: 323773
uucugacgcagugacaagu

SEQ ID NO: 323775 - RNA, 19 nt, Artificial Sequence
  Description of Artificial Sequence: Synthetic oligonucleotide
  Sense Strand Starting at position 65 of SEQ ID NO: 317761
gccacuuguucucuucuau

SEQ ID NO: 323776 - RNA, 19 nt, Artificial Sequence
  Description of Artificial Sequence: Synthetic oligonucleotide
  Antisense Strand to SEQ ID NO: 323775
auagaagagaacaaguggc

SEQ ID NO: 323777 - RNA, 19 nt, Artificial Sequence
  Description of Artificial Sequence: Synthetic oligonucleotide
  Sense Strand Starting at position 65 of SEQ ID NO: 317928
uuuaaugagugagagaaug

SEQ ID NO: 323778 - RNA, 19 nt, Artificial Sequence
  Description of Artificial Sequence: Synthetic oligonucleotide
  Antisense Strand to SEQ ID NO: 323777
cauucucucacucauuaaa

SEQ ID NO: 323779 - RNA, 19 nt, Artificial Sequence
  Description of Artificial Sequence: Synthetic oligonucleotide
  Sense Strand Starting at position 65 of SEQ ID NO: 317940
gagaaugaaugacaggaau

SEQ ID NO: 323780 - RNA, 19 nt, Artificial Sequence
  Description of Artificial Sequence: Synthetic oligonucleotide
  Antisense Strand to SEQ ID NO: 323779
auuccugucauucauucuc

SEQ ID NO: 323781 - RNA, 19 nt, Artificial Sequence
  Description of Artificial Sequence: Synthetic oligonucleotide
  Sense Strand Starting at position 65 of SEQ ID NO: 317985
caaagugcuugguugucaa

SEQ ID NO: 323782 - RNA, 19 nt, Artificial Sequence
  Description of Artificial Sequence: Synthetic oligonucleotide
  Antisense Strand to SEQ ID NO: 323781
uugacaaccaagcacuuug

SEQ ID NO: 323783 - RNA, 19 nt, Artificial Sequence
  Description of Artificial Sequence: Synthetic oligonucleotide
  Sense Strand Starting at position 65 of SEQ ID NO: 317988
agugcuugguugucaaaua

SEQ ID NO: 323784 - RNA, 19 nt, Artificial Sequence
  Description of Artificial Sequence: Synthetic oligonucleotide
  Antisense Strand to SEQ ID NO: 323783
uauuugacaaccaagcacu

SEQ ID NO: 323785 - RNA, 19 nt, Artificial Sequence
  Description of Artificial Sequence: Synthetic oligonucleotide
  Sense Strand Starting at position 65 of SEQ ID NO: 317993
uugguugucaaauaguaga

SEQ ID NO: 323786 - RNA, 19 nt, Artificial Sequence
  Description of Artificial Sequence: Synthetic oligonucleotide
  Antisense Strand to SEQ ID NO: 323785
ucuacuauuugacaaccaa

SEQ ID NO: 323787 - RNA, 19 nt, Artificial Sequence
  Description of Artificial Sequence: Synthetic oligonucleotide
  Sense Strand Starting at position 65 of SEQ ID NO: 318008
uagaaagauggcugugucu

SEQ ID NO: 323788 - RNA, 19 nt, Artificial Sequence
  Description of Artificial Sequence: Synthetic oligonucleotide
  Antisense Strand to SEQ ID NO: 323787
agacacagccaucuuucua

SEQ ID NO: 323789 - RNA, 19 nt, Artificial Sequence
  Description of Artificial Sequence: Synthetic oligonucleotide
  Sense Strand Starting at position 65 of SEQ ID NO: 318010
gaaagauggcugugucuug

SEQ ID NO: 323790 - RNA, 19 nt, Artificial Sequence
  Description of Artificial Sequence: Synthetic oligonucleotide
  Antisense Strand to SEQ ID NO: 323789
caagacacagccaucuuuc

SEQ ID NO: 323791 - RNA, 19 nt, Artificial Sequence
  Description of Artificial Sequence: Synthetic oligonucleotide
  Sense Strand Starting at position 65 of SEQ ID NO: 318057
aggcaaacuugagaagaca

SEQ ID NO: 323792 - RNA, 19 nt, Artificial Sequence
  Description of Artificial Sequence: Synthetic oligonucleotide
  Antisense Strand to SEQ ID NO: 323791
ugucuucucaaguuugccu

SEQ ID NO: 323793 - RNA, 19 nt, Artificial Sequence
  Description of Artificial Sequence: Synthetic oligonucleotide
  Sense Strand Starting at position 65 of SEQ ID NO: 318088
ccauaagagcuguauaauu

SEQ ID NO: 323794 - RNA, 19 nt, Artificial Sequence
  Description of Artificial Sequence: Synthetic oligonucleotide
  Antisense Strand to SEQ ID NO: 323793
aauuauacagcucuuaugg

SEQ ID NO: 323795 - RNA, 19 nt, Artificial Sequence
  Description of Artificial Sequence: Synthetic oligonucleotide
  Sense Strand Starting at position 65 of SEQ ID NO: 318196
gcaaguuaugcugccuguu

SEQ ID NO: 323796 - RNA, 19 nt, Artificial Sequence
  Description of Artificial Sequence: Synthetic oligonucleotide
  Antisense Strand to SEQ ID NO: 323795
aacaggcagcauaacuugc

SEQ ID NO: 323797 - RNA, 19 nt, Artificial Sequence
  Description of Artificial Sequence: Synthetic oligonucleotide
  Sense Strand Starting at position 65 of SEQ ID NO: 318197
caaguuaugcugccuguuu

SEQ ID NO: 323798 - RNA, 19 nt, Artificial Sequence
  Description of Artificial Sequence: Synthetic oligonucleotide
  Antisense Strand to SEQ ID NO: 323797
aaacaggcagcauaacuug

SEQ ID NO: 323799 - RNA, 19 nt, Artificial Sequence
  Description of Artificial Sequence: Synthetic oligonucleotide
  Sense Strand Starting at position 65 of SEQ ID NO: 318254
ugugaucucugggugguga

SEQ ID NO: 323800 - RNA, 19 nt, Artificial Sequence
  Description of Artificial Sequence: Synthetic oligonucleotide
  Antisense Strand to SEQ ID NO: 323799
ucaccacccagagaucaca

SEQ ID NO: 323801 - RNA, 19 nt, Artificial Sequence
  Description of Artificial Sequence: Synthetic oligonucleotide
  Sense Strand Starting at position 65 of SEQ ID NO: 318267
uggugagaugaaggauagu

SEQ ID NO: 323802 - RNA, 19 nt, Artificial Sequence
  Description of Artificial Sequence: Synthetic oligonucleotide
  Antisense Strand to SEQ ID NO: 323801
acuauccuucaucucacca

SEQ ID NO: 323803 - RNA, 19 nt, Artificial Sequence
  Description of Artificial Sequence: Synthetic oligonucleotide
  Sense Strand Starting at position 65 of SEQ ID NO: 318348
uuacuuugaucugagacau

SEQ ID NO: 323804 - RNA, 19 nt, Artificial Sequence
  Description of Artificial Sequence: Synthetic oligonucleotide
  Antisense Strand to SEQ ID NO: 323803
augucucagaucaaaguaa

SEQ ID NO: 323805 - RNA, 19 nt, Artificial Sequence
  Description of Artificial Sequence: Synthetic oligonucleotide
  Sense Strand Starting at position 65 of SEQ ID NO: 318699
ccgcuccuggccuaagaaa

SEQ ID NO: 323806 - RNA, 19 nt, Artificial Sequence
  Description of Artificial Sequence: Synthetic oligonucleotide
  Antisense Strand to SEQ ID NO: 323805
uuucuuaggccaggagcgg

SEQ ID NO: 323807 - RNA, 19 nt, Artificial Sequence
  Description of Artificial Sequence: Synthetic oligonucleotide
  Sense Strand Starting at position 65 of SEQ ID NO: 318746
gguggaagacauggcugau

SEQ ID NO: 323808 - RNA, 19 nt, Artificial Sequence
  Description of Artificial Sequence: Synthetic oligonucleotide
  Antisense Strand to SEQ ID NO: 323807
aucagccaugucuuccacc

SEQ ID NO: 323809 - RNA, 19 nt, Artificial Sequence
  Description of Artificial Sequence: Synthetic oligonucleotide
  Sense Strand Starting at position 65 of SEQ ID NO: 318749
ggaagacauggcugauuac

SEQ ID NO: 323810 - RNA, 19 nt, Artificial Sequence
  Description of Artificial Sequence: Synthetic oligonucleotide
  Antisense Strand to SEQ ID NO: 323809
guaaucagccaugucuucc

SEQ ID NO: 323811 - RNA, 19 nt, Artificial Sequence
  Description of Artificial Sequence: Synthetic oligonucleotide
  Sense Strand Starting at position 65 of SEQ ID NO: 318752
agacauggcugauuacaua

SEQ ID NO: 323812 - RNA, 19 nt, Artificial Sequence
  Description of Artificial Sequence: Synthetic oligonucleotide
  Antisense Strand to SEQ ID NO: 323811
uauguaaucagccaugucu

SEQ ID NO: 323813 - RNA, 19 nt, Artificial Sequence
  Description of Artificial Sequence: Synthetic oligonucleotide
  Sense Strand Starting at position 65 of SEQ ID NO: 318872
gugguuaccgacugacaaa

SEQ ID NO: 323814 - RNA, 19 nt, Artificial Sequence
  Description of Artificial Sequence: Synthetic oligonucleotide
  Antisense Strand to SEQ ID NO: 323813
uuugucagucgguaaccac

SEQ ID NO: 323815 - RNA, 19 nt, Artificial Sequence
  Description of Artificial Sequence: Synthetic oligonucleotide
  Sense Strand Starting at position 65 of SEQ ID NO: 318873
ugguuaccgacugacaaau

SEQ ID NO: 323816 - RNA, 19 nt, Artificial Sequence
  Description of Artificial Sequence: Synthetic oligonucleotide
  Antisense Strand to SEQ ID NO: 323815
auuugucagucgguaacca

SEQ ID NO: 323817 - RNA, 19 nt, Artificial Sequence
  Description of Artificial Sequence: Synthetic oligonucleotide
  Sense Strand Starting at position 65 of SEQ ID NO: 318879
ccgacugacaaauggagua

SEQ ID NO: 323818 - RNA, 19 nt, Artificial Sequence
  Description of Artificial Sequence: Synthetic oligonucleotide
  Antisense Strand to SEQ ID NO: 323817
uacuccauuugucagucgg

SEQ ID NO: 323819 - RNA, 19 nt, Artificial Sequence
  Description of Artificial Sequence: Synthetic oligonucleotide
  Sense Strand Starting at position 65 of SEQ ID NO: 318918
accugugaccuauguuaag

SEQ ID NO: 323820 - RNA, 19 nt, Artificial Sequence
  Description of Artificial Sequence: Synthetic oligonucleotide
  Antisense Strand to SEQ ID NO: 323819
cuuaacauaggucacaggu

SEQ ID NO: 323821 - RNA, 19 nt, Artificial Sequence
  Description of Artificial Sequence: Synthetic oligonucleotide
  Sense Strand Starting at position 65 of SEQ ID NO: 318970
ucuugaaauuauguugcuu

SEQ ID NO: 323822 - RNA, 19 nt, Artificial Sequence
  Description of Artificial Sequence: Synthetic oligonucleotide
  Antisense Strand to SEQ ID NO: 323821
aagcaacauaauuucaaga

SEQ ID NO: 323823 - RNA, 19 nt, Artificial Sequence
  Description of Artificial Sequence: Synthetic oligonucleotide
  Sense Strand Starting at position 65 of SEQ ID NO: 319004
accaauauuugugacgacu

SEQ ID NO: 323824 - RNA, 19 nt, Artificial Sequence
  Description of Artificial Sequence: Synthetic oligonucleotide
  Antisense Strand to SEQ ID NO: 323823
agucgucacaaauauuggu

SEQ ID NO: 323825 - RNA, 19 nt, Artificial Sequence
  Description of Artificial Sequence: Synthetic oligonucleotide
  Sense Strand Starting at position 65 of SEQ ID NO: 319006
caauauuugugacgacuuc

SEQ ID NO: 323826 - RNA, 19 nt, Artificial Sequence
  Description of Artificial Sequence: Synthetic oligonucleotide
  Antisense Strand to SEQ ID NO: 323825
gaagucgucacaaauauug

SEQ ID NO: 323827 - RNA, 19 nt, Artificial Sequence
  Description of Artificial Sequence: Synthetic oligonucleotide
  Sense Strand Starting at position 66 of SEQ ID NO: 315271
cccaauucugccugagcuu

SEQ ID NO: 323828 - RNA, 19 nt, Artificial Sequence
  Description of Artificial Sequence: Synthetic oligonucleotide
  Antisense Strand to SEQ ID NO: 323827
aagcucaggcagaauuggg

SEQ ID NO: 323829 - RNA, 19 nt, Artificial Sequence
  Description of Artificial Sequence: Synthetic oligonucleotide
  Sense Strand Starting at position 66 of SEQ ID NO: 315272
ccaauucugccugagcuua

SEQ ID NO: 323830 - RNA, 19 nt, Artificial Sequence
  Description of Artificial Sequence: Synthetic oligonucleotide
  Antisense Strand to SEQ ID NO: 323829
uaagcucaggcagaauugg

SEQ ID NO: 323831 - RNA, 19 nt, Artificial Sequence
  Description of Artificial Sequence: Synthetic oligonucleotide
  Sense Strand Starting at position 66 of SEQ ID NO: 315277
ucugccugagcuuagaaau

SEQ ID NO: 323832 - RNA, 19 nt, Artificial Sequence
  Description of Artificial Sequence: Synthetic oligonucleotide
  Antisense Strand to SEQ ID NO: 323831
auuucuaagcucaggcaga

SEQ ID NO: 323833 - RNA, 19 nt, Artificial Sequence
  Description of Artificial Sequence: Synthetic oligonucleotide
  Sense Strand Starting at position 66 of SEQ ID NO: 315376
cuggauguacacuagcaau

SEQ ID NO: 323834 - RNA, 19 nt, Artificial Sequence
  Description of Artificial Sequence: Synthetic oligonucleotide
  Antisense Strand to SEQ ID NO: 323833
auugcuaguguacauccag

SEQ ID NO: 323835 - RNA, 19 nt, Artificial Sequence
  Description of Artificial Sequence: Synthetic oligonucleotide
  Sense Strand Starting at position 66 of SEQ ID NO: 315421
gaaugacuucuucggguuu

SEQ ID NO: 323836 - RNA, 19 nt, Artificial Sequence
  Description of Artificial Sequence: Synthetic oligonucleotide
  Antisense Strand to SEQ ID NO: 323835
aaacccgaagaagucauuc

SEQ ID NO: 323837 - RNA, 19 nt, Artificial Sequence
  Description of Artificial Sequence: Synthetic oligonucleotide
  Sense Strand Starting at position 66 of SEQ ID NO: 315473
uuacuuuccgcuuagugaa

SEQ ID NO: 323838 - RNA, 19 nt, Artificial Sequence
  Description of Artificial Sequence: Synthetic oligonucleotide
  Antisense Strand to SEQ ID NO: 323837
uucacuaagcggaaaguaa

SEQ ID NO: 323839 - RNA, 19 nt, Artificial Sequence
  Description of Artificial Sequence: Synthetic oligonucleotide
  Sense Strand Starting at position 66 of SEQ ID NO: 316642
gaguuagucuugccuaaag

SEQ ID NO: 323840 - RNA, 19 nt, Artificial Sequence
  Description of Artificial Sequence: Synthetic oligonucleotide
  Antisense Strand to SEQ ID NO: 323839
cuuuaggcaagacuaacuc

SEQ ID NO: 323841 - RNA, 19 nt, Artificial Sequence
  Description of Artificial Sequence: Synthetic oligonucleotide
  Sense Strand Starting at position 66 of SEQ ID NO: 316644
guuagucuugccuaaagag

SEQ ID NO: 323842 - RNA, 19 nt, Artificial Sequence
  Description of Artificial Sequence: Synthetic oligonucleotide
  Antisense Strand to SEQ ID NO: 323841
cucuuuaggcaagacuaac

SEQ ID NO: 323843 - RNA, 19 nt, Artificial Sequence
  Description of Artificial Sequence: Synthetic oligonucleotide
  Sense Strand Starting at position 66 of SEQ ID NO: 316813
gcgcgguucccggcagaaa

SEQ ID NO: 323844 - RNA, 19 nt, Artificial Sequence
  Description of Artificial Sequence: Synthetic oligonucleotide
  Antisense Strand to SEQ ID NO: 323843
uuucugccgggaaccgcgc

SEQ ID NO: 323845 - RNA, 19 nt, Artificial Sequence
  Description of Artificial Sequence: Synthetic oligonucleotide
  Sense Strand Starting at position 66 of SEQ ID NO: 316815
gcgguucccggcagaaauc

SEQ ID NO: 323846 - RNA, 19 nt, Artificial Sequence
  Description of Artificial Sequence: Synthetic oligonucleotide
  Antisense Strand to SEQ ID NO: 323845
gauuucugccgggaaccgc

SEQ ID NO: 323847 - RNA, 19 nt, Artificial Sequence
  Description of Artificial Sequence: Synthetic oligonucleotide
  Sense Strand Starting at position 66 of SEQ ID NO: 317586
agaguucuaacgcagaguc

SEQ ID NO: 323848 - RNA, 19 nt, Artificial Sequence
  Description of Artificial Sequence: Synthetic oligonucleotide
  Antisense Strand to SEQ ID NO: 323847
gacucugcguuagaacucu

SEQ ID NO: 323849 - RNA, 19 nt, Artificial Sequence
  Description of Artificial Sequence: Synthetic oligonucleotide
  Sense Strand Starting at position 66 of SEQ ID NO: 317588
aguucuaacgcagagucau

SEQ ID NO: 323850 - RNA, 19 nt, Artificial Sequence
  Description of Artificial Sequence: Synthetic oligonucleotide
  Antisense Strand to SEQ ID NO: 323849
augacucugcguuagaacu

SEQ ID NO: 323851 - RNA, 19 nt, Artificial Sequence
  Description of Artificial Sequence: Synthetic oligonucleotide
  Sense Strand Starting at position 66 of SEQ ID NO: 317643
gcucgucccagugcugaaa

SEQ ID NO: 323852 - RNA, 19 nt, Artificial Sequence
  Description of Artificial Sequence: Synthetic oligonucleotide
  Antisense Strand to SEQ ID NO: 323851
uuucagcacugggacgagc

SEQ ID NO: 323853 - RNA, 19 nt, Artificial Sequence
  Description of Artificial Sequence: Synthetic oligonucleotide
  Sense Strand Starting at position 66 of SEQ ID NO: 317681
gauagaugggcuuguuugu

SEQ ID NO: 323854 - RNA, 19 nt, Artificial Sequence
  Description of Artificial Sequence: Synthetic oligonucleotide
  Antisense Strand to SEQ ID NO: 323853
acaaacaagcccaucuauc

SEQ ID NO: 323855 - RNA, 19 nt, Artificial Sequence
  Description of Artificial Sequence: Synthetic oligonucleotide
  Sense Strand Starting at position 66 of SEQ ID NO: 317688
gggcuuguuugugccuaga

SEQ ID NO: 323856 - RNA, 19 nt, Artificial Sequence
  Description of Artificial Sequence: Synthetic oligonucleotide
  Antisense Strand to SEQ ID NO: 323855
ucuaggcacaaacaagccc

SEQ ID NO: 323857 - RNA, 19 nt, Artificial Sequence
  Description of Artificial Sequence: Synthetic oligonucleotide
  Sense Strand Starting at position 66 of SEQ ID NO: 317703
uagagucuuuccguaggaa

SEQ ID NO: 323858 - RNA, 19 nt, Artificial Sequence
  Description of Artificial Sequence: Synthetic oligonucleotide
  Antisense Strand to SEQ ID NO: 323857
uuccuacggaaagacucua

SEQ ID NO: 323859 - RNA, 19 nt, Artificial Sequence
  Description of Artificial Sequence: Synthetic oligonucleotide
  Sense Strand Starting at position 66 of SEQ ID NO: 317704
agagucuuuccguaggaaa

SEQ ID NO: 323860 - RNA, 19 nt, Artificial Sequence
  Description of Artificial Sequence: Synthetic oligonucleotide
  Antisense Strand to SEQ ID NO: 323859
uuuccuacggaaagacucu

SEQ ID NO: 323861 - RNA, 19 nt, Artificial Sequence
  Description of Artificial Sequence: Synthetic oligonucleotide
  Sense Strand Starting at position 66 of SEQ ID NO: 317706
agucuuuccguaggaaaga

SEQ ID NO: 323862 - RNA, 19 nt, Artificial Sequence
  Description of Artificial Sequence: Synthetic oligonucleotide
  Antisense Strand to SEQ ID NO: 323861
ucuuuccuacggaaagacu

SEQ ID NO: 323863 - RNA, 19 nt, Artificial Sequence
  Description of Artificial Sequence: Synthetic oligonucleotide
  Sense Strand Starting at position 66 of SEQ ID NO: 317868
auugguuuccaacaguaca

SEQ ID NO: 323864 - RNA, 19 nt, Artificial Sequence
  Description of Artificial Sequence: Synthetic oligonucleotide
  Antisense Strand to SEQ ID NO: 323863
uguacuguuggaaaccaau

SEQ ID NO: 323865 - RNA, 19 nt, Artificial Sequence
  Description of Artificial Sequence: Synthetic oligonucleotide
  Sense Strand Starting at position 66 of SEQ ID NO: 317950
agccuagucuuuccuccau

SEQ ID NO: 323866 - RNA, 19 nt, Artificial Sequence
  Description of Artificial Sequence: Synthetic oligonucleotide
  Antisense Strand to SEQ ID NO: 323865
auggaggaaagacuaggcu

SEQ ID NO: 323867 - RNA, 19 nt, Artificial Sequence
  Description of Artificial Sequence: Synthetic oligonucleotide
  Sense Strand Starting at position 66 of SEQ ID NO: 318047
acuugucacugcgucagaa

SEQ ID NO: 323868 - RNA, 19 nt, Artificial Sequence
  Description of Artificial Sequence: Synthetic oligonucleotide
  Antisense Strand to SEQ ID NO: 323867
uucugacgcagugacaagu

SEQ ID NO: 323869 - RNA, 19 nt, Artificial Sequence
  Description of Artificial Sequence: Synthetic oligonucleotide
  Sense Strand Starting at position 66 of SEQ ID NO: 318118
gccacuuguucucuucuau

SEQ ID NO: 323870 - RNA, 19 nt, Artificial Sequence
  Description of Artificial Sequence: Synthetic oligonucleotide
  Antisense Strand to SEQ ID NO: 323869
auagaagagaacaaguggc

SEQ ID NO: 323871 - RNA, 19 nt, Artificial Sequence
  Description of Artificial Sequence: Synthetic oligonucleotide
  Sense Strand Starting at position 66 of SEQ ID NO: 318285
uuuaaugagugagagaaug

SEQ ID NO: 323872 - RNA, 19 nt, Artificial Sequence
  Description of Artificial Sequence: Synthetic oligonucleotide
  Antisense Strand to SEQ ID NO: 323871
cauucucucacucauuaaa

SEQ ID NO: 323873 - RNA, 19 nt, Artificial Sequence
  Description of Artificial Sequence: Synthetic oligonucleotide
  Sense Strand Starting at position 66 of SEQ ID NO: 318297
gagaaugaaugacaggaau

SEQ ID NO: 323874 - RNA, 19 nt, Artificial Sequence
  Description of Artificial Sequence: Synthetic oligonucleotide
  Antisense Strand to SEQ ID NO: 323873
auuccugucauucauucuc

SEQ ID NO: 323875 - RNA, 19 nt, Artificial Sequence
  Description of Artificial Sequence: Synthetic oligonucleotide
  Sense Strand Starting at position 66 of SEQ ID NO: 318342
caaagugcuugguugucaa

SEQ ID NO: 323876 - RNA, 19 nt, Artificial Sequence
  Description of Artificial Sequence: Synthetic oligonucleotide
  Antisense Strand to SEQ ID NO: 323875
uugacaaccaagcacuuug

SEQ ID NO: 323877 - RNA, 19 nt, Artificial Sequence
  Description of Artificial Sequence: Synthetic oligonucleotide
  Sense Strand Starting at position 66 of SEQ ID NO: 318345
agugcuugguugucaaaua

SEQ ID NO: 323878 - RNA, 19 nt, Artificial Sequence
  Description of Artificial Sequence: Synthetic oligonucleotide
  Antisense Strand to SEQ ID NO: 323877
uauuugacaaccaagcacu

SEQ ID NO: 323879 - RNA, 19 nt, Artificial Sequence
  Description of Artificial Sequence: Synthetic oligonucleotide
  Sense Strand Starting at position 66 of SEQ ID NO: 318350
uugguugucaaauaguaga

SEQ ID NO: 323880 - RNA, 19 nt, Artificial Sequence
  Description of Artificial Sequence: Synthetic oligonucleotide
  Antisense Strand to SEQ ID NO: 323879
ucuacuauuugacaaccaa

SEQ ID NO: 323881 - RNA, 19 nt, Artificial Sequence
  Description of Artificial Sequence: Synthetic oligonucleotide
  Sense Strand Starting at position 66 of SEQ ID NO: 318365
uagaaagauggcugugucu

SEQ ID NO: 323882 - RNA, 19 nt, Artificial Sequence
  Description of Artificial Sequence: Synthetic oligonucleotide
  Antisense Strand to SEQ ID NO: 323881
agacacagccaucuuucua

SEQ ID NO: 323883 - RNA, 19 nt, Artificial Sequence
  Description of Artificial Sequence: Synthetic oligonucleotide
  Sense Strand Starting at position 66 of SEQ ID NO: 318367
gaaagauggcugugucuug

SEQ ID NO: 323884 - RNA, 19 nt, Artificial Sequence
  Description of Artificial Sequence: Synthetic oligonucleotide
  Antisense Strand to SEQ ID NO: 323883
caagacacagccaucuuuc

SEQ ID NO: 323885 - RNA, 19 nt, Artificial Sequence
  Description of Artificial Sequence: Synthetic oligonucleotide
  Sense Strand Starting at position 66 of SEQ ID NO: 318414
aggcaaacuugagaagaca

SEQ ID NO: 323886 - RNA, 19 nt, Artificial Sequence
  Description of Artificial Sequence: Synthetic oligonucleotide
  Antisense Strand to SEQ ID NO: 323885
ugucuucucaaguuugccu

SEQ ID NO: 323887 - RNA, 19 nt, Artificial Sequence
  Description of Artificial Sequence: Synthetic oligonucleotide
  Sense Strand Starting at position 66 of SEQ ID NO: 318445
ccauaagagcuguauaauu

SEQ ID NO: 323888 - RNA, 19 nt, Artificial Sequence
  Description of Artificial Sequence: Synthetic oligonucleotide
  Antisense Strand to SEQ ID NO: 323887
aauuauacagcucuuaugg

SEQ ID NO: 323889 - RNA, 19 nt, Artificial Sequence
  Description of Artificial Sequence: Synthetic oligonucleotide
  Sense Strand Starting at position 66 of SEQ ID NO: 318553
gcaaguuaugcugccuguu

SEQ ID NO: 323890 - RNA, 19 nt, Artificial Sequence
  Description of Artificial Sequence: Synthetic oligonucleotide
  Antisense Strand to SEQ ID NO: 323889
aacaggcagcauaacuugc

SEQ ID NO: 323891 - RNA, 19 nt, Artificial Sequence
  Description of Artificial Sequence: Synthetic oligonucleotide
  Sense Strand Starting at position 66 of SEQ ID NO: 318554
caaguuaugcugccuguuu

SEQ ID NO: 323892 - RNA, 19 nt, Artificial Sequence
  Description of Artificial Sequence: Synthetic oligonucleotide
  Antisense Strand to SEQ ID NO: 323891
aaacaggcagcauaacuug

SEQ ID NO: 323893 - RNA, 19 nt, Artificial Sequence
  Description of Artificial Sequence: Synthetic oligonucleotide
  Sense Strand Starting at position 66 of SEQ ID NO: 318611
ugugaucucugggugguga

SEQ ID NO: 323894 - RNA, 19 nt, Artificial Sequence
  Description of Artificial Sequence: Synthetic oligonucleotide
  Antisense Strand to SEQ ID NO: 323893
ucaccacccagagaucaca

SEQ ID NO: 323895 - RNA, 19 nt, Artificial Sequence
  Description of Artificial Sequence: Synthetic oligonucleotide
  Sense Strand Starting at position 66 of SEQ ID NO: 318624
uggugagaugaaggauagu

SEQ ID NO: 323896 - RNA, 19 nt, Artificial Sequence
  Description of Artificial Sequence: Synthetic oligonucleotide
  Antisense Strand to SEQ ID NO: 323895
acuauccuucaucucacca

SEQ ID NO: 323897 - RNA, 19 nt, Artificial Sequence
  Description of Artificial Sequence: Synthetic oligonucleotide
  Sense Strand Starting at position 66 of SEQ ID NO: 318705
uuacuuugaucugagacau

SEQ ID NO: 323898 - RNA, 19 nt, Artificial Sequence
  Description of Artificial Sequence: Synthetic oligonucleotide
  Antisense Strand to SEQ ID NO: 323897
augucucagaucaaaguaa

SEQ ID NO: 323899 - RNA, 19 nt, Artificial Sequence
  Description of Artificial Sequence: Synthetic oligonucleotide
  Sense Strand Starting at position 66 of SEQ ID NO: 319056
ccgcuccuggccuaagaaa

SEQ ID NO: 323900 - RNA, 19 nt, Artificial Sequence
  Description of Artificial Sequence: Synthetic oligonucleotide
  Antisense Strand to SEQ ID NO: 323899
uuucuuaggccaggagcgg

SEQ ID NO: 323901 - RNA, 19 nt, Artificial Sequence
  Description of Artificial Sequence: Synthetic oligonucleotide
  Sense Strand Starting at position 66 of SEQ ID NO: 319103
gguggaagacauggcugau

SEQ ID NO: 323902 - RNA, 19 nt, Artificial Sequence
  Description of Artificial Sequence: Synthetic oligonucleotide
  Antisense Strand to SEQ ID NO: 323901
aucagccaugucuuccacc

SEQ ID NO: 323903 - RNA, 19 nt, Artificial Sequence
  Description of Artificial Sequence: Synthetic oligonucleotide
  Sense Strand Starting at position 66 of SEQ ID NO: 319106
ggaagacauggcugauuac

SEQ ID NO: 323904 - RNA, 19 nt, Artificial Sequence
  Description of Artificial Sequence: Synthetic oligonucleotide
  Antisense Strand to SEQ ID NO: 323903
guaaucagccaugucuucc

SEQ ID NO: 323905 - RNA, 19 nt, Artificial Sequence
  Description of Artificial Sequence: Synthetic oligonucleotide
  Sense Strand Starting at position 66 of SEQ ID NO: 319109
agacauggcugauuacaua

SEQ ID NO: 323906 - RNA, 19 nt, Artificial Sequence
  Description of Artificial Sequence: Synthetic oligonucleotide
  Antisense Strand to SEQ ID NO: 323905
uauguaaucagccaugucu

SEQ ID NO: 323907 - RNA, 19 nt, Artificial Sequence
  Description of Artificial Sequence: Synthetic oligonucleotide
  Sense Strand Starting at position 67 of SEQ ID NO: 315353
gcuucaagugccucgugua

SEQ ID NO: 323908 - RNA, 19 nt, Artificial Sequence
  Description of Artificial Sequence: Synthetic oligonucleotide
  Antisense Strand to SEQ ID NO: 323907
uacacgaggcacuugaagc

SEQ ID NO: 323909 - RNA, 19 nt, Artificial Sequence
  Description of Artificial Sequence: Synthetic oligonucleotide
  Sense Strand Starting at position 67 of SEQ ID NO: 315358
aagugccucguguagauuu

SEQ ID NO: 323910 - RNA, 19 nt, Artificial Sequence
  Description of Artificial Sequence: Synthetic oligonucleotide
  Antisense Strand to SEQ ID NO: 323909
aaaucuacacgaggcacuu

SEQ ID NO: 323911 - RNA, 19 nt, Artificial Sequence
  Description of Artificial Sequence: Synthetic oligonucleotide
  Sense Strand Starting at position 67 of SEQ ID NO: 315405
gagcucuuaucuguggaga

SEQ ID NO: 323912 - RNA, 19 nt, Artificial Sequence
  Description of Artificial Sequence: Synthetic oligonucleotide
  Antisense Strand to SEQ ID NO: 323911
ucuccacagauaagagcuc

SEQ ID NO: 323913 - RNA, 19 nt, Artificial Sequence
  Description of Artificial Sequence: Synthetic oligonucleotide
  Sense Strand Starting at position 67 of SEQ ID NO: 315406
agcucuuaucuguggagau

SEQ ID NO: 323914 - RNA, 19 nt, Artificial Sequence
  Description of Artificial Sequence: Synthetic oligonucleotide
  Antisense Strand to SEQ ID NO: 323913
aucuccacagauaagagcu

SEQ ID NO: 323915 - RNA, 19 nt, Artificial Sequence
  Description of Artificial Sequence: Synthetic oligonucleotide
  Sense Strand Starting at position 67 of SEQ ID NO: 315408
cucuuaucuguggagauuc

SEQ ID NO: 323916 - RNA, 19 nt, Artificial Sequence
  Description of Artificial Sequence: Synthetic oligonucleotide
  Antisense Strand to SEQ ID NO: 323915
gaaucuccacagauaagag

SEQ ID NO: 323917 - RNA, 19 nt, Artificial Sequence
  Description of Artificial Sequence: Synthetic oligonucleotide
  Sense Strand Starting at position 67 of SEQ ID NO: 315416
uguggagauucagaagaca

SEQ ID NO: 323918 - RNA, 19 nt, Artificial Sequence
  Description of Artificial Sequence: Synthetic oligonucleotide
  Antisense Strand to SEQ ID NO: 323917
ugucuucugaaucuccaca

SEQ ID NO: 323919 - RNA, 19 nt, Artificial Sequence
  Description of Artificial Sequence: Synthetic oligonucleotide
  Sense Strand Starting at position 67 of SEQ ID NO: 315502
ggcaaucugcuagaaauga

SEQ ID NO: 323920 - RNA, 19 nt, Artificial Sequence
  Description of Artificial Sequence: Synthetic oligonucleotide
  Antisense Strand to SEQ ID NO: 323919
ucauuucuagcagauugcc

SEQ ID NO: 323921 - RNA, 19 nt, Artificial Sequence
  Description of Artificial Sequence: Synthetic oligonucleotide
  Sense Strand Starting at position 67 of SEQ ID NO: 315510
gcuagaaaugaaugaaugu

SEQ ID NO: 323922 - RNA, 19 nt, Artificial Sequence
  Description of Artificial Sequence: Synthetic oligonucleotide
  Antisense Strand to SEQ ID NO: 323921
acauucauucauuucuagc

SEQ ID NO: 323923 - RNA, 19 nt, Artificial Sequence
  Description of Artificial Sequence: Synthetic oligonucleotide
  Sense Strand Starting at position 67 of SEQ ID NO: 315723
ccaacaguguccuugacaa

SEQ ID NO: 323924 - RNA, 19 nt, Artificial Sequence
  Description of Artificial Sequence: Synthetic oligonucleotide
  Antisense Strand to SEQ ID NO: 323923
uugucaaggacacuguugg

SEQ ID NO: 323925 - RNA, 19 nt, Artificial Sequence
  Description of Artificial Sequence: Synthetic oligonucleotide
  Sense Strand Starting at position 67 of SEQ ID NO: 315765
ugagauauacuuugcacaa

SEQ ID NO: 323926 - RNA, 19 nt, Artificial Sequence
  Description of Artificial Sequence: Synthetic oligonucleotide
  Antisense Strand to SEQ ID NO: 323925
uugugcaaaguauaucuca

SEQ ID NO: 323927 - RNA, 19 nt, Artificial Sequence
  Description of Artificial Sequence: Synthetic oligonucleotide
  Sense Strand Starting at position 67 of SEQ ID NO: 315783
aggcuaguuagccauagga

SEQ ID NO: 323928 - RNA, 19 nt, Artificial Sequence
  Description of Artificial Sequence: Synthetic oligonucleotide
  Antisense Strand to SEQ ID NO: 323927
uccuauggcuaacuagccu

SEQ ID NO: 323929 - RNA, 19 nt, Artificial Sequence
  Description of Artificial Sequence: Synthetic oligonucleotide
  Sense Strand Starting at position 67 of SEQ ID NO: 315792
agccauaggagguguuaca

SEQ ID NO: 323930 - RNA, 19 nt, Artificial Sequence
  Description of Artificial Sequence: Synthetic oligonucleotide
  Antisense Strand to SEQ ID NO: 323929
uguaacaccuccuauggcu

SEQ ID NO: 323931 - RNA, 19 nt, Artificial Sequence
  Description of Artificial Sequence: Synthetic oligonucleotide
  Sense Strand Starting at position 67 of SEQ ID NO: 315948
guuagaugucagugauaau

SEQ ID NO: 323932 - RNA, 19 nt, Artificial Sequence
  Description of Artificial Sequence: Synthetic oligonucleotide
  Antisense Strand to SEQ ID NO: 323931
auuaucacugacaucuaac

SEQ ID NO: 323933 - RNA, 19 nt, Artificial Sequence
  Description of Artificial Sequence: Synthetic oligonucleotide
  Sense Strand Starting at position 67 of SEQ ID NO: 315977
gcagcuaacacagaggauu

SEQ ID NO: 323934 - RNA, 19 nt, Artificial Sequence
  Description of Artificial Sequence: Synthetic oligonucleotide
  Antisense Strand to SEQ ID NO: 323933
aauccucuguguuagcugc

SEQ ID NO: 323935 - RNA, 19 nt, Artificial Sequence
  Description of Artificial Sequence: Synthetic oligonucleotide
  Sense Strand Starting at position 67 of SEQ ID NO: 316104
cgaaguaacuugccuagga

SEQ ID NO: 323936 - RNA, 19 nt, Artificial Sequence
  Description of Artificial Sequence: Synthetic oligonucleotide
  Antisense Strand to SEQ ID NO: 323935
uccuaggcaaguuacuucg

SEQ ID NO: 323937 - RNA, 19 nt, Artificial Sequence
  Description of Artificial Sequence: Synthetic oligonucleotide
  Sense Strand Starting at position 67 of SEQ ID NO: 316106
aaguaacuugccuaggacu

SEQ ID NO: 323938 - RNA, 19 nt, Artificial Sequence
  Description of Artificial Sequence: Synthetic oligonucleotide
  Antisense Strand to SEQ ID NO: 323937
aguccuaggcaaguuacuu

SEQ ID NO: 323939 - RNA, 19 nt, Artificial Sequence
  Description of Artificial Sequence: Synthetic oligonucleotide
  Sense Strand Starting at position 67 of SEQ ID NO: 316171
cagggaagaaagugguuau

SEQ ID NO: 323940 - RNA, 19 nt, Artificial Sequence
  Description of Artificial Sequence: Synthetic oligonucleotide
  Antisense Strand to SEQ ID NO: 323939
auaaccacuuucuucccug

SEQ ID NO: 323941 - RNA, 19 nt, Artificial Sequence
  Description of Artificial Sequence: Synthetic oligonucleotide
  Sense Strand Starting at position 67 of SEQ ID NO: 316183
ugguuauaccuggguagug

SEQ ID NO: 323942 - RNA, 19 nt, Artificial Sequence
  Description of Artificial Sequence: Synthetic oligonucleotide
  Antisense Strand to SEQ ID NO: 323941
cacuacccagguauaacca

SEQ ID NO: 323943 - RNA, 19 nt, Artificial Sequence
  Description of Artificial Sequence: Synthetic oligonucleotide
  Sense Strand Starting at position 67 of SEQ ID NO: 316316
caagccgaguccucuaaga

SEQ ID NO: 323944 - RNA, 19 nt, Artificial Sequence
  Description of Artificial Sequence: Synthetic oligonucleotide
  Antisense Strand to SEQ ID NO: 323943
ucuuagaggacucggcuug

SEQ ID NO: 323945 - RNA, 19 nt, Artificial Sequence
  Description of Artificial Sequence: Synthetic oligonucleotide
  Sense Strand Starting at position 67 of SEQ ID NO: 316318
agccgaguccucuaagaac

SEQ ID NO: 323946 - RNA, 19 nt, Artificial Sequence
  Description of Artificial Sequence: Synthetic oligonucleotide
  Antisense Strand to SEQ ID NO: 323945
guucuuagaggacucggcu

SEQ ID NO: 323947 - RNA, 19 nt, Artificial Sequence
  Description of Artificial Sequence: Synthetic oligonucleotide
  Sense Strand Starting at position 67 of SEQ ID NO: 316532
guguccuaucucgggauuu

SEQ ID NO: 323948 - RNA, 19 nt, Artificial Sequence
  Description of Artificial Sequence: Synthetic oligonucleotide
  Antisense Strand to SEQ ID NO: 323947
aaaucccgagauaggacac

SEQ ID NO: 323949 - RNA, 19 nt, Artificial Sequence
  Description of Artificial Sequence: Synthetic oligonucleotide
  Sense Strand Starting at position 67 of SEQ ID NO: 316554
ggcugcucgguuuacaaga

SEQ ID NO: 323950 - RNA, 19 nt, Artificial Sequence
  Description of Artificial Sequence: Synthetic oligonucleotide
  Antisense Strand to SEQ ID NO: 323949
ucuuguaaaccgagcagcc

SEQ ID NO: 323951 - RNA, 19 nt, Artificial Sequence
  Description of Artificial Sequence: Synthetic oligonucleotide
  Sense Strand Starting at position 67 of SEQ ID NO: 317674
ugaucuugggugugucaga

SEQ ID NO: 323952 - RNA, 19 nt, Artificial Sequence
  Description of Artificial Sequence: Synthetic oligonucleotide
  Antisense Strand to SEQ ID NO: 323951
ucugacacacccaagauca

SEQ ID NO: 323953 - RNA, 19 nt, Artificial Sequence
  Description of Artificial Sequence: Synthetic oligonucleotide
  Sense Strand Starting at position 67 of SEQ ID NO: 317675
gaucuugggugugucagau

SEQ ID NO: 323954 - RNA, 19 nt, Artificial Sequence
  Description of Artificial Sequence: Synthetic oligonucleotide
  Antisense Strand to SEQ ID NO: 323953
aucugacacacccaagauc

SEQ ID NO: 323955 - RNA, 19 nt, Artificial Sequence
  Description of Artificial Sequence: Synthetic oligonucleotide
  Sense Strand Starting at position 67 of SEQ ID NO: 317972
ggcucaagaaaguguaaac

SEQ ID NO: 323956 - RNA, 19 nt, Artificial Sequence
  Description of Artificial Sequence: Synthetic oligonucleotide
  Antisense Strand to SEQ ID NO: 323955
guuuacacuuucuugagcc

SEQ ID NO: 323957 - RNA, 19 nt, Artificial Sequence
  Description of Artificial Sequence: Synthetic oligonucleotide
  Sense Strand Starting at position 67 of SEQ ID NO: 317981
aaguguaaacucugaugcu

SEQ ID NO: 323958 - RNA, 19 nt, Artificial Sequence
  Description of Artificial Sequence: Synthetic oligonucleotide
  Antisense Strand to SEQ ID NO: 323957
agcaucagaguuuacacuu

SEQ ID NO: 323959 - RNA, 19 nt, Artificial Sequence
  Description of Artificial Sequence: Synthetic oligonucleotide
  Sense Strand Starting at position 67 of SEQ ID NO: 318048
aggugcuugaucgaaguua

SEQ ID NO: 323960 - RNA, 19 nt, Artificial Sequence
  Description of Artificial Sequence: Synthetic oligonucleotide
  Antisense Strand to SEQ ID NO: 323959
uaacuucgaucaagcaccu

SEQ ID NO: 323961 - RNA, 19 nt, Artificial Sequence
  Description of Artificial Sequence: Synthetic oligonucleotide
  Sense Strand Starting at position 67 of SEQ ID NO: 318254
uugagagcucccugggaga

SEQ ID NO: 323962 - RNA, 19 nt, Artificial Sequence
  Description of Artificial Sequence: Synthetic oligonucleotide
  Antisense Strand to SEQ ID NO: 323961
ucucccagggagcucucaa

SEQ ID NO: 323963 - RNA, 19 nt, Artificial Sequence
  Description of Artificial Sequence: Synthetic oligonucleotide
  Sense Strand Starting at position 67 of SEQ ID NO: 318302
gcagaucuuccagacuuac

SEQ ID NO: 323964 - RNA, 19 nt, Artificial Sequence
  Description of Artificial Sequence: Synthetic oligonucleotide
  Antisense Strand to SEQ ID NO: 323963
guaagucuggaagaucugc

SEQ ID NO: 323965 - RNA, 19 nt, Artificial Sequence
  Description of Artificial Sequence: Synthetic oligonucleotide
  Sense Strand Starting at position 67 of SEQ ID NO: 318406
gccagaaacugggcaucuu

SEQ ID NO: 323966 - RNA, 19 nt, Artificial Sequence
  Description of Artificial Sequence: Synthetic oligonucleotide
  Antisense Strand to SEQ ID NO: 323965
aagaugcccaguuucuggc

SEQ ID NO: 323967 - RNA, 19 nt, Artificial Sequence
  Description of Artificial Sequence: Synthetic oligonucleotide
  Sense Strand Starting at position 67 of SEQ ID NO: 318494
cagacucaaugcguuauga

SEQ ID NO: 323968 - RNA, 19 nt, Artificial Sequence
  Description of Artificial Sequence: Synthetic oligonucleotide
  Antisense Strand to SEQ ID NO: 323967
ucauaacgcauugagucug

SEQ ID NO: 323969 - RNA, 19 nt, Artificial Sequence
  Description of Artificial Sequence: Synthetic oligonucleotide
  Sense Strand Starting at position 67 of SEQ ID NO: 318503
ugcguuaugacccaccagu

SEQ ID NO: 323970 - RNA, 19 nt, Artificial Sequence
  Description of Artificial Sequence: Synthetic oligonucleotide
  Antisense Strand to SEQ ID NO: 323969
acuggugggucauaacgca

SEQ ID NO: 323971 - RNA, 19 nt, Artificial Sequence
  Description of Artificial Sequence: Synthetic oligonucleotide
  Sense Strand Starting at position 67 of SEQ ID NO: 318565
ggacaacuccuguguccag

SEQ ID NO: 323972 - RNA, 19 nt, Artificial Sequence
  Description of Artificial Sequence: Synthetic oligonucleotide
  Antisense Strand to SEQ ID NO: 323971
cuggacacaggaguugucc

SEQ ID NO: 323973 - RNA, 19 nt, Artificial Sequence
  Description of Artificial Sequence: Synthetic oligonucleotide
  Sense Strand Starting at position 67 of SEQ ID NO: 318643
gcagaagaucccuacgaca

SEQ ID NO: 323974 - RNA, 19 nt, Artificial Sequence
  Description of Artificial Sequence: Synthetic oligonucleotide
  Antisense Strand to SEQ ID NO: 323973
ugucguagggaucuucugc

SEQ ID NO: 323975 - RNA, 19 nt, Artificial Sequence
  Description of Artificial Sequence: Synthetic oligonucleotide
  Sense Strand Starting at position 67 of SEQ ID NO: 318777
ugguguucuacccaggcaa

SEQ ID NO: 323976 - RNA, 19 nt, Artificial Sequence
  Description of Artificial Sequence: Synthetic oligonucleotide
  Antisense Strand to SEQ ID NO: 323975
uugccuggguagaacacca

SEQ ID NO: 323977 - RNA, 19 nt, Artificial Sequence
  Description of Artificial Sequence: Synthetic oligonucleotide
  Sense Strand Starting at position 67 of SEQ ID NO: 318789
caggcaagcuugucaaaga

SEQ ID NO: 323978 - RNA, 19 nt, Artificial Sequence
  Description of Artificial Sequence: Synthetic oligonucleotide
  Antisense Strand to SEQ ID NO: 323977
ucuuugacaagcuugccug

SEQ ID NO: 323979 - RNA, 19 nt, Artificial Sequence
  Description of Artificial Sequence: Synthetic oligonucleotide
  Sense Strand Starting at position 67 of SEQ ID NO: 319110
uggacaaagugagacauua

SEQ ID NO: 323980 - RNA, 19 nt, Artificial Sequence
  Description of Artificial Sequence: Synthetic oligonucleotide
  Antisense Strand to SEQ ID NO: 323979
uaaugucucacuuugucca

SEQ ID NO: 323981 - RNA, 19 nt, Artificial Sequence
  Description of Artificial Sequence: Synthetic oligonucleotide
  Sense Strand Starting at position 67 of SEQ ID NO: 319156
gagacaugaugggauguga

SEQ ID NO: 323982 - RNA, 19 nt, Artificial Sequence
  Description of Artificial Sequence: Synthetic oligonucleotide
  Antisense Strand to SEQ ID NO: 323981
ucacaucccaucaugucuc

SEQ ID NO: 323983 - RNA, 19 nt, Artificial Sequence
  Description of Artificial Sequence: Synthetic oligonucleotide
  Sense Strand Starting at position 67 of SEQ ID NO: 319165
ugggaugugagcuacaguu

SEQ ID NO: 323984 - RNA, 19 nt, Artificial Sequence
  Description of Artificial Sequence: Synthetic oligonucleotide
  Antisense Strand to SEQ ID NO: 323983
aacuguagcucacauccca

SEQ ID NO: 323985 - RNA, 19 nt, Artificial Sequence
  Description of Artificial Sequence: Synthetic oligonucleotide
  Sense Strand Starting at position 67 of SEQ ID NO: 319197
cuggcugcugagugaaaga

SEQ ID NO: 323986 - RNA, 19 nt, Artificial Sequence
  Description of Artificial Sequence: Synthetic oligonucleotide
  Antisense Strand to SEQ ID NO: 323985
ucuuucacucagcagccag

SEQ ID NO: 323987 - RNA, 19 nt, Artificial Sequence
  Description of Artificial Sequence: Synthetic oligonucleotide
  Sense Strand Starting at position 68 of SEQ ID NO: 315429
cugguuguacacugaucua

SEQ ID NO: 323988 - RNA, 19 nt, Artificial Sequence
  Description of Artificial Sequence: Synthetic oligonucleotide
  Antisense Strand to SEQ ID NO: 323987
uagaucaguguacaaccag

SEQ ID NO: 323989 - RNA, 19 nt, Artificial Sequence
  Description of Artificial Sequence: Synthetic oligonucleotide
  Sense Strand Starting at position 68 of SEQ ID NO: 315673
agcagugucugauuucuca

SEQ ID NO: 323990 - RNA, 19 nt, Artificial Sequence
  Description of Artificial Sequence: Synthetic oligonucleotide
  Antisense Strand to SEQ ID NO: 323989
ugagaaaucagacacugcu

SEQ ID NO: 323991 - RNA, 19 nt, Artificial Sequence
  Description of Artificial Sequence: Synthetic oligonucleotide
  Sense Strand Starting at position 68 of SEQ ID NO: 315677
gugucugauuucucaccca

SEQ ID NO: 323992 - RNA, 19 nt, Artificial Sequence
  Description of Artificial Sequence: Synthetic oligonucleotide
  Antisense Strand to SEQ ID NO: 323991
ugggugagaaaucagacac

SEQ ID NO: 323993 - RNA, 19 nt, Artificial Sequence
  Description of Artificial Sequence: Synthetic oligonucleotide
  Sense Strand Starting at position 68 of SEQ ID NO: 315846
uucuauuacugggcucuua

SEQ ID NO: 323994 - RNA, 19 nt, Artificial Sequence
  Description of Artificial Sequence: Synthetic oligonucleotide
  Antisense Strand to SEQ ID NO: 323993
uaagagcccaguaauagaa

SEQ ID NO: 323995 - RNA, 19 nt, Artificial Sequence
  Description of Artificial Sequence: Synthetic oligonucleotide
  Sense Strand Starting at position 68 of SEQ ID NO: 315969
ggacaucgguuucuauacu

SEQ ID NO: 323996 - RNA, 19 nt, Artificial Sequence
  Description of Artificial Sequence: Synthetic oligonucleotide
  Antisense Strand to SEQ ID NO: 323995
aguauagaaaccgaugucc

SEQ ID NO: 323997 - RNA, 19 nt, Artificial Sequence
  Description of Artificial Sequence: Synthetic oligonucleotide
  Sense Strand Starting at position 68 of SEQ ID NO: 316317
gugggauugcuugaaccug

SEQ ID NO: 323998 - RNA, 19 nt, Artificial Sequence
  Description of Artificial Sequence: Synthetic oligonucleotide
  Antisense Strand to SEQ ID NO: 323997
cagguucaagcaaucccac

SEQ ID NO: 323999 - RNA, 19 nt, Artificial Sequence
  Description of Artificial Sequence: Synthetic oligonucleotide
  Sense Strand Starting at position 68 of SEQ ID NO: 316535
ccaucugaccuguaguaga

SEQ ID NO: 324000 - RNA, 19 nt, Artificial Sequence
  Description of Artificial Sequence: Synthetic oligonucleotide
  Antisense Strand to SEQ ID NO: 323999
ucuacuacaggucagaugg

SEQ ID NO: 324001 - RNA, 19 nt, Artificial Sequence
  Description of Artificial Sequence: Synthetic oligonucleotide
  Sense Strand Starting at position 68 of SEQ ID NO: 316542
accuguaguagaugcuaga

SEQ ID NO: 324002 - RNA, 19 nt, Artificial Sequence
  Description of Artificial Sequence: Synthetic oligonucleotide
  Antisense Strand to SEQ ID NO: 324001
ucuagcaucuacuacaggu

SEQ ID NO: 324003 - RNA, 19 nt, Artificial Sequence
  Description of Artificial Sequence: Synthetic oligonucleotide
  Sense Strand Starting at position 68 of SEQ ID NO: 316613
gguggcaaaccucaaucau

SEQ ID NO: 324004 - RNA, 19 nt, Artificial Sequence
  Description of Artificial Sequence: Synthetic oligonucleotide
  Antisense Strand to SEQ ID NO: 324003
augauugagguuugccacc

SEQ ID NO: 324005 - RNA, 19 nt, Artificial Sequence
  Description of Artificial Sequence: Synthetic oligonucleotide
  Sense Strand Starting at position 68 of SEQ ID NO: 316639
gggagccucuagguauuca

SEQ ID NO: 324006 - RNA, 19 nt, Artificial Sequence
  Description of Artificial Sequence: Synthetic oligonucleotide
  Antisense Strand to SEQ ID NO: 324005
ugaauaccuagaggcuccc

SEQ ID NO: 324007 - RNA, 19 nt, Artificial Sequence
  Description of Artificial Sequence: Synthetic oligonucleotide
  Sense Strand Starting at position 68 of SEQ ID NO: 316682
caaaguuucgaggguuaag

SEQ ID NO: 324008 - RNA, 19 nt, Artificial Sequence
  Description of Artificial Sequence: Synthetic oligonucleotide
  Antisense Strand to SEQ ID NO: 324007
cuuaacccucgaaacuuug

SEQ ID NO: 324009 - RNA, 19 nt, Artificial Sequence
  Description of Artificial Sequence: Synthetic oligonucleotide
  Sense Strand Starting at position 68 of SEQ ID NO: 316709
ucagauucuccaggauauu

SEQ ID NO: 324010 - RNA, 19 nt, Artificial Sequence
  Description of Artificial Sequence: Synthetic oligonucleotide
  Antisense Strand to SEQ ID NO: 324009
aauauccuggagaaucuga

SEQ ID NO: 324011 - RNA, 19 nt, Artificial Sequence
  Description of Artificial Sequence: Synthetic oligonucleotide
  Sense Strand Starting at position 68 of SEQ ID NO: 316747
cauaguaggugccuggaaa

SEQ ID NO: 324012 - RNA, 19 nt, Artificial Sequence
  Description of Artificial Sequence: Synthetic oligonucleotide
  Antisense Strand to SEQ ID NO: 324011
uuuccaggcaccuacuaug

SEQ ID NO: 324013 - RNA, 19 nt, Artificial Sequence
  Description of Artificial Sequence: Synthetic oligonucleotide
  Sense Strand Starting at position 68 of SEQ ID NO: 316851
gaaauagacugucuccaag

SEQ ID NO: 324014 - RNA, 19 nt, Artificial Sequence
  Description of Artificial Sequence: Synthetic oligonucleotide
  Antisense Strand to SEQ ID NO: 324013
cuuggagacagucuauuuc

SEQ ID NO: 324015 - RNA, 19 nt, Artificial Sequence
  Description of Artificial Sequence: Synthetic oligonucleotide
  Sense Strand Starting at position 68 of SEQ ID NO: 317071
uaggaaggcucaguuccaa

SEQ ID NO: 324016 - RNA, 19 nt, Artificial Sequence
  Description of Artificial Sequence: Synthetic oligonucleotide
  Antisense Strand to SEQ ID NO: 324015
uuggaacugagccuuccua

SEQ ID NO: 324017 - RNA, 19 nt, Artificial Sequence
  Description of Artificial Sequence: Synthetic oligonucleotide
  Sense Strand Starting at position 68 of SEQ ID NO: 317118
aagccauugcgugacaaug

SEQ ID NO: 324018 - RNA, 19 nt, Artificial Sequence
  Description of Artificial Sequence: Synthetic oligonucleotide
  Antisense Strand to SEQ ID NO: 324017
cauugucacgcaauggcuu

SEQ ID NO: 324019 - RNA, 19 nt, Artificial Sequence
  Description of Artificial Sequence: Synthetic oligonucleotide
  Sense Strand Starting at position 68 of SEQ ID NO: 317126
gcgugacaaugauuuaagu

SEQ ID NO: 324020 - RNA, 19 nt, Artificial Sequence
  Description of Artificial Sequence: Synthetic oligonucleotide
  Antisense Strand to SEQ ID NO: 324019
acuuaaaucauugucacgc

SEQ ID NO: 324021 - RNA, 19 nt, Artificial Sequence
  Description of Artificial Sequence: Synthetic oligonucleotide
  Sense Strand Starting at position 68 of SEQ ID NO: 317224
uugagcauuugugcucaga

SEQ ID NO: 324022 - RNA, 19 nt, Artificial Sequence
  Description of Artificial Sequence: Synthetic oligonucleotide
  Antisense Strand to SEQ ID NO: 324021
ucugagcacaaaugcucaa

SEQ ID NO: 324023 - RNA, 19 nt, Artificial Sequence
  Description of Artificial Sequence: Synthetic oligonucleotide
  Sense Strand Starting at position 68 of SEQ ID NO: 317226
gagcauuugugcucagagg

SEQ ID NO: 324024 - RNA, 19 nt, Artificial Sequence
  Description of Artificial Sequence: Synthetic oligonucleotide
  Antisense Strand to SEQ ID NO: 324023
ccucugagcacaaaugcuc

SEQ ID NO: 324025 - RNA, 19 nt, Artificial Sequence
  Description of Artificial Sequence: Synthetic oligonucleotide
  Sense Strand Starting at position 68 of SEQ ID NO: 317924
guugcugugugauuuagug

SEQ ID NO: 324026 - RNA, 19 nt, Artificial Sequence
  Description of Artificial Sequence: Synthetic oligonucleotide
  Antisense Strand to SEQ ID NO: 324025
cacuaaaucacacagcaac

SEQ ID NO: 324027 - RNA, 19 nt, Artificial Sequence
  Description of Artificial Sequence: Synthetic oligonucleotide
  Sense Strand Starting at position 68 of SEQ ID NO: 317928
cugugugauuuagugcuau

SEQ ID NO: 324028 - RNA, 19 nt, Artificial Sequence
  Description of Artificial Sequence: Synthetic oligonucleotide
  Antisense Strand to SEQ ID NO: 324027
auagcacuaaaucacacag

SEQ ID NO: 324029 - RNA, 19 nt, Artificial Sequence
  Description of Artificial Sequence: Synthetic oligonucleotide
  Sense Strand Starting at position 68 of SEQ ID NO: 318014
aggcuuuaugccuaaccca

SEQ ID NO: 324030 - RNA, 19 nt, Artificial Sequence
  Description of Artificial Sequence: Synthetic oligonucleotide
  Antisense Strand to SEQ ID NO: 324029
uggguuaggcauaaagccu

SEQ ID NO: 324031 - RNA, 19 nt, Artificial Sequence
  Description of Artificial Sequence: Synthetic oligonucleotide
  Sense Strand Starting at position 68 of SEQ ID NO: 318204
guuaaauagcucuacugag

SEQ ID NO: 324032 - RNA, 19 nt, Artificial Sequence
  Description of Artificial Sequence: Synthetic oligonucleotide
  Antisense Strand to SEQ ID NO: 324031
cucaguagagcuauuuaac

SEQ ID NO: 324033 - RNA, 19 nt, Artificial Sequence
  Description of Artificial Sequence: Synthetic oligonucleotide
  Sense Strand Starting at position 68 of SEQ ID NO: 318256
gcuuuacagagagguaaca

SEQ ID NO: 324034 - RNA, 19 nt, Artificial Sequence
  Description of Artificial Sequence: Synthetic oligonucleotide
  Antisense Strand to SEQ ID NO: 324033
uguuaccucucuguaaagc

SEQ ID NO: 324035 - RNA, 19 nt, Artificial Sequence
  Description of Artificial Sequence: Synthetic oligonucleotide
  Sense Strand Starting at position 68 of SEQ ID NO: 318331
gggcaaggucaaugcuaaa

SEQ ID NO: 324036 - RNA, 19 nt, Artificial Sequence
  Description of Artificial Sequence: Synthetic oligonucleotide
  Antisense Strand to SEQ ID NO: 324035
uuuagcauugaccuugccc

SEQ ID NO: 324037 - RNA, 19 nt, Artificial Sequence
  Description of Artificial Sequence: Synthetic oligonucleotide
  Sense Strand Starting at position 68 of SEQ ID NO: 318415
gcagaaggguaucucacua

SEQ ID NO: 324038 - RNA, 19 nt, Artificial Sequence
  Description of Artificial Sequence: Synthetic oligonucleotide
  Antisense Strand to SEQ ID NO: 324037
uagugagauacccuucugc

SEQ ID NO: 324039 - RNA, 19 nt, Artificial Sequence
  Description of Artificial Sequence: Synthetic oligonucleotide
  Sense Strand Starting at position 68 of SEQ ID NO: 318419
aaggguaucucacuaaagu

SEQ ID NO: 324040 - RNA, 19 nt, Artificial Sequence
  Description of Artificial Sequence: Synthetic oligonucleotide
  Antisense Strand to SEQ ID NO: 324039
acuuuagugagauacccuu

SEQ ID NO: 324041 - RNA, 19 nt, Artificial Sequence
  Description of Artificial Sequence: Synthetic oligonucleotide
  Sense Strand Starting at position 68 of SEQ ID NO: 318420
aggguaucucacuaaaguu

SEQ ID NO: 324042 - RNA, 19 nt, Artificial Sequence
  Description of Artificial Sequence: Synthetic oligonucleotide
  Antisense Strand to SEQ ID NO: 324041
aacuuuagugagauacccu

SEQ ID NO: 324043 - RNA, 19 nt, Artificial Sequence
  Description of Artificial Sequence: Synthetic oligonucleotide
  Sense Strand Starting at position 68 of SEQ ID NO: 318465
cugagcauucuguauagac

SEQ ID NO: 324044 - RNA, 19 nt, Artificial Sequence
  Description of Artificial Sequence: Synthetic oligonucleotide
  Antisense Strand to SEQ ID NO: 324043
gucuauacagaaugcucag

SEQ ID NO: 324045 - RNA, 19 nt, Artificial Sequence
  Description of Artificial Sequence: Synthetic oligonucleotide
  Sense Strand Starting at position 68 of SEQ ID NO: 318467
gagcauucuguauagacag

SEQ ID NO: 324046 - RNA, 19 nt, Artificial Sequence
  Description of Artificial Sequence: Synthetic oligonucleotide
  Antisense Strand to SEQ ID NO: 324045
cugucuauacagaaugcuc

SEQ ID NO: 324047 - RNA, 19 nt, Artificial Sequence
  Description of Artificial Sequence: Synthetic oligonucleotide
  Sense Strand Starting at position 68 of SEQ ID NO: 318570
accuguauauuguugauua

SEQ ID NO: 324048 - RNA, 19 nt, Artificial Sequence
  Description of Artificial Sequence: Synthetic oligonucleotide
  Antisense Strand to SEQ ID NO: 324047
uaaucaacaauauacaggu

SEQ ID NO: 324049 - RNA, 19 nt, Artificial Sequence
  Description of Artificial Sequence: Synthetic oligonucleotide
  Sense Strand Starting at position 68 of SEQ ID NO: 318572
cuguauauuguugauuaca

SEQ ID NO: 324050 - RNA, 19 nt, Artificial Sequence
  Description of Artificial Sequence: Synthetic oligonucleotide
  Antisense Strand to SEQ ID NO: 324049
uguaaucaacaauauacag

SEQ ID NO: 324051 - RNA, 19 nt, Artificial Sequence
  Description of Artificial Sequence: Synthetic oligonucleotide
  Sense Strand Starting at position 68 of SEQ ID NO: 318574
guauauuguugauuacaag

SEQ ID NO: 324052 - RNA, 19 nt, Artificial Sequence
  Description of Artificial Sequence: Synthetic oligonucleotide
  Antisense Strand to SEQ ID NO: 324051
cuuguaaucaacaauauac

SEQ ID NO: 324053 - RNA, 19 nt, Artificial Sequence
  Description of Artificial Sequence: Synthetic oligonucleotide
  Sense Strand Starting at position 68 of SEQ ID NO: 318602
uggguauacuaguuuaauu

SEQ ID NO: 324054 - RNA, 19 nt, Artificial Sequence
  Description of Artificial Sequence: Synthetic oligonucleotide
  Antisense Strand to SEQ ID NO: 324053
aauuaaacuaguauaccca

SEQ ID NO: 324055 - RNA, 19 nt, Artificial Sequence
  Description of Artificial Sequence: Synthetic oligonucleotide
  Sense Strand Starting at position 68 of SEQ ID NO: 318604
gguauacuaguuuaauucu

SEQ ID NO: 324056 - RNA, 19 nt, Artificial Sequence
  Description of Artificial Sequence: Synthetic oligonucleotide
  Antisense Strand to SEQ ID NO: 324055
agaauuaaacuaguauacc

SEQ ID NO: 324057 - RNA, 19 nt, Artificial Sequence
  Description of Artificial Sequence: Synthetic oligonucleotide
  Sense Strand Starting at position 68 of SEQ ID NO: 318622
uugguucuacagugauuau

SEQ ID NO: 324058 - RNA, 19 nt, Artificial Sequence
  Description of Artificial Sequence: Synthetic oligonucleotide
  Antisense Strand to SEQ ID NO: 324057
auaaucacuguagaaccaa

SEQ ID NO: 324059 - RNA, 19 nt, Artificial Sequence
  Description of Artificial Sequence: Synthetic oligonucleotide
  Sense Strand Starting at position 68 of SEQ ID NO: 318625
guucuacagugauuauuaa

SEQ ID NO: 324060 - RNA, 19 nt, Artificial Sequence
  Description of Artificial Sequence: Synthetic oligonucleotide
  Antisense Strand to SEQ ID NO: 324059
uuaauaaucacuguagaac

SEQ ID NO: 324061 - RNA, 19 nt, Artificial Sequence
  Description of Artificial Sequence: Synthetic oligonucleotide
  Sense Strand Starting at position 68 of SEQ ID NO: 318721
ccaacuuugcugugaauuu

SEQ ID NO: 324062 - RNA, 19 nt, Artificial Sequence
  Description of Artificial Sequence: Synthetic oligonucleotide
  Antisense Strand to SEQ ID NO: 324061
aaauucacagcaaaguugg

SEQ ID NO: 324063 - RNA, 19 nt, Artificial Sequence
  Description of Artificial Sequence: Synthetic oligonucleotide
  Sense Strand Starting at position 68 of SEQ ID NO: 318890
agaaacugauuugacaauu

SEQ ID NO: 324064 - RNA, 19 nt, Artificial Sequence
  Description of Artificial Sequence: Synthetic oligonucleotide
  Antisense Strand to SEQ ID NO: 324063
aauugucaaaucaguuucu

SEQ ID NO: 324065 - RNA, 19 nt, Artificial Sequence
  Description of Artificial Sequence: Synthetic oligonucleotide
  Sense Strand Starting at position 68 of SEQ ID NO: 319075
gacuauaugcaauguaaga

SEQ ID NO: 324066 - RNA, 19 nt, Artificial Sequence
  Description of Artificial Sequence: Synthetic oligonucleotide
  Antisense Strand to SEQ ID NO: 324065
ucuuacauugcauauaguc

SEQ ID NO: 324067 - RNA, 19 nt, Artificial Sequence
  Description of Artificial Sequence: Synthetic oligonucleotide
  Sense Strand Starting at position 69 of SEQ ID NO: 315252
uuguaauacagaggguagu

SEQ ID NO: 324068 - RNA, 19 nt, Artificial Sequence
  Description of Artificial Sequence: Synthetic oligonucleotide
  Antisense Strand to SEQ ID NO: 324067
acuacccucuguauuacaa

SEQ ID NO: 324069 - RNA, 19 nt, Artificial Sequence
  Description of Artificial Sequence: Synthetic oligonucleotide
  Sense Strand Starting at position 69 of SEQ ID NO: 315358
gaguauuuguuucucuguu

SEQ ID NO: 324070 - RNA, 19 nt, Artificial Sequence
  Description of Artificial Sequence: Synthetic oligonucleotide
  Antisense Strand to SEQ ID NO: 324069
aacagagaaacaaauacuc

SEQ ID NO: 324071 - RNA, 19 nt, Artificial Sequence
  Description of Artificial Sequence: Synthetic oligonucleotide
  Sense Strand Starting at position 69 of SEQ ID NO: 315359
aguauuuguuucucuguua

SEQ ID NO: 324072 - RNA, 19 nt, Artificial Sequence
  Description of Artificial Sequence: Synthetic oligonucleotide
  Antisense Strand to SEQ ID NO: 324071
uaacagagaaacaaauacu

SEQ ID NO: 324073 - RNA, 19 nt, Artificial Sequence
  Description of Artificial Sequence: Synthetic oligonucleotide
  Sense Strand Starting at position 69 of SEQ ID NO: 315360
guauuuguuucucuguuaa

SEQ ID NO: 324074 - RNA, 19 nt, Artificial Sequence
  Description of Artificial Sequence: Synthetic oligonucleotide
  Antisense Strand to SEQ ID NO: 324073
uuaacagagaaacaaauac

SEQ ID NO: 324075 - RNA, 19 nt, Artificial Sequence
  Description of Artificial Sequence: Synthetic oligonucleotide
  Sense Strand Starting at position 69 of SEQ ID NO: 315521
acuguuugacucuacuuau

SEQ ID NO: 324076 - RNA, 19 nt, Artificial Sequence
  Description of Artificial Sequence: Synthetic oligonucleotide
  Antisense Strand to SEQ ID NO: 324075
auaaguagagucaaacagu

SEQ ID NO: 324077 - RNA, 19 nt, Artificial Sequence
  Description of Artificial Sequence: Synthetic oligonucleotide
  Sense Strand Starting at position 69 of SEQ ID NO: 315524
guuugacucuacuuauaug

SEQ ID NO: 324078 - RNA, 19 nt, Artificial Sequence
  Description of Artificial Sequence: Synthetic oligonucleotide
  Antisense Strand to SEQ ID NO: 324077
cauauaaguagagucaaac

SEQ ID NO: 324079 - RNA, 19 nt, Artificial Sequence
  Description of Artificial Sequence: Synthetic oligonucleotide
  Sense Strand Starting at position 69 of SEQ ID NO: 315619
gagaguuauuguuuaacga

SEQ ID NO: 324080 - RNA, 19 nt, Artificial Sequence
  Description of Artificial Sequence: Synthetic oligonucleotide
  Antisense Strand to SEQ ID NO: 324079
ucguuaaacaauaacucuc

SEQ ID NO: 324081 - RNA, 19 nt, Artificial Sequence
  Description of Artificial Sequence: Synthetic oligonucleotide
  Sense Strand Starting at position 69 of SEQ ID NO: 315620
agaguuauuguuuaacgag

SEQ ID NO: 324082 - RNA, 19 nt, Artificial Sequence
  Description of Artificial Sequence: Synthetic oligonucleotide
  Antisense Strand to SEQ ID NO: 324081
cucguuaaacaauaacucu

SEQ ID NO: 324083 - RNA, 19 nt, Artificial Sequence
  Description of Artificial Sequence: Synthetic oligonucleotide
  Sense Strand Starting at position 69 of SEQ ID NO: 315627
uuguuuaacgaguauagag

SEQ ID NO: 324084 - RNA, 19 nt, Artificial Sequence
  Description of Artificial Sequence: Synthetic oligonucleotide
  Antisense Strand to SEQ ID NO: 324083
cucuauacucguuaaacaa

SEQ ID NO: 324085 - RNA, 19 nt, Artificial Sequence
  Description of Artificial Sequence: Synthetic oligonucleotide
  Sense Strand Starting at position 69 of SEQ ID NO: 315629
guuuaacgaguauagaguu

SEQ ID NO: 324086 - RNA, 19 nt, Artificial Sequence
  Description of Artificial Sequence: Synthetic oligonucleotide
  Antisense Strand to SEQ ID NO: 324085
aacucuauacucguuaaac

SEQ ID NO: 324087 - RNA, 19 nt, Artificial Sequence
  Description of Artificial Sequence: Synthetic oligonucleotide
  Sense Strand Starting at position 69 of SEQ ID NO: 315808
uuaguaugucuagaauggu

SEQ ID NO: 324088 - RNA, 19 nt, Artificial Sequence
  Description of Artificial Sequence: Synthetic oligonucleotide
  Antisense Strand to SEQ ID NO: 324087
accauucuagacauacuaa

SEQ ID NO: 324089 - RNA, 19 nt, Artificial Sequence
  Description of Artificial Sequence: Synthetic oligonucleotide
  Sense Strand Starting at position 69 of SEQ ID NO: 315811
guaugucuagaauggucau

SEQ ID NO: 324090 - RNA, 19 nt, Artificial Sequence
  Description of Artificial Sequence: Synthetic oligonucleotide
  Antisense Strand to SEQ ID NO: 324089
augaccauucuagacauac

SEQ ID NO: 324091 - RNA, 19 nt, Artificial Sequence
  Description of Artificial Sequence: Synthetic oligonucleotide
  Sense Strand Starting at position 69 of SEQ ID NO: 315814
ugucuagaauggucauaca

SEQ ID NO: 324092 - RNA, 19 nt, Artificial Sequence
  Description of Artificial Sequence: Synthetic oligonucleotide
  Antisense Strand to SEQ ID NO: 324091
uguaugaccauucuagaca

SEQ ID NO: 324093 - RNA, 19 nt, Artificial Sequence
  Description of Artificial Sequence: Synthetic oligonucleotide
  Sense Strand Starting at position 69 of SEQ ID NO: 315866
ccaggaacauaguucugau

SEQ ID NO: 324094 - RNA, 19 nt, Artificial Sequence
  Description of Artificial Sequence: Synthetic oligonucleotide
  Antisense Strand to SEQ ID NO: 324093
aucagaacuauguuccugg

SEQ ID NO: 324095 - RNA, 19 nt, Artificial Sequence
  Description of Artificial Sequence: Synthetic oligonucleotide
  Sense Strand Starting at position 69 of SEQ ID NO: 315987
gcuugagcucaaggaggau

SEQ ID NO: 324096 - RNA, 19 nt, Artificial Sequence
  Description of Artificial Sequence: Synthetic oligonucleotide
  Antisense Strand to SEQ ID NO: 324095
auccuccuugagcucaagc

SEQ ID NO: 324097 - RNA, 19 nt, Artificial Sequence
  Description of Artificial Sequence: Synthetic oligonucleotide
  Sense Strand Starting at position 69 of SEQ ID NO: 316022
uuaagaugagccugagcaa

SEQ ID NO: 324098 - RNA, 19 nt, Artificial Sequence
  Description of Artificial Sequence: Synthetic oligonucleotide
  Antisense Strand to SEQ ID NO: 324097
uugcucaggcucaucuuaa

SEQ ID NO: 324099 - RNA, 19 nt, Artificial Sequence
  Description of Artificial Sequence: Synthetic oligonucleotide
  Sense Strand Starting at position 69 of SEQ ID NO: 316424
ucuuaaugagaaugguauc

SEQ ID NO: 324100 - RNA, 19 nt, Artificial Sequence
  Description of Artificial Sequence: Synthetic oligonucleotide
  Antisense Strand to SEQ ID NO: 324099
gauaccauucucauuaaga

SEQ ID NO: 324101 - RNA, 19 nt, Artificial Sequence
  Description of Artificial Sequence: Synthetic oligonucleotide
  Sense Strand Starting at position 69 of SEQ ID NO: 316447
cugagucuccacugauaau

SEQ ID NO: 324102 - RNA, 19 nt, Artificial Sequence
  Description of Artificial Sequence: Synthetic oligonucleotide
  Antisense Strand to SEQ ID NO: 324101
auuaucaguggagacucag

SEQ ID NO: 324103 - RNA, 19 nt, Artificial Sequence
  Description of Artificial Sequence: Synthetic oligonucleotide
  Sense Strand Starting at position 69 of SEQ ID NO: 316944
ccugaucaguuucuuggaa

SEQ ID NO: 324104 - RNA, 19 nt, Artificial Sequence
  Description of Artificial Sequence: Synthetic oligonucleotide
  Antisense Strand to SEQ ID NO: 324103
uuccaagaaacugaucagg

SEQ ID NO: 324105 - RNA, 19 nt, Artificial Sequence
  Description of Artificial Sequence: Synthetic oligonucleotide
  Sense Strand Starting at position 69 of SEQ ID NO: 317188
ugagcauaguuucccugaa

SEQ ID NO: 324106 - RNA, 19 nt, Artificial Sequence
  Description of Artificial Sequence: Synthetic oligonucleotide
  Antisense Strand to SEQ ID NO: 324105
uucagggaaacuaugcuca

SEQ ID NO: 324107 - RNA, 19 nt, Artificial Sequence
  Description of Artificial Sequence: Synthetic oligonucleotide
  Sense Strand Starting at position 69 of SEQ ID NO: 317189
gagcauaguuucccugaag

SEQ ID NO: 324108 - RNA, 19 nt, Artificial Sequence
  Description of Artificial Sequence: Synthetic oligonucleotide
  Antisense Strand to SEQ ID NO: 324107
cuucagggaaacuaugcuc

SEQ ID NO: 324109 - RNA, 19 nt, Artificial Sequence
  Description of Artificial Sequence: Synthetic oligonucleotide
  Sense Strand Starting at position 69 of SEQ ID NO: 317256
aucaguuacaagugucaga

SEQ ID NO: 324110 - RNA, 19 nt, Artificial Sequence
  Description of Artificial Sequence: Synthetic oligonucleotide
  Antisense Strand to SEQ ID NO: 324109
ucugacacuuguaacugau

SEQ ID NO: 324111 - RNA, 19 nt, Artificial Sequence
  Description of Artificial Sequence: Synthetic oligonucleotide
  Sense Strand Starting at position 69 of SEQ ID NO: 317369
ucaguuucugacugacaau

SEQ ID NO: 324112 - RNA, 19 nt, Artificial Sequence
  Description of Artificial Sequence: Synthetic oligonucleotide
  Antisense Strand to SEQ ID NO: 324111
auugucagucagaaacuga

SEQ ID NO: 324113 - RNA, 19 nt, Artificial Sequence
  Description of Artificial Sequence: Synthetic oligonucleotide
  Sense Strand Starting at position 69 of SEQ ID NO: 317893
agaccucuugggugaggua

SEQ ID NO: 324114 - RNA, 19 nt, Artificial Sequence
  Description of Artificial Sequence: Synthetic oligonucleotide
  Antisense Strand to SEQ ID NO: 324113
uaccucacccaagaggucu

SEQ ID NO: 324115 - RNA, 19 nt, Artificial Sequence
  Description of Artificial Sequence: Synthetic oligonucleotide
  Sense Strand Starting at position 69 of SEQ ID NO: 317906
gagguagacuugucucaua

SEQ ID NO: 324116 - RNA, 19 nt, Artificial Sequence
  Description of Artificial Sequence: Synthetic oligonucleotide
  Antisense Strand to SEQ ID NO: 324115
uaugagacaagucuaccuc

SEQ ID NO: 324117 - RNA, 19 nt, Artificial Sequence
  Description of Artificial Sequence: Synthetic oligonucleotide
  Sense Strand Starting at position 69 of SEQ ID NO: 318037
acauaacuccaguguaguu

SEQ ID NO: 324118 - RNA, 19 nt, Artificial Sequence
  Description of Artificial Sequence: Synthetic oligonucleotide
  Antisense Strand to SEQ ID NO: 324117
aacuacacuggaguuaugu

SEQ ID NO: 324119 - RNA, 19 nt, Artificial Sequence
  Description of Artificial Sequence: Synthetic oligonucleotide
  Sense Strand Starting at position 69 of SEQ ID NO: 318206
ugucucaagccugaguaaa

SEQ ID NO: 324120 - RNA, 19 nt, Artificial Sequence
  Description of Artificial Sequence: Synthetic oligonucleotide
  Antisense Strand to SEQ ID NO: 324119
uuuacucaggcuugagaca

SEQ ID NO: 324121 - RNA, 19 nt, Artificial Sequence
  Description of Artificial Sequence: Synthetic oligonucleotide
  Sense Strand Starting at position 69 of SEQ ID NO: 318208
ucucaagccugaguaaagu

SEQ ID NO: 324122 - RNA, 19 nt, Artificial Sequence
  Description of Artificial Sequence: Synthetic oligonucleotide
  Antisense Strand to SEQ ID NO: 324121
acuuuacucaggcuugaga

SEQ ID NO: 324123 - RNA, 19 nt, Artificial Sequence
  Description of Artificial Sequence: Synthetic oligonucleotide
  Sense Strand Starting at position 69 of SEQ ID NO: 318266
aagcuuccggucuaacaga

SEQ ID NO: 324124 - RNA, 19 nt, Artificial Sequence
  Description of Artificial Sequence: Synthetic oligonucleotide
  Antisense Strand to SEQ ID NO: 324123
ucuguuagaccggaagcuu

SEQ ID NO: 324125 - RNA, 19 nt, Artificial Sequence
  Description of Artificial Sequence: Synthetic oligonucleotide
  Sense Strand Starting at position 69 of SEQ ID NO: 318368
ccaggaaauaagugagcuu

SEQ ID NO: 324126 - RNA, 19 nt, Artificial Sequence
  Description of Artificial Sequence: Synthetic oligonucleotide
  Antisense Strand to SEQ ID NO: 324125
aagcucacuuauuuccugg

SEQ ID NO: 324127 - RNA, 19 nt, Artificial Sequence
  Description of Artificial Sequence: Synthetic oligonucleotide
  Sense Strand Starting at position 69 of SEQ ID NO: 318375
auaagugagcuuggcaaau

SEQ ID NO: 324128 - RNA, 19 nt, Artificial Sequence
  Description of Artificial Sequence: Synthetic oligonucleotide
  Antisense Strand to SEQ ID NO: 324127
auuugccaagcucacuuau

SEQ ID NO: 324129 - RNA, 19 nt, Artificial Sequence
  Description of Artificial Sequence: Synthetic oligonucleotide
  Sense Strand Starting at position 69 of SEQ ID NO: 318505
ugcagaacuacaggguauu

SEQ ID NO: 324130 - RNA, 19 nt, Artificial Sequence
  Description of Artificial Sequence: Synthetic oligonucleotide
  Antisense Strand to SEQ ID NO: 324129
aauacccuguaguucugca

SEQ ID NO: 324131 - RNA, 19 nt, Artificial Sequence
  Description of Artificial Sequence: Synthetic oligonucleotide
  Sense Strand Starting at position 69 of SEQ ID NO: 318538
guacuuuaauaggucugga

SEQ ID NO: 324132 - RNA, 19 nt, Artificial Sequence
  Description of Artificial Sequence: Synthetic oligonucleotide
  Antisense Strand to SEQ ID NO: 324131
uccagaccuauuaaaguac

SEQ ID NO: 324133 - RNA, 19 nt, Artificial Sequence
  Description of Artificial Sequence: Synthetic oligonucleotide
  Sense Strand Starting at position 69 of SEQ ID NO: 318693
ccuggaagcacucgguaau

SEQ ID NO: 324134 - RNA, 19 nt, Artificial Sequence
  Description of Artificial Sequence: Synthetic oligonucleotide
  Antisense Strand to SEQ ID NO: 324133
auuaccgagugcuuccagg

SEQ ID NO: 324135 - RNA, 19 nt, Artificial Sequence
  Description of Artificial Sequence: Synthetic oligonucleotide
  Sense Strand Starting at position 69 of SEQ ID NO: 318753
ucagauuguccuugggauu

SEQ ID NO: 324136 - RNA, 19 nt, Artificial Sequence
  Description of Artificial Sequence: Synthetic oligonucleotide
  Antisense Strand to SEQ ID NO: 324135
aaucccaaggacaaucuga

SEQ ID NO: 324137 - RNA, 19 nt, Artificial Sequence
  Description of Artificial Sequence: Synthetic oligonucleotide
  Sense Strand Starting at position 69 of SEQ ID NO: 318754
cagauuguccuugggauuc

SEQ ID NO: 324138 - RNA, 19 nt, Artificial Sequence
  Description of Artificial Sequence: Synthetic oligonucleotide
  Antisense Strand to SEQ ID NO: 324137
gaaucccaaggacaaucug

SEQ ID NO: 324139 - RNA, 19 nt, Artificial Sequence
  Description of Artificial Sequence: Synthetic oligonucleotide
  Sense Strand Starting at position 69 of SEQ ID NO: 318878
caggaaggguccuaaauuu

SEQ ID NO: 324140 - RNA, 19 nt, Artificial Sequence
  Description of Artificial Sequence: Synthetic oligonucleotide
  Antisense Strand to SEQ ID NO: 324139
aaauuuaggacccuuccug

SEQ ID NO: 324141 - RNA, 19 nt, Artificial Sequence
  Description of Artificial Sequence: Synthetic oligonucleotide
  Sense Strand Starting at position 69 of SEQ ID NO: 318914
acuugagauuagcuagcuu

SEQ ID NO: 324142 - RNA, 19 nt, Artificial Sequence
  Description of Artificial Sequence: Synthetic oligonucleotide
  Antisense Strand to SEQ ID NO: 324141
aagcuagcuaaucucaagu

SEQ ID NO: 324143 - RNA, 19 nt, Artificial Sequence
  Description of Artificial Sequence: Synthetic oligonucleotide
  Sense Strand Starting at position 69 of SEQ ID NO: 318957
aagacagugcccugggaaa

SEQ ID NO: 324144 - RNA, 19 nt, Artificial Sequence
  Description of Artificial Sequence: Synthetic oligonucleotide
  Antisense Strand to SEQ ID NO: 324143
uuucccagggcacugucuu

SEQ ID NO: 324145 - RNA, 19 nt, Artificial Sequence
  Description of Artificial Sequence: Synthetic oligonucleotide
  Sense Strand Starting at position 69 of SEQ ID NO: 319115
uuuauuucuuuggagagga

SEQ ID NO: 324146 - RNA, 19 nt, Artificial Sequence
  Description of Artificial Sequence: Synthetic oligonucleotide
  Antisense Strand to SEQ ID NO: 324145
uccucuccaaagaaauaaa

SEQ ID NO: 324147 - RNA, 19 nt, Artificial Sequence
  Description of Artificial Sequence: Synthetic oligonucleotide
  Sense Strand Starting at position 70 of SEQ ID NO: 315267
uccagcuaccaaugaagaa

SEQ ID NO: 324148 - RNA, 19 nt, Artificial Sequence
  Description of Artificial Sequence: Synthetic oligonucleotide
  Antisense Strand to SEQ ID NO: 324147
uucuucauugguagcugga

SEQ ID NO: 324149 - RNA, 19 nt, Artificial Sequence
  Description of Artificial Sequence: Synthetic oligonucleotide
  Sense Strand Starting at position 70 of SEQ ID NO: 315362
ugaaauuaagcaggcaagu

SEQ ID NO: 324150 - RNA, 19 nt, Artificial Sequence
  Description of Artificial Sequence: Synthetic oligonucleotide
  Antisense Strand to SEQ ID NO: 324149
acuugccugcuuaauuuca

SEQ ID NO: 324151 - RNA, 19 nt, Artificial Sequence
  Description of Artificial Sequence: Synthetic oligonucleotide
  Sense Strand Starting at position 70 of SEQ ID NO: 315434
ggaagggacugguuagagu

SEQ ID NO: 324152 - RNA, 19 nt, Artificial Sequence
  Description of Artificial Sequence: Synthetic oligonucleotide
  Antisense Strand to SEQ ID NO: 324151
acucuaaccagucccuucc

SEQ ID NO: 324153 - RNA, 19 nt, Artificial Sequence
  Description of Artificial Sequence: Synthetic oligonucleotide
  Sense Strand Starting at position 70 of SEQ ID NO: 315559
ugcuccuauguugauuaaa

SEQ ID NO: 324154 - RNA, 19 nt, Artificial Sequence
  Description of Artificial Sequence: Synthetic oligonucleotide
  Antisense Strand to SEQ ID NO: 324153
uuuaaucaacauaggagca

SEQ ID NO: 324155 - RNA, 19 nt, Artificial Sequence
  Description of Artificial Sequence: Synthetic oligonucleotide
  Sense Strand Starting at position 70 of SEQ ID NO: 315628
ccugaauucuaugcaaaug

SEQ ID NO: 324156 - RNA, 19 nt, Artificial Sequence
  Description of Artificial Sequence: Synthetic oligonucleotide
  Antisense Strand to SEQ ID NO: 324155
cauuugcauagaauucagg

SEQ ID NO: 324157 - RNA, 19 nt, Artificial Sequence
  Description of Artificial Sequence: Synthetic oligonucleotide
  Sense Strand Starting at position 70 of SEQ ID NO: 315694
ugugauaauauucgacuga

SEQ ID NO: 324158 - RNA, 19 nt, Artificial Sequence
  Description of Artificial Sequence: Synthetic oligonucleotide
  Antisense Strand to SEQ ID NO: 324157
ucagucgaauauuaucaca

SEQ ID NO: 324159 - RNA, 19 nt, Artificial Sequence
  Description of Artificial Sequence: Synthetic oligonucleotide
  Sense Strand Starting at position 70 of SEQ ID NO: 315698
auaauauucgacugagcug

SEQ ID NO: 324160 - RNA, 19 nt, Artificial Sequence
  Description of Artificial Sequence: Synthetic oligonucleotide
  Antisense Strand to SEQ ID NO: 324159
cagcucagucgaauauuau

SEQ ID NO: 324161 - RNA, 19 nt, Artificial Sequence
  Description of Artificial Sequence: Synthetic oligonucleotide
  Sense Strand Starting at position 70 of SEQ ID NO: 315722
uaggguuggguuugaguga

SEQ ID NO: 324162 - RNA, 19 nt, Artificial Sequence
  Description of Artificial Sequence: Synthetic oligonucleotide
  Antisense Strand to SEQ ID NO: 324161
ucacucaaacccaacccua

SEQ ID NO: 324163 - RNA, 19 nt, Artificial Sequence
  Description of Artificial Sequence: Synthetic oligonucleotide
  Sense Strand Starting at position 70 of SEQ ID NO: 315726
guuggguuugagugaggga

SEQ ID NO: 324164 - RNA, 19 nt, Artificial Sequence
  Description of Artificial Sequence: Synthetic oligonucleotide
  Antisense Strand to SEQ ID NO: 324163
ucccucacucaaacccaac

SEQ ID NO: 324165 - RNA, 19 nt, Artificial Sequence
  Description of Artificial Sequence: Synthetic oligonucleotide
  Sense Strand Starting at position 70 of SEQ ID NO: 315731
guuugagugagggagaagu

SEQ ID NO: 324166 - RNA, 19 nt, Artificial Sequence
  Description of Artificial Sequence: Synthetic oligonucleotide
  Antisense Strand to SEQ ID NO: 324165
acuucucccucacucaaac

SEQ ID NO: 324167 - RNA, 19 nt, Artificial Sequence
  Description of Artificial Sequence: Synthetic oligonucleotide
  Sense Strand Starting at position 70 of SEQ ID NO: 315764
cguauagaaagcugaauac

SEQ ID NO: 324168 - RNA, 19 nt, Artificial Sequence
  Description of Artificial Sequence: Synthetic oligonucleotide
  Antisense Strand to SEQ ID NO: 324167
guauucagcuuucuauacg

SEQ ID NO: 324169 - RNA, 19 nt, Artificial Sequence
  Description of Artificial Sequence: Synthetic oligonucleotide
  Sense Strand Starting at position 70 of SEQ ID NO: 315818
cagcucuugcuagaggaaa

SEQ ID NO: 324170 - RNA, 19 nt, Artificial Sequence
  Description of Artificial Sequence: Synthetic oligonucleotide
  Antisense Strand to SEQ ID NO: 324169
uuuccucuagcaagagcug

SEQ ID NO: 324171 - RNA, 19 nt, Artificial Sequence
  Description of Artificial Sequence: Synthetic oligonucleotide
  Sense Strand Starting at position 70 of SEQ ID NO: 315820
gcucuugcuagaggaaaug

SEQ ID NO: 324172 - RNA, 19 nt, Artificial Sequence
  Description of Artificial Sequence: Synthetic oligonucleotide
  Antisense Strand to SEQ ID NO: 324171
cauuuccucuagcaagagc

SEQ ID NO: 324173 - RNA, 19 nt, Artificial Sequence
  Description of Artificial Sequence: Synthetic oligonucleotide
  Sense Strand Starting at position 70 of SEQ ID NO: 315851
ugugcucccgaauauacau

SEQ ID NO: 324174 - RNA, 19 nt, Artificial Sequence
  Description of Artificial Sequence: Synthetic oligonucleotide
  Antisense Strand to SEQ ID NO: 324173
auguauauucgggagcaca

SEQ ID NO: 324175 - RNA, 19 nt, Artificial Sequence
  Description of Artificial Sequence: Synthetic oligonucleotide
  Sense Strand Starting at position 70 of SEQ ID NO: 315930
ucaagaaugcugugacaag

SEQ ID NO: 324176 - RNA, 19 nt, Artificial Sequence
  Description of Artificial Sequence: Synthetic oligonucleotide
  Antisense Strand to SEQ ID NO: 324175
cuugucacagcauucuuga

SEQ ID NO: 324177 - RNA, 19 nt, Artificial Sequence
  Description of Artificial Sequence: Synthetic oligonucleotide
  Sense Strand Starting at position 70 of SEQ ID NO: 316100
acagcaaagcuguaaucua

SEQ ID NO: 324178 - RNA, 19 nt, Artificial Sequence
  Description of Artificial Sequence: Synthetic oligonucleotide
  Antisense Strand to SEQ ID NO: 324177
uagauuacagcuuugcugu

SEQ ID NO: 324179 - RNA, 19 nt, Artificial Sequence
  Description of Artificial Sequence: Synthetic oligonucleotide
  Sense Strand Starting at position 70 of SEQ ID NO: 316123
aagcgacuguauucccuaa

SEQ ID NO: 324180 - RNA, 19 nt, Artificial Sequence
  Description of Artificial Sequence: Synthetic oligonucleotide
  Antisense Strand to SEQ ID NO: 324179
uuagggaauacagucgcuu

SEQ ID NO: 324181 - RNA, 19 nt, Artificial Sequence
  Description of Artificial Sequence: Synthetic oligonucleotide
  Sense Strand Starting at position 70 of SEQ ID NO: 316200
agcuaugugccagagaaau

SEQ ID NO: 324182 - RNA, 19 nt, Artificial Sequence
  Description of Artificial Sequence: Synthetic oligonucleotide
  Antisense Strand to SEQ ID NO: 324181
auuucucuggcacauagcu

SEQ ID NO: 324183 - RNA, 19 nt, Artificial Sequence
  Description of Artificial Sequence: Synthetic oligonucleotide
  Sense Strand Starting at position 70 of SEQ ID NO: 316303
agagaaauguuuccaaugu

SEQ ID NO: 324184 - RNA, 19 nt, Artificial Sequence
  Description of Artificial Sequence: Synthetic oligonucleotide
  Antisense Strand to SEQ ID NO: 324183
acauuggaaacauuucucu

SEQ ID NO: 324185 - RNA, 19 nt, Artificial Sequence
  Description of Artificial Sequence: Synthetic oligonucleotide
  Sense Strand Starting at position 70 of SEQ ID NO: 316494
ccaagucugacaggugaga

SEQ ID NO: 324186 - RNA, 19 nt, Artificial Sequence
  Description of Artificial Sequence: Synthetic oligonucleotide
  Antisense Strand to SEQ ID NO: 324185
ucucaccugucagacuugg

SEQ ID NO: 324187 - RNA, 19 nt, Artificial Sequence
  Description of Artificial Sequence: Synthetic oligonucleotide
  Sense Strand Starting at position 70 of SEQ ID NO: 316741
gugcuugguccacagagaa

SEQ ID NO: 324188 - RNA, 19 nt, Artificial Sequence
  Description of Artificial Sequence: Synthetic oligonucleotide
  Antisense Strand to SEQ ID NO: 324187
uucucuguggaccaagcac

SEQ ID NO: 324189 - RNA, 19 nt, Artificial Sequence
  Description of Artificial Sequence: Synthetic oligonucleotide
  Sense Strand Starting at position 70 of SEQ ID NO: 316810
agaagacugugggagagau

SEQ ID NO: 324190 - RNA, 19 nt, Artificial Sequence
  Description of Artificial Sequence: Synthetic oligonucleotide
  Antisense Strand to SEQ ID NO: 324189
aucucucccacagucuucu

SEQ ID NO: 324191 - RNA, 19 nt, Artificial Sequence
  Description of Artificial Sequence: Synthetic oligonucleotide
  Sense Strand Starting at position 70 of SEQ ID NO: 317047
ggguaauccuuggccacca

SEQ ID NO: 324192 - RNA, 19 nt, Artificial Sequence
  Description of Artificial Sequence: Synthetic oligonucleotide
  Antisense Strand to SEQ ID NO: 324191
ugguggccaaggauuaccc

SEQ ID NO: 324193 - RNA, 19 nt, Artificial Sequence
  Description of Artificial Sequence: Synthetic oligonucleotide
  Sense Strand Starting at position 70 of SEQ ID NO: 317712
aaugaaugucaguggaaua

SEQ ID NO: 324194 - RNA, 19 nt, Artificial Sequence
  Description of Artificial Sequence: Synthetic oligonucleotide
  Antisense Strand to SEQ ID NO: 324193
uauuccacugacauucauu

SEQ ID NO: 324195 - RNA, 19 nt, Artificial Sequence
  Description of Artificial Sequence: Synthetic oligonucleotide
  Sense Strand Starting at position 70 of SEQ ID NO: 317713
augaaugucaguggaauau

SEQ ID NO: 324196 - RNA, 19 nt, Artificial Sequence
  Description of Artificial Sequence: Synthetic oligonucleotide
  Antisense Strand to SEQ ID NO: 324195
auauuccacugacauucau

SEQ ID NO: 324197 - RNA, 19 nt, Artificial Sequence
  Description of Artificial Sequence: Synthetic oligonucleotide
  Sense Strand Starting at position 70 of SEQ ID NO: 317860
ucgagaccuuucccacuuu

SEQ ID NO: 324198 - RNA, 19 nt, Artificial Sequence
  Description of Artificial Sequence: Synthetic oligonucleotide
  Antisense Strand to SEQ ID NO: 324197
aaagugggaaaggucucga

SEQ ID NO: 324199 - RNA, 19 nt, Artificial Sequence
  Description of Artificial Sequence: Synthetic oligonucleotide
  Sense Strand Starting at position 70 of SEQ ID NO: 318034
gcccaagaaggcgauugau

SEQ ID NO: 324200 - RNA, 19 nt, Artificial Sequence
  Description of Artificial Sequence: Synthetic oligonucleotide
  Antisense Strand to SEQ ID NO: 324199
aucaaucgccuucuugggc

SEQ ID NO: 324201 - RNA, 19 nt, Artificial Sequence
  Description of Artificial Sequence: Synthetic oligonucleotide
  Sense Strand Starting at position 70 of SEQ ID NO: 318037
caagaaggcgauugaucuu

SEQ ID NO: 324202 - RNA, 19 nt, Artificial Sequence
  Description of Artificial Sequence: Synthetic oligonucleotide
  Antisense Strand to SEQ ID NO: 324201
aagaucaaucgccuucuug

SEQ ID NO: 324203 - RNA, 19 nt, Artificial Sequence
  Description of Artificial Sequence: Synthetic oligonucleotide
  Sense Strand Starting at position 70 of SEQ ID NO: 318040
gaaggcgauugaucuuaag

SEQ ID NO: 324204 - RNA, 19 nt, Artificial Sequence
  Description of Artificial Sequence: Synthetic oligonucleotide
  Antisense Strand to SEQ ID NO: 324203
cuuaagaucaaucgccuuc

SEQ ID NO: 324205 - RNA, 19 nt, Artificial Sequence
  Description of Artificial Sequence: Synthetic oligonucleotide
  Sense Strand Starting at position 70 of SEQ ID NO: 318128
aucaauagggagugcuuaa

SEQ ID NO: 324206 - RNA, 19 nt, Artificial Sequence
  Description of Artificial Sequence: Synthetic oligonucleotide
  Antisense Strand to SEQ ID NO: 324205
uuaagcacucccuauugau

SEQ ID NO: 324207 - RNA, 19 nt, Artificial Sequence
  Description of Artificial Sequence: Synthetic oligonucleotide
  Sense Strand Starting at position 70 of SEQ ID NO: 318162
uguguaauaccgcuuagca

SEQ ID NO: 324208 - RNA, 19 nt, Artificial Sequence
  Description of Artificial Sequence: Synthetic oligonucleotide
  Antisense Strand to SEQ ID NO: 324207
ugcuaagcgguauuacaca

SEQ ID NO: 324209 - RNA, 19 nt, Artificial Sequence
  Description of Artificial Sequence: Synthetic oligonucleotide
  Sense Strand Starting at position 70 of SEQ ID NO: 318215
auggaaagaucuccaaugu

SEQ ID NO: 324210 - RNA, 19 nt, Artificial Sequence
  Description of Artificial Sequence: Synthetic oligonucleotide
  Antisense Strand to SEQ ID NO: 324209
acauuggagaucuuuccau

SEQ ID NO: 324211 - RNA, 19 nt, Artificial Sequence
  Description of Artificial Sequence: Synthetic oligonucleotide
  Sense Strand Starting at position 70 of SEQ ID NO: 318232
guauuagacucaguuuaaa

SEQ ID NO: 324212 - RNA, 19 nt, Artificial Sequence
  Description of Artificial Sequence: Synthetic oligonucleotide
  Antisense Strand to SEQ ID NO: 324211
uuuaaacugagucuaauac

SEQ ID NO: 324213 - RNA, 19 nt, Artificial Sequence
  Description of Artificial Sequence: Synthetic oligonucleotide
  Sense Strand Starting at position 70 of SEQ ID NO: 318255
auugcagacuaagcauaau

SEQ ID NO: 324214 - RNA, 19 nt, Artificial Sequence
  Description of Artificial Sequence: Synthetic oligonucleotide
  Antisense Strand to SEQ ID NO: 324213
auuaugcuuagucugcaau

SEQ ID NO: 324215 - RNA, 19 nt, Artificial Sequence
  Description of Artificial Sequence: Synthetic oligonucleotide
  Sense Strand Starting at position 70 of SEQ ID NO: 318350
gguaaauagcauugaacac

SEQ ID NO: 324216 - RNA, 19 nt, Artificial Sequence
  Description of Artificial Sequence: Synthetic oligonucleotide
  Antisense Strand to SEQ ID NO: 324215
guguucaaugcuauuuacc

SEQ ID NO: 324217 - RNA, 19 nt, Artificial Sequence
  Description of Artificial Sequence: Synthetic oligonucleotide
  Sense Strand Starting at position 70 of SEQ ID NO: 318419
ggaggcaccuggguuuaaa

SEQ ID NO: 324218 - RNA, 19 nt, Artificial Sequence
  Description of Artificial Sequence: Synthetic oligonucleotide
  Antisense Strand to SEQ ID NO: 324217
uuuaaacccaggugccucc

SEQ ID NO: 324219 - RNA, 19 nt, Artificial Sequence
  Description of Artificial Sequence: Synthetic oligonucleotide
  Sense Strand Starting at position 70 of SEQ ID NO: 318460
gggacuuaagcuuauagcu

SEQ ID NO: 324220 - RNA, 19 nt, Artificial Sequence
  Description of Artificial Sequence: Synthetic oligonucleotide
  Antisense Strand to SEQ ID NO: 324219
agcuauaagcuuaaguccc

SEQ ID NO: 324221 - RNA, 19 nt, Artificial Sequence
  Description of Artificial Sequence: Synthetic oligonucleotide
  Sense Strand Starting at position 70 of SEQ ID NO: 318979
gaggauuccugagcccaag

SEQ ID NO: 324222 - RNA, 19 nt, Artificial Sequence
  Description of Artificial Sequence: Synthetic oligonucleotide
  Antisense Strand to SEQ ID NO: 324221
cuugggcucaggaauccuc

SEQ ID NO: 324223 - RNA, 19 nt, Artificial Sequence
  Description of Artificial Sequence: Synthetic oligonucleotide
  Sense Strand Starting at position 70 of SEQ ID NO: 318982
gauuccugagcccaagagu

SEQ ID NO: 324224 - RNA, 19 nt, Artificial Sequence
  Description of Artificial Sequence: Synthetic oligonucleotide
  Antisense Strand to SEQ ID NO: 324223
acucuugggcucaggaauc

SEQ ID NO: 324225 - RNA, 19 nt, Artificial Sequence
  Description of Artificial Sequence: Synthetic oligonucleotide
  Sense Strand Starting at position 70 of SEQ ID NO: 319098
auggcacuucuugggaaau

SEQ ID NO: 324226 - RNA, 19 nt, Artificial Sequence
  Description of Artificial Sequence: Synthetic oligonucleotide
  Antisense Strand to SEQ ID NO: 324225
auuucccaagaagugccau

SEQ ID NO: 324227 - RNA, 19 nt, Artificial Sequence
  Description of Artificial Sequence: Synthetic oligonucleotide
  Sense Strand Starting at position 71 of SEQ ID NO: 315428
caaccagccuggguguaau

SEQ ID NO: 324228 - RNA, 19 nt, Artificial Sequence
  Description of Artificial Sequence: Synthetic oligonucleotide
  Antisense Strand to SEQ ID NO: 324227
auuacacccaggcugguug

SEQ ID NO: 324229 - RNA, 19 nt, Artificial Sequence
  Description of Artificial Sequence: Synthetic oligonucleotide
  Sense Strand Starting at position 71 of SEQ ID NO: 315487
cugcuugaucugggagaug

SEQ ID NO: 324230 - RNA, 19 nt, Artificial Sequence
  Description of Artificial Sequence: Synthetic oligonucleotide
  Antisense Strand to SEQ ID NO: 324229
caucucccagaucaagcag

SEQ ID NO: 324231 - RNA, 19 nt, Artificial Sequence
  Description of Artificial Sequence: Synthetic oligonucleotide
  Sense Strand Starting at position 71 of SEQ ID NO: 315738
aguuaaauauccgaauucu

SEQ ID NO: 324232 - RNA, 19 nt, Artificial Sequence
  Description of Artificial Sequence: Synthetic oligonucleotide
  Antisense Strand to SEQ ID NO: 324231
agaauucggauauuuaacu

SEQ ID NO: 324233 - RNA, 19 nt, Artificial Sequence
  Description of Artificial Sequence: Synthetic oligonucleotide
  Sense Strand Starting at position 71 of SEQ ID NO: 315900
accuauuaagaucacguau

SEQ ID NO: 324234 - RNA, 19 nt, Artificial Sequence
  Description of Artificial Sequence: Synthetic oligonucleotide
  Antisense Strand to SEQ ID NO: 324233
auacgugaucuuaauaggu

SEQ ID NO: 324235 - RNA, 19 nt, Artificial Sequence
  Description of Artificial Sequence: Synthetic oligonucleotide
  Sense Strand Starting at position 71 of SEQ ID NO: 316206
ugaagacguuuacuccaga

SEQ ID NO: 324236 - RNA, 19 nt, Artificial Sequence
  Description of Artificial Sequence: Synthetic oligonucleotide
  Antisense Strand to SEQ ID NO: 324235
ucuggaguaaacgucuuca

SEQ ID NO: 324237 - RNA, 19 nt, Artificial Sequence
  Description of Artificial Sequence: Synthetic oligonucleotide
  Sense Strand Starting at position 71 of SEQ ID NO: 316207
gaagacguuuacuccagau

SEQ ID NO: 324238 - RNA, 19 nt, Artificial Sequence
  Description of Artificial Sequence: Synthetic oligonucleotide
  Antisense Strand to SEQ ID NO: 324237
aucuggaguaaacgucuuc

SEQ ID NO: 324239 - RNA, 19 nt, Artificial Sequence
  Description of Artificial Sequence: Synthetic oligonucleotide
  Sense Strand Starting at position 71 of SEQ ID NO: 316209
agacguuuacuccagauau

SEQ ID NO: 324240 - RNA, 19 nt, Artificial Sequence
  Description of Artificial Sequence: Synthetic oligonucleotide
  Antisense Strand to SEQ ID NO: 324239
auaucuggaguaaacgucu

SEQ ID NO: 324241 - RNA, 19 nt, Artificial Sequence
  Description of Artificial Sequence: Synthetic oligonucleotide
  Sense Strand Starting at position 71 of SEQ ID NO: 316211
acguuuacuccagauauga

SEQ ID NO: 324242 - RNA, 19 nt, Artificial Sequence
  Description of Artificial Sequence: Synthetic oligonucleotide
  Antisense Strand to SEQ ID NO: 324241
ucauaucuggaguaaacgu

SEQ ID NO: 324243 - RNA, 19 nt, Artificial Sequence
  Description of Artificial Sequence: Synthetic oligonucleotide
  Sense Strand Starting at position 71 of SEQ ID NO: 316222
agauaugaucacuagcgcu

SEQ ID NO: 324244 - RNA, 19 nt, Artificial Sequence
  Description of Artificial Sequence: Synthetic oligonucleotide
  Antisense Strand to SEQ ID NO: 324243
agcgcuagugaucauaucu

SEQ ID NO: 324245 - RNA, 19 nt, Artificial Sequence
  Description of Artificial Sequence: Synthetic oligonucleotide
  Sense Strand Starting at position 71 of SEQ ID NO: 316228
gaucacuagcgcugaauuc

SEQ ID NO: 324246 - RNA, 19 nt, Artificial Sequence
  Description of Artificial Sequence: Synthetic oligonucleotide
  Antisense Strand to SEQ ID NO: 324245
gaauucagcgcuagugauc

SEQ ID NO: 324247 - RNA, 19 nt, Artificial Sequence
  Description of Artificial Sequence: Synthetic oligonucleotide
  Sense Strand Starting at position 71 of SEQ ID NO: 316506
agaacaugucgcuaugaca

SEQ ID NO: 324248 - RNA, 19 nt, Artificial Sequence
  Description of Artificial Sequence: Synthetic oligonucleotide
  Antisense Strand to SEQ ID NO: 324247
ugucauagcgacauguucu

SEQ ID NO: 324249 - RNA, 19 nt, Artificial Sequence
  Description of Artificial Sequence: Synthetic oligonucleotide
  Sense Strand Starting at position 71 of SEQ ID NO: 316513
gucgcuaugacagaaaguu

SEQ ID NO: 324250 - RNA, 19 nt, Artificial Sequence
  Description of Artificial Sequence: Synthetic oligonucleotide
  Antisense Strand to SEQ ID NO: 324249
aacuuucugucauagcgac

SEQ ID NO: 324251 - RNA, 19 nt, Artificial Sequence
  Description of Artificial Sequence: Synthetic oligonucleotide
  Sense Strand Starting at position 71 of SEQ ID NO: 316521
gacagaaaguucuauggga

SEQ ID NO: 324252 - RNA, 19 nt, Artificial Sequence
  Description of Artificial Sequence: Synthetic oligonucleotide
  Antisense Strand to SEQ ID NO: 324251
ucccauagaacuuucuguc

SEQ ID NO: 324253 - RNA, 19 nt, Artificial Sequence
  Description of Artificial Sequence: Synthetic oligonucleotide
  Sense Strand Starting at position 71 of SEQ ID NO: 316646
ccgcgggcuccgggauauu

SEQ ID NO: 324254 - RNA, 19 nt, Artificial Sequence
  Description of Artificial Sequence: Synthetic oligonucleotide
  Antisense Strand to SEQ ID NO: 324253
aauaucccggagcccgcgg

SEQ ID NO: 324255 - RNA, 19 nt, Artificial Sequence
  Description of Artificial Sequence: Synthetic oligonucleotide
  Sense Strand Starting at position 71 of SEQ ID NO: 316746
caaagaugacucgaguggu

SEQ ID NO: 324256 - RNA, 19 nt, Artificial Sequence
  Description of Artificial Sequence: Synthetic oligonucleotide
  Antisense Strand to SEQ ID NO: 324255
accacucgagucaucuuug

SEQ ID NO: 324257 - RNA, 19 nt, Artificial Sequence
  Description of Artificial Sequence: Synthetic oligonucleotide
  Sense Strand Starting at position 71 of SEQ ID NO: 316855
ugaccuuuccgagagcuga

SEQ ID NO: 324258 - RNA, 19 nt, Artificial Sequence
  Description of Artificial Sequence: Synthetic oligonucleotide
  Antisense Strand to SEQ ID NO: 324257
ucagcucucggaaagguca

SEQ ID NO: 324259 - RNA, 19 nt, Artificial Sequence
  Description of Artificial Sequence: Synthetic oligonucleotide
  Sense Strand Starting at position 71 of SEQ ID NO: 316927
ggcggguaaugcucggaca

SEQ ID NO: 324260 - RNA, 19 nt, Artificial Sequence
  Description of Artificial Sequence: Synthetic oligonucleotide
  Antisense Strand to SEQ ID NO: 324259
uguccgagcauuacccgcc

SEQ ID NO: 324261 - RNA, 19 nt, Artificial Sequence
  Description of Artificial Sequence: Synthetic oligonucleotide
  Sense Strand Starting at position 71 of SEQ ID NO: 316928
gcggguaaugcucggacaa

SEQ ID NO: 324262 - RNA, 19 nt, Artificial Sequence
  Description of Artificial Sequence: Synthetic oligonucleotide
  Antisense Strand to SEQ ID NO: 324261
uuguccgagcauuacccgc

SEQ ID NO: 324263 - RNA, 19 nt, Artificial Sequence
  Description of Artificial Sequence: Synthetic oligonucleotide
  Sense Strand Starting at position 71 of SEQ ID NO: 316929
cggguaaugcucggacaac

SEQ ID NO: 324264 - RNA, 19 nt, Artificial Sequence
  Description of Artificial Sequence: Synthetic oligonucleotide
  Antisense Strand to SEQ ID NO: 324263
guuguccgagcauuacccg

SEQ ID NO: 324265 - RNA, 19 nt, Artificial Sequence
  Description of Artificial Sequence: Synthetic oligonucleotide
  Sense Strand Starting at position 71 of SEQ ID NO: 317425
cagcgucucccgucgagau

SEQ ID NO: 324266 - RNA, 19 nt, Artificial Sequence
  Description of Artificial Sequence: Synthetic oligonucleotide
  Antisense Strand to SEQ ID NO: 324265
aucucgacgggagacgcug

SEQ ID NO: 324267 - RNA, 19 nt, Artificial Sequence
  Description of Artificial Sequence: Synthetic oligonucleotide
  Sense Strand Starting at position 71 of SEQ ID NO: 317481
cacuguuuguacuccggga

SEQ ID NO: 324268 - RNA, 19 nt, Artificial Sequence
  Description of Artificial Sequence: Synthetic oligonucleotide
  Antisense Strand to SEQ ID NO: 324267
ucccggaguacaaacagug

SEQ ID NO: 324269 - RNA, 19 nt, Artificial Sequence
  Description of Artificial Sequence: Synthetic oligonucleotide
  Sense Strand Starting at position 71 of SEQ ID NO: 317510
agaagacauccuggcguca

SEQ ID NO: 324270 - RNA, 19 nt, Artificial Sequence
  Description of Artificial Sequence: Synthetic oligonucleotide
  Antisense Strand to SEQ ID NO: 324269
ugacgccaggaugucuucu

SEQ ID NO: 324271 - RNA, 19 nt, Artificial Sequence
  Description of Artificial Sequence: Synthetic oligonucleotide
  Sense Strand Starting at position 71 of SEQ ID NO: 317531
ggagcagauaaccauuguu

SEQ ID NO: 324272 - RNA, 19 nt, Artificial Sequence
  Description of Artificial Sequence: Synthetic oligonucleotide
  Antisense Strand to SEQ ID NO: 324271
aacaaugguuaucugcucc

SEQ ID NO: 324273 - RNA, 19 nt, Artificial Sequence
  Description of Artificial Sequence: Synthetic oligonucleotide
  Sense Strand Starting at position 71 of SEQ ID NO: 317574
ggagcugggccgggaaauu

SEQ ID NO: 324274 - RNA, 19 nt, Artificial Sequence
  Description of Artificial Sequence: Synthetic oligonucleotide
  Antisense Strand to SEQ ID NO: 324273
aauuucccggcccagcucc

SEQ ID NO: 324275 - RNA, 19 nt, Artificial Sequence
  Description of Artificial Sequence: Synthetic oligonucleotide
  Sense Strand Starting at position 71 of SEQ ID NO: 317583
ccgggaaauucugccuaca

SEQ ID NO: 324276 - RNA, 19 nt, Artificial Sequence
  Description of Artificial Sequence: Synthetic oligonucleotide
  Antisense Strand to SEQ ID NO: 324275
uguaggcagaauuucccgg

SEQ ID NO: 324277 - RNA, 19 nt, Artificial Sequence
  Description of Artificial Sequence: Synthetic oligonucleotide
  Sense Strand Starting at position 71 of SEQ ID NO: 317585
gggaaauucugccuacacc

SEQ ID NO: 324278 - RNA, 19 nt, Artificial Sequence
  Description of Artificial Sequence: Synthetic oligonucleotide
  Antisense Strand to SEQ ID NO: 324277
gguguaggcagaauuuccc

SEQ ID NO: 324279 - RNA, 19 nt, Artificial Sequence
  Description of Artificial Sequence: Synthetic oligonucleotide
  Sense Strand Starting at position 71 of SEQ ID NO: 317697
acggucaccgugcaagauu

SEQ ID NO: 324280 - RNA, 19 nt, Artificial Sequence
  Description of Artificial Sequence: Synthetic oligonucleotide
  Antisense Strand to SEQ ID NO: 324279
aaucuugcacggugaccgu

SEQ ID NO: 324281 - RNA, 19 nt, Artificial Sequence
  Description of Artificial Sequence: Synthetic oligonucleotide
  Sense Strand Starting at position 71 of SEQ ID NO: 317756
aggaguugucaucaugacu

SEQ ID NO: 324282 - RNA, 19 nt, Artificial Sequence
  Description of Artificial Sequence: Synthetic oligonucleotide
  Antisense Strand to SEQ ID NO: 324281
agucaugaugacaacuccu

SEQ ID NO: 324283 - RNA, 19 nt, Artificial Sequence
  Description of Artificial Sequence: Synthetic oligonucleotide
  Sense Strand Starting at position 71 of SEQ ID NO: 317789
gggaccgguugucaaauga

SEQ ID NO: 324284 - RNA, 19 nt, Artificial Sequence
  Description of Artificial Sequence: Synthetic oligonucleotide
  Antisense Strand to SEQ ID NO: 324283
ucauuugacaaccgguccc

SEQ ID NO: 324285 - RNA, 19 nt, Artificial Sequence
  Description of Artificial Sequence: Synthetic oligonucleotide
  Sense Strand Starting at position 71 of SEQ ID NO: 317793
ccgguugucaaaugaugug

SEQ ID NO: 324286 - RNA, 19 nt, Artificial Sequence
  Description of Artificial Sequence: Synthetic oligonucleotide
  Antisense Strand to SEQ ID NO: 324285
cacaucauuugacaaccgg

SEQ ID NO: 324287 - RNA, 19 nt, Artificial Sequence
  Description of Artificial Sequence: Synthetic oligonucleotide
  Sense Strand Starting at position 71 of SEQ ID NO: 317818
gacggaggcucacucagau

SEQ ID NO: 324288 - RNA, 19 nt, Artificial Sequence
  Description of Artificial Sequence: Synthetic oligonucleotide
  Antisense Strand to SEQ ID NO: 324287
aucugagugagccuccguc

SEQ ID NO: 324289 - RNA, 19 nt, Artificial Sequence
  Description of Artificial Sequence: Synthetic oligonucleotide
  Sense Strand Starting at position 71 of SEQ ID NO: 317864
guaugaagccgcugauguu

SEQ ID NO: 324290 - RNA, 19 nt, Artificial Sequence
  Description of Artificial Sequence: Synthetic oligonucleotide
  Antisense Strand to SEQ ID NO: 324289
aacaucagcggcuucauac

SEQ ID NO: 324291 - RNA, 19 nt, Artificial Sequence
  Description of Artificial Sequence: Synthetic oligonucleotide
  Sense Strand Starting at position 71 of SEQ ID NO: 317898
ugugcaauuccauagacaa

SEQ ID NO: 324292 - RNA, 19 nt, Artificial Sequence
  Description of Artificial Sequence: Synthetic oligonucleotide
  Antisense Strand to SEQ ID NO: 324291
uugucuauggaauugcaca

SEQ ID NO: 324293 - RNA, 19 nt, Artificial Sequence
  Description of Artificial Sequence: Synthetic oligonucleotide
  Sense Strand Starting at position 71 of SEQ ID NO: 317940
acuggagucgcguauauac

SEQ ID NO: 324294 - RNA, 19 nt, Artificial Sequence
  Description of Artificial Sequence: Synthetic oligonucleotide
  Antisense Strand to SEQ ID NO: 324293
guauauacgcgacuccagu

SEQ ID NO: 324295 - RNA, 19 nt, Artificial Sequence
  Description of Artificial Sequence: Synthetic oligonucleotide
  Sense Strand Starting at position 71 of SEQ ID NO: 317942
uggagucgcguauauacau

SEQ ID NO: 324296 - RNA, 19 nt, Artificial Sequence
  Description of Artificial Sequence: Synthetic oligonucleotide
  Antisense Strand to SEQ ID NO: 324295
auguauauacgcgacucca

SEQ ID NO: 324297 - RNA, 19 nt, Artificial Sequence
  Description of Artificial Sequence: Synthetic oligonucleotide
  Sense Strand Starting at position 71 of SEQ ID NO: 318382
ccaagaauuugauguagug

SEQ ID NO: 324298 - RNA, 19 nt, Artificial Sequence
  Description of Artificial Sequence: Synthetic oligonucleotide
  Antisense Strand to SEQ ID NO: 324297
cacuacaucaaauucuugg

SEQ ID NO: 324299 - RNA, 19 nt, Artificial Sequence
  Description of Artificial Sequence: Synthetic oligonucleotide
  Sense Strand Starting at position 71 of SEQ ID NO: 318488
gugauauaggaucgcuuga

SEQ ID NO: 324300 - RNA, 19 nt, Artificial Sequence
  Description of Artificial Sequence: Synthetic oligonucleotide
  Antisense Strand to SEQ ID NO: 324299
ucaagcgauccuauaucac

SEQ ID NO: 324301 - RNA, 19 nt, Artificial Sequence
  Description of Artificial Sequence: Synthetic oligonucleotide
  Sense Strand Starting at position 71 of SEQ ID NO: 318550
caguccagcaucggugaua

SEQ ID NO: 324302 - RNA, 19 nt, Artificial Sequence
  Description of Artificial Sequence: Synthetic oligonucleotide
  Antisense Strand to SEQ ID NO: 324301
uaucaccgaugcuggacug

SEQ ID NO: 324303 - RNA, 19 nt, Artificial Sequence
  Description of Artificial Sequence: Synthetic oligonucleotide
  Sense Strand Starting at position 71 of SEQ ID NO: 318553
uccagcaucggugauagaa

SEQ ID NO: 324304 - RNA, 19 nt, Artificial Sequence
  Description of Artificial Sequence: Synthetic oligonucleotide
  Antisense Strand to SEQ ID NO: 324303
uucuaucaccgaugcugga

SEQ ID NO: 324305 - RNA, 19 nt, Artificial Sequence
  Description of Artificial Sequence: Synthetic oligonucleotide
  Sense Strand Starting at position 71 of SEQ ID NO: 318951
gguggacugcucugccuau

SEQ ID NO: 324306 - RNA, 19 nt, Artificial Sequence
  Description of Artificial Sequence: Synthetic oligonucleotide
  Antisense Strand to SEQ ID NO: 324305
auaggcagagcaguccacc

SEQ ID NO: 324307 - RNA, 19 nt, Artificial Sequence
  Description of Artificial Sequence: Synthetic oligonucleotide
  Sense Strand Starting at position 72 of SEQ ID NO: 315320
uacauuguaugguuuguua

SEQ ID NO: 324308 - RNA, 19 nt, Artificial Sequence
  Description of Artificial Sequence: Synthetic oligonucleotide
  Antisense Strand to SEQ ID NO: 324307
uaacaaaccauacaaugua

SEQ ID NO: 324309 - RNA, 19 nt, Artificial Sequence
  Description of Artificial Sequence: Synthetic oligonucleotide
  Sense Strand Starting at position 72 of SEQ ID NO: 315622
cagcacaggugucuuuauu

SEQ ID NO: 324310 - RNA, 19 nt, Artificial Sequence
  Description of Artificial Sequence: Synthetic oligonucleotide
  Antisense Strand to SEQ ID NO: 324309
aauaaagacaccugugcug

SEQ ID NO: 324311 - RNA, 19 nt, Artificial Sequence
  Description of Artificial Sequence: Synthetic oligonucleotide
  Sense Strand Starting at position 72 of SEQ ID NO: 315955
cugcacaggugucuugaau

SEQ ID NO: 324312 - RNA, 19 nt, Artificial Sequence
  Description of Artificial Sequence: Synthetic oligonucleotide
  Antisense Strand to SEQ ID NO: 324311
auucaagacaccugugcag

SEQ ID NO: 324313 - RNA, 19 nt, Artificial Sequence
  Description of Artificial Sequence: Synthetic oligonucleotide
  Sense Strand Starting at position 72 of SEQ ID NO: 315961
aggugucuugaauauguau

SEQ ID NO: 324314 - RNA, 19 nt, Artificial Sequence
  Description of Artificial Sequence: Synthetic oligonucleotide
  Antisense Strand to SEQ ID NO: 324313
auacauauucaagacaccu

SEQ ID NO: 324315 - RNA, 19 nt, Artificial Sequence
  Description of Artificial Sequence: Synthetic oligonucleotide
  Sense Strand Starting at position 72 of SEQ ID NO: 315963
gugucuugaauauguauau

SEQ ID NO: 324316 - RNA, 19 nt, Artificial Sequence
  Description of Artificial Sequence: Synthetic oligonucleotide
  Antisense Strand to SEQ ID NO: 324315
auauacauauucaagacac

SEQ ID NO: 324317 - RNA, 19 nt, Artificial Sequence
  Description of Artificial Sequence: Synthetic oligonucleotide
  Sense Strand Starting at position 72 of SEQ ID NO: 315987
acuccaguaugguuggaaa

SEQ ID NO: 324318 - RNA, 19 nt, Artificial Sequence
  Description of Artificial Sequence: Synthetic oligonucleotide
  Antisense Strand to SEQ ID NO: 324317
uuuccaaccauacuggagu

SEQ ID NO: 324319 - RNA, 19 nt, Artificial Sequence
  Description of Artificial Sequence: Synthetic oligonucleotide
  Sense Strand Starting at position 72 of SEQ ID NO: 315989
uccaguaugguuggaaaug

SEQ ID NO: 324320 - RNA, 19 nt, Artificial Sequence
  Description of Artificial Sequence: Synthetic oligonucleotide
  Antisense Strand to SEQ ID NO: 324319
cauuuccaaccauacugga

SEQ ID NO: 324321 - RNA, 19 nt, Artificial Sequence
  Description of Artificial Sequence: Synthetic oligonucleotide
  Sense Strand Starting at position 72 of SEQ ID NO: 316038
ccuggagccuuccuaacau

SEQ ID NO: 324322 - RNA, 19 nt, Artificial Sequence
  Description of Artificial Sequence: Synthetic oligonucleotide
  Antisense Strand to SEQ ID NO: 324321
auguuaggaaggcuccagg

SEQ ID NO: 324323 - RNA, 19 nt, Artificial Sequence
  Description of Artificial Sequence: Synthetic oligonucleotide
  Sense Strand Starting at position 72 of SEQ ID NO: 316089
gcagcaacaaucugaguga

SEQ ID NO: 324324 - RNA, 19 nt, Artificial Sequence
  Description of Artificial Sequence: Synthetic oligonucleotide
  Antisense Strand to SEQ ID NO: 324323
ucacucagauuguugcugc

SEQ ID NO: 324325 - RNA, 19 nt, Artificial Sequence
  Description of Artificial Sequence: Synthetic oligonucleotide
  Sense Strand Starting at position 72 of SEQ ID NO: 316093
caacaaucugagugagccu

SEQ ID NO: 324326 - RNA, 19 nt, Artificial Sequence
  Description of Artificial Sequence: Synthetic oligonucleotide
  Antisense Strand to SEQ ID NO: 324325
aggcucacucagauuguug

SEQ ID NO: 324327 - RNA, 19 nt, Artificial Sequence
  Description of Artificial Sequence: Synthetic oligonucleotide
  Sense Strand Starting at position 72 of SEQ ID NO: 316113
cgucucuagccacaucauu

SEQ ID NO: 324328 - RNA, 19 nt, Artificial Sequence
  Description of Artificial Sequence: Synthetic oligonucleotide
  Antisense Strand to SEQ ID NO: 324327
aaugauguggcuagagacg

SEQ ID NO: 324329 - RNA, 19 nt, Artificial Sequence
  Description of Artificial Sequence: Synthetic oligonucleotide
  Sense Strand Starting at position 72 of SEQ ID NO: 316368
ccagauagcggccgagaaa

SEQ ID NO: 324330 - RNA, 19 nt, Artificial Sequence
  Description of Artificial Sequence: Synthetic oligonucleotide
  Antisense Strand to SEQ ID NO: 324329
uuucucggccgcuaucugg

SEQ ID NO: 324331 - RNA, 19 nt, Artificial Sequence
  Description of Artificial Sequence: Synthetic oligonucleotide
  Sense Strand Starting at position 72 of SEQ ID NO: 316379
ccgagaaacaaugguuauc

SEQ ID NO: 324332 - RNA, 19 nt, Artificial Sequence
  Description of Artificial Sequence: Synthetic oligonucleotide
  Antisense Strand to SEQ ID NO: 324331
gauaaccauuguuucucgg

SEQ ID NO: 324333 - RNA, 19 nt, Artificial Sequence
  Description of Artificial Sequence: Synthetic oligonucleotide
  Sense Strand Starting at position 72 of SEQ ID NO: 316456
augagaagccggugagaaa

SEQ ID NO: 324334 - RNA, 19 nt, Artificial Sequence
  Description of Artificial Sequence: Synthetic oligonucleotide
  Antisense Strand to SEQ ID NO: 324333
uuucucaccggcuucucau

SEQ ID NO: 324335 - RNA, 19 nt, Artificial Sequence
  Description of Artificial Sequence: Synthetic oligonucleotide
  Sense Strand Starting at position 72 of SEQ ID NO: 316513
ggcgaauaguggcuccaga

SEQ ID NO: 324336 - RNA, 19 nt, Artificial Sequence
  Description of Artificial Sequence: Synthetic oligonucleotide
  Antisense Strand to SEQ ID NO: 324335
ucuggagccacuauucgcc

SEQ ID NO: 324337 - RNA, 19 nt, Artificial Sequence
  Description of Artificial Sequence: Synthetic oligonucleotide
  Sense Strand Starting at position 72 of SEQ ID NO: 316567
gggucagagcgcuaaguuu

SEQ ID NO: 324338 - RNA, 19 nt, Artificial Sequence
  Description of Artificial Sequence: Synthetic oligonucleotide
  Antisense Strand to SEQ ID NO: 324337
aaacuuagcgcucugaccc

SEQ ID NO: 324339 - RNA, 19 nt, Artificial Sequence
  Description of Artificial Sequence: Synthetic oligonucleotide
  Sense Strand Starting at position 72 of SEQ ID NO: 316984
cacguuguccgagcauuac

SEQ ID NO: 324340 - RNA, 19 nt, Artificial Sequence
  Description of Artificial Sequence: Synthetic oligonucleotide
  Antisense Strand to SEQ ID NO: 324339
guaaugcucggacaacgug

SEQ ID NO: 324341 - RNA, 19 nt, Artificial Sequence
  Description of Artificial Sequence: Synthetic oligonucleotide
  Sense Strand Starting at position 72 of SEQ ID NO: 317363
augacuucuccuuaguacu

SEQ ID NO: 324342 - RNA, 19 nt, Artificial Sequence
  Description of Artificial Sequence: Synthetic oligonucleotide
  Antisense Strand to SEQ ID NO: 324341
aguacuaaggagaagucau

SEQ ID NO: 324343 - RNA, 19 nt, Artificial Sequence
  Description of Artificial Sequence: Synthetic oligonucleotide
  Sense Strand Starting at position 72 of SEQ ID NO: 317399
auagaacuuucugucauag

SEQ ID NO: 324344 - RNA, 19 nt, Artificial Sequence
  Description of Artificial Sequence: Synthetic oligonucleotide
  Antisense Strand to SEQ ID NO: 324343
cuaugacagaaaguucuau

SEQ ID NO: 324345 - RNA, 19 nt, Artificial Sequence
  Description of Artificial Sequence: Synthetic oligonucleotide
  Sense Strand Starting at position 72 of SEQ ID NO: 317409
cugucauagcgacauguuc

SEQ ID NO: 324346 - RNA, 19 nt, Artificial Sequence
  Description of Artificial Sequence: Synthetic oligonucleotide
  Antisense Strand to SEQ ID NO: 324345
gaacaugucgcuaugacag

SEQ ID NO: 324347 - RNA, 19 nt, Artificial Sequence
  Description of Artificial Sequence: Synthetic oligonucleotide
  Sense Strand Starting at position 72 of SEQ ID NO: 317418
cgacauguucuuuaccuuu

SEQ ID NO: 324348 - RNA, 19 nt, Artificial Sequence
  Description of Artificial Sequence: Synthetic oligonucleotide
  Antisense Strand to SEQ ID NO: 324347
aaagguaaagaacaugucg

SEQ ID NO: 324349 - RNA, 19 nt, Artificial Sequence
  Description of Artificial Sequence: Synthetic oligonucleotide
  Sense Strand Starting at position 72 of SEQ ID NO: 317673
guuaguaaaugaccugaau

SEQ ID NO: 324350 - RNA, 19 nt, Artificial Sequence
  Description of Artificial Sequence: Synthetic oligonucleotide
  Antisense Strand to SEQ ID NO: 324349
auucaggucauuuacuaac

SEQ ID NO: 324351 - RNA, 19 nt, Artificial Sequence
  Description of Artificial Sequence: Synthetic oligonucleotide
  Sense Strand Starting at position 72 of SEQ ID NO: 317687
ugaauucagcgcuagugau

SEQ ID NO: 324352 - RNA, 19 nt, Artificial Sequence
  Description of Artificial Sequence: Synthetic oligonucleotide
  Antisense Strand to SEQ ID NO: 324351
aucacuagcgcugaauuca

SEQ ID NO: 324353 - RNA, 19 nt, Artificial Sequence
  Description of Artificial Sequence: Synthetic oligonucleotide
  Sense Strand Starting at position 72 of SEQ ID NO: 317694
agcgcuagugaucauaucu

SEQ ID NO: 324354 - RNA, 19 nt, Artificial Sequence
  Description of Artificial Sequence: Synthetic oligonucleotide
  Antisense Strand to SEQ ID NO: 324353
agauaugaucacuagcgcu

SEQ ID NO: 324355 - RNA, 19 nt, Artificial Sequence
  Description of Artificial Sequence: Synthetic oligonucleotide
  Sense Strand Starting at position 72 of SEQ ID NO: 317699
uagugaucauaucuggagu

SEQ ID NO: 324356 - RNA, 19 nt, Artificial Sequence
  Description of Artificial Sequence: Synthetic oligonucleotide
  Antisense Strand to SEQ ID NO: 324355
acuccagauaugaucacua

SEQ ID NO: 324357 - RNA, 19 nt, Artificial Sequence
  Description of Artificial Sequence: Synthetic oligonucleotide
  Sense Strand Starting at position 72 of SEQ ID NO: 317700
agugaucauaucuggagua

SEQ ID NO: 324358 - RNA, 19 nt, Artificial Sequence
  Description of Artificial Sequence: Synthetic oligonucleotide
  Antisense Strand to SEQ ID NO: 324357
uacuccagauaugaucacu

SEQ ID NO: 324359 - RNA, 19 nt, Artificial Sequence
  Description of Artificial Sequence: Synthetic oligonucleotide
  Sense Strand Starting at position 72 of SEQ ID NO: 317705
ucauaucuggaguaaacgu

SEQ ID NO: 324360 - RNA, 19 nt, Artificial Sequence
  Description of Artificial Sequence: Synthetic oligonucleotide
  Antisense Strand to SEQ ID NO: 324359
acguuuacuccagauauga

SEQ ID NO: 324361 - RNA, 19 nt, Artificial Sequence
  Description of Artificial Sequence: Synthetic oligonucleotide
  Sense Strand Starting at position 72 of SEQ ID NO: 317770
ccaggaugguugguuguua

SEQ ID NO: 324362 - RNA, 19 nt, Artificial Sequence
  Description of Artificial Sequence: Synthetic oligonucleotide
  Antisense Strand to SEQ ID NO: 324361
uaacaaccaaccauccugg

SEQ ID NO: 324363 - RNA, 19 nt, Artificial Sequence
  Description of Artificial Sequence: Synthetic oligonucleotide
  Sense Strand Starting at position 72 of SEQ ID NO: 317804
ugacuuuggcucuggagga

SEQ ID NO: 324364 - RNA, 19 nt, Artificial Sequence
  Description of Artificial Sequence: Synthetic oligonucleotide
  Antisense Strand to SEQ ID NO: 324363
uccuccagagccaaaguca

SEQ ID NO: 324365 - RNA, 19 nt, Artificial Sequence
  Description of Artificial Sequence: Synthetic oligonucleotide
  Sense Strand Starting at position 72 of SEQ ID NO: 317808
uuuggcucuggaggaaauu

SEQ ID NO: 324366 - RNA, 19 nt, Artificial Sequence
  Description of Artificial Sequence: Synthetic oligonucleotide
  Antisense Strand to SEQ ID NO: 324365
aauuuccuccagagccaaa

SEQ ID NO: 324367 - RNA, 19 nt, Artificial Sequence
  Description of Artificial Sequence: Synthetic oligonucleotide
  Sense Strand Starting at position 72 of SEQ ID NO: 318012
guggauacgugaucuuaau

SEQ ID NO: 324368 - RNA, 19 nt, Artificial Sequence
  Description of Artificial Sequence: Synthetic oligonucleotide
  Antisense Strand to SEQ ID NO: 324367
auuaagaucacguauccac

SEQ ID NO: 324369 - RNA, 19 nt, Artificial Sequence
  Description of Artificial Sequence: Synthetic oligonucleotide
  Sense Strand Starting at position 72 of SEQ ID NO: 318023
aucuuaauagguugccuaa

SEQ ID NO: 324370 - RNA, 19 nt, Artificial Sequence
  Description of Artificial Sequence: Synthetic oligonucleotide
  Antisense Strand to SEQ ID NO: 324369
uuaggcaaccuauuaagau

SEQ ID NO: 324371 - RNA, 19 nt, Artificial Sequence
  Description of Artificial Sequence: Synthetic oligonucleotide
  Sense Strand Starting at position 72 of SEQ ID NO: 318172
ucaaguagaauucggauau

SEQ ID NO: 324372 - RNA, 19 nt, Artificial Sequence
  Description of Artificial Sequence: Synthetic oligonucleotide
  Antisense Strand to SEQ ID NO: 324371
auauccgaauucuacuuga

SEQ ID NO: 324373 - RNA, 19 nt, Artificial Sequence
  Description of Artificial Sequence: Synthetic oligonucleotide
  Sense Strand Starting at position 72 of SEQ ID NO: 318245
uuuaguaugaaauggaguu

SEQ ID NO: 324374 - RNA, 19 nt, Artificial Sequence
  Description of Artificial Sequence: Synthetic oligonucleotide
  Antisense Strand to SEQ ID NO: 324373
aacuccauuucauacuaaa

SEQ ID NO: 324375 - RNA, 19 nt, Artificial Sequence
  Description of Artificial Sequence: Synthetic oligonucleotide
  Sense Strand Starting at position 72 of SEQ ID NO: 318309
auauuugguuggugagaag

SEQ ID NO: 324376 - RNA, 19 nt, Artificial Sequence
  Description of Artificial Sequence: Synthetic oligonucleotide
  Antisense Strand to SEQ ID NO: 324375
cuucucaccaaccaaauau

SEQ ID NO: 324377 - RNA, 19 nt, Artificial Sequence
  Description of Artificial Sequence: Synthetic oligonucleotide
  Sense Strand Starting at position 72 of SEQ ID NO: 318320
gugagaagccugugagcaa

SEQ ID NO: 324378 - RNA, 19 nt, Artificial Sequence
  Description of Artificial Sequence: Synthetic oligonucleotide
  Antisense Strand to SEQ ID NO: 324377
uugcucacaggcuucucac

SEQ ID NO: 324379 - RNA, 19 nt, Artificial Sequence
  Description of Artificial Sequence: Synthetic oligonucleotide
  Sense Strand Starting at position 72 of SEQ ID NO: 318533
cugcaaucuccuggacuca

SEQ ID NO: 324380 - RNA, 19 nt, Artificial Sequence
  Description of Artificial Sequence: Synthetic oligonucleotide
  Antisense Strand to SEQ ID NO: 324379
ugaguccaggagauugcag

SEQ ID NO: 324381 - RNA, 19 nt, Artificial Sequence
  Description of Artificial Sequence: Synthetic oligonucleotide
  Sense Strand Starting at position 72 of SEQ ID NO: 318534
ugcaaucuccuggacucaa

SEQ ID NO: 324382 - RNA, 19 nt, Artificial Sequence
  Description of Artificial Sequence: Synthetic oligonucleotide
  Antisense Strand to SEQ ID NO: 324381
uugaguccaggagauugca

SEQ ID NO: 324383 - RNA, 19 nt, Artificial Sequence
  Description of Artificial Sequence: Synthetic oligonucleotide
  Sense Strand Starting at position 72 of SEQ ID NO: 318781
ggaacaagaucagcacuuu

SEQ ID NO: 324384 - RNA, 19 nt, Artificial Sequence
  Description of Artificial Sequence: Synthetic oligonucleotide
  Antisense Strand to SEQ ID NO: 324383
aaagugcugaucuuguucc

SEQ ID NO: 324385 - RNA, 19 nt, Artificial Sequence
  Description of Artificial Sequence: Synthetic oligonucleotide
  Sense Strand Starting at position 72 of SEQ ID NO: 319112
caaguagaauuuggguauu

SEQ ID NO: 324386 - RNA, 19 nt, Artificial Sequence
  Description of Artificial Sequence: Synthetic oligonucleotide
  Antisense Strand to SEQ ID NO: 324385
aauacccaaauucuacuug

SEQ ID NO: 324387 - RNA, 19 nt, Artificial Sequence
  Description of Artificial Sequence: Synthetic oligonucleotide
  Sense Strand Starting at position 73 of SEQ ID NO: 315389
ccucaagucuuaguagaua

SEQ ID NO: 324388 - RNA, 19 nt, Artificial Sequence
  Description of Artificial Sequence: Synthetic oligonucleotide
  Antisense Strand to SEQ ID NO: 324387
uaucuacuaagacuugagg

SEQ ID NO: 324389 - RNA, 19 nt, Artificial Sequence
  Description of Artificial Sequence: Synthetic oligonucleotide
  Sense Strand Starting at position 73 of SEQ ID NO: 315400
aguagauacugugaaauua

SEQ ID NO: 324390 - RNA, 19 nt, Artificial Sequence
  Description of Artificial Sequence: Synthetic oligonucleotide
  Antisense Strand to SEQ ID NO: 324389
uaauuucacaguaucuacu

SEQ ID NO: 324391 - RNA, 19 nt, Artificial Sequence
  Description of Artificial Sequence: Synthetic oligonucleotide
  Sense Strand Starting at position 73 of SEQ ID NO: 315905
ucuguuauaauguguaagu

SEQ ID NO: 324392 - RNA, 19 nt, Artificial Sequence
  Description of Artificial Sequence: Synthetic oligonucleotide
  Antisense Strand to SEQ ID NO: 324391
acuuacacauuauaacaga

SEQ ID NO: 324393 - RNA, 19 nt, Artificial Sequence
  Description of Artificial Sequence: Synthetic oligonucleotide
  Sense Strand Starting at position 73 of SEQ ID NO: 315906
cuguuauaauguguaagug

SEQ ID NO: 324394 - RNA, 19 nt, Artificial Sequence
  Description of Artificial Sequence: Synthetic oligonucleotide
  Antisense Strand to SEQ ID NO: 324393
cacuuacacauuauaacag

SEQ ID NO: 324395 - RNA, 19 nt, Artificial Sequence
  Description of Artificial Sequence: Synthetic oligonucleotide
  Sense Strand Starting at position 73 of SEQ ID NO: 315907
uguuauaauguguaagugu

SEQ ID NO: 324396 - RNA, 19 nt, Artificial Sequence
  Description of Artificial Sequence: Synthetic oligonucleotide
  Antisense Strand to SEQ ID NO: 324395
acacuuacacauuauaaca

SEQ ID NO: 324397 - RNA, 19 nt, Artificial Sequence
  Description of Artificial Sequence: Synthetic oligonucleotide
  Sense Strand Starting at position 73 of SEQ ID NO: 316052
augugaagucaacauuauu

SEQ ID NO: 324398 - RNA, 19 nt, Artificial Sequence
  Description of Artificial Sequence: Synthetic oligonucleotide
  Antisense Strand to SEQ ID NO: 324397
aauaauguugacuucacau

SEQ ID NO: 324399 - RNA, 19 nt, Artificial Sequence
  Description of Artificial Sequence: Synthetic oligonucleotide
  Sense Strand Starting at position 73 of SEQ ID NO: 316283
uuuacuagagaccguauaa

SEQ ID NO: 324400 - RNA, 19 nt, Artificial Sequence
  Description of Artificial Sequence: Synthetic oligonucleotide
  Antisense Strand to SEQ ID NO: 324399
uuauacggucucuaguaaa

SEQ ID NO: 324401 - RNA, 19 nt, Artificial Sequence
  Description of Artificial Sequence: Synthetic oligonucleotide
  Sense Strand Starting at position 73 of SEQ ID NO: 316369
agcagaguauuaucacucu

SEQ ID NO: 324402 - RNA, 19 nt, Artificial Sequence
  Description of Artificial Sequence: Synthetic oligonucleotide
  Antisense Strand to SEQ ID NO: 324401
agagugauaauacucugcu

SEQ ID NO: 324403 - RNA, 19 nt, Artificial Sequence
  Description of Artificial Sequence: Synthetic oligonucleotide
  Sense Strand Starting at position 73 of SEQ ID NO: 316372
agaguauuaucacucucau

SEQ ID NO: 324404 - RNA, 19 nt, Artificial Sequence
  Description of Artificial Sequence: Synthetic oligonucleotide
  Antisense Strand to SEQ ID NO: 324403
augagagugauaauacucu

SEQ ID NO: 324405 - RNA, 19 nt, Artificial Sequence
  Description of Artificial Sequence: Synthetic oligonucleotide
  Sense Strand Starting at position 73 of SEQ ID NO: 316420
gguugagucauguaauuau

SEQ ID NO: 324406 - RNA, 19 nt, Artificial Sequence
  Description of Artificial Sequence: Synthetic oligonucleotide
  Antisense Strand to SEQ ID NO: 324405
auaauuacaugacucaacc

SEQ ID NO: 324407 - RNA, 19 nt, Artificial Sequence
  Description of Artificial Sequence: Synthetic oligonucleotide
  Sense Strand Starting at position 73 of SEQ ID NO: 316431
guaauuauuaaguagugga

SEQ ID NO: 324408 - RNA, 19 nt, Artificial Sequence
  Description of Artificial Sequence: Synthetic oligonucleotide
  Antisense Strand to SEQ ID NO: 324407
uccacuacuuaauaauuac

SEQ ID NO: 324409 - RNA, 19 nt, Artificial Sequence
  Description of Artificial Sequence: Synthetic oligonucleotide
  Sense Strand Starting at position 73 of SEQ ID NO: 316488
ggaggugugacuuggaaug

SEQ ID NO: 324410 - RNA, 19 nt, Artificial Sequence
  Description of Artificial Sequence: Synthetic oligonucleotide
  Antisense Strand to SEQ ID NO: 324409
cauuccaagucacaccucc

SEQ ID NO: 324411 - RNA, 19 nt, Artificial Sequence
  Description of Artificial Sequence: Synthetic oligonucleotide
  Sense Strand Starting at position 73 of SEQ ID NO: 316490
aggugugacuuggaaugga

SEQ ID NO: 324412 - RNA, 19 nt, Artificial Sequence
  Description of Artificial Sequence: Synthetic oligonucleotide
  Antisense Strand to SEQ ID NO: 324411
uccauuccaagucacaccu

SEQ ID NO: 324413 - RNA, 19 nt, Artificial Sequence
  Description of Artificial Sequence: Synthetic oligonucleotide
  Sense Strand Starting at position 73 of SEQ ID NO: 316504
auggaaugugcggauauua

SEQ ID NO: 324414 - RNA, 19 nt, Artificial Sequence
  Description of Artificial Sequence: Synthetic oligonucleotide
  Antisense Strand to SEQ ID NO: 324413
uaauauccgcacauuccau

SEQ ID NO: 324415 - RNA, 19 nt, Artificial Sequence
  Description of Artificial Sequence: Synthetic oligonucleotide
  Sense Strand Starting at position 73 of SEQ ID NO: 316683
aacgguaagcauugucaau

SEQ ID NO: 324416 - RNA, 19 nt, Artificial Sequence
  Description of Artificial Sequence: Synthetic oligonucleotide
  Antisense Strand to SEQ ID NO: 324415
auugacaaugcuuaccguu

SEQ ID NO: 324417 - RNA, 19 nt, Artificial Sequence
  Description of Artificial Sequence: Synthetic oligonucleotide
  Sense Strand Starting at position 73 of SEQ ID NO: 317325
cucugaguggcugaagagu

SEQ ID NO: 324418 - RNA, 19 nt, Artificial Sequence
  Description of Artificial Sequence: Synthetic oligonucleotide
  Antisense Strand to SEQ ID NO: 324417
acucuucagccacucagag

SEQ ID NO: 324419 - RNA, 19 nt, Artificial Sequence
  Description of Artificial Sequence: Synthetic oligonucleotide
  Sense Strand Starting at position 73 of SEQ ID NO: 317416
gagguagcucguucucgua

SEQ ID NO: 324420 - RNA, 19 nt, Artificial Sequence
  Description of Artificial Sequence: Synthetic oligonucleotide
  Antisense Strand to SEQ ID NO: 324419
uacgagaacgagcuaccuc

SEQ ID NO: 324421 - RNA, 19 nt, Artificial Sequence
  Description of Artificial Sequence: Synthetic oligonucleotide
  Sense Strand Starting at position 73 of SEQ ID NO: 317420
uagcucguucucguaacua

SEQ ID NO: 324422 - RNA, 19 nt, Artificial Sequence
  Description of Artificial Sequence: Synthetic oligonucleotide
  Antisense Strand to SEQ ID NO: 324421
uaguuacgagaacgagcua

SEQ ID NO: 324423 - RNA, 19 nt, Artificial Sequence
  Description of Artificial Sequence: Synthetic oligonucleotide
  Sense Strand Starting at position 73 of SEQ ID NO: 317454
cggagauaagcuggaggau

SEQ ID NO: 324424 - RNA, 19 nt, Artificial Sequence
  Description of Artificial Sequence: Synthetic oligonucleotide
  Antisense Strand to SEQ ID NO: 324423
auccuccagcuuaucuccg

SEQ ID NO: 324425 - RNA, 19 nt, Artificial Sequence
  Description of Artificial Sequence: Synthetic oligonucleotide
  Sense Strand Starting at position 73 of SEQ ID NO: 317474
cgggacaaaucuccagcaa

SEQ ID NO: 324426 - RNA, 19 nt, Artificial Sequence
  Description of Artificial Sequence: Synthetic oligonucleotide
  Antisense Strand to SEQ ID NO: 324425
uugcuggagauuugucccg

SEQ ID NO: 324427 - RNA, 19 nt, Artificial Sequence
  Description of Artificial Sequence: Synthetic oligonucleotide
  Sense Strand Starting at position 73 of SEQ ID NO: 317672
cuagaauucuggccgacuu

SEQ ID NO: 324428 - RNA, 19 nt, Artificial Sequence
  Description of Artificial Sequence: Synthetic oligonucleotide
  Antisense Strand to SEQ ID NO: 324427
aagucggccagaauucuag

SEQ ID NO: 324429 - RNA, 19 nt, Artificial Sequence
  Description of Artificial Sequence: Synthetic oligonucleotide
  Sense Strand Starting at position 73 of SEQ ID NO: 317673
uagaauucuggccgacuua

SEQ ID NO: 324430 - RNA, 19 nt, Artificial Sequence
  Description of Artificial Sequence: Synthetic oligonucleotide
  Antisense Strand to SEQ ID NO: 324429
uaagucggccagaauucua

SEQ ID NO: 324431 - RNA, 19 nt, Artificial Sequence
  Description of Artificial Sequence: Synthetic oligonucleotide
  Sense Strand Starting at position 73 of SEQ ID NO: 317749
gggaaauucgcuugcuaaa

SEQ ID NO: 324432 - RNA, 19 nt, Artificial Sequence
  Description of Artificial Sequence: Synthetic oligonucleotide
  Antisense Strand to SEQ ID NO: 324431
uuuagcaagcgaauuuccc

SEQ ID NO: 324433 - RNA, 19 nt, Artificial Sequence
  Description of Artificial Sequence: Synthetic oligonucleotide
  Sense Strand Starting at position 73 of SEQ ID NO: 317826
acauaugugaaacggaauu

SEQ ID NO: 324434 - RNA, 19 nt, Artificial Sequence
  Description of Artificial Sequence: Synthetic oligonucleotide
  Antisense Strand to SEQ ID NO: 324433
aauuccguuucacauaugu

SEQ ID NO: 324435 - RNA, 19 nt, Artificial Sequence
  Description of Artificial Sequence: Synthetic oligonucleotide
  Sense Strand Starting at position 73 of SEQ ID NO: 317832
gugaaacggaauuguauga

SEQ ID NO: 324436 - RNA, 19 nt, Artificial Sequence
  Description of Artificial Sequence: Synthetic oligonucleotide
  Antisense Strand to SEQ ID NO: 324435
ucauacaauuccguuucac

SEQ ID NO: 324437 - RNA, 19 nt, Artificial Sequence
  Description of Artificial Sequence: Synthetic oligonucleotide
  Sense Strand Starting at position 73 of SEQ ID NO: 317836
aacggaauuguaugauauu

SEQ ID NO: 324438 - RNA, 19 nt, Artificial Sequence
  Description of Artificial Sequence: Synthetic oligonucleotide
  Antisense Strand to SEQ ID NO: 324437
aauaucauacaauuccguu

SEQ ID NO: 324439 - RNA, 19 nt, Artificial Sequence
  Description of Artificial Sequence: Synthetic oligonucleotide
  Sense Strand Starting at position 73 of SEQ ID NO: 317837
acggaauuguaugauauuu

SEQ ID NO: 324440 - RNA, 19 nt, Artificial Sequence
  Description of Artificial Sequence: Synthetic oligonucleotide
  Antisense Strand to SEQ ID NO: 324439
aaauaucauacaauuccgu

SEQ ID NO: 324441 - RNA, 19 nt, Artificial Sequence
  Description of Artificial Sequence: Synthetic oligonucleotide
  Sense Strand Starting at position 73 of SEQ ID NO: 318331
acauaaauugcuggcuauu

SEQ ID NO: 324442 - RNA, 19 nt, Artificial Sequence
  Description of Artificial Sequence: Synthetic oligonucleotide
  Antisense Strand to SEQ ID NO: 324441
aauagccagcaauuuaugu

SEQ ID NO: 324443 - RNA, 19 nt, Artificial Sequence
  Description of Artificial Sequence: Synthetic oligonucleotide
  Sense Strand Starting at position 73 of SEQ ID NO: 318352
guaucugcaagaugaagau

SEQ ID NO: 324444 - RNA, 19 nt, Artificial Sequence
  Description of Artificial Sequence: Synthetic oligonucleotide
  Antisense Strand to SEQ ID NO: 324443
aucuucaucuugcagauac

SEQ ID NO: 324445 - RNA, 19 nt, Artificial Sequence
  Description of Artificial Sequence: Synthetic oligonucleotide
  Sense Strand Starting at position 73 of SEQ ID NO: 318359
caagaugaagauuguuauc

SEQ ID NO: 324446 - RNA, 19 nt, Artificial Sequence
  Description of Artificial Sequence: Synthetic oligonucleotide
  Antisense Strand to SEQ ID NO: 324445
gauaacaaucuucaucuug

SEQ ID NO: 324447 - RNA, 19 nt, Artificial Sequence
  Description of Artificial Sequence: Synthetic oligonucleotide
  Sense Strand Starting at position 73 of SEQ ID NO: 318361
agaugaagauuguuaucuc

SEQ ID NO: 324448 - RNA, 19 nt, Artificial Sequence
  Description of Artificial Sequence: Synthetic oligonucleotide
  Antisense Strand to SEQ ID NO: 324447
gagauaacaaucuucaucu

SEQ ID NO: 324449 - RNA, 19 nt, Artificial Sequence
  Description of Artificial Sequence: Synthetic oligonucleotide
  Sense Strand Starting at position 73 of SEQ ID NO: 318364
ugaagauuguuaucucuug

SEQ ID NO: 324450 - RNA, 19 nt, Artificial Sequence
  Description of Artificial Sequence: Synthetic oligonucleotide
  Antisense Strand to SEQ ID NO: 324449
caagagauaacaaucuuca

SEQ ID NO: 324451 - RNA, 19 nt, Artificial Sequence
  Description of Artificial Sequence: Synthetic oligonucleotide
  Sense Strand Starting at position 73 of SEQ ID NO: 318365
gaagauuguuaucucuuga

SEQ ID NO: 324452 - RNA, 19 nt, Artificial Sequence
  Description of Artificial Sequence: Synthetic oligonucleotide
  Antisense Strand to SEQ ID NO: 324451
ucaagagauaacaaucuuc

SEQ ID NO: 324453 - RNA, 19 nt, Artificial Sequence
  Description of Artificial Sequence: Synthetic oligonucleotide
  Sense Strand Starting at position 73 of SEQ ID NO: 318370
uuguuaucucuugacuguu

SEQ ID NO: 324454 - RNA, 19 nt, Artificial Sequence
  Description of Artificial Sequence: Synthetic oligonucleotide
  Antisense Strand to SEQ ID NO: 324453
aacagucaagagauaacaa

SEQ ID NO: 324455 - RNA, 19 nt, Artificial Sequence
  Description of Artificial Sequence: Synthetic oligonucleotide
  Sense Strand Starting at position 73 of SEQ ID NO: 318492
gcacaauauguagggaucu

SEQ ID NO: 324456 - RNA, 19 nt, Artificial Sequence
  Description of Artificial Sequence: Synthetic oligonucleotide
  Antisense Strand to SEQ ID NO: 324455
agaucccuacauauugugc

SEQ ID NO: 324457 - RNA, 19 nt, Artificial Sequence
  Description of Artificial Sequence: Synthetic oligonucleotide
  Sense Strand Starting at position 73 of SEQ ID NO: 318502
uagggaucuguguguccau

SEQ ID NO: 324458 - RNA, 19 nt, Artificial Sequence
  Description of Artificial Sequence: Synthetic oligonucleotide
  Antisense Strand to SEQ ID NO: 324457
auggacacacagaucccua

SEQ ID NO: 324459 - RNA, 19 nt, Artificial Sequence
  Description of Artificial Sequence: Synthetic oligonucleotide
  Sense Strand Starting at position 73 of SEQ ID NO: 318503
agggaucuguguguccauu

SEQ ID NO: 324460 - RNA, 19 nt, Artificial Sequence
  Description of Artificial Sequence: Synthetic oligonucleotide
  Antisense Strand to SEQ ID NO: 324459
aauggacacacagaucccu

SEQ ID NO: 324461 - RNA, 19 nt, Artificial Sequence
  Description of Artificial Sequence: Synthetic oligonucleotide
  Sense Strand Starting at position 73 of SEQ ID NO: 318575
ugagaaucccaguguauuc

SEQ ID NO: 324462 - RNA, 19 nt, Artificial Sequence
  Description of Artificial Sequence: Synthetic oligonucleotide
  Antisense Strand to SEQ ID NO: 324461
gaauacacugggauucuca

SEQ ID NO: 324463 - RNA, 19 nt, Artificial Sequence
  Description of Artificial Sequence: Synthetic oligonucleotide
  Sense Strand Starting at position 73 of SEQ ID NO: 318609
auuugagacuaagauacau

SEQ ID NO: 324464 - RNA, 19 nt, Artificial Sequence
  Description of Artificial Sequence: Synthetic oligonucleotide
  Antisense Strand to SEQ ID NO: 324463
auguaucuuagucucaaau

SEQ ID NO: 324465 - RNA, 19 nt, Artificial Sequence
  Description of Artificial Sequence: Synthetic oligonucleotide
  Sense Strand Starting at position 73 of SEQ ID NO: 318643
gucucuguccuuuacuaaa

SEQ ID NO: 324466 - RNA, 19 nt, Artificial Sequence
  Description of Artificial Sequence: Synthetic oligonucleotide
  Antisense Strand to SEQ ID NO: 324465
uuuaguaaaggacagagac

SEQ ID NO: 324467 - RNA, 19 nt, Artificial Sequence
  Description of Artificial Sequence: Synthetic oligonucleotide
  Sense Strand Starting at position 74 of SEQ ID NO: 315264
ccaaaugagccuuguugga

SEQ ID NO: 324468 - RNA, 19 nt, Artificial Sequence
  Description of Artificial Sequence: Synthetic oligonucleotide
  Antisense Strand to SEQ ID NO: 324467
uccaacaaggcucauuugg

SEQ ID NO: 324469 - RNA, 19 nt, Artificial Sequence
  Description of Artificial Sequence: Synthetic oligonucleotide
  Sense Strand Starting at position 74 of SEQ ID NO: 315266
aaaugagccuuguuggaag

SEQ ID NO: 324470 - RNA, 19 nt, Artificial Sequence
  Description of Artificial Sequence: Synthetic oligonucleotide
  Antisense Strand to SEQ ID NO: 324469
cuuccaacaaggcucauuu

SEQ ID NO: 324471 - RNA, 19 nt, Artificial Sequence
  Description of Artificial Sequence: Synthetic oligonucleotide
  Sense Strand Starting at position 74 of SEQ ID NO: 315399
guccaaugccucuggaaag

SEQ ID NO: 324472 - RNA, 19 nt, Artificial Sequence
  Description of Artificial Sequence: Synthetic oligonucleotide
  Antisense Strand to SEQ ID NO: 324471
cuuuccagaggcauuggac

SEQ ID NO: 324473 - RNA, 19 nt, Artificial Sequence
  Description of Artificial Sequence: Synthetic oligonucleotide
  Sense Strand Starting at position 74 of SEQ ID NO: 315410
cuggaaaguuuccuaguga

SEQ ID NO: 324474 - RNA, 19 nt, Artificial Sequence
  Description of Artificial Sequence: Synthetic oligonucleotide
  Antisense Strand to SEQ ID NO: 324473
ucacuaggaaacuuuccag

SEQ ID NO: 324475 - RNA, 19 nt, Artificial Sequence
  Description of Artificial Sequence: Synthetic oligonucleotide
  Sense Strand Starting at position 74 of SEQ ID NO: 315418
uuuccuagugaugguaacu

SEQ ID NO: 324476 - RNA, 19 nt, Artificial Sequence
  Description of Artificial Sequence: Synthetic oligonucleotide
  Antisense Strand to SEQ ID NO: 324475
aguuaccaucacuaggaaa

SEQ ID NO: 324477 - RNA, 19 nt, Artificial Sequence
  Description of Artificial Sequence: Synthetic oligonucleotide
  Sense Strand Starting at position 74 of SEQ ID NO: 315430
gguaacuuccagugacuaa

SEQ ID NO: 324478 - RNA, 19 nt, Artificial Sequence
  Description of Artificial Sequence: Synthetic oligonucleotide
  Antisense Strand to SEQ ID NO: 324477
uuagucacuggaaguuacc

SEQ ID NO: 324479 - RNA, 19 nt, Artificial Sequence
  Description of Artificial Sequence: Synthetic oligonucleotide
  Sense Strand Starting at position 74 of SEQ ID NO: 315441
gugacuaaccuguaccuuu

SEQ ID NO: 324480 - RNA, 19 nt, Artificial Sequence
  Description of Artificial Sequence: Synthetic oligonucleotide
  Antisense Strand to SEQ ID NO: 324479
aaagguacagguuagucac

SEQ ID NO: 324481 - RNA, 19 nt, Artificial Sequence
  Description of Artificial Sequence: Synthetic oligonucleotide
  Sense Strand Starting at position 74 of SEQ ID NO: 315611
aauuguaggucucugagag

SEQ ID NO: 324482 - RNA, 19 nt, Artificial Sequence
  Description of Artificial Sequence: Synthetic oligonucleotide
  Antisense Strand to SEQ ID NO: 324481
cucucagagaccuacaauu

SEQ ID NO: 324483 - RNA, 19 nt, Artificial Sequence
  Description of Artificial Sequence: Synthetic oligonucleotide
  Sense Strand Starting at position 74 of SEQ ID NO: 315648
ccuguuugaucaguacaau

SEQ ID NO: 324484 - RNA, 19 nt, Artificial Sequence
  Description of Artificial Sequence: Synthetic oligonucleotide
  Antisense Strand to SEQ ID NO: 324483
auuguacugaucaaacagg

SEQ ID NO: 324485 - RNA, 19 nt, Artificial Sequence
  Description of Artificial Sequence: Synthetic oligonucleotide
  Sense Strand Starting at position 74 of SEQ ID NO: 315649
cuguuugaucaguacaaug

SEQ ID NO: 324486 - RNA, 19 nt, Artificial Sequence
  Description of Artificial Sequence: Synthetic oligonucleotide
  Antisense Strand to SEQ ID NO: 324485
cauuguacugaucaaacag

SEQ ID NO: 324487 - RNA, 19 nt, Artificial Sequence
  Description of Artificial Sequence: Synthetic oligonucleotide
  Sense Strand Starting at position 74 of SEQ ID NO: 315702
gcugaauuccaaggaagca

SEQ ID NO: 324488 - RNA, 19 nt, Artificial Sequence
  Description of Artificial Sequence: Synthetic oligonucleotide
  Antisense Strand to SEQ ID NO: 324487
ugcuuccuuggaauucagc

SEQ ID NO: 324489 - RNA, 19 nt, Artificial Sequence
  Description of Artificial Sequence: Synthetic oligonucleotide
  Sense Strand Starting at position 74 of SEQ ID NO: 315729
ggcuguagccuagagcuaa

SEQ ID NO: 324490 - RNA, 19 nt, Artificial Sequence
  Description of Artificial Sequence: Synthetic oligonucleotide
  Antisense Strand to SEQ ID NO: 324489
uuagcucuaggcuacagcc

SEQ ID NO: 324491 - RNA, 19 nt, Artificial Sequence
  Description of Artificial Sequence: Synthetic oligonucleotide
  Sense Strand Starting at position 74 of SEQ ID NO: 315941
agcuuuauuuagggaauaa

SEQ ID NO: 324492 - RNA, 19 nt, Artificial Sequence
  Description of Artificial Sequence: Synthetic oligonucleotide
  Antisense Strand to SEQ ID NO: 324491
uuauucccuaaauaaagcu

SEQ ID NO: 324493 - RNA, 19 nt, Artificial Sequence
  Description of Artificial Sequence: Synthetic oligonucleotide
  Sense Strand Starting at position 74 of SEQ ID NO: 317230
gcuuaucaacuugauuaug

SEQ ID NO: 324494 - RNA, 19 nt, Artificial Sequence
  Description of Artificial Sequence: Synthetic oligonucleotide
  Antisense Strand to SEQ ID NO: 324493
cauaaucaaguugauaagc

SEQ ID NO: 324495 - RNA, 19 nt, Artificial Sequence
  Description of Artificial Sequence: Synthetic oligonucleotide
  Sense Strand Starting at position 74 of SEQ ID NO: 317238
acuugauuaugggcaaaca

SEQ ID NO: 324496 - RNA, 19 nt, Artificial Sequence
  Description of Artificial Sequence: Synthetic oligonucleotide
  Antisense Strand to SEQ ID NO: 324495
uguuugcccauaaucaagu

SEQ ID NO: 324497 - RNA, 19 nt, Artificial Sequence
  Description of Artificial Sequence: Synthetic oligonucleotide
  Sense Strand Starting at position 74 of SEQ ID NO: 317282
uccugagggaucuguggua

SEQ ID NO: 324498 - RNA, 19 nt, Artificial Sequence
  Description of Artificial Sequence: Synthetic oligonucleotide
  Antisense Strand to SEQ ID NO: 324497
uaccacagaucccucagga

SEQ ID NO: 324499 - RNA, 19 nt, Artificial Sequence
  Description of Artificial Sequence: Synthetic oligonucleotide
  Sense Strand Starting at position 74 of SEQ ID NO: 317289
ggaucugugguaugaguaa

SEQ ID NO: 324500 - RNA, 19 nt, Artificial Sequence
  Description of Artificial Sequence: Synthetic oligonucleotide
  Antisense Strand to SEQ ID NO: 324499
uuacucauaccacagaucc

SEQ ID NO: 324501 - RNA, 19 nt, Artificial Sequence
  Description of Artificial Sequence: Synthetic oligonucleotide
  Sense Strand Starting at position 74 of SEQ ID NO: 317335
ggaaauucucugugaauga

SEQ ID NO: 324502 - RNA, 19 nt, Artificial Sequence
  Description of Artificial Sequence: Synthetic oligonucleotide
  Antisense Strand to SEQ ID NO: 324501
ucauucacagagaauuucc

SEQ ID NO: 324503 - RNA, 19 nt, Artificial Sequence
  Description of Artificial Sequence: Synthetic oligonucleotide
  Sense Strand Starting at position 74 of SEQ ID NO: 317339
auucucugugaaugaguaa

SEQ ID NO: 324504 - RNA, 19 nt, Artificial Sequence
  Description of Artificial Sequence: Synthetic oligonucleotide
  Antisense Strand to SEQ ID NO: 324503
uuacucauucacagagaau

SEQ ID NO: 324505 - RNA, 19 nt, Artificial Sequence
  Description of Artificial Sequence: Synthetic oligonucleotide
  Sense Strand Starting at position 74 of SEQ ID NO: 317342
cucugugaaugaguaagau

SEQ ID NO: 324506 - RNA, 19 nt, Artificial Sequence
  Description of Artificial Sequence: Synthetic oligonucleotide
  Antisense Strand to SEQ ID NO: 324505
aucuuacucauucacagag

SEQ ID NO: 324507 - RNA, 19 nt, Artificial Sequence
  Description of Artificial Sequence: Synthetic oligonucleotide
  Sense Strand Starting at position 74 of SEQ ID NO: 317446
agaggagcaugguuuagua

SEQ ID NO: 324508 - RNA, 19 nt, Artificial Sequence
  Description of Artificial Sequence: Synthetic oligonucleotide
  Antisense Strand to SEQ ID NO: 324507
uacuaaaccaugcuccucu

SEQ ID NO: 324509 - RNA, 19 nt, Artificial Sequence
  Description of Artificial Sequence: Synthetic oligonucleotide
  Sense Strand Starting at position 74 of SEQ ID NO: 317456
gguuuaguagcagaauaaa

SEQ ID NO: 324510 - RNA, 19 nt, Artificial Sequence
  Description of Artificial Sequence: Synthetic oligonucleotide
  Antisense Strand to SEQ ID NO: 324509
uuuauucugcuacuaaacc

SEQ ID NO: 324511 - RNA, 19 nt, Artificial Sequence
  Description of Artificial Sequence: Synthetic oligonucleotide
  Sense Strand Starting at position 74 of SEQ ID NO: 317539
uguggaacuucucuaggua

SEQ ID NO: 324512 - RNA, 19 nt, Artificial Sequence
  Description of Artificial Sequence: Synthetic oligonucleotide
  Antisense Strand to SEQ ID NO: 324511
uaccuagagaaguuccaca

SEQ ID NO: 324513 - RNA, 19 nt, Artificial Sequence
  Description of Artificial Sequence: Synthetic oligonucleotide
  Sense Strand Starting at position 74 of SEQ ID NO: 317540
guggaacuucucuagguau

SEQ ID NO: 324514 - RNA, 19 nt, Artificial Sequence
  Description of Artificial Sequence: Synthetic oligonucleotide
  Antisense Strand to SEQ ID NO: 324513
auaccuagagaaguuccac

SEQ ID NO: 324515 - RNA, 19 nt, Artificial Sequence
  Description of Artificial Sequence: Synthetic oligonucleotide
  Sense Strand Starting at position 74 of SEQ ID NO: 317542
ggaacuucucuagguauuc

SEQ ID NO: 324516 - RNA, 19 nt, Artificial Sequence
  Description of Artificial Sequence: Synthetic oligonucleotide
  Antisense Strand to SEQ ID NO: 324515
gaauaccuagagaaguucc

SEQ ID NO: 324517 - RNA, 19 nt, Artificial Sequence
  Description of Artificial Sequence: Synthetic oligonucleotide
  Sense Strand Starting at position 74 of SEQ ID NO: 317592
gaaccaggcuucuuaaguu

SEQ ID NO: 324518 - RNA, 19 nt, Artificial Sequence
  Description of Artificial Sequence: Synthetic oligonucleotide
  Antisense Strand to SEQ ID NO: 324517
aacuuaagaagccugguuc

SEQ ID NO: 324519 - RNA, 19 nt, Artificial Sequence
  Description of Artificial Sequence: Synthetic oligonucleotide
  Sense Strand Starting at position 74 of SEQ ID NO: 317598
ggcuucuuaaguugugaag

SEQ ID NO: 324520 - RNA, 19 nt, Artificial Sequence
  Description of Artificial Sequence: Synthetic oligonucleotide
  Antisense Strand to SEQ ID NO: 324519
cuucacaacuuaagaagcc

SEQ ID NO: 324521 - RNA, 19 nt, Artificial Sequence
  Description of Artificial Sequence: Synthetic oligonucleotide
  Sense Strand Starting at position 74 of SEQ ID NO: 317665
ucagauuacucaguaggaa

SEQ ID NO: 324522 - RNA, 19 nt, Artificial Sequence
  Description of Artificial Sequence: Synthetic oligonucleotide
  Antisense Strand to SEQ ID NO: 324521
uuccuacugaguaaucuga

SEQ ID NO: 324523 - RNA, 19 nt, Artificial Sequence
  Description of Artificial Sequence: Synthetic oligonucleotide
  Sense Strand Starting at position 74 of SEQ ID NO: 317668
gauuacucaguaggaaacu

SEQ ID NO: 324524 - RNA, 19 nt, Artificial Sequence
  Description of Artificial Sequence: Synthetic oligonucleotide
  Antisense Strand to SEQ ID NO: 324523
aguuuccuacugaguaauc

SEQ ID NO: 324525 - RNA, 19 nt, Artificial Sequence
  Description of Artificial Sequence: Synthetic oligonucleotide
  Sense Strand Starting at position 74 of SEQ ID NO: 317802
gggaauuuauaacacgaac

SEQ ID NO: 324526 - RNA, 19 nt, Artificial Sequence
  Description of Artificial Sequence: Synthetic oligonucleotide
  Antisense Strand to SEQ ID NO: 324525
guucguguuauaaauuccc

SEQ ID NO: 324527 - RNA, 19 nt, Artificial Sequence
  Description of Artificial Sequence: Synthetic oligonucleotide
  Sense Strand Starting at position 74 of SEQ ID NO: 318268
aucaaagggucagaaauuu

SEQ ID NO: 324528 - RNA, 19 nt, Artificial Sequence
  Description of Artificial Sequence: Synthetic oligonucleotide
  Antisense Strand to SEQ ID NO: 324527
aaauuucugacccuuugau

SEQ ID NO: 324529 - RNA, 19 nt, Artificial Sequence
  Description of Artificial Sequence: Synthetic oligonucleotide
  Sense Strand Starting at position 74 of SEQ ID NO: 318366
ugcugaugcagaggagaua

SEQ ID NO: 324530 - RNA, 19 nt, Artificial Sequence
  Description of Artificial Sequence: Synthetic oligonucleotide
  Antisense Strand to SEQ ID NO: 324529
uaucuccucugcaucagca

SEQ ID NO: 324531 - RNA, 19 nt, Artificial Sequence
  Description of Artificial Sequence: Synthetic oligonucleotide
  Sense Strand Starting at position 74 of SEQ ID NO: 318528
agauguuuauucccaggca

SEQ ID NO: 324532 - RNA, 19 nt, Artificial Sequence
  Description of Artificial Sequence: Synthetic oligonucleotide
  Antisense Strand to SEQ ID NO: 324531
ugccugggaauaaacaucu

SEQ ID NO: 324533 - RNA, 19 nt, Artificial Sequence
  Description of Artificial Sequence: Synthetic oligonucleotide
  Sense Strand Starting at position 74 of SEQ ID NO: 318617
gggaguuucugaccauaau

SEQ ID NO: 324534 - RNA, 19 nt, Artificial Sequence
  Description of Artificial Sequence: Synthetic oligonucleotide
  Antisense Strand to SEQ ID NO: 324533
auuauggucagaaacuccc

SEQ ID NO: 324535 - RNA, 19 nt, Artificial Sequence
  Description of Artificial Sequence: Synthetic oligonucleotide
  Sense Strand Starting at position 74 of SEQ ID NO: 318635
ugccaaagucaacauguaa

SEQ ID NO: 324536 - RNA, 19 nt, Artificial Sequence
  Description of Artificial Sequence: Synthetic oligonucleotide
  Antisense Strand to SEQ ID NO: 324535
uuacauguugacuuuggca

SEQ ID NO: 324537 - RNA, 19 nt, Artificial Sequence
  Description of Artificial Sequence: Synthetic oligonucleotide
  Sense Strand Starting at position 74 of SEQ ID NO: 318908
agaaauggaugguauuaaa

SEQ ID NO: 324538 - RNA, 19 nt, Artificial Sequence
  Description of Artificial Sequence: Synthetic oligonucleotide
  Antisense Strand to SEQ ID NO: 324537
uuuaauaccauccauuucu

SEQ ID NO: 324539 - RNA, 19 nt, Artificial Sequence
  Description of Artificial Sequence: Synthetic oligonucleotide
  Sense Strand Starting at position 74 of SEQ ID NO: 318926
acagaccacucagagaaua

SEQ ID NO: 324540 - RNA, 19 nt, Artificial Sequence
  Description of Artificial Sequence: Synthetic oligonucleotide
  Antisense Strand to SEQ ID NO: 324539
uauucucugaguggucugu

SEQ ID NO: 324541 - RNA, 19 nt, Artificial Sequence
  Description of Artificial Sequence: Synthetic oligonucleotide
  Sense Strand Starting at position 74 of SEQ ID NO: 319114
aagucugauuuauaggacu

SEQ ID NO: 324542 - RNA, 19 nt, Artificial Sequence
  Description of Artificial Sequence: Synthetic oligonucleotide
  Antisense Strand to SEQ ID NO: 324541
aguccuauaaaucagacuu

SEQ ID NO: 324543 - RNA, 19 nt, Artificial Sequence
  Description of Artificial Sequence: Synthetic oligonucleotide
  Sense Strand Starting at position 74 of SEQ ID NO: 319117
ucugauuuauaggacuuau

SEQ ID NO: 324544 - RNA, 19 nt, Artificial Sequence
  Description of Artificial Sequence: Synthetic oligonucleotide
  Antisense Strand to SEQ ID NO: 324543
auaaguccuauaaaucaga

SEQ ID NO: 324545 - RNA, 19 nt, Artificial Sequence
  Description of Artificial Sequence: Synthetic oligonucleotide
  Sense Strand Starting at position 74 of SEQ ID NO: 319161
agaggaaauuaucaagaaa

SEQ ID NO: 324546 - RNA, 19 nt, Artificial Sequence
  Description of Artificial Sequence: Synthetic oligonucleotide
  Antisense Strand to SEQ ID NO: 324545
uuucuugauaauuuccucu

SEQ ID NO: 324547 - RNA, 19 nt, Artificial Sequence
  Description of Artificial Sequence: Synthetic oligonucleotide
  Sense Strand Starting at position 75 of SEQ ID NO: 315430
uucugaugucaugaagcaa

SEQ ID NO: 324548 - RNA, 19 nt, Artificial Sequence
  Description of Artificial Sequence: Synthetic oligonucleotide
  Antisense Strand to SEQ ID NO: 324547
uugcuucaugacaucagaa

SEQ ID NO: 324549 - RNA, 19 nt, Artificial Sequence
  Description of Artificial Sequence: Synthetic oligonucleotide
  Sense Strand Starting at position 75 of SEQ ID NO: 315615
uaaagcacugaguguuuaa

SEQ ID NO: 324550 - RNA, 19 nt, Artificial Sequence
  Description of Artificial Sequence: Synthetic oligonucleotide
  Antisense Strand to SEQ ID NO: 324549
uuaaacacucagugcuuua

SEQ ID NO: 324551 - RNA, 19 nt, Artificial Sequence
  Description of Artificial Sequence: Synthetic oligonucleotide
  Sense Strand Starting at position 75 of SEQ ID NO: 315974
cucugauagccaugauucu

SEQ ID NO: 324552 - RNA, 19 nt, Artificial Sequence
  Description of Artificial Sequence: Synthetic oligonucleotide
  Antisense Strand to SEQ ID NO: 324551
agaaucauggcuaucagag

SEQ ID NO: 324553 - RNA, 19 nt, Artificial Sequence
  Description of Artificial Sequence: Synthetic oligonucleotide
  Sense Strand Starting at position 75 of SEQ ID NO: 316122
gaauaaagccaguaguuuc

SEQ ID NO: 324554 - RNA, 19 nt, Artificial Sequence
  Description of Artificial Sequence: Synthetic oligonucleotide
  Antisense Strand to SEQ ID NO: 324553
gaaacuacuggcuuuauuc

SEQ ID NO: 324555 - RNA, 19 nt, Artificial Sequence
  Description of Artificial Sequence: Synthetic oligonucleotide
  Sense Strand Starting at position 75 of SEQ ID NO: 316247
uugguuauugucugacaga

SEQ ID NO: 324556 - RNA, 19 nt, Artificial Sequence
  Description of Artificial Sequence: Synthetic oligonucleotide
  Antisense Strand to SEQ ID NO: 324555
ucugucagacaauaaccaa

SEQ ID NO: 324557 - RNA, 19 nt, Artificial Sequence
  Description of Artificial Sequence: Synthetic oligonucleotide
  Sense Strand Starting at position 75 of SEQ ID NO: 316258
cugacagacuguuuccuaa

SEQ ID NO: 324558 - RNA, 19 nt, Artificial Sequence
  Description of Artificial Sequence: Synthetic oligonucleotide
  Antisense Strand to SEQ ID NO: 324557
uuaggaaacagucugucag

SEQ ID NO: 324559 - RNA, 19 nt, Artificial Sequence
  Description of Artificial Sequence: Synthetic oligonucleotide
  Sense Strand Starting at position 75 of SEQ ID NO: 316260
gacagacuguuuccuaaag

SEQ ID NO: 324560 - RNA, 19 nt, Artificial Sequence
  Description of Artificial Sequence: Synthetic oligonucleotide
  Antisense Strand to SEQ ID NO: 324559
cuuuaggaaacagucuguc

SEQ ID NO: 324561 - RNA, 19 nt, Artificial Sequence
  Description of Artificial Sequence: Synthetic oligonucleotide
  Sense Strand Starting at position 75 of SEQ ID NO: 316279
gauuacauauugccagaga

SEQ ID NO: 324562 - RNA, 19 nt, Artificial Sequence
  Description of Artificial Sequence: Synthetic oligonucleotide
  Antisense Strand to SEQ ID NO: 324561
ucucuggcaauauguaauc

SEQ ID NO: 324563 - RNA, 19 nt, Artificial Sequence
  Description of Artificial Sequence: Synthetic oligonucleotide
  Sense Strand Starting at position 75 of SEQ ID NO: 316282
uacauauugccagagaagu

SEQ ID NO: 324564 - RNA, 19 nt, Artificial Sequence
  Description of Artificial Sequence: Synthetic oligonucleotide
  Antisense Strand to SEQ ID NO: 324563
acuucucuggcaauaugua

SEQ ID NO: 324565 - RNA, 19 nt, Artificial Sequence
  Description of Artificial Sequence: Synthetic oligonucleotide
  Sense Strand Starting at position 75 of SEQ ID NO: 316310
uuaggauguuauccacagu

SEQ ID NO: 324566 - RNA, 19 nt, Artificial Sequence
  Description of Artificial Sequence: Synthetic oligonucleotide
  Antisense Strand to SEQ ID NO: 324565
acuguggauaacauccuaa

SEQ ID NO: 324567 - RNA, 19 nt, Artificial Sequence
  Description of Artificial Sequence: Synthetic oligonucleotide
  Sense Strand Starting at position 75 of SEQ ID NO: 316313
ggauguuauccacaguuaa

SEQ ID NO: 324568 - RNA, 19 nt, Artificial Sequence
  Description of Artificial Sequence: Synthetic oligonucleotide
  Antisense Strand to SEQ ID NO: 324567
uuaacuguggauaacaucc

SEQ ID NO: 324569 - RNA, 19 nt, Artificial Sequence
  Description of Artificial Sequence: Synthetic oligonucleotide
  Sense Strand Starting at position 75 of SEQ ID NO: 316382
cacgaaugauacuuaguaa

SEQ ID NO: 324570 - RNA, 19 nt, Artificial Sequence
  Description of Artificial Sequence: Synthetic oligonucleotide
  Antisense Strand to SEQ ID NO: 324569
uuacuaaguaucauucgug

SEQ ID NO: 324571 - RNA, 19 nt, Artificial Sequence
  Description of Artificial Sequence: Synthetic oligonucleotide
  Sense Strand Starting at position 75 of SEQ ID NO: 316393
cuuaguaaacucuguaaag

SEQ ID NO: 324572 - RNA, 19 nt, Artificial Sequence
  Description of Artificial Sequence: Synthetic oligonucleotide
  Antisense Strand to SEQ ID NO: 324571
cuuuacagaguuuacuaag

SEQ ID NO: 324573 - RNA, 19 nt, Artificial Sequence
  Description of Artificial Sequence: Synthetic oligonucleotide
  Sense Strand Starting at position 75 of SEQ ID NO: 316394
uuaguaaacucuguaaagu

SEQ ID NO: 324574 - RNA, 19 nt, Artificial Sequence
  Description of Artificial Sequence: Synthetic oligonucleotide
  Antisense Strand to SEQ ID NO: 324573
acuuuacagaguuuacuaa

SEQ ID NO: 324575 - RNA, 19 nt, Artificial Sequence
  Description of Artificial Sequence: Synthetic oligonucleotide
  Sense Strand Starting at position 75 of SEQ ID NO: 316395
uaguaaacucuguaaagug

SEQ ID NO: 324576 - RNA, 19 nt, Artificial Sequence
  Description of Artificial Sequence: Synthetic oligonucleotide
  Antisense Strand to SEQ ID NO: 324575
cacuuuacagaguuuacua

SEQ ID NO: 324577 - RNA, 19 nt, Artificial Sequence
  Description of Artificial Sequence: Synthetic oligonucleotide
  Sense Strand Starting at position 75 of SEQ ID NO: 316562
uaaguugagcauuguuaaa

SEQ ID NO: 324578 - RNA, 19 nt, Artificial Sequence
  Description of Artificial Sequence: Synthetic oligonucleotide
  Antisense Strand to SEQ ID NO: 324577
uuuaacaaugcucaacuua

SEQ ID NO: 324579 - RNA, 19 nt, Artificial Sequence
  Description of Artificial Sequence: Synthetic oligonucleotide
  Sense Strand Starting at position 75 of SEQ ID NO: 317420
gcaagaugugcgccggagu

SEQ ID NO: 324580 - RNA, 19 nt, Artificial Sequence
  Description of Artificial Sequence: Synthetic oligonucleotide
  Antisense Strand to SEQ ID NO: 324579
acuccggcgcacaucuugc

SEQ ID NO: 324581 - RNA, 19 nt, Artificial Sequence
  Description of Artificial Sequence: Synthetic oligonucleotide
  Sense Strand Starting at position 75 of SEQ ID NO: 317624
agagauuucuaccaggcau

SEQ ID NO: 324582 - RNA, 19 nt, Artificial Sequence
  Description of Artificial Sequence: Synthetic oligonucleotide
  Antisense Strand to SEQ ID NO: 324581
augccugguagaaaucucu

SEQ ID NO: 324583 - RNA, 19 nt, Artificial Sequence
  Description of Artificial Sequence: Synthetic oligonucleotide
  Sense Strand Starting at position 75 of SEQ ID NO: 317636
caggcauaaucuccuguga

SEQ ID NO: 324584 - RNA, 19 nt, Artificial Sequence
  Description of Artificial Sequence: Synthetic oligonucleotide
  Antisense Strand to SEQ ID NO: 324583
ucacaggagauuaugccug

SEQ ID NO: 324585 - RNA, 19 nt, Artificial Sequence
  Description of Artificial Sequence: Synthetic oligonucleotide
  Sense Strand Starting at position 75 of SEQ ID NO: 317640
cauaaucuccugugaguag

SEQ ID NO: 324586 - RNA, 19 nt, Artificial Sequence
  Description of Artificial Sequence: Synthetic oligonucleotide
  Antisense Strand to SEQ ID NO: 324585
cuacucacaggagauuaug

SEQ ID NO: 324587 - RNA, 19 nt, Artificial Sequence
  Description of Artificial Sequence: Synthetic oligonucleotide
  Sense Strand Starting at position 75 of SEQ ID NO: 317644
aucuccugugaguagauua

SEQ ID NO: 324588 - RNA, 19 nt, Artificial Sequence
  Description of Artificial Sequence: Synthetic oligonucleotide
  Antisense Strand to SEQ ID NO: 324587
uaaucuacucacaggagau

SEQ ID NO: 324589 - RNA, 19 nt, Artificial Sequence
  Description of Artificial Sequence: Synthetic oligonucleotide
  Sense Strand Starting at position 75 of SEQ ID NO: 317657
agauuacagucuccagaau

SEQ ID NO: 324590 - RNA, 19 nt, Artificial Sequence
  Description of Artificial Sequence: Synthetic oligonucleotide
  Antisense Strand to SEQ ID NO: 324589
auucuggagacuguaaucu

SEQ ID NO: 324591 - RNA, 19 nt, Artificial Sequence
  Description of Artificial Sequence: Synthetic oligonucleotide
  Sense Strand Starting at position 75 of SEQ ID NO: 317687
guggucaggaaagguauua

SEQ ID NO: 324592 - RNA, 19 nt, Artificial Sequence
  Description of Artificial Sequence: Synthetic oligonucleotide
  Antisense Strand to SEQ ID NO: 324591
uaauaccuuuccugaccac

SEQ ID NO: 324593 - RNA, 19 nt, Artificial Sequence
  Description of Artificial Sequence: Synthetic oligonucleotide
  Sense Strand Starting at position 75 of SEQ ID NO: 317698
agguauuaauagucaauac

SEQ ID NO: 324594 - RNA, 19 nt, Artificial Sequence
  Description of Artificial Sequence: Synthetic oligonucleotide
  Antisense Strand to SEQ ID NO: 324593
guauugacuauuaauaccu

SEQ ID NO: 324595 - RNA, 19 nt, Artificial Sequence
  Description of Artificial Sequence: Synthetic oligonucleotide
  Sense Strand Starting at position 75 of SEQ ID NO: 317962
uuugcauggguguaggauu

SEQ ID NO: 324596 - RNA, 19 nt, Artificial Sequence
  Description of Artificial Sequence: Synthetic oligonucleotide
  Antisense Strand to SEQ ID NO: 324595
aauccuacacccaugcaaa

SEQ ID NO: 324597 - RNA, 19 nt, Artificial Sequence
  Description of Artificial Sequence: Synthetic oligonucleotide
  Sense Strand Starting at position 75 of SEQ ID NO: 318144
acgguuguaagcgugugau

SEQ ID NO: 324598 - RNA, 19 nt, Artificial Sequence
  Description of Artificial Sequence: Synthetic oligonucleotide
  Antisense Strand to SEQ ID NO: 324597
aucacacgcuuacaaccgu

SEQ ID NO: 324599 - RNA, 19 nt, Artificial Sequence
  Description of Artificial Sequence: Synthetic oligonucleotide
  Sense Strand Starting at position 75 of SEQ ID NO: 318146
gguuguaagcgugugauua

SEQ ID NO: 324600 - RNA, 19 nt, Artificial Sequence
  Description of Artificial Sequence: Synthetic oligonucleotide
  Antisense Strand to SEQ ID NO: 324599
uaaucacacgcuuacaacc

SEQ ID NO: 324601 - RNA, 19 nt, Artificial Sequence
  Description of Artificial Sequence: Synthetic oligonucleotide
  Sense Strand Starting at position 75 of SEQ ID NO: 318250
uagugauucuuguugaaag

SEQ ID NO: 324602 - RNA, 19 nt, Artificial Sequence
  Description of Artificial Sequence: Synthetic oligonucleotide
  Antisense Strand to SEQ ID NO: 324601
cuuucaacaagaaucacua

SEQ ID NO: 324603 - RNA, 19 nt, Artificial Sequence
  Description of Artificial Sequence: Synthetic oligonucleotide
  Sense Strand Starting at position 75 of SEQ ID NO: 318252
gugauucuuguugaaagac

SEQ ID NO: 324604 - RNA, 19 nt, Artificial Sequence
  Description of Artificial Sequence: Synthetic oligonucleotide
  Antisense Strand to SEQ ID NO: 324603
gucuuucaacaagaaucac

SEQ ID NO: 324605 - RNA, 19 nt, Artificial Sequence
  Description of Artificial Sequence: Synthetic oligonucleotide
  Sense Strand Starting at position 75 of SEQ ID NO: 318305
acauauaaauguccuugua

SEQ ID NO: 324606 - RNA, 19 nt, Artificial Sequence
  Description of Artificial Sequence: Synthetic oligonucleotide
  Antisense Strand to SEQ ID NO: 324605
uacaaggacauuuauaugu

SEQ ID NO: 324607 - RNA, 19 nt, Artificial Sequence
  Description of Artificial Sequence: Synthetic oligonucleotide
  Sense Strand Starting at position 75 of SEQ ID NO: 318431
gguaguucugaguauuaaa

SEQ ID NO: 324608 - RNA, 19 nt, Artificial Sequence
  Description of Artificial Sequence: Synthetic oligonucleotide
  Antisense Strand to SEQ ID NO: 324607
uuuaauacucagaacuacc

SEQ ID NO: 324609 - RNA, 19 nt, Artificial Sequence
  Description of Artificial Sequence: Synthetic oligonucleotide
  Sense Strand Starting at position 75 of SEQ ID NO: 318461
uacagauguuuggcacaua

SEQ ID NO: 324610 - RNA, 19 nt, Artificial Sequence
  Description of Artificial Sequence: Synthetic oligonucleotide
  Antisense Strand to SEQ ID NO: 324609
uaugugccaaacaucugua

SEQ ID NO: 324611 - RNA, 19 nt, Artificial Sequence
  Description of Artificial Sequence: Synthetic oligonucleotide
  Sense Strand Starting at position 75 of SEQ ID NO: 318557
uaacuauggugguucuuua

SEQ ID NO: 324612 - RNA, 19 nt, Artificial Sequence
  Description of Artificial Sequence: Synthetic oligonucleotide
  Antisense Strand to SEQ ID NO: 324611
uaaagaaccaccauaguua

SEQ ID NO: 324613 - RNA, 19 nt, Artificial Sequence
  Description of Artificial Sequence: Synthetic oligonucleotide
  Sense Strand Starting at position 75 of SEQ ID NO: 318580
cugaacuucuaaucgugaa

SEQ ID NO: 324614 - RNA, 19 nt, Artificial Sequence
  Description of Artificial Sequence: Synthetic oligonucleotide
  Antisense Strand to SEQ ID NO: 324613
uucacgauuagaaguucag

SEQ ID NO: 324615 - RNA, 19 nt, Artificial Sequence
  Description of Artificial Sequence: Synthetic oligonucleotide
  Sense Strand Starting at position 75 of SEQ ID NO: 318584
acuucuaaucgugaaugca

SEQ ID NO: 324616 - RNA, 19 nt, Artificial Sequence
  Description of Artificial Sequence: Synthetic oligonucleotide
  Antisense Strand to SEQ ID NO: 324615
ugcauucacgauuagaagu

SEQ ID NO: 324617 - RNA, 19 nt, Artificial Sequence
  Description of Artificial Sequence: Synthetic oligonucleotide
  Sense Strand Starting at position 75 of SEQ ID NO: 318927
ucaaaucguuaucuuagau

SEQ ID NO: 324618 - RNA, 19 nt, Artificial Sequence
  Description of Artificial Sequence: Synthetic oligonucleotide
  Antisense Strand to SEQ ID NO: 324617
aucuaagauaacgauuuga

SEQ ID NO: 324619 - RNA, 19 nt, Artificial Sequence
  Description of Artificial Sequence: Synthetic oligonucleotide
  Sense Strand Starting at position 75 of SEQ ID NO: 318942
agauaaguauaguugauag

SEQ ID NO: 324620 - RNA, 19 nt, Artificial Sequence
  Description of Artificial Sequence: Synthetic oligonucleotide
  Antisense Strand to SEQ ID NO: 324619
cuaucaacuauacuuaucu

SEQ ID NO: 324621 - RNA, 19 nt, Artificial Sequence
  Description of Artificial Sequence: Synthetic oligonucleotide
  Sense Strand Starting at position 75 of SEQ ID NO: 318950
auaguugauagauggcuua

SEQ ID NO: 324622 - RNA, 19 nt, Artificial Sequence
  Description of Artificial Sequence: Synthetic oligonucleotide
  Antisense Strand to SEQ ID NO: 324621
uaagccaucuaucaacuau

SEQ ID NO: 324623 - RNA, 19 nt, Artificial Sequence
  Description of Artificial Sequence: Synthetic oligonucleotide
  Sense Strand Starting at position 75 of SEQ ID NO: 318953
guugauagauggcuuauua

SEQ ID NO: 324624 - RNA, 19 nt, Artificial Sequence
  Description of Artificial Sequence: Synthetic oligonucleotide
  Antisense Strand to SEQ ID NO: 324623
uaauaagccaucuaucaac

SEQ ID NO: 324625 - RNA, 19 nt, Artificial Sequence
  Description of Artificial Sequence: Synthetic oligonucleotide
  Sense Strand Starting at position 75 of SEQ ID NO: 318960
gauggcuuauuacuagaga

SEQ ID NO: 324626 - RNA, 19 nt, Artificial Sequence
  Description of Artificial Sequence: Synthetic oligonucleotide
  Antisense Strand to SEQ ID NO: 324625
ucucuaguaauaagccauc

SEQ ID NO: 324627 - RNA, 19 nt, Artificial Sequence
  Description of Artificial Sequence: Synthetic oligonucleotide
  Sense Strand Starting at position 76 of SEQ ID NO: 315367
aaagguuguagugagacga

SEQ ID NO: 324628 - RNA, 19 nt, Artificial Sequence
  Description of Artificial Sequence: Synthetic oligonucleotide
  Antisense Strand to SEQ ID NO: 324627
ucgucucacuacaaccuuu

SEQ ID NO: 324629 - RNA, 19 nt, Artificial Sequence
  Description of Artificial Sequence: Synthetic oligonucleotide
  Sense Strand Starting at position 76 of SEQ ID NO: 315666
agaagaaggaucugugcga

SEQ ID NO: 324630 - RNA, 19 nt, Artificial Sequence
  Description of Artificial Sequence: Synthetic oligonucleotide
  Antisense Strand to SEQ ID NO: 324629
ucgcacagauccuucuucu

SEQ ID NO: 324631 - RNA, 19 nt, Artificial Sequence
  Description of Artificial Sequence: Synthetic oligonucleotide
  Sense Strand Starting at position 76 of SEQ ID NO: 315667
gaagaaggaucugugcgau

SEQ ID NO: 324632 - RNA, 19 nt, Artificial Sequence
  Description of Artificial Sequence: Synthetic oligonucleotide
  Antisense Strand to SEQ ID NO: 324631
aucgcacagauccuucuuc

SEQ ID NO: 324633 - RNA, 19 nt, Artificial Sequence
  Description of Artificial Sequence: Synthetic oligonucleotide
  Sense Strand Starting at position 76 of SEQ ID NO: 315679
gugcgauuguguauagagu

SEQ ID NO: 324634 - RNA, 19 nt, Artificial Sequence
  Description of Artificial Sequence: Synthetic oligonucleotide
  Antisense Strand to SEQ ID NO: 324633
acucuauacacaaucgcac

SEQ ID NO: 324635 - RNA, 19 nt, Artificial Sequence
  Description of Artificial Sequence: Synthetic oligonucleotide
  Sense Strand Starting at position 76 of SEQ ID NO: 315737
ugugaaccauacucggaaa

SEQ ID NO: 324636 - RNA, 19 nt, Artificial Sequence
  Description of Artificial Sequence: Synthetic oligonucleotide
  Antisense Strand to SEQ ID NO: 324635
uuuccgaguaugguucaca

SEQ ID NO: 324637 - RNA, 19 nt, Artificial Sequence
  Description of Artificial Sequence: Synthetic oligonucleotide
  Sense Strand Starting at position 76 of SEQ ID NO: 315739
ugaaccauacucggaaacu

SEQ ID NO: 324638 - RNA, 19 nt, Artificial Sequence
  Description of Artificial Sequence: Synthetic oligonucleotide
  Antisense Strand to SEQ ID NO: 324637
aguuuccgaguaugguuca

SEQ ID NO: 324639 - RNA, 19 nt, Artificial Sequence
  Description of Artificial Sequence: Synthetic oligonucleotide
  Sense Strand Starting at position 76 of SEQ ID NO: 315787
guguuugcuccuuuagcuu

SEQ ID NO: 324640 - RNA, 19 nt, Artificial Sequence
  Description of Artificial Sequence: Synthetic oligonucleotide
  Antisense Strand to SEQ ID NO: 324639
aagcuaaaggagcaaacac

SEQ ID NO: 324641 - RNA, 19 nt, Artificial Sequence
  Description of Artificial Sequence: Synthetic oligonucleotide
  Sense Strand Starting at position 76 of SEQ ID NO: 316071
cuuuauaaagucugagggu

SEQ ID NO: 324642 - RNA, 19 nt, Artificial Sequence
  Description of Artificial Sequence: Synthetic oligonucleotide
  Antisense Strand to SEQ ID NO: 324641
acccucagacuuuauaaag

SEQ ID NO: 324643 - RNA, 19 nt, Artificial Sequence
  Description of Artificial Sequence: Synthetic oligonucleotide
  Sense Strand Starting at position 76 of SEQ ID NO: 316097
ucuuuaaagauguguagga

SEQ ID NO: 324644 - RNA, 19 nt, Artificial Sequence
  Description of Artificial Sequence: Synthetic oligonucleotide
  Antisense Strand to SEQ ID NO: 324643
uccuacacaucuuuaaaga

SEQ ID NO: 324645 - RNA, 19 nt, Artificial Sequence
  Description of Artificial Sequence: Synthetic oligonucleotide
  Sense Strand Starting at position 76 of SEQ ID NO: 316153
gcauaagcgagagaagcau

SEQ ID NO: 324646 - RNA, 19 nt, Artificial Sequence
  Description of Artificial Sequence: Synthetic oligonucleotide
  Antisense Strand to SEQ ID NO: 324645
augcuucucucgcuuaugc

SEQ ID NO: 324647 - RNA, 19 nt, Artificial Sequence
  Description of Artificial Sequence: Synthetic oligonucleotide
  Sense Strand Starting at position 76 of SEQ ID NO: 316171
uuucuuaaagggugaacua

SEQ ID NO: 324648 - RNA, 19 nt, Artificial Sequence
  Description of Artificial Sequence: Synthetic oligonucleotide
  Antisense Strand to SEQ ID NO: 324647
uaguucacccuuuaagaaa

SEQ ID NO: 324649 - RNA, 19 nt, Artificial Sequence
  Description of Artificial Sequence: Synthetic oligonucleotide
  Sense Strand Starting at position 76 of SEQ ID NO: 316207
uaggaaagcagguguacau

SEQ ID NO: 324650 - RNA, 19 nt, Artificial Sequence
  Description of Artificial Sequence: Synthetic oligonucleotide
  Antisense Strand to SEQ ID NO: 324649
auguacaccugcuuuccua

SEQ ID NO: 324651 - RNA, 19 nt, Artificial Sequence
  Description of Artificial Sequence: Synthetic oligonucleotide
  Sense Strand Starting at position 76 of SEQ ID NO: 316237
acaggauacuuuguuaagu

SEQ ID NO: 324652 - RNA, 19 nt, Artificial Sequence
  Description of Artificial Sequence: Synthetic oligonucleotide
  Antisense Strand to SEQ ID NO: 324651
acuuaacaaaguauccugu

SEQ ID NO: 324653 - RNA, 19 nt, Artificial Sequence
  Description of Artificial Sequence: Synthetic oligonucleotide
  Sense Strand Starting at position 76 of SEQ ID NO: 316238
caggauacuuuguuaagua

SEQ ID NO: 324654 - RNA, 19 nt, Artificial Sequence
  Description of Artificial Sequence: Synthetic oligonucleotide
  Antisense Strand to SEQ ID NO: 324653
uacuuaacaaaguauccug

SEQ ID NO: 324655 - RNA, 19 nt, Artificial Sequence
  Description of Artificial Sequence: Synthetic oligonucleotide
  Sense Strand Starting at position 76 of SEQ ID NO: 316331
uggccacugcuggaagaaa

SEQ ID NO: 324656 - RNA, 19 nt, Artificial Sequence
  Description of Artificial Sequence: Synthetic oligonucleotide
  Antisense Strand to SEQ ID NO: 324655
uuucuuccagcaguggcca

SEQ ID NO: 324657 - RNA, 19 nt, Artificial Sequence
  Description of Artificial Sequence: Synthetic oligonucleotide
  Sense Strand Starting at position 76 of SEQ ID NO: 316464
gcaggcauuaggcagagaa

SEQ ID NO: 324658 - RNA, 19 nt, Artificial Sequence
  Description of Artificial Sequence: Synthetic oligonucleotide
  Antisense Strand to SEQ ID NO: 324657
uucucugccuaaugccugc

SEQ ID NO: 324659 - RNA, 19 nt, Artificial Sequence
  Description of Artificial Sequence: Synthetic oligonucleotide
  Sense Strand Starting at position 76 of SEQ ID NO: 316603
agacgagggcgcuacaaau

SEQ ID NO: 324660 - RNA, 19 nt, Artificial Sequence
  Description of Artificial Sequence: Synthetic oligonucleotide
  Antisense Strand to SEQ ID NO: 324659
auuuguagcgcccucgucu

SEQ ID NO: 324661 - RNA, 19 nt, Artificial Sequence
  Description of Artificial Sequence: Synthetic oligonucleotide
  Sense Strand Starting at position 76 of SEQ ID NO: 317282
guguuugcuccucuuuacu

SEQ ID NO: 324662 - RNA, 19 nt, Artificial Sequence
  Description of Artificial Sequence: Synthetic oligonucleotide
  Antisense Strand to SEQ ID NO: 324661
aguaaagaggagcaaacac

SEQ ID NO: 324663 - RNA, 19 nt, Artificial Sequence
  Description of Artificial Sequence: Synthetic oligonucleotide
  Sense Strand Starting at position 76 of SEQ ID NO: 317536
augccaaucuaagugaaau

SEQ ID NO: 324664 - RNA, 19 nt, Artificial Sequence
  Description of Artificial Sequence: Synthetic oligonucleotide
  Antisense Strand to SEQ ID NO: 324663
auuucacuuagauuggcau

SEQ ID NO: 324665 - RNA, 19 nt, Artificial Sequence
  Description of Artificial Sequence: Synthetic oligonucleotide
  Sense Strand Starting at position 76 of SEQ ID NO: 317678
gugaaaucagauuggcaaa

SEQ ID NO: 324666 - RNA, 19 nt, Artificial Sequence
  Description of Artificial Sequence: Synthetic oligonucleotide
  Antisense Strand to SEQ ID NO: 324665
uuugccaaucugauuucac

SEQ ID NO: 324667 - RNA, 19 nt, Artificial Sequence
  Description of Artificial Sequence: Synthetic oligonucleotide
  Sense Strand Starting at position 76 of SEQ ID NO: 318007
cauagauaacgugauguuu

SEQ ID NO: 324668 - RNA, 19 nt, Artificial Sequence
  Description of Artificial Sequence: Synthetic oligonucleotide
  Antisense Strand to SEQ ID NO: 324667
aaacaucacguuaucuaug

SEQ ID NO: 324669 - RNA, 19 nt, Artificial Sequence
  Description of Artificial Sequence: Synthetic oligonucleotide
  Sense Strand Starting at position 76 of SEQ ID NO: 318113
ggcugauugguacaaugca

SEQ ID NO: 324670 - RNA, 19 nt, Artificial Sequence
  Description of Artificial Sequence: Synthetic oligonucleotide
  Antisense Strand to SEQ ID NO: 324669
ugcauuguaccaaucagcc

SEQ ID NO: 324671 - RNA, 19 nt, Artificial Sequence
  Description of Artificial Sequence: Synthetic oligonucleotide
  Sense Strand Starting at position 76 of SEQ ID NO: 318120
ugguacaaugcaugagaaa

SEQ ID NO: 324672 - RNA, 19 nt, Artificial Sequence
  Description of Artificial Sequence: Synthetic oligonucleotide
  Antisense Strand to SEQ ID NO: 324671
uuucucaugcauuguacca

SEQ ID NO: 324673 - RNA, 19 nt, Artificial Sequence
  Description of Artificial Sequence: Synthetic oligonucleotide
  Sense Strand Starting at position 76 of SEQ ID NO: 318184
ggugaagauuucuaagaua

SEQ ID NO: 324674 - RNA, 19 nt, Artificial Sequence
  Description of Artificial Sequence: Synthetic oligonucleotide
  Antisense Strand to SEQ ID NO: 324673
uaucuuagaaaucuucacc

SEQ ID NO: 324675 - RNA, 19 nt, Artificial Sequence
  Description of Artificial Sequence: Synthetic oligonucleotide
  Sense Strand Starting at position 76 of SEQ ID NO: 318218
cccuaaguggcuuagacaa

SEQ ID NO: 324676 - RNA, 19 nt, Artificial Sequence
  Description of Artificial Sequence: Synthetic oligonucleotide
  Antisense Strand to SEQ ID NO: 324675
uugucuaagccacuuaggg

SEQ ID NO: 324677 - RNA, 19 nt, Artificial Sequence
  Description of Artificial Sequence: Synthetic oligonucleotide
  Sense Strand Starting at position 76 of SEQ ID NO: 318225
uggcuuagacaaggugaau

SEQ ID NO: 324678 - RNA, 19 nt, Artificial Sequence
  Description of Artificial Sequence: Synthetic oligonucleotide
  Antisense Strand to SEQ ID NO: 324677
auucaccuugucuaagcca

SEQ ID NO: 324679 - RNA, 19 nt, Artificial Sequence
  Description of Artificial Sequence: Synthetic oligonucleotide
  Sense Strand Starting at position 76 of SEQ ID NO: 318386
uacuacuguuguuuaggaa

SEQ ID NO: 324680 - RNA, 19 nt, Artificial Sequence
  Description of Artificial Sequence: Synthetic oligonucleotide
  Antisense Strand to SEQ ID NO: 324679
uuccuaaacaacaguagua

SEQ ID NO: 324681 - RNA, 19 nt, Artificial Sequence
  Description of Artificial Sequence: Synthetic oligonucleotide
  Sense Strand Starting at position 76 of SEQ ID NO: 318387
acuacuguuguuuaggaaa

SEQ ID NO: 324682 - RNA, 19 nt, Artificial Sequence
  Description of Artificial Sequence: Synthetic oligonucleotide
  Antisense Strand to SEQ ID NO: 324681
uuuccuaaacaacaguagu

SEQ ID NO: 324683 - RNA, 19 nt, Artificial Sequence
  Description of Artificial Sequence: Synthetic oligonucleotide
  Sense Strand Starting at position 76 of SEQ ID NO: 318409
uggugauugcauggaauua

SEQ ID NO: 324684 - RNA, 19 nt, Artificial Sequence
  Description of Artificial Sequence: Synthetic oligonucleotide
  Antisense Strand to SEQ ID NO: 324683
uaauuccaugcaaucacca

SEQ ID NO: 324685 - RNA, 19 nt, Artificial Sequence
  Description of Artificial Sequence: Synthetic oligonucleotide
  Sense Strand Starting at position 76 of SEQ ID NO: 318410
ggugauugcauggaauuag

SEQ ID NO: 324686 - RNA, 19 nt, Artificial Sequence
  Description of Artificial Sequence: Synthetic oligonucleotide
  Antisense Strand to SEQ ID NO: 324685
cuaauuccaugcaaucacc

SEQ ID NO: 324687 - RNA, 19 nt, Artificial Sequence
  Description of Artificial Sequence: Synthetic oligonucleotide
  Sense Strand Starting at position 76 of SEQ ID NO: 318668
ggcuaagugaaggaaugua

SEQ ID NO: 324688 - RNA, 19 nt, Artificial Sequence
  Description of Artificial Sequence: Synthetic oligonucleotide
  Antisense Strand to SEQ ID NO: 324687
uacauuccuucacuuagcc

SEQ ID NO: 324689 - RNA, 19 nt, Artificial Sequence
  Description of Artificial Sequence: Synthetic oligonucleotide
  Sense Strand Starting at position 76 of SEQ ID NO: 318686
auaggaaaugcuuagugua

SEQ ID NO: 324690 - RNA, 19 nt, Artificial Sequence
  Description of Artificial Sequence: Synthetic oligonucleotide
  Antisense Strand to SEQ ID NO: 324689
uacacuaagcauuuccuau

SEQ ID NO: 324691 - RNA, 19 nt, Artificial Sequence
  Description of Artificial Sequence: Synthetic oligonucleotide
  Sense Strand Starting at position 76 of SEQ ID NO: 318738
uguuauuagcaauaggaua

SEQ ID NO: 324692 - RNA, 19 nt, Artificial Sequence
  Description of Artificial Sequence: Synthetic oligonucleotide
  Antisense Strand to SEQ ID NO: 324691
uauccuauugcuaauaaca

SEQ ID NO: 324693 - RNA, 19 nt, Artificial Sequence
  Description of Artificial Sequence: Synthetic oligonucleotide
  Sense Strand Starting at position 76 of SEQ ID NO: 318751
aggauagcccacgauucuu

SEQ ID NO: 324694 - RNA, 19 nt, Artificial Sequence
  Description of Artificial Sequence: Synthetic oligonucleotide
  Antisense Strand to SEQ ID NO: 324693
aagaaucgugggcuauccu

SEQ ID NO: 324695 - RNA, 19 nt, Artificial Sequence
  Description of Artificial Sequence: Synthetic oligonucleotide
  Sense Strand Starting at position 76 of SEQ ID NO: 318778
uuaauagugcuuuaaucug

SEQ ID NO: 324696 - RNA, 19 nt, Artificial Sequence
  Description of Artificial Sequence: Synthetic oligonucleotide
  Antisense Strand to SEQ ID NO: 324695
cagauuaaagcacuauuaa

SEQ ID NO: 324697 - RNA, 19 nt, Artificial Sequence
  Description of Artificial Sequence: Synthetic oligonucleotide
  Sense Strand Starting at position 76 of SEQ ID NO: 318786
gcuuuaaucugauuuguuu

SEQ ID NO: 324698 - RNA, 19 nt, Artificial Sequence
  Description of Artificial Sequence: Synthetic oligonucleotide
  Antisense Strand to SEQ ID NO: 324697
aaacaaaucagauuaaagc

SEQ ID NO: 324699 - RNA, 19 nt, Artificial Sequence
  Description of Artificial Sequence: Synthetic oligonucleotide
  Sense Strand Starting at position 76 of SEQ ID NO: 319068
caguaagaggagugcuaaa

SEQ ID NO: 324700 - RNA, 19 nt, Artificial Sequence
  Description of Artificial Sequence: Synthetic oligonucleotide
  Antisense Strand to SEQ ID NO: 324699
uuuagcacuccucuuacug

SEQ ID NO: 324701 - RNA, 19 nt, Artificial Sequence
  Description of Artificial Sequence: Synthetic oligonucleotide
  Sense Strand Starting at position 76 of SEQ ID NO: 319180
gggcaagcugaguaaauca

SEQ ID NO: 324702 - RNA, 19 nt, Artificial Sequence
  Description of Artificial Sequence: Synthetic oligonucleotide
  Antisense Strand to SEQ ID NO: 324701
ugauuuacucagcuugccc

SEQ ID NO: 324703 - RNA, 19 nt, Artificial Sequence
  Description of Artificial Sequence: Synthetic oligonucleotide
  Sense Strand Starting at position 76 of SEQ ID NO: 319187
cugaguaaaucaucuuggu

SEQ ID NO: 324704 - RNA, 19 nt, Artificial Sequence
  Description of Artificial Sequence: Synthetic oligonucleotide
  Antisense Strand to SEQ ID NO: 324703
accaagaugauuuacucag

SEQ ID NO: 324705 - RNA, 19 nt, Artificial Sequence
  Description of Artificial Sequence: Synthetic oligonucleotide
  Sense Strand Starting at position 76 of SEQ ID NO: 319191
guaaaucaucuuggucaag

SEQ ID NO: 324706 - RNA, 19 nt, Artificial Sequence
  Description of Artificial Sequence: Synthetic oligonucleotide
  Antisense Strand to SEQ ID NO: 324705
cuugaccaagaugauuuac

SEQ ID NO: 324707 - RNA, 19 nt, Artificial Sequence
  Description of Artificial Sequence: Synthetic oligonucleotide
  Sense Strand Starting at position 77 of SEQ ID NO: 315252
cuucuauuccugcggaaag

SEQ ID NO: 324708 - RNA, 19 nt, Artificial Sequence
  Description of Artificial Sequence: Synthetic oligonucleotide
  Antisense Strand to SEQ ID NO: 324707
cuuuccgcaggaauagaag

SEQ ID NO: 324709 - RNA, 19 nt, Artificial Sequence
  Description of Artificial Sequence: Synthetic oligonucleotide
  Sense Strand Starting at position 77 of SEQ ID NO: 315254
ucuauuccugcggaaagau

SEQ ID NO: 324710 - RNA, 19 nt, Artificial Sequence
  Description of Artificial Sequence: Synthetic oligonucleotide
  Antisense Strand to SEQ ID NO: 324709
aucuuuccgcaggaauaga

SEQ ID NO: 324711 - RNA, 19 nt, Artificial Sequence
  Description of Artificial Sequence: Synthetic oligonucleotide
  Sense Strand Starting at position 77 of SEQ ID NO: 315639
gcagguaaaucuuccuuau

SEQ ID NO: 324712 - RNA, 19 nt, Artificial Sequence
  Description of Artificial Sequence: Synthetic oligonucleotide
  Antisense Strand to SEQ ID NO: 324711
auaaggaagauuuaccugc

SEQ ID NO: 324713 - RNA, 19 nt, Artificial Sequence
  Description of Artificial Sequence: Synthetic oligonucleotide
  Sense Strand Starting at position 77 of SEQ ID NO: 315684
gguuucugcuaaucucuuu

SEQ ID NO: 324714 - RNA, 19 nt, Artificial Sequence
  Description of Artificial Sequence: Synthetic oligonucleotide
  Antisense Strand to SEQ ID NO: 324713
aaagagauuagcagaaacc

SEQ ID NO: 324715 - RNA, 19 nt, Artificial Sequence
  Description of Artificial Sequence: Synthetic oligonucleotide
  Sense Strand Starting at position 77 of SEQ ID NO: 315729
gcuuuauuagugcaaggac

SEQ ID NO: 324716 - RNA, 19 nt, Artificial Sequence
  Description of Artificial Sequence: Synthetic oligonucleotide
  Antisense Strand to SEQ ID NO: 324715
guccuugcacuaauaaagc

SEQ ID NO: 324717 - RNA, 19 nt, Artificial Sequence
  Description of Artificial Sequence: Synthetic oligonucleotide
  Sense Strand Starting at position 77 of SEQ ID NO: 315732
uuauuagugcaaggacuaa

SEQ ID NO: 324718 - RNA, 19 nt, Artificial Sequence
  Description of Artificial Sequence: Synthetic oligonucleotide
  Antisense Strand to SEQ ID NO: 324717
uuaguccuugcacuaauaa

SEQ ID NO: 324719 - RNA, 19 nt, Artificial Sequence
  Description of Artificial Sequence: Synthetic oligonucleotide
  Sense Strand Starting at position 77 of SEQ ID NO: 315777
acaugaaagcuguguuuga

SEQ ID NO: 324720 - RNA, 19 nt, Artificial Sequence
  Description of Artificial Sequence: Synthetic oligonucleotide
  Antisense Strand to SEQ ID NO: 324719
ucaaacacagcuuucaugu

SEQ ID NO: 324721 - RNA, 19 nt, Artificial Sequence
  Description of Artificial Sequence: Synthetic oligonucleotide
  Sense Strand Starting at position 77 of SEQ ID NO: 315778
caugaaagcuguguuugaa

SEQ ID NO: 324722 - RNA, 19 nt, Artificial Sequence
  Description of Artificial Sequence: Synthetic oligonucleotide
  Antisense Strand to SEQ ID NO: 324721
uucaaacacagcuuucaug

SEQ ID NO: 324723 - RNA, 19 nt, Artificial Sequence
  Description of Artificial Sequence: Synthetic oligonucleotide
  Sense Strand Starting at position 77 of SEQ ID NO: 315781
gaaagcuguguuugaauca

SEQ ID NO: 324724 - RNA, 19 nt, Artificial Sequence
  Description of Artificial Sequence: Synthetic oligonucleotide
  Antisense Strand to SEQ ID NO: 324723
ugauucaaacacagcuuuc

SEQ ID NO: 324725 - RNA, 19 nt, Artificial Sequence
  Description of Artificial Sequence: Synthetic oligonucleotide
  Sense Strand Starting at position 77 of SEQ ID NO: 315788
guguuugaaucaucuugug

SEQ ID NO: 324726 - RNA, 19 nt, Artificial Sequence
  Description of Artificial Sequence: Synthetic oligonucleotide
  Antisense Strand to SEQ ID NO: 324725
cacaagaugauucaaacac

SEQ ID NO: 324727 - RNA, 19 nt, Artificial Sequence
  Description of Artificial Sequence: Synthetic oligonucleotide
  Sense Strand Starting at position 77 of SEQ ID NO: 315950
acucuugggcucuaaauaa

SEQ ID NO: 324728 - RNA, 19 nt, Artificial Sequence
  Description of Artificial Sequence: Synthetic oligonucleotide
  Antisense Strand to SEQ ID NO: 324727
uuauuuagagcccaagagu

SEQ ID NO: 324729 - RNA, 19 nt, Artificial Sequence
  Description of Artificial Sequence: Synthetic oligonucleotide
  Sense Strand Starting at position 77 of SEQ ID NO: 315964
aauaaagaucgaggcgaaa

SEQ ID NO: 324730 - RNA, 19 nt, Artificial Sequence
  Description of Artificial Sequence: Synthetic oligonucleotide
  Antisense Strand to SEQ ID NO: 324729
uuucgccucgaucuuuauu

SEQ ID NO: 324731 - RNA, 19 nt, Artificial Sequence
  Description of Artificial Sequence: Synthetic oligonucleotide
  Sense Strand Starting at position 77 of SEQ ID NO: 315966
uaaagaucgaggcgaaauc

SEQ ID NO: 324732 - RNA, 19 nt, Artificial Sequence
  Description of Artificial Sequence: Synthetic oligonucleotide
  Antisense Strand to SEQ ID NO: 324731
gauuucgccucgaucuuua

SEQ ID NO: 324733 - RNA, 19 nt, Artificial Sequence
  Description of Artificial Sequence: Synthetic oligonucleotide
  Sense Strand Starting at position 77 of SEQ ID NO: 316075
uauguaaguccucagugca

SEQ ID NO: 324734 - RNA, 19 nt, Artificial Sequence
  Description of Artificial Sequence: Synthetic oligonucleotide
  Antisense Strand to SEQ ID NO: 324733
ugcacugaggacuuacaua

SEQ ID NO: 324735 - RNA, 19 nt, Artificial Sequence
  Description of Artificial Sequence: Synthetic oligonucleotide
  Sense Strand Starting at position 77 of SEQ ID NO: 316202
gguaguuaacuuuaugcua

SEQ ID NO: 324736 - RNA, 19 nt, Artificial Sequence
  Description of Artificial Sequence: Synthetic oligonucleotide
  Antisense Strand to SEQ ID NO: 324735
uagcauaaaguuaacuacc

SEQ ID NO: 324737 - RNA, 19 nt, Artificial Sequence
  Description of Artificial Sequence: Synthetic oligonucleotide
  Sense Strand Starting at position 77 of SEQ ID NO: 316210
acuuuaugcuaacugcaga

SEQ ID NO: 324738 - RNA, 19 nt, Artificial Sequence
  Description of Artificial Sequence: Synthetic oligonucleotide
  Antisense Strand to SEQ ID NO: 324737
ucugcaguuagcauaaagu

SEQ ID NO: 324739 - RNA, 19 nt, Artificial Sequence
  Description of Artificial Sequence: Synthetic oligonucleotide
  Sense Strand Starting at position 77 of SEQ ID NO: 316234
cuuaucuagucgcuuaaga

SEQ ID NO: 324740 - RNA, 19 nt, Artificial Sequence
  Description of Artificial Sequence: Synthetic oligonucleotide
  Antisense Strand to SEQ ID NO: 324739
ucuuaagcgacuagauaag

SEQ ID NO: 324741 - RNA, 19 nt, Artificial Sequence
  Description of Artificial Sequence: Synthetic oligonucleotide
  Sense Strand Starting at position 77 of SEQ ID NO: 316236
uaucuagucgcuuaagaca

SEQ ID NO: 324742 - RNA, 19 nt, Artificial Sequence
  Description of Artificial Sequence: Synthetic oligonucleotide
  Antisense Strand to SEQ ID NO: 324741
ugucuuaagcgacuagaua

SEQ ID NO: 324743 - RNA, 19 nt, Artificial Sequence
  Description of Artificial Sequence: Synthetic oligonucleotide
  Sense Strand Starting at position 77 of SEQ ID NO: 316421
augggucuauugguccaaa

SEQ ID NO: 324744 - RNA, 19 nt, Artificial Sequence
  Description of Artificial Sequence: Synthetic oligonucleotide
  Antisense Strand to SEQ ID NO: 324743
uuuggaccaauagacccau

SEQ ID NO: 324745 - RNA, 19 nt, Artificial Sequence
  Description of Artificial Sequence: Synthetic oligonucleotide
  Sense Strand Starting at position 77 of SEQ ID NO: 316422
ugggucuauugguccaaag

SEQ ID NO: 324746 - RNA, 19 nt, Artificial Sequence
  Description of Artificial Sequence: Synthetic oligonucleotide
  Antisense Strand to SEQ ID NO: 324745
cuuuggaccaauagaccca

SEQ ID NO: 324747 - RNA, 19 nt, Artificial Sequence
  Description of Artificial Sequence: Synthetic oligonucleotide
  Sense Strand Starting at position 77 of SEQ ID NO: 316424
ggucuauugguccaaagug

SEQ ID NO: 324748 - RNA, 19 nt, Artificial Sequence
  Description of Artificial Sequence: Synthetic oligonucleotide
  Antisense Strand to SEQ ID NO: 324747
cacuuuggaccaauagacc

SEQ ID NO: 324749 - RNA, 19 nt, Artificial Sequence
  Description of Artificial Sequence: Synthetic oligonucleotide
  Sense Strand Starting at position 77 of SEQ ID NO: 316464
augcuuacgcuuucucgua

SEQ ID NO: 324750 - RNA, 19 nt, Artificial Sequence
  Description of Artificial Sequence: Synthetic oligonucleotide
  Antisense Strand to SEQ ID NO: 324749
uacgagaaagcguaagcau

SEQ ID NO: 324751 - RNA, 19 nt, Artificial Sequence
  Description of Artificial Sequence: Synthetic oligonucleotide
  Sense Strand Starting at position 77 of SEQ ID NO: 316816
caacucaggccuuggagaa

SEQ ID NO: 324752 - RNA, 19 nt, Artificial Sequence
  Description of Artificial Sequence: Synthetic oligonucleotide
  Antisense Strand to SEQ ID NO: 324751
uucuccaaggccugaguug

SEQ ID NO: 324753 - RNA, 19 nt, Artificial Sequence
  Description of Artificial Sequence: Synthetic oligonucleotide
  Sense Strand Starting at position 77 of SEQ ID NO: 317333
ccuugaggcuuucucuaca

SEQ ID NO: 324754 - RNA, 19 nt, Artificial Sequence
  Description of Artificial Sequence: Synthetic oligonucleotide
  Antisense Strand to SEQ ID NO: 324753
uguagagaaagccucaagg

SEQ ID NO: 324755 - RNA, 19 nt, Artificial Sequence
  Description of Artificial Sequence: Synthetic oligonucleotide
  Sense Strand Starting at position 77 of SEQ ID NO: 317467
aagaguuggcguggaauaa

SEQ ID NO: 324756 - RNA, 19 nt, Artificial Sequence
  Description of Artificial Sequence: Synthetic oligonucleotide
  Antisense Strand to SEQ ID NO: 324755
uuauuccacgccaacucuu

SEQ ID NO: 324757 - RNA, 19 nt, Artificial Sequence
  Description of Artificial Sequence: Synthetic oligonucleotide
  Sense Strand Starting at position 77 of SEQ ID NO: 317468
agaguuggcguggaauaaa

SEQ ID NO: 324758 - RNA, 19 nt, Artificial Sequence
  Description of Artificial Sequence: Synthetic oligonucleotide
  Antisense Strand to SEQ ID NO: 324757
uuuauuccacgccaacucu

SEQ ID NO: 324759 - RNA, 19 nt, Artificial Sequence
  Description of Artificial Sequence: Synthetic oligonucleotide
  Sense Strand Starting at position 77 of SEQ ID NO: 317636
aaguaagcacuuugagaga

SEQ ID NO: 324760 - RNA, 19 nt, Artificial Sequence
  Description of Artificial Sequence: Synthetic oligonucleotide
  Antisense Strand to SEQ ID NO: 324759
ucucucaaagugcuuacuu

SEQ ID NO: 324761 - RNA, 19 nt, Artificial Sequence
  Description of Artificial Sequence: Synthetic oligonucleotide
  Sense Strand Starting at position 77 of SEQ ID NO: 317672
aauuuauauugaggaguug

SEQ ID NO: 324762 - RNA, 19 nt, Artificial Sequence
  Description of Artificial Sequence: Synthetic oligonucleotide
  Antisense Strand to SEQ ID NO: 324761
caacuccucaauauaaauu

SEQ ID NO: 324763 - RNA, 19 nt, Artificial Sequence
  Description of Artificial Sequence: Synthetic oligonucleotide
  Sense Strand Starting at position 77 of SEQ ID NO: 317681
ugaggaguuggccaaguaa

SEQ ID NO: 324764 - RNA, 19 nt, Artificial Sequence
  Description of Artificial Sequence: Synthetic oligonucleotide
  Antisense Strand to SEQ ID NO: 324763
uuacuuggccaacuccuca

SEQ ID NO: 324765 - RNA, 19 nt, Artificial Sequence
  Description of Artificial Sequence: Synthetic oligonucleotide
  Sense Strand Starting at position 77 of SEQ ID NO: 317707
uaacuuauggaaggagcua

SEQ ID NO: 324766 - RNA, 19 nt, Artificial Sequence
  Description of Artificial Sequence: Synthetic oligonucleotide
  Antisense Strand to SEQ ID NO: 324765
uagcuccuuccauaaguua

SEQ ID NO: 324767 - RNA, 19 nt, Artificial Sequence
  Description of Artificial Sequence: Synthetic oligonucleotide
  Sense Strand Starting at position 77 of SEQ ID NO: 317731
auguaugaagguggucuua

SEQ ID NO: 324768 - RNA, 19 nt, Artificial Sequence
  Description of Artificial Sequence: Synthetic oligonucleotide
  Antisense Strand to SEQ ID NO: 324767
uaagaccaccuucauacau

SEQ ID NO: 324769 - RNA, 19 nt, Artificial Sequence
  Description of Artificial Sequence: Synthetic oligonucleotide
  Sense Strand Starting at position 77 of SEQ ID NO: 317733
guaugaagguggucuuaca

SEQ ID NO: 324770 - RNA, 19 nt, Artificial Sequence
  Description of Artificial Sequence: Synthetic oligonucleotide
  Antisense Strand to SEQ ID NO: 324769
uguaagaccaccuucauac

SEQ ID NO: 324771 - RNA, 19 nt, Artificial Sequence
  Description of Artificial Sequence: Synthetic oligonucleotide
  Sense Strand Starting at position 77 of SEQ ID NO: 317758
gugaacaaaucuguauguu

SEQ ID NO: 324772 - RNA, 19 nt, Artificial Sequence
  Description of Artificial Sequence: Synthetic oligonucleotide
  Antisense Strand to SEQ ID NO: 324771
aacauacagauuuguucac

SEQ ID NO: 324773 - RNA, 19 nt, Artificial Sequence
  Description of Artificial Sequence: Synthetic oligonucleotide
  Sense Strand Starting at position 77 of SEQ ID NO: 318720
caugguuaguugucucuua

SEQ ID NO: 324774 - RNA, 19 nt, Artificial Sequence
  Description of Artificial Sequence: Synthetic oligonucleotide
  Antisense Strand to SEQ ID NO: 324773
uaagagacaacuaaccaug

SEQ ID NO: 324775 - RNA, 19 nt, Artificial Sequence
  Description of Artificial Sequence: Synthetic oligonucleotide
  Sense Strand Starting at position 77 of SEQ ID NO: 318721
augguuaguugucucuuaa

SEQ ID NO: 324776 - RNA, 19 nt, Artificial Sequence
  Description of Artificial Sequence: Synthetic oligonucleotide
  Antisense Strand to SEQ ID NO: 324775
uuaagagacaacuaaccau

SEQ ID NO: 324777 - RNA, 19 nt, Artificial Sequence
  Description of Artificial Sequence: Synthetic oligonucleotide
  Sense Strand Starting at position 77 of SEQ ID NO: 318782
cauaguuaggcuuguggaa

SEQ ID NO: 324778 - RNA, 19 nt, Artificial Sequence
  Description of Artificial Sequence: Synthetic oligonucleotide
  Antisense Strand to SEQ ID NO: 324777
uuccacaagccuaacuaug

SEQ ID NO: 324779 - RNA, 19 nt, Artificial Sequence
  Description of Artificial Sequence: Synthetic oligonucleotide
  Sense Strand Starting at position 77 of SEQ ID NO: 318814
cugcaucuggcagagaguu

SEQ ID NO: 324780 - RNA, 19 nt, Artificial Sequence
  Description of Artificial Sequence: Synthetic oligonucleotide
  Antisense Strand to SEQ ID NO: 324779
aacucucugccagaugcag

SEQ ID NO: 324781 - RNA, 19 nt, Artificial Sequence
  Description of Artificial Sequence: Synthetic oligonucleotide
  Sense Strand Starting at position 77 of SEQ ID NO: 318820
cuggcagagaguuguaacu

SEQ ID NO: 324782 - RNA, 19 nt, Artificial Sequence
  Description of Artificial Sequence: Synthetic oligonucleotide
  Antisense Strand to SEQ ID NO: 324781
aguuacaacucucugccag

SEQ ID NO: 324783 - RNA, 19 nt, Artificial Sequence
  Description of Artificial Sequence: Synthetic oligonucleotide
  Sense Strand Starting at position 77 of SEQ ID NO: 318847
uguguuuaucuccaggcca

SEQ ID NO: 324784 - RNA, 19 nt, Artificial Sequence
  Description of Artificial Sequence: Synthetic oligonucleotide
  Antisense Strand to SEQ ID NO: 324783
uggccuggagauaaacaca

SEQ ID NO: 324785 - RNA, 19 nt, Artificial Sequence
  Description of Artificial Sequence: Synthetic oligonucleotide
  Sense Strand Starting at position 77 of SEQ ID NO: 318898
ccuugcacuuagucauuua

SEQ ID NO: 324786 - RNA, 19 nt, Artificial Sequence
  Description of Artificial Sequence: Synthetic oligonucleotide
  Antisense Strand to SEQ ID NO: 324785
uaaaugacuaagugcaagg

SEQ ID NO: 324787 - RNA, 19 nt, Artificial Sequence
  Description of Artificial Sequence: Synthetic oligonucleotide
  Sense Strand Starting at position 78 of SEQ ID NO: 315502
cacagaauauuccugggua

SEQ ID NO: 324788 - RNA, 19 nt, Artificial Sequence
  Description of Artificial Sequence: Synthetic oligonucleotide
  Antisense Strand to SEQ ID NO: 324787
uacccaggaauauucugug

SEQ ID NO: 324789 - RNA, 19 nt, Artificial Sequence
  Description of Artificial Sequence: Synthetic oligonucleotide
  Sense Strand Starting at position 78 of SEQ ID NO: 315504
cagaauauuccuggguauu

SEQ ID NO: 324790 - RNA, 19 nt, Artificial Sequence
  Description of Artificial Sequence: Synthetic oligonucleotide
  Antisense Strand to SEQ ID NO: 324789
aauacccaggaauauucug

SEQ ID NO: 324791 - RNA, 19 nt, Artificial Sequence
  Description of Artificial Sequence: Synthetic oligonucleotide
  Sense Strand Starting at position 78 of SEQ ID NO: 315505
agaauauuccuggguauua

SEQ ID NO: 324792 - RNA, 19 nt, Artificial Sequence
  Description of Artificial Sequence: Synthetic oligonucleotide
  Antisense Strand to SEQ ID NO: 324791
uaauacccaggaauauucu

SEQ ID NO: 324793 - RNA, 19 nt, Artificial Sequence
  Description of Artificial Sequence: Synthetic oligonucleotide
  Sense Strand Starting at position 78 of SEQ ID NO: 315506
gaauauuccuggguauuac

SEQ ID NO: 324794 - RNA, 19 nt, Artificial Sequence
  Description of Artificial Sequence: Synthetic oligonucleotide
  Antisense Strand to SEQ ID NO: 324793
guaauacccaggaauauuc

SEQ ID NO: 324795 - RNA, 19 nt, Artificial Sequence
  Description of Artificial Sequence: Synthetic oligonucleotide
  Sense Strand Starting at position 78 of SEQ ID NO: 315516
ggguauuacagucagugau

SEQ ID NO: 324796 - RNA, 19 nt, Artificial Sequence
  Description of Artificial Sequence: Synthetic oligonucleotide
  Antisense Strand to SEQ ID NO: 324795
aucacugacuguaauaccc

SEQ ID NO: 324797 - RNA, 19 nt, Artificial Sequence
  Description of Artificial Sequence: Synthetic oligonucleotide
  Sense Strand Starting at position 78 of SEQ ID NO: 315519
uauuacagucagugaugga

SEQ ID NO: 324798 - RNA, 19 nt, Artificial Sequence
  Description of Artificial Sequence: Synthetic oligonucleotide
  Antisense Strand to SEQ ID NO: 324797
uccaucacugacuguaaua

SEQ ID NO: 324799 - RNA, 19 nt, Artificial Sequence
  Description of Artificial Sequence: Synthetic oligonucleotide
  Sense Strand Starting at position 78 of SEQ ID NO: 315523
acagucagugauggaguaa

SEQ ID NO: 324800 - RNA, 19 nt, Artificial Sequence
  Description of Artificial Sequence: Synthetic oligonucleotide
  Antisense Strand to SEQ ID NO: 324799
uuacuccaucacugacugu

SEQ ID NO: 324801 - RNA, 19 nt, Artificial Sequence
  Description of Artificial Sequence: Synthetic oligonucleotide
  Sense Strand Starting at position 78 of SEQ ID NO: 315543
aggcuaaucugaucuaaua

SEQ ID NO: 324802 - RNA, 19 nt, Artificial Sequence
  Description of Artificial Sequence: Synthetic oligonucleotide
  Antisense Strand to SEQ ID NO: 324801
uauuagaucagauuagccu

SEQ ID NO: 324803 - RNA, 19 nt, Artificial Sequence
  Description of Artificial Sequence: Synthetic oligonucleotide
  Sense Strand Starting at position 78 of SEQ ID NO: 315551
cugaucuaauacuuaggua

SEQ ID NO: 324804 - RNA, 19 nt, Artificial Sequence
  Description of Artificial Sequence: Synthetic oligonucleotide
  Antisense Strand to SEQ ID NO: 324803
uaccuaaguauuagaucag

SEQ ID NO: 324805 - RNA, 19 nt, Artificial Sequence
  Description of Artificial Sequence: Synthetic oligonucleotide
  Sense Strand Starting at position 78 of SEQ ID NO: 315750
ucagauaggugaguuuguu

SEQ ID NO: 324806 - RNA, 19 nt, Artificial Sequence
  Description of Artificial Sequence: Synthetic oligonucleotide
  Antisense Strand to SEQ ID NO: 324805
aacaaacucaccuaucuga

SEQ ID NO: 324807 - RNA, 19 nt, Artificial Sequence
  Description of Artificial Sequence: Synthetic oligonucleotide
  Sense Strand Starting at position 78 of SEQ ID NO: 315764
uuguuugugggacaaguca

SEQ ID NO: 324808 - RNA, 19 nt, Artificial Sequence
  Description of Artificial Sequence: Synthetic oligonucleotide
  Antisense Strand to SEQ ID NO: 324807
ugacuugucccacaaacaa

SEQ ID NO: 324809 - RNA, 19 nt, Artificial Sequence
  Description of Artificial Sequence: Synthetic oligonucleotide
  Sense Strand Starting at position 78 of SEQ ID NO: 315792
aaagaaaccgguuguaguu

SEQ ID NO: 324810 - RNA, 19 nt, Artificial Sequence
  Description of Artificial Sequence: Synthetic oligonucleotide
  Antisense Strand to SEQ ID NO: 324809
aacuacaaccgguuucuuu

SEQ ID NO: 324811 - RNA, 19 nt, Artificial Sequence
  Description of Artificial Sequence: Synthetic oligonucleotide
  Sense Strand Starting at position 78 of SEQ ID NO: 315798
accgguuguaguuacaaga

SEQ ID NO: 324812 - RNA, 19 nt, Artificial Sequence
  Description of Artificial Sequence: Synthetic oligonucleotide
  Antisense Strand to SEQ ID NO: 324811
ucuuguaacuacaaccggu

SEQ ID NO: 324813 - RNA, 19 nt, Artificial Sequence
  Description of Artificial Sequence: Synthetic oligonucleotide
  Sense Strand Starting at position 78 of SEQ ID NO: 315850
cuacccucucaguaucaga

SEQ ID NO: 324814 - RNA, 19 nt, Artificial Sequence
  Description of Artificial Sequence: Synthetic oligonucleotide
  Antisense Strand to SEQ ID NO: 324813
ucugauacugagaggguag

SEQ ID NO: 324815 - RNA, 19 nt, Artificial Sequence
  Description of Artificial Sequence: Synthetic oligonucleotide
  Sense Strand Starting at position 78 of SEQ ID NO: 316328
acgaaucaccauugccaaa

SEQ ID NO: 324816 - RNA, 19 nt, Artificial Sequence
  Description of Artificial Sequence: Synthetic oligonucleotide
  Antisense Strand to SEQ ID NO: 324815
uuuggcaauggugauucgu

SEQ ID NO: 324817 - RNA, 19 nt, Artificial Sequence
  Description of Artificial Sequence: Synthetic oligonucleotide
  Sense Strand Starting at position 78 of SEQ ID NO: 316559
aaggaaggcucagugaaac

SEQ ID NO: 324818 - RNA, 19 nt, Artificial Sequence
  Description of Artificial Sequence: Synthetic oligonucleotide
  Antisense Strand to SEQ ID NO: 324817
guuucacugagccuuccuu

SEQ ID NO: 324819 - RNA, 19 nt, Artificial Sequence
  Description of Artificial Sequence: Synthetic oligonucleotide
  Sense Strand Starting at position 78 of SEQ ID NO: 317354
acauacauaguuugaaguu

SEQ ID NO: 324820 - RNA, 19 nt, Artificial Sequence
  Description of Artificial Sequence: Synthetic oligonucleotide
  Antisense Strand to SEQ ID NO: 324819
aacuucaaacuauguaugu

SEQ ID NO: 324821 - RNA, 19 nt, Artificial Sequence
  Description of Artificial Sequence: Synthetic oligonucleotide
  Sense Strand Starting at position 78 of SEQ ID NO: 317467
aaccguaagagugauuguu

SEQ ID NO: 324822 - RNA, 19 nt, Artificial Sequence
  Description of Artificial Sequence: Synthetic oligonucleotide
  Antisense Strand to SEQ ID NO: 324821
aacaaucacucuuacgguu

SEQ ID NO: 324823 - RNA, 19 nt, Artificial Sequence
  Description of Artificial Sequence: Synthetic oligonucleotide
  Sense Strand Starting at position 78 of SEQ ID NO: 317535
ccguuuauucugguguagu

SEQ ID NO: 324824 - RNA, 19 nt, Artificial Sequence
  Description of Artificial Sequence: Synthetic oligonucleotide
  Antisense Strand to SEQ ID NO: 324823
acuacaccagaauaaacgg

SEQ ID NO: 324825 - RNA, 19 nt, Artificial Sequence
  Description of Artificial Sequence: Synthetic oligonucleotide
  Sense Strand Starting at position 78 of SEQ ID NO: 317537
guuuauucugguguagugu

SEQ ID NO: 324826 - RNA, 19 nt, Artificial Sequence
  Description of Artificial Sequence: Synthetic oligonucleotide
  Antisense Strand to SEQ ID NO: 324825
acacuacaccagaauaaac

SEQ ID NO: 324827 - RNA, 19 nt, Artificial Sequence
  Description of Artificial Sequence: Synthetic oligonucleotide
  Sense Strand Starting at position 78 of SEQ ID NO: 317553
uguuaagaauagccagaau

SEQ ID NO: 324828 - RNA, 19 nt, Artificial Sequence
  Description of Artificial Sequence: Synthetic oligonucleotide
  Antisense Strand to SEQ ID NO: 324827
auucuggcuauucuuaaca

SEQ ID NO: 324829 - RNA, 19 nt, Artificial Sequence
  Description of Artificial Sequence: Synthetic oligonucleotide
  Sense Strand Starting at position 78 of SEQ ID NO: 317722
cauagaaagcguuauacaa

SEQ ID NO: 324830 - RNA, 19 nt, Artificial Sequence
  Description of Artificial Sequence: Synthetic oligonucleotide
  Antisense Strand to SEQ ID NO: 324829
uuguauaacgcuuucuaug

SEQ ID NO: 324831 - RNA, 19 nt, Artificial Sequence
  Description of Artificial Sequence: Synthetic oligonucleotide
  Sense Strand Starting at position 78 of SEQ ID NO: 317922
ccuugacuugguuggauaa

SEQ ID NO: 324832 - RNA, 19 nt, Artificial Sequence
  Description of Artificial Sequence: Synthetic oligonucleotide
  Antisense Strand to SEQ ID NO: 324831
uuauccaaccaagucaagg

SEQ ID NO: 324833 - RNA, 19 nt, Artificial Sequence
  Description of Artificial Sequence: Synthetic oligonucleotide
  Sense Strand Starting at position 78 of SEQ ID NO: 317999
cuguuaacauuacuuguau

SEQ ID NO: 324834 - RNA, 19 nt, Artificial Sequence
  Description of Artificial Sequence: Synthetic oligonucleotide
  Antisense Strand to SEQ ID NO: 324833
auacaaguaauguuaacag

SEQ ID NO: 324835 - RNA, 19 nt, Artificial Sequence
  Description of Artificial Sequence: Synthetic oligonucleotide
  Sense Strand Starting at position 78 of SEQ ID NO: 318205
gucuguguuccuuaacaaa

SEQ ID NO: 324836 - RNA, 19 nt, Artificial Sequence
  Description of Artificial Sequence: Synthetic oligonucleotide
  Antisense Strand to SEQ ID NO: 324835
uuuguuaaggaacacagac

SEQ ID NO: 324837 - RNA, 19 nt, Artificial Sequence
  Description of Artificial Sequence: Synthetic oligonucleotide
  Sense Strand Starting at position 78 of SEQ ID NO: 318285
ucugaaacuuggguaaucu

SEQ ID NO: 324838 - RNA, 19 nt, Artificial Sequence
  Description of Artificial Sequence: Synthetic oligonucleotide
  Antisense Strand to SEQ ID NO: 324837
agauuacccaaguuucaga

SEQ ID NO: 324839 - RNA, 19 nt, Artificial Sequence
  Description of Artificial Sequence: Synthetic oligonucleotide
  Sense Strand Starting at position 78 of SEQ ID NO: 318293
uuggguaaucuguacacca

SEQ ID NO: 324840 - RNA, 19 nt, Artificial Sequence
  Description of Artificial Sequence: Synthetic oligonucleotide
  Antisense Strand to SEQ ID NO: 324839
ugguguacagauuacccaa

SEQ ID NO: 324841 - RNA, 19 nt, Artificial Sequence
  Description of Artificial Sequence: Synthetic oligonucleotide
  Sense Strand Starting at position 78 of SEQ ID NO: 318437
guuuguugugcuccuuauu

SEQ ID NO: 324842 - RNA, 19 nt, Artificial Sequence
  Description of Artificial Sequence: Synthetic oligonucleotide
  Antisense Strand to SEQ ID NO: 324841
aauaaggagcacaacaaac

SEQ ID NO: 324843 - RNA, 19 nt, Artificial Sequence
  Description of Artificial Sequence: Synthetic oligonucleotide
  Sense Strand Starting at position 78 of SEQ ID NO: 318484
aguuuaaauguccauccau

SEQ ID NO: 324844 - RNA, 19 nt, Artificial Sequence
  Description of Artificial Sequence: Synthetic oligonucleotide
  Antisense Strand to SEQ ID NO: 324843
auggauggacauuuaaacu

SEQ ID NO: 324845 - RNA, 19 nt, Artificial Sequence
  Description of Artificial Sequence: Synthetic oligonucleotide
  Sense Strand Starting at position 78 of SEQ ID NO: 318719
uuguuaauuguuuccgugu

SEQ ID NO: 324846 - RNA, 19 nt, Artificial Sequence
  Description of Artificial Sequence: Synthetic oligonucleotide
  Antisense Strand to SEQ ID NO: 324845
acacggaaacaauuaacaa

SEQ ID NO: 324847 - RNA, 19 nt, Artificial Sequence
  Description of Artificial Sequence: Synthetic oligonucleotide
  Sense Strand Starting at position 78 of SEQ ID NO: 318824
auguuuguuguacgaauuu

SEQ ID NO: 324848 - RNA, 19 nt, Artificial Sequence
  Description of Artificial Sequence: Synthetic oligonucleotide
  Antisense Strand to SEQ ID NO: 324847
aaauucguacaacaaacau

SEQ ID NO: 324849 - RNA, 19 nt, Artificial Sequence
  Description of Artificial Sequence: Synthetic oligonucleotide
  Sense Strand Starting at position 78 of SEQ ID NO: 318917
uugauaggucagggagagu

SEQ ID NO: 324850 - RNA, 19 nt, Artificial Sequence
  Description of Artificial Sequence: Synthetic oligonucleotide
  Antisense Strand to SEQ ID NO: 324849
acucucccugaccuaucaa

SEQ ID NO: 324851 - RNA, 19 nt, Artificial Sequence
  Description of Artificial Sequence: Synthetic oligonucleotide
  Sense Strand Starting at position 78 of SEQ ID NO: 319018
agaauaccucucuggauug

SEQ ID NO: 324852 - RNA, 19 nt, Artificial Sequence
  Description of Artificial Sequence: Synthetic oligonucleotide
  Antisense Strand to SEQ ID NO: 324851
caauccagagagguauucu

SEQ ID NO: 324853 - RNA, 19 nt, Artificial Sequence
  Description of Artificial Sequence: Synthetic oligonucleotide
  Sense Strand Starting at position 78 of SEQ ID NO: 319073
auauguauugguugaggau

SEQ ID NO: 324854 - RNA, 19 nt, Artificial Sequence
  Description of Artificial Sequence: Synthetic oligonucleotide
  Antisense Strand to SEQ ID NO: 324853
auccucaaccaauacauau

SEQ ID NO: 324855 - RNA, 19 nt, Artificial Sequence
  Description of Artificial Sequence: Synthetic oligonucleotide
  Sense Strand Starting at position 78 of SEQ ID NO: 319074
uauguauugguugaggauu

SEQ ID NO: 324856 - RNA, 19 nt, Artificial Sequence
  Description of Artificial Sequence: Synthetic oligonucleotide
  Antisense Strand to SEQ ID NO: 324855
aauccucaaccaauacaua

SEQ ID NO: 324857 - RNA, 19 nt, Artificial Sequence
  Description of Artificial Sequence: Synthetic oligonucleotide
  Sense Strand Starting at position 78 of SEQ ID NO: 319150
gggcuucuuuaaccugaua

SEQ ID NO: 324858 - RNA, 19 nt, Artificial Sequence
  Description of Artificial Sequence: Synthetic oligonucleotide
  Antisense Strand to SEQ ID NO: 324857
uaucagguuaaagaagccc

SEQ ID NO: 324859 - RNA, 19 nt, Artificial Sequence
  Description of Artificial Sequence: Synthetic oligonucleotide
  Sense Strand Starting at position 78 of SEQ ID NO: 319191
uucaucuuagggugggaua

SEQ ID NO: 324860 - RNA, 19 nt, Artificial Sequence
  Description of Artificial Sequence: Synthetic oligonucleotide
  Antisense Strand to SEQ ID NO: 324859
uaucccacccuaagaugaa

SEQ ID NO: 324861 - RNA, 19 nt, Artificial Sequence
  Description of Artificial Sequence: Synthetic oligonucleotide
  Sense Strand Starting at position 78 of SEQ ID NO: 319192
ucaucuuagggugggauau

SEQ ID NO: 324862 - RNA, 19 nt, Artificial Sequence
  Description of Artificial Sequence: Synthetic oligonucleotide
  Antisense Strand to SEQ ID NO: 324861
auaucccacccuaagauga

SEQ ID NO: 324863 - RNA, 19 nt, Artificial Sequence
  Description of Artificial Sequence: Synthetic oligonucleotide
  Sense Strand Starting at position 78 of SEQ ID NO: 319193
caucuuagggugggauaua

SEQ ID NO: 324864 - RNA, 19 nt, Artificial Sequence
  Description of Artificial Sequence: Synthetic oligonucleotide
  Antisense Strand to SEQ ID NO: 324863
uauaucccacccuaagaug

SEQ ID NO: 324865 - RNA, 19 nt, Artificial Sequence
  Description of Artificial Sequence: Synthetic oligonucleotide
  Sense Strand Starting at position 78 of SEQ ID NO: 319202
gugggauauaggcagcaua

SEQ ID NO: 324866 - RNA, 19 nt, Artificial Sequence
  Description of Artificial Sequence: Synthetic oligonucleotide
  Antisense Strand to SEQ ID NO: 324865
uaugcugccuauaucccac

SEQ ID NO: 324867 - RNA, 19 nt, Artificial Sequence
  Description of Artificial Sequence: Synthetic oligonucleotide
  Sense Strand Starting at position 79 of SEQ ID NO: 315510
ggccuuugucaacaguuau

SEQ ID NO: 324868 - RNA, 19 nt, Artificial Sequence
  Description of Artificial Sequence: Synthetic oligonucleotide
  Antisense Strand to SEQ ID NO: 324867
auaacuguugacaaaggcc

SEQ ID NO: 324869 - RNA, 19 nt, Artificial Sequence
  Description of Artificial Sequence: Synthetic oligonucleotide
  Sense Strand Starting at position 79 of SEQ ID NO: 315788
ucaagauauccaggcaaac

SEQ ID NO: 324870 - RNA, 19 nt, Artificial Sequence
  Description of Artificial Sequence: Synthetic oligonucleotide
  Antisense Strand to SEQ ID NO: 324869
guuugccuggauaucuuga

SEQ ID NO: 324871 - RNA, 19 nt, Artificial Sequence
  Description of Artificial Sequence: Synthetic oligonucleotide
  Sense Strand Starting at position 79 of SEQ ID NO: 315797
ccaggcaaaccuugaaaga

SEQ ID NO: 324872 - RNA, 19 nt, Artificial Sequence
  Description of Artificial Sequence: Synthetic oligonucleotide
  Antisense Strand to SEQ ID NO: 324871
ucuuucaagguuugccugg

SEQ ID NO: 324873 - RNA, 19 nt, Artificial Sequence
  Description of Artificial Sequence: Synthetic oligonucleotide
  Sense Strand Starting at position 79 of SEQ ID NO: 315869
ggagacuagaucgguauca

SEQ ID NO: 324874 - RNA, 19 nt, Artificial Sequence
  Description of Artificial Sequence: Synthetic oligonucleotide
  Antisense Strand to SEQ ID NO: 324873
ugauaccgaucuagucucc

SEQ ID NO: 324875 - RNA, 19 nt, Artificial Sequence
  Description of Artificial Sequence: Synthetic oligonucleotide
  Sense Strand Starting at position 79 of SEQ ID NO: 315938
caggaaugcccacacguau

SEQ ID NO: 324876 - RNA, 19 nt, Artificial Sequence
  Description of Artificial Sequence: Synthetic oligonucleotide
  Antisense Strand to SEQ ID NO: 324875
auacgugugggcauuccug

SEQ ID NO: 324877 - RNA, 19 nt, Artificial Sequence
  Description of Artificial Sequence: Synthetic oligonucleotide
  Sense Strand Starting at position 79 of SEQ ID NO: 316299
cucgaaaugcuccaaagag

SEQ ID NO: 324878 - RNA, 19 nt, Artificial Sequence
  Description of Artificial Sequence: Synthetic oligonucleotide
  Antisense Strand to SEQ ID NO: 324877
cucuuuggagcauuucgag

SEQ ID NO: 324879 - RNA, 19 nt, Artificial Sequence
  Description of Artificial Sequence: Synthetic oligonucleotide
  Sense Strand Starting at position 79 of SEQ ID NO: 317366
gggugucccuagagaacga

SEQ ID NO: 324880 - RNA, 19 nt, Artificial Sequence
  Description of Artificial Sequence: Synthetic oligonucleotide
  Antisense Strand to SEQ ID NO: 324879
ucguucucuagggacaccc

SEQ ID NO: 324881 - RNA, 19 nt, Artificial Sequence
  Description of Artificial Sequence: Synthetic oligonucleotide
  Sense Strand Starting at position 79 of SEQ ID NO: 317478
cgggcaucaucucuuaauc

SEQ ID NO: 324882 - RNA, 19 nt, Artificial Sequence
  Description of Artificial Sequence: Synthetic oligonucleotide
  Antisense Strand to SEQ ID NO: 324881
gauuaagagaugaugcccg

SEQ ID NO: 324883 - RNA, 19 nt, Artificial Sequence
  Description of Artificial Sequence: Synthetic oligonucleotide
  Sense Strand Starting at position 79 of SEQ ID NO: 317662
gguaaagccugggcuugaa

SEQ ID NO: 324884 - RNA, 19 nt, Artificial Sequence
  Description of Artificial Sequence: Synthetic oligonucleotide
  Antisense Strand to SEQ ID NO: 324883
uucaagcccaggcuuuacc

SEQ ID NO: 324885 - RNA, 19 nt, Artificial Sequence
  Description of Artificial Sequence: Synthetic oligonucleotide
  Sense Strand Starting at position 79 of SEQ ID NO: 317709
guucuaaaccacuguuagu

SEQ ID NO: 324886 - RNA, 19 nt, Artificial Sequence
  Description of Artificial Sequence: Synthetic oligonucleotide
  Antisense Strand to SEQ ID NO: 324885
acuaacagugguuuagaac

SEQ ID NO: 324887 - RNA, 19 nt, Artificial Sequence
  Description of Artificial Sequence: Synthetic oligonucleotide
  Sense Strand Starting at position 79 of SEQ ID NO: 317718
cacuguuagugacuagaga

SEQ ID NO: 324888 - RNA, 19 nt, Artificial Sequence
  Description of Artificial Sequence: Synthetic oligonucleotide
  Antisense Strand to SEQ ID NO: 324887
ucucuagucacuaacagug

SEQ ID NO: 324889 - RNA, 19 nt, Artificial Sequence
  Description of Artificial Sequence: Synthetic oligonucleotide
  Sense Strand Starting at position 79 of SEQ ID NO: 317780
cagagaacaugguaagaau

SEQ ID NO: 324890 - RNA, 19 nt, Artificial Sequence
  Description of Artificial Sequence: Synthetic oligonucleotide
  Antisense Strand to SEQ ID NO: 324889
auucuuaccauguucucug

SEQ ID NO: 324891 - RNA, 19 nt, Artificial Sequence
  Description of Artificial Sequence: Synthetic oligonucleotide
  Sense Strand Starting at position 79 of SEQ ID NO: 317812
cucaaagucuuagcagaac

SEQ ID NO: 324892 - RNA, 19 nt, Artificial Sequence
  Description of Artificial Sequence: Synthetic oligonucleotide
  Antisense Strand to SEQ ID NO: 324891
guucugcuaagacuuugag

SEQ ID NO: 324893 - RNA, 19 nt, Artificial Sequence
  Description of Artificial Sequence: Synthetic oligonucleotide
  Sense Strand Starting at position 79 of SEQ ID NO: 317883
agcaguauagcauggugau

SEQ ID NO: 324894 - RNA, 19 nt, Artificial Sequence
  Description of Artificial Sequence: Synthetic oligonucleotide
  Antisense Strand to SEQ ID NO: 324893
aucaccaugcuauacugcu

SEQ ID NO: 324895 - RNA, 19 nt, Artificial Sequence
  Description of Artificial Sequence: Synthetic oligonucleotide
  Sense Strand Starting at position 79 of SEQ ID NO: 318022
cauggugcugagugagaaa

SEQ ID NO: 324896 - RNA, 19 nt, Artificial Sequence
  Description of Artificial Sequence: Synthetic oligonucleotide
  Antisense Strand to SEQ ID NO: 324895
uuucucacucagcaccaug

SEQ ID NO: 324897 - RNA, 19 nt, Artificial Sequence
  Description of Artificial Sequence: Synthetic oligonucleotide
  Sense Strand Starting at position 79 of SEQ ID NO: 318033
gugagaaauucagugagau

SEQ ID NO: 324898 - RNA, 19 nt, Artificial Sequence
  Description of Artificial Sequence: Synthetic oligonucleotide
  Antisense Strand to SEQ ID NO: 324897
aucucacugaauuucucac

SEQ ID NO: 324899 - RNA, 19 nt, Artificial Sequence
  Description of Artificial Sequence: Synthetic oligonucleotide
  Sense Strand Starting at position 79 of SEQ ID NO: 318047
gagauaaacugauaaagug

SEQ ID NO: 324900 - RNA, 19 nt, Artificial Sequence
  Description of Artificial Sequence: Synthetic oligonucleotide
  Antisense Strand to SEQ ID NO: 324899
cacuuuaucaguuuaucuc

SEQ ID NO: 324901 - RNA, 19 nt, Artificial Sequence
  Description of Artificial Sequence: Synthetic oligonucleotide
  Sense Strand Starting at position 79 of SEQ ID NO: 318057
gauaaagugcucugcaccu

SEQ ID NO: 324902 - RNA, 19 nt, Artificial Sequence
  Description of Artificial Sequence: Synthetic oligonucleotide
  Antisense Strand to SEQ ID NO: 324901
aggugcagagcacuuuauc

SEQ ID NO: 324903 - RNA, 19 nt, Artificial Sequence
  Description of Artificial Sequence: Synthetic oligonucleotide
  Sense Strand Starting at position 79 of SEQ ID NO: 318158
gaggcugucccuggaggua

SEQ ID NO: 324904 - RNA, 19 nt, Artificial Sequence
  Description of Artificial Sequence: Synthetic oligonucleotide
  Antisense Strand to SEQ ID NO: 324903
uaccuccagggacagccuc

SEQ ID NO: 324905 - RNA, 19 nt, Artificial Sequence
  Description of Artificial Sequence: Synthetic oligonucleotide
  Sense Strand Starting at position 79 of SEQ ID NO: 318174
guaagaagcccuugggcuu

SEQ ID NO: 324906 - RNA, 19 nt, Artificial Sequence
  Description of Artificial Sequence: Synthetic oligonucleotide
  Antisense Strand to SEQ ID NO: 324905
aagcccaagggcuucuuac

SEQ ID NO: 324907 - RNA, 19 nt, Artificial Sequence
  Description of Artificial Sequence: Synthetic oligonucleotide
  Sense Strand Starting at position 79 of SEQ ID NO: 318261
ggccaugagugaguugaaa

SEQ ID NO: 324908 - RNA, 19 nt, Artificial Sequence
  Description of Artificial Sequence: Synthetic oligonucleotide
  Antisense Strand to SEQ ID NO: 324907
uuucaacucacucauggcc

SEQ ID NO: 324909 - RNA, 19 nt, Artificial Sequence
  Description of Artificial Sequence: Synthetic oligonucleotide
  Sense Strand Starting at position 79 of SEQ ID NO: 318263
ccaugagugaguugaaaga

SEQ ID NO: 324910 - RNA, 19 nt, Artificial Sequence
  Description of Artificial Sequence: Synthetic oligonucleotide
  Antisense Strand to SEQ ID NO: 324909
ucuuucaacucacucaugg

SEQ ID NO: 324911 - RNA, 19 nt, Artificial Sequence
  Description of Artificial Sequence: Synthetic oligonucleotide
  Sense Strand Starting at position 79 of SEQ ID NO: 318300
cgacuucaagucuguggau

SEQ ID NO: 324912 - RNA, 19 nt, Artificial Sequence
  Description of Artificial Sequence: Synthetic oligonucleotide
  Antisense Strand to SEQ ID NO: 324911
auccacagacuugaagucg

SEQ ID NO: 324913 - RNA, 19 nt, Artificial Sequence
  Description of Artificial Sequence: Synthetic oligonucleotide
  Sense Strand Starting at position 79 of SEQ ID NO: 318459
ggccgaaacccaggugaua

SEQ ID NO: 324914 - RNA, 19 nt, Artificial Sequence
  Description of Artificial Sequence: Synthetic oligonucleotide
  Antisense Strand to SEQ ID NO: 324913
uaucaccuggguuucggcc

SEQ ID NO: 324915 - RNA, 19 nt, Artificial Sequence
  Description of Artificial Sequence: Synthetic oligonucleotide
  Sense Strand Starting at position 79 of SEQ ID NO: 318515
caaguuaugggauggguca

SEQ ID NO: 324916 - RNA, 19 nt, Artificial Sequence
  Description of Artificial Sequence: Synthetic oligonucleotide
  Antisense Strand to SEQ ID NO: 324915
ugacccaucccauaacuug

SEQ ID NO: 324917 - RNA, 19 nt, Artificial Sequence
  Description of Artificial Sequence: Synthetic oligonucleotide
  Sense Strand Starting at position 79 of SEQ ID NO: 318516
aaguuaugggaugggucau

SEQ ID NO: 324918 - RNA, 19 nt, Artificial Sequence
  Description of Artificial Sequence: Synthetic oligonucleotide
  Antisense Strand to SEQ ID NO: 324917
augacccaucccauaacuu

SEQ ID NO: 324919 - RNA, 19 nt, Artificial Sequence
  Description of Artificial Sequence: Synthetic oligonucleotide
  Sense Strand Starting at position 79 of SEQ ID NO: 318517
aguuaugggaugggucauu

SEQ ID NO: 324920 - RNA, 19 nt, Artificial Sequence
  Description of Artificial Sequence: Synthetic oligonucleotide
  Antisense Strand to SEQ ID NO: 324919
aaugacccaucccauaacu

SEQ ID NO: 324921 - RNA, 19 nt, Artificial Sequence
  Description of Artificial Sequence: Synthetic oligonucleotide
  Sense Strand Starting at position 79 of SEQ ID NO: 318522
ugggaugggucauugaguu

SEQ ID NO: 324922 - RNA, 19 nt, Artificial Sequence
  Description of Artificial Sequence: Synthetic oligonucleotide
  Antisense Strand to SEQ ID NO: 324921
aacucaaugacccauccca

SEQ ID NO: 324923 - RNA, 19 nt, Artificial Sequence
  Description of Artificial Sequence: Synthetic oligonucleotide
  Sense Strand Starting at position 79 of SEQ ID NO: 318601
cuggguuugcaugacacaa

SEQ ID NO: 324924 - RNA, 19 nt, Artificial Sequence
  Description of Artificial Sequence: Synthetic oligonucleotide
  Antisense Strand to SEQ ID NO: 324923
uugugucaugcaaacccag

SEQ ID NO: 324925 - RNA, 19 nt, Artificial Sequence
  Description of Artificial Sequence: Synthetic oligonucleotide
  Sense Strand Starting at position 79 of SEQ ID NO: 318716
guccuaugcuagucauuag

SEQ ID NO: 324926 - RNA, 19 nt, Artificial Sequence
  Description of Artificial Sequence: Synthetic oligonucleotide
  Antisense Strand to SEQ ID NO: 324925
cuaaugacuagcauaggac

SEQ ID NO: 324927 - RNA, 19 nt, Artificial Sequence
  Description of Artificial Sequence: Synthetic oligonucleotide
  Sense Strand Starting at position 79 of SEQ ID NO: 318719
cuaugcuagucauuagaga

SEQ ID NO: 324928 - RNA, 19 nt, Artificial Sequence
  Description of Artificial Sequence: Synthetic oligonucleotide
  Antisense Strand to SEQ ID NO: 324927
ucucuaaugacuagcauag

SEQ ID NO: 324929 - RNA, 19 nt, Artificial Sequence
  Description of Artificial Sequence: Synthetic oligonucleotide
  Sense Strand Starting at position 79 of SEQ ID NO: 318828
uuagcaguccuagggaacu

SEQ ID NO: 324930 - RNA, 19 nt, Artificial Sequence
  Description of Artificial Sequence: Synthetic oligonucleotide
  Antisense Strand to SEQ ID NO: 324929
aguucccuaggacugcuaa

SEQ ID NO: 324931 - RNA, 19 nt, Artificial Sequence
  Description of Artificial Sequence: Synthetic oligonucleotide
  Sense Strand Starting at position 79 of SEQ ID NO: 318896
ugcuguuuccuagcuaugu

SEQ ID NO: 324932 - RNA, 19 nt, Artificial Sequence
  Description of Artificial Sequence: Synthetic oligonucleotide
  Antisense Strand to SEQ ID NO: 324931
acauagcuaggaaacagca

SEQ ID NO: 324933 - RNA, 19 nt, Artificial Sequence
  Description of Artificial Sequence: Synthetic oligonucleotide
  Sense Strand Starting at position 79 of SEQ ID NO: 318919
uugagaaaguugccucaua

SEQ ID NO: 324934 - RNA, 19 nt, Artificial Sequence
  Description of Artificial Sequence: Synthetic oligonucleotide
  Antisense Strand to SEQ ID NO: 324933
uaugaggcaacuuucucaa

SEQ ID NO: 324935 - RNA, 19 nt, Artificial Sequence
  Description of Artificial Sequence: Synthetic oligonucleotide
  Sense Strand Starting at position 79 of SEQ ID NO: 318920
ugagaaaguugccucauau

SEQ ID NO: 324936 - RNA, 19 nt, Artificial Sequence
  Description of Artificial Sequence: Synthetic oligonucleotide
  Antisense Strand to SEQ ID NO: 324935
auaugaggcaacuuucuca

SEQ ID NO: 324937 - RNA, 19 nt, Artificial Sequence
  Description of Artificial Sequence: Synthetic oligonucleotide
  Sense Strand Starting at position 79 of SEQ ID NO: 318934
cauaucucugagugucagu

SEQ ID NO: 324938 - RNA, 19 nt, Artificial Sequence
  Description of Artificial Sequence: Synthetic oligonucleotide
  Antisense Strand to SEQ ID NO: 324937
acugacacucagagauaug

SEQ ID NO: 324939 - RNA, 19 nt, Artificial Sequence
  Description of Artificial Sequence: Synthetic oligonucleotide
  Sense Strand Starting at position 79 of SEQ ID NO: 319045
gccagacacuaaguaagua

SEQ ID NO: 324940 - RNA, 19 nt, Artificial Sequence
  Description of Artificial Sequence: Synthetic oligonucleotide
  Antisense Strand to SEQ ID NO: 324939
uacuuacuuagugucuggc

SEQ ID NO: 324941 - RNA, 19 nt, Artificial Sequence
  Description of Artificial Sequence: Synthetic oligonucleotide
  Sense Strand Starting at position 79 of SEQ ID NO: 319079
auuugcuacucugaugacu

SEQ ID NO: 324942 - RNA, 19 nt, Artificial Sequence
  Description of Artificial Sequence: Synthetic oligonucleotide
  Antisense Strand to SEQ ID NO: 324941
agucaucagaguagcaaau

SEQ ID NO: 324943 - RNA, 19 nt, Artificial Sequence
  Description of Artificial Sequence: Synthetic oligonucleotide
  Sense Strand Starting at position 79 of SEQ ID NO: 319082
ugcuacucugaugacuuua

SEQ ID NO: 324944 - RNA, 19 nt, Artificial Sequence
  Description of Artificial Sequence: Synthetic oligonucleotide
  Antisense Strand to SEQ ID NO: 324943
uaaagucaucagaguagca

SEQ ID NO: 324945 - RNA, 19 nt, Artificial Sequence
  Description of Artificial Sequence: Synthetic oligonucleotide
  Sense Strand Starting at position 79 of SEQ ID NO: 319195
uagcuuauggucuaguuga

SEQ ID NO: 324946 - RNA, 19 nt, Artificial Sequence
  Description of Artificial Sequence: Synthetic oligonucleotide
  Antisense Strand to SEQ ID NO: 324945
ucaacuagaccauaagcua

SEQ ID NO: 324947 - RNA, 19 nt, Artificial Sequence
  Description of Artificial Sequence: Synthetic oligonucleotide
  Sense Strand Starting at position 80 of SEQ ID NO: 315447
aauguauuaugguaagaag

SEQ ID NO: 324948 - RNA, 19 nt, Artificial Sequence
  Description of Artificial Sequence: Synthetic oligonucleotide
  Antisense Strand to SEQ ID NO: 324947
cuucuuaccauaauacauu

SEQ ID NO: 324949 - RNA, 19 nt, Artificial Sequence
  Description of Artificial Sequence: Synthetic oligonucleotide
  Sense Strand Starting at position 80 of SEQ ID NO: 315635
ugcaguagugguuacacaa

SEQ ID NO: 324950 - RNA, 19 nt, Artificial Sequence
  Description of Artificial Sequence: Synthetic oligonucleotide
  Antisense Strand to SEQ ID NO: 324949
uuguguaaccacuacugca

SEQ ID NO: 324951 - RNA, 19 nt, Artificial Sequence
  Description of Artificial Sequence: Synthetic oligonucleotide
  Sense Strand Starting at position 80 of SEQ ID NO: 315725
gagugaucacaguguacua

SEQ ID NO: 324952 - RNA, 19 nt, Artificial Sequence
  Description of Artificial Sequence: Synthetic oligonucleotide
  Antisense Strand to SEQ ID NO: 324951
uaguacacugugaucacuc

SEQ ID NO: 324953 - RNA, 19 nt, Artificial Sequence
  Description of Artificial Sequence: Synthetic oligonucleotide
  Sense Strand Starting at position 80 of SEQ ID NO: 315738
guacuacggccucgaacuu

SEQ ID NO: 324954 - RNA, 19 nt, Artificial Sequence
  Description of Artificial Sequence: Synthetic oligonucleotide
  Antisense Strand to SEQ ID NO: 324953
aaguucgaggccguaguac

SEQ ID NO: 324955 - RNA, 19 nt, Artificial Sequence
  Description of Artificial Sequence: Synthetic oligonucleotide
  Sense Strand Starting at position 80 of SEQ ID NO: 316132
ggccuuugucaacaguuau

SEQ ID NO: 324956 - RNA, 19 nt, Artificial Sequence
  Description of Artificial Sequence: Synthetic oligonucleotide
  Antisense Strand to SEQ ID NO: 324955
auaacuguugacaaaggcc

SEQ ID NO: 324957 - RNA, 19 nt, Artificial Sequence
  Description of Artificial Sequence: Synthetic oligonucleotide
  Sense Strand Starting at position 80 of SEQ ID NO: 316138
ugucaacaguuauagaaag

SEQ ID NO: 324958 - RNA, 19 nt, Artificial Sequence
  Description of Artificial Sequence: Synthetic oligonucleotide
  Antisense Strand to SEQ ID NO: 324957
cuuucuauaacuguugaca

SEQ ID NO: 324959 - RNA, 19 nt, Artificial Sequence
  Description of Artificial Sequence: Synthetic oligonucleotide
  Sense Strand Starting at position 80 of SEQ ID NO: 316410
ucaagauauccaggcaaac

SEQ ID NO: 324960 - RNA, 19 nt, Artificial Sequence
  Description of Artificial Sequence: Synthetic oligonucleotide
  Antisense Strand to SEQ ID NO: 324959
guuugccuggauaucuuga

SEQ ID NO: 324961 - RNA, 19 nt, Artificial Sequence
  Description of Artificial Sequence: Synthetic oligonucleotide
  Sense Strand Starting at position 80 of SEQ ID NO: 316419
ccaggcaaaccuugaaaga

SEQ ID NO: 324962 - RNA, 19 nt, Artificial Sequence
  Description of Artificial Sequence: Synthetic oligonucleotide
  Antisense Strand to SEQ ID NO: 324961
ucuuucaagguuugccugg

SEQ ID NO: 324963 - RNA, 19 nt, Artificial Sequence
  Description of Artificial Sequence: Synthetic oligonucleotide
  Sense Strand Starting at position 80 of SEQ ID NO: 316491
ggagacuagaucgguauca

SEQ ID NO: 324964 - RNA, 19 nt, Artificial Sequence
  Description of Artificial Sequence: Synthetic oligonucleotide
  Antisense Strand to SEQ ID NO: 324963
ugauaccgaucuagucucc

SEQ ID NO: 324965 - RNA, 19 nt, Artificial Sequence
  Description of Artificial Sequence: Synthetic oligonucleotide
  Sense Strand Starting at position 80 of SEQ ID NO: 316548
agucacaacucccaggaau

SEQ ID NO: 324966 - RNA, 19 nt, Artificial Sequence
  Description of Artificial Sequence: Synthetic oligonucleotide
  Antisense Strand to SEQ ID NO: 324965
auuccugggaguugugacu

SEQ ID NO: 324967 - RNA, 19 nt, Artificial Sequence
  Description of Artificial Sequence: Synthetic oligonucleotide
  Sense Strand Starting at position 80 of SEQ ID NO: 316560
caggaaugcccacacguau

SEQ ID NO: 324968 - RNA, 19 nt, Artificial Sequence
  Description of Artificial Sequence: Synthetic oligonucleotide
  Antisense Strand to SEQ ID NO: 324967
auacgugugggcauuccug

SEQ ID NO: 324969 - RNA, 19 nt, Artificial Sequence
  Description of Artificial Sequence: Synthetic oligonucleotide
  Sense Strand Starting at position 80 of SEQ ID NO: 316840
ggcguaugucgugaaguuc

SEQ ID NO: 324970 - RNA, 19 nt, Artificial Sequence
  Description of Artificial Sequence: Synthetic oligonucleotide
  Antisense Strand to SEQ ID NO: 324969
gaacuucacgacauacgcc

SEQ ID NO: 324971 - RNA, 19 nt, Artificial Sequence
  Description of Artificial Sequence: Synthetic oligonucleotide
  Sense Strand Starting at position 80 of SEQ ID NO: 316921
cucgaaaugcuccaaagag

SEQ ID NO: 324972 - RNA, 19 nt, Artificial Sequence
  Description of Artificial Sequence: Synthetic oligonucleotide
  Antisense Strand to SEQ ID NO: 324971
cucuuuggagcauuucgag

SEQ ID NO: 324973 - RNA, 19 nt, Artificial Sequence
  Description of Artificial Sequence: Synthetic oligonucleotide
  Sense Strand Starting at position 80 of SEQ ID NO: 317988
gggugucccuagagaacga

SEQ ID NO: 324974 - RNA, 19 nt, Artificial Sequence
  Description of Artificial Sequence: Synthetic oligonucleotide
  Antisense Strand to SEQ ID NO: 324973
ucguucucuagggacaccc

SEQ ID NO: 324975 - RNA, 19 nt, Artificial Sequence
  Description of Artificial Sequence: Synthetic oligonucleotide
  Sense Strand Starting at position 80 of SEQ ID NO: 318062
gucccacuucugugccaga

SEQ ID NO: 324976 - RNA, 19 nt, Artificial Sequence
  Description of Artificial Sequence: Synthetic oligonucleotide
  Antisense Strand to SEQ ID NO: 324975
ucuggcacagaagugggac

SEQ ID NO: 324977 - RNA, 19 nt, Artificial Sequence
  Description of Artificial Sequence: Synthetic oligonucleotide
  Sense Strand Starting at position 80 of SEQ ID NO: 318100
cgggcaucaucucuuaauc

SEQ ID NO: 324978 - RNA, 19 nt, Artificial Sequence
  Description of Artificial Sequence: Synthetic oligonucleotide
  Antisense Strand to SEQ ID NO: 324977
gauuaagagaugaugcccg

SEQ ID NO: 324979 - RNA, 19 nt, Artificial Sequence
  Description of Artificial Sequence: Synthetic oligonucleotide
  Sense Strand Starting at position 80 of SEQ ID NO: 318284
gguaaagccugggcuugaa

SEQ ID NO: 324980 - RNA, 19 nt, Artificial Sequence
  Description of Artificial Sequence: Synthetic oligonucleotide
  Antisense Strand to SEQ ID NO: 324979
uucaagcccaggcuuuacc

SEQ ID NO: 324981 - RNA, 19 nt, Artificial Sequence
  Description of Artificial Sequence: Synthetic oligonucleotide
  Sense Strand Starting at position 80 of SEQ ID NO: 318331
guucuaaaccacuguuagu

SEQ ID NO: 324982 - RNA, 19 nt, Artificial Sequence
  Description of Artificial Sequence: Synthetic oligonucleotide
  Antisense Strand to SEQ ID NO: 324981
acuaacagugguuuagaac

SEQ ID NO: 324983 - RNA, 19 nt, Artificial Sequence
  Description of Artificial Sequence: Synthetic oligonucleotide
  Sense Strand Starting at position 80 of SEQ ID NO: 318340
cacuguuagugacuagaga

SEQ ID NO: 324984 - RNA, 19 nt, Artificial Sequence
  Description of Artificial Sequence: Synthetic oligonucleotide
  Antisense Strand to SEQ ID NO: 324983
ucucuagucacuaacagug

SEQ ID NO: 324985 - RNA, 19 nt, Artificial Sequence
  Description of Artificial Sequence: Synthetic oligonucleotide
  Sense Strand Starting at position 80 of SEQ ID NO: 318390
ggccaagagucccagagaa

SEQ ID NO: 324986 - RNA, 19 nt, Artificial Sequence
  Description of Artificial Sequence: Synthetic oligonucleotide
  Antisense Strand to SEQ ID NO: 324985
uucucugggacucuuggcc

SEQ ID NO: 324987 - RNA, 19 nt, Artificial Sequence
  Description of Artificial Sequence: Synthetic oligonucleotide
  Sense Strand Starting at position 80 of SEQ ID NO: 318402
cagagaacaugguaagaau

SEQ ID NO: 324988 - RNA, 19 nt, Artificial Sequence
  Description of Artificial Sequence: Synthetic oligonucleotide
  Antisense Strand to SEQ ID NO: 324987
auucuuaccauguucucug

SEQ ID NO: 324989 - RNA, 19 nt, Artificial Sequence
  Description of Artificial Sequence: Synthetic oligonucleotide
  Sense Strand Starting at position 80 of SEQ ID NO: 318434
cucaaagucuuagcagaac

SEQ ID NO: 324990 - RNA, 19 nt, Artificial Sequence
  Description of Artificial Sequence: Synthetic oligonucleotide
  Antisense Strand to SEQ ID NO: 324989
guucugcuaagacuuugag

SEQ ID NO: 324991 - RNA, 19 nt, Artificial Sequence
  Description of Artificial Sequence: Synthetic oligonucleotide
  Sense Strand Starting at position 80 of SEQ ID NO: 318505
agcaguauagcauggugau

SEQ ID NO: 324992 - RNA, 19 nt, Artificial Sequence
  Description of Artificial Sequence: Synthetic oligonucleotide
  Antisense Strand to SEQ ID NO: 324991
aucaccaugcuauacugcu

SEQ ID NO: 324993 - RNA, 19 nt, Artificial Sequence
  Description of Artificial Sequence: Synthetic oligonucleotide
  Sense Strand Starting at position 80 of SEQ ID NO: 318506
gcaguauagcauggugauc

SEQ ID NO: 324994 - RNA, 19 nt, Artificial Sequence
  Description of Artificial Sequence: Synthetic oligonucleotide
  Antisense Strand to SEQ ID NO: 324993
gaucaccaugcuauacugc

SEQ ID NO: 324995 - RNA, 19 nt, Artificial Sequence
  Description of Artificial Sequence: Synthetic oligonucleotide
  Sense Strand Starting at position 80 of SEQ ID NO: 318644
cauggugcugagugagaaa

SEQ ID NO: 324996 - RNA, 19 nt, Artificial Sequence
  Description of Artificial Sequence: Synthetic oligonucleotide
  Antisense Strand to SEQ ID NO: 324995
uuucucacucagcaccaug

SEQ ID NO: 324997 - RNA, 19 nt, Artificial Sequence
  Description of Artificial Sequence: Synthetic oligonucleotide
  Sense Strand Starting at position 80 of SEQ ID NO: 318655
gugagaaauucagugagau

SEQ ID NO: 324998 - RNA, 19 nt, Artificial Sequence
  Description of Artificial Sequence: Synthetic oligonucleotide
  Antisense Strand to SEQ ID NO: 324997
aucucacugaauuucucac

SEQ ID NO: 324999 - RNA, 19 nt, Artificial Sequence
  Description of Artificial Sequence: Synthetic oligonucleotide
  Sense Strand Starting at position 80 of SEQ ID NO: 318669
gagauaaacugauaaagug

SEQ ID NO: 325000 - RNA, 19 nt, Artificial Sequence
  Description of Artificial Sequence: Synthetic oligonucleotide
  Antisense Strand to SEQ ID NO: 324999
cacuuuaucaguuuaucuc

SEQ ID NO: 325001 - RNA, 19 nt, Artificial Sequence
  Description of Artificial Sequence: Synthetic oligonucleotide
  Sense Strand Starting at position 80 of SEQ ID NO: 318679
gauaaagugcucugcaccu

SEQ ID NO: 325002 - RNA, 19 nt, Artificial Sequence
  Description of Artificial Sequence: Synthetic oligonucleotide
  Antisense Strand to SEQ ID NO: 325001
aggugcagagcacuuuauc

SEQ ID NO: 325003 - RNA, 19 nt, Artificial Sequence
  Description of Artificial Sequence: Synthetic oligonucleotide
  Sense Strand Starting at position 80 of SEQ ID NO: 318708
ccaguuaagugcccuguga

SEQ ID NO: 325004 - RNA, 19 nt, Artificial Sequence
  Description of Artificial Sequence: Synthetic oligonucleotide
  Antisense Strand to SEQ ID NO: 325003
ucacagggcacuuaacugg

SEQ ID NO: 325005 - RNA, 19 nt, Artificial Sequence
  Description of Artificial Sequence: Synthetic oligonucleotide
  Sense Strand Starting at position 80 of SEQ ID NO: 318710
aguuaagugcccugugagu

SEQ ID NO: 325006 - RNA, 19 nt, Artificial Sequence
  Description of Artificial Sequence: Synthetic oligonucleotide
  Antisense Strand to SEQ ID NO: 325005
acucacagggcacuuaacu

SEQ ID NO: 325007 - RNA, 19 nt, Artificial Sequence
  Description of Artificial Sequence: Synthetic oligonucleotide
  Sense Strand Starting at position 80 of SEQ ID NO: 318780
gaggcugucccuggaggua

SEQ ID NO: 325008 - RNA, 19 nt, Artificial Sequence
  Description of Artificial Sequence: Synthetic oligonucleotide
  Antisense Strand to SEQ ID NO: 325007
uaccuccagggacagccuc

SEQ ID NO: 325009 - RNA, 19 nt, Artificial Sequence
  Description of Artificial Sequence: Synthetic oligonucleotide
  Sense Strand Starting at position 80 of SEQ ID NO: 318796
guaagaagcccuugggcuu

SEQ ID NO: 325010 - RNA, 19 nt, Artificial Sequence
  Description of Artificial Sequence: Synthetic oligonucleotide
  Antisense Strand to SEQ ID NO: 325009
aagcccaagggcuucuuac

SEQ ID NO: 325011 - RNA, 19 nt, Artificial Sequence
  Description of Artificial Sequence: Synthetic oligonucleotide
  Sense Strand Starting at position 80 of SEQ ID NO: 318883
ggccaugagugaguugaaa

SEQ ID NO: 325012 - RNA, 19 nt, Artificial Sequence
  Description of Artificial Sequence: Synthetic oligonucleotide
  Antisense Strand to SEQ ID NO: 325011
uuucaacucacucauggcc

SEQ ID NO: 325013 - RNA, 19 nt, Artificial Sequence
  Description of Artificial Sequence: Synthetic oligonucleotide
  Sense Strand Starting at position 80 of SEQ ID NO: 318885
ccaugagugaguugaaaga

SEQ ID NO: 325014 - RNA, 19 nt, Artificial Sequence
  Description of Artificial Sequence: Synthetic oligonucleotide
  Antisense Strand to SEQ ID NO: 325013
ucuuucaacucacucaugg

SEQ ID NO: 325015 - RNA, 19 nt, Artificial Sequence
  Description of Artificial Sequence: Synthetic oligonucleotide
  Sense Strand Starting at position 80 of SEQ ID NO: 318922
cgacuucaagucuguggau

SEQ ID NO: 325016 - RNA, 19 nt, Artificial Sequence
  Description of Artificial Sequence: Synthetic oligonucleotide
  Antisense Strand to SEQ ID NO: 325015
auccacagacuugaagucg

SEQ ID NO: 325017 - RNA, 19 nt, Artificial Sequence
  Description of Artificial Sequence: Synthetic oligonucleotide
  Sense Strand Starting at position 80 of SEQ ID NO: 319081
ggccgaaacccaggugaua

SEQ ID NO: 325018 - RNA, 19 nt, Artificial Sequence
  Description of Artificial Sequence: Synthetic oligonucleotide
  Antisense Strand to SEQ ID NO: 325017
uaucaccuggguuucggcc

SEQ ID NO: 325019 - RNA, 19 nt, Artificial Sequence
  Description of Artificial Sequence: Synthetic oligonucleotide
  Sense Strand Starting at position 80 of SEQ ID NO: 319137
caaguuaugggauggguca

SEQ ID NO: 325020 - RNA, 19 nt, Artificial Sequence
  Description of Artificial Sequence: Synthetic oligonucleotide
  Antisense Strand to SEQ ID NO: 325019
ugacccaucccauaacuug

SEQ ID NO: 325021 - RNA, 19 nt, Artificial Sequence
  Description of Artificial Sequence: Synthetic oligonucleotide
  Sense Strand Starting at position 80 of SEQ ID NO: 319138
aaguuaugggaugggucau

SEQ ID NO: 325022 - RNA, 19 nt, Artificial Sequence
  Description of Artificial Sequence: Synthetic oligonucleotide
  Antisense Strand to SEQ ID NO: 325021
augacccaucccauaacuu

SEQ ID NO: 325023 - RNA, 19 nt, Artificial Sequence
  Description of Artificial Sequence: Synthetic oligonucleotide
  Sense Strand Starting at position 80 of SEQ ID NO: 319139
aguuaugggaugggucauu

SEQ ID NO: 325024 - RNA, 19 nt, Artificial Sequence
  Description of Artificial Sequence: Synthetic oligonucleotide
  Antisense Strand to SEQ ID NO: 325023
aaugacccaucccauaacu

SEQ ID NO: 325025 - RNA, 19 nt, Artificial Sequence
  Description of Artificial Sequence: Synthetic oligonucleotide
  Sense Strand Starting at position 80 of SEQ ID NO: 319144
ugggaugggucauugaguu

SEQ ID NO: 325026 - RNA, 19 nt, Artificial Sequence
  Description of Artificial Sequence: Synthetic oligonucleotide
  Antisense Strand to SEQ ID NO: 325025
aacucaaugacccauccca

SEQ ID NO: 325027 - RNA, 19 nt, Artificial Sequence
  Description of Artificial Sequence: Synthetic oligonucleotide
  Sense Strand Starting at position 81 of SEQ ID NO: 315563
ggccuuugucaacaguuau

SEQ ID NO: 325028 - RNA, 19 nt, Artificial Sequence
  Description of Artificial Sequence: Synthetic oligonucleotide
  Antisense Strand to SEQ ID NO: 325027
auaacuguugacaaaggcc

SEQ ID NO: 325029 - RNA, 19 nt, Artificial Sequence
  Description of Artificial Sequence: Synthetic oligonucleotide
  Sense Strand Starting at position 81 of SEQ ID NO: 315841
ucaagauauccaggcaaac

SEQ ID NO: 325030 - RNA, 19 nt, Artificial Sequence
  Description of Artificial Sequence: Synthetic oligonucleotide
  Antisense Strand to SEQ ID NO: 325029
guuugccuggauaucuuga

SEQ ID NO: 325031 - RNA, 19 nt, Artificial Sequence
  Description of Artificial Sequence: Synthetic oligonucleotide
  Sense Strand Starting at position 81 of SEQ ID NO: 315850
ccaggcaaaccuugaaaga

SEQ ID NO: 325032 - RNA, 19 nt, Artificial Sequence
  Description of Artificial Sequence: Synthetic oligonucleotide
  Antisense Strand to SEQ ID NO: 325031
ucuuucaagguuugccugg

SEQ ID NO: 325033 - RNA, 19 nt, Artificial Sequence
  Description of Artificial Sequence: Synthetic oligonucleotide
  Sense Strand Starting at position 81 of SEQ ID NO: 315922
ggagacuagaucgguauca

SEQ ID NO: 325034 - RNA, 19 nt, Artificial Sequence
  Description of Artificial Sequence: Synthetic oligonucleotide
  Antisense Strand to SEQ ID NO: 325033
ugauaccgaucuagucucc

SEQ ID NO: 325035 - RNA, 19 nt, Artificial Sequence
  Description of Artificial Sequence: Synthetic oligonucleotide
  Sense Strand Starting at position 81 of SEQ ID NO: 315991
caggaaugcccacacguau

SEQ ID NO: 325036 - RNA, 19 nt, Artificial Sequence
  Description of Artificial Sequence: Synthetic oligonucleotide
  Antisense Strand to SEQ ID NO: 325035
auacgugugggcauuccug

SEQ ID NO: 325037 - RNA, 19 nt, Artificial Sequence
  Description of Artificial Sequence: Synthetic oligonucleotide
  Sense Strand Starting at position 81 of SEQ ID NO: 316352
cucgaaaugcuccaaagag

SEQ ID NO: 325038 - RNA, 19 nt, Artificial Sequence
  Description of Artificial Sequence: Synthetic oligonucleotide
  Antisense Strand to SEQ ID NO: 325037
cucuuuggagcauuucgag

SEQ ID NO: 325039 - RNA, 19 nt, Artificial Sequence
  Description of Artificial Sequence: Synthetic oligonucleotide
  Sense Strand Starting at position 81 of SEQ ID NO: 317419
gggugucccuagagaacga

SEQ ID NO: 325040 - RNA, 19 nt, Artificial Sequence
  Description of Artificial Sequence: Synthetic oligonucleotide
  Antisense Strand to SEQ ID NO: 325039
ucguucucuagggacaccc

SEQ ID NO: 325041 - RNA, 19 nt, Artificial Sequence
  Description of Artificial Sequence: Synthetic oligonucleotide
  Sense Strand Starting at position 81 of SEQ ID NO: 317531
cgggcaucaucucuuaauc

SEQ ID NO: 325042 - RNA, 19 nt, Artificial Sequence
  Description of Artificial Sequence: Synthetic oligonucleotide
  Antisense Strand to SEQ ID NO: 325041
gauuaagagaugaugcccg

SEQ ID NO: 325043 - RNA, 19 nt, Artificial Sequence
  Description of Artificial Sequence: Synthetic oligonucleotide
  Sense Strand Starting at position 81 of SEQ ID NO: 317715
gguaaagccugggcuugaa

SEQ ID NO: 325044 - RNA, 19 nt, Artificial Sequence
  Description of Artificial Sequence: Synthetic oligonucleotide
  Antisense Strand to SEQ ID NO: 325043
uucaagcccaggcuuuacc

SEQ ID NO: 325045 - RNA, 19 nt, Artificial Sequence
  Description of Artificial Sequence: Synthetic oligonucleotide
  Sense Strand Starting at position 81 of SEQ ID NO: 317762
guucuaaaccacuguuagu

SEQ ID NO: 325046 - RNA, 19 nt, Artificial Sequence
  Description of Artificial Sequence: Synthetic oligonucleotide
  Antisense Strand to SEQ ID NO: 325045
acuaacagugguuuagaac

SEQ ID NO: 325047 - RNA, 19 nt, Artificial Sequence
  Description of Artificial Sequence: Synthetic oligonucleotide
  Sense Strand Starting at position 81 of SEQ ID NO: 317771
cacuguuagugacuagaga

SEQ ID NO: 325048 - RNA, 19 nt, Artificial Sequence
  Description of Artificial Sequence: Synthetic oligonucleotide
  Antisense Strand to SEQ ID NO: 325047
ucucuagucacuaacagug

SEQ ID NO: 325049 - RNA, 19 nt, Artificial Sequence
  Description of Artificial Sequence: Synthetic oligonucleotide
  Sense Strand Starting at position 81 of SEQ ID NO: 317833
cagagaacaugguaagaau

SEQ ID NO: 325050 - RNA, 19 nt, Artificial Sequence
  Description of Artificial Sequence: Synthetic oligonucleotide
  Antisense Strand to SEQ ID NO: 325049
auucuuaccauguucucug

SEQ ID NO: 325051 - RNA, 19 nt, Artificial Sequence
  Description of Artificial Sequence: Synthetic oligonucleotide
  Sense Strand Starting at position 81 of SEQ ID NO: 317865
cucaaagucuuagcagaac

SEQ ID NO: 325052 - RNA, 19 nt, Artificial Sequence
  Description of Artificial Sequence: Synthetic oligonucleotide
  Antisense Strand to SEQ ID NO: 325051
guucugcuaagacuuugag

SEQ ID NO: 325053 - RNA, 19 nt, Artificial Sequence
  Description of Artificial Sequence: Synthetic oligonucleotide
  Sense Strand Starting at position 81 of SEQ ID NO: 317936
agcaguauagcauggugau

SEQ ID NO: 325054 - RNA, 19 nt, Artificial Sequence
  Description of Artificial Sequence: Synthetic oligonucleotide
  Antisense Strand to SEQ ID NO: 325053
aucaccaugcuauacugcu

SEQ ID NO: 325055 - RNA, 19 nt, Artificial Sequence
  Description of Artificial Sequence: Synthetic oligonucleotide
  Sense Strand Starting at position 81 of SEQ ID NO: 317937
gcaguauagcauggugauc

SEQ ID NO: 325056 - RNA, 19 nt, Artificial Sequence
  Description of Artificial Sequence: Synthetic oligonucleotide
  Antisense Strand to SEQ ID NO: 325055
gaucaccaugcuauacugc

SEQ ID NO: 325057 - RNA, 19 nt, Artificial Sequence
  Description of Artificial Sequence: Synthetic oligonucleotide
  Sense Strand Starting at position 81 of SEQ ID NO: 318075
cauggugcugagugagaaa

SEQ ID NO: 325058 - RNA, 19 nt, Artificial Sequence
  Description of Artificial Sequence: Synthetic oligonucleotide
  Antisense Strand to SEQ ID NO: 325057
uuucucacucagcaccaug

SEQ ID NO: 325059 - RNA, 19 nt, Artificial Sequence
  Description of Artificial Sequence: Synthetic oligonucleotide
  Sense Strand Starting at position 81 of SEQ ID NO: 318086
gugagaaauucagugagau

SEQ ID NO: 325060 - RNA, 19 nt, Artificial Sequence
  Description of Artificial Sequence: Synthetic oligonucleotide
  Antisense Strand to SEQ ID NO: 325059
aucucacugaauuucucac

SEQ ID NO: 325061 - RNA, 19 nt, Artificial Sequence
  Description of Artificial Sequence: Synthetic oligonucleotide
  Sense Strand Starting at position 81 of SEQ ID NO: 318100
gagauaaacugauaaagug

SEQ ID NO: 325062 - RNA, 19 nt, Artificial Sequence
  Description of Artificial Sequence: Synthetic oligonucleotide
  Antisense Strand to SEQ ID NO: 325061
cacuuuaucaguuuaucuc

SEQ ID NO: 325063 - RNA, 19 nt, Artificial Sequence
  Description of Artificial Sequence: Synthetic oligonucleotide
  Sense Strand Starting at position 81 of SEQ ID NO: 318110
gauaaagugcucugcaccu

SEQ ID NO: 325064 - RNA, 19 nt, Artificial Sequence
  Description of Artificial Sequence: Synthetic oligonucleotide
  Antisense Strand to SEQ ID NO: 325063
aggugcagagcacuuuauc

SEQ ID NO: 325065 - RNA, 19 nt, Artificial Sequence
  Description of Artificial Sequence: Synthetic oligonucleotide
  Sense Strand Starting at position 81 of SEQ ID NO: 318211
gaggcugucccuggaggua

SEQ ID NO: 325066 - RNA, 19 nt, Artificial Sequence
  Description of Artificial Sequence: Synthetic oligonucleotide
  Antisense Strand to SEQ ID NO: 325065
uaccuccagggacagccuc

SEQ ID NO: 325067 - RNA, 19 nt, Artificial Sequence
  Description of Artificial Sequence: Synthetic oligonucleotide
  Sense Strand Starting at position 81 of SEQ ID NO: 318227
guaagaagcccuugggcuu

SEQ ID NO: 325068 - RNA, 19 nt, Artificial Sequence
  Description of Artificial Sequence: Synthetic oligonucleotide
  Antisense Strand to SEQ ID NO: 325067
aagcccaagggcuucuuac

SEQ ID NO: 325069 - RNA, 19 nt, Artificial Sequence
  Description of Artificial Sequence: Synthetic oligonucleotide
  Sense Strand Starting at position 81 of SEQ ID NO: 318314
ggccaugagugaguugaaa

SEQ ID NO: 325070 - RNA, 19 nt, Artificial Sequence
  Description of Artificial Sequence: Synthetic oligonucleotide
  Antisense Strand to SEQ ID NO: 325069
uuucaacucacucauggcc

SEQ ID NO: 325071 - RNA, 19 nt, Artificial Sequence
  Description of Artificial Sequence: Synthetic oligonucleotide
  Sense Strand Starting at position 81 of SEQ ID NO: 318316
ccaugagugaguugaaaga

SEQ ID NO: 325072 - RNA, 19 nt, Artificial Sequence
  Description of Artificial Sequence: Synthetic oligonucleotide
  Antisense Strand to SEQ ID NO: 325071
ucuuucaacucacucaugg

SEQ ID NO: 325073 - RNA, 19 nt, Artificial Sequence
  Description of Artificial Sequence: Synthetic oligonucleotide
  Sense Strand Starting at position 81 of SEQ ID NO: 318353
cgacuucaagucuguggau

SEQ ID NO: 325074 - RNA, 19 nt, Artificial Sequence
  Description of Artificial Sequence: Synthetic oligonucleotide
  Antisense Strand to SEQ ID NO: 325073
auccacagacuugaagucg

SEQ ID NO: 325075 - RNA, 19 nt, Artificial Sequence
  Description of Artificial Sequence: Synthetic oligonucleotide
  Sense Strand Starting at position 81 of SEQ ID NO: 318512
ggccgaaacccaggugaua

SEQ ID NO: 325076 - RNA, 19 nt, Artificial Sequence
  Description of Artificial Sequence: Synthetic oligonucleotide
  Antisense Strand to SEQ ID NO: 325075
uaucaccuggguuucggcc

SEQ ID NO: 325077 - RNA, 19 nt, Artificial Sequence
  Description of Artificial Sequence: Synthetic oligonucleotide
  Sense Strand Starting at position 81 of SEQ ID NO: 318568
caaguuaugggauggguca

SEQ ID NO: 325078 - RNA, 19 nt, Artificial Sequence
  Description of Artificial Sequence: Synthetic oligonucleotide
  Antisense Strand to SEQ ID NO: 325077
ugacccaucccauaacuug

SEQ ID NO: 325079 - RNA, 19 nt, Artificial Sequence
  Description of Artificial Sequence: Synthetic oligonucleotide
  Sense Strand Starting at position 81 of SEQ ID NO: 318569
aaguuaugggaugggucau

SEQ ID NO: 325080 - RNA, 19 nt, Artificial Sequence
  Description of Artificial Sequence: Synthetic oligonucleotide
  Antisense Strand to SEQ ID NO: 325079
augacccaucccauaacuu

SEQ ID NO: 325081 - RNA, 19 nt, Artificial Sequence
  Description of Artificial Sequence: Synthetic oligonucleotide
  Sense Strand Starting at position 81 of SEQ ID NO: 318570
aguuaugggaugggucauu

SEQ ID NO: 325082 - RNA, 19 nt, Artificial Sequence
  Description of Artificial Sequence: Synthetic oligonucleotide
  Antisense Strand to SEQ ID NO: 325081
aaugacccaucccauaacu

SEQ ID NO: 325083 - RNA, 19 nt, Artificial Sequence
  Description of Artificial Sequence: Synthetic oligonucleotide
  Sense Strand Starting at position 81 of SEQ ID NO: 318575
ugggaugggucauugaguu

SEQ ID NO: 325084 - RNA, 19 nt, Artificial Sequence
  Description of Artificial Sequence: Synthetic oligonucleotide
  Antisense Strand to SEQ ID NO: 325083
aacucaaugacccauccca

SEQ ID NO: 325085 - RNA, 19 nt, Artificial Sequence
  Description of Artificial Sequence: Synthetic oligonucleotide
  Sense Strand Starting at position 81 of SEQ ID NO: 318654
cuggguuugcaugacacaa

SEQ ID NO: 325086 - RNA, 19 nt, Artificial Sequence
  Description of Artificial Sequence: Synthetic oligonucleotide
  Antisense Strand to SEQ ID NO: 325085
uugugucaugcaaacccag

SEQ ID NO: 325087 - RNA, 19 nt, Artificial Sequence
  Description of Artificial Sequence: Synthetic oligonucleotide
  Sense Strand Starting at position 81 of SEQ ID NO: 318769
guccuaugcuagucauuag

SEQ ID NO: 325088 - RNA, 19 nt, Artificial Sequence
  Description of Artificial Sequence: Synthetic oligonucleotide
  Antisense Strand to SEQ ID NO: 325087
cuaaugacuagcauaggac

SEQ ID NO: 325089 - RNA, 19 nt, Artificial Sequence
  Description of Artificial Sequence: Synthetic oligonucleotide
  Sense Strand Starting at position 81 of SEQ ID NO: 318772
cuaugcuagucauuagaga

SEQ ID NO: 325090 - RNA, 19 nt, Artificial Sequence
  Description of Artificial Sequence: Synthetic oligonucleotide
  Antisense Strand to SEQ ID NO: 325089
ucucuaaugacuagcauag

SEQ ID NO: 325091 - RNA, 19 nt, Artificial Sequence
  Description of Artificial Sequence: Synthetic oligonucleotide
  Sense Strand Starting at position 81 of SEQ ID NO: 318881
uuagcaguccuagggaacu

SEQ ID NO: 325092 - RNA, 19 nt, Artificial Sequence
  Description of Artificial Sequence: Synthetic oligonucleotide
  Antisense Strand to SEQ ID NO: 325091
aguucccuaggacugcuaa

SEQ ID NO: 325093 - RNA, 19 nt, Artificial Sequence
  Description of Artificial Sequence: Synthetic oligonucleotide
  Sense Strand Starting at position 81 of SEQ ID NO: 318949
ugcuguuuccuagcuaugu

SEQ ID NO: 325094 - RNA, 19 nt, Artificial Sequence
  Description of Artificial Sequence: Synthetic oligonucleotide
  Antisense Strand to SEQ ID NO: 325093
acauagcuaggaaacagca

SEQ ID NO: 325095 - RNA, 19 nt, Artificial Sequence
  Description of Artificial Sequence: Synthetic oligonucleotide
  Sense Strand Starting at position 81 of SEQ ID NO: 318972
uugagaaaguugccucaua

SEQ ID NO: 325096 - RNA, 19 nt, Artificial Sequence
  Description of Artificial Sequence: Synthetic oligonucleotide
  Antisense Strand to SEQ ID NO: 325095
uaugaggcaacuuucucaa

SEQ ID NO: 325097 - RNA, 19 nt, Artificial Sequence
  Description of Artificial Sequence: Synthetic oligonucleotide
  Sense Strand Starting at position 81 of SEQ ID NO: 318973
ugagaaaguugccucauau

SEQ ID NO: 325098 - RNA, 19 nt, Artificial Sequence
  Description of Artificial Sequence: Synthetic oligonucleotide
  Antisense Strand to SEQ ID NO: 325097
auaugaggcaacuuucuca

SEQ ID NO: 325099 - RNA, 19 nt, Artificial Sequence
  Description of Artificial Sequence: Synthetic oligonucleotide
  Sense Strand Starting at position 81 of SEQ ID NO: 318987
cauaucucugagugucagu

SEQ ID NO: 325100 - RNA, 19 nt, Artificial Sequence
  Description of Artificial Sequence: Synthetic oligonucleotide
  Antisense Strand to SEQ ID NO: 325099
acugacacucagagauaug

SEQ ID NO: 325101 - RNA, 19 nt, Artificial Sequence
  Description of Artificial Sequence: Synthetic oligonucleotide
  Sense Strand Starting at position 81 of SEQ ID NO: 319098
gccagacacuaaguaagua

SEQ ID NO: 325102 - RNA, 19 nt, Artificial Sequence
  Description of Artificial Sequence: Synthetic oligonucleotide
  Antisense Strand to SEQ ID NO: 325101
uacuuacuuagugucuggc

SEQ ID NO: 325103 - RNA, 19 nt, Artificial Sequence
  Description of Artificial Sequence: Synthetic oligonucleotide
  Sense Strand Starting at position 81 of SEQ ID NO: 319132
auuugcuacucugaugacu

SEQ ID NO: 325104 - RNA, 19 nt, Artificial Sequence
  Description of Artificial Sequence: Synthetic oligonucleotide
  Antisense Strand to SEQ ID NO: 325103
agucaucagaguagcaaau

SEQ ID NO: 325105 - RNA, 19 nt, Artificial Sequence
  Description of Artificial Sequence: Synthetic oligonucleotide
  Sense Strand Starting at position 81 of SEQ ID NO: 319135
ugcuacucugaugacuuua

SEQ ID NO: 325106 - RNA, 19 nt, Artificial Sequence
  Description of Artificial Sequence: Synthetic oligonucleotide
  Antisense Strand to SEQ ID NO: 325105
uaaagucaucagaguagca

SEQ ID NO: 325107 - RNA, 19 nt, Artificial Sequence
  Description of Artificial Sequence: Synthetic oligonucleotide
  Sense Strand Starting at position 82 of SEQ ID NO: 315563
ggccuuugucaacaguuau

SEQ ID NO: 325108 - RNA, 19 nt, Artificial Sequence
  Description of Artificial Sequence: Synthetic oligonucleotide
  Antisense Strand to SEQ ID NO: 325107
auaacuguugacaaaggcc

SEQ ID NO: 325109 - RNA, 19 nt, Artificial Sequence
  Description of Artificial Sequence: Synthetic oligonucleotide
  Sense Strand Starting at position 82 of SEQ ID NO: 315841
ucaagauauccaggcaaac

SEQ ID NO: 325110 - RNA, 19 nt, Artificial Sequence
  Description of Artificial Sequence: Synthetic oligonucleotide
  Antisense Strand to SEQ ID NO: 325109
guuugccuggauaucuuga

SEQ ID NO: 325111 - RNA, 19 nt, Artificial Sequence
  Description of Artificial Sequence: Synthetic oligonucleotide
  Sense Strand Starting at position 82 of SEQ ID NO: 315850
ccaggcaaaccuugaaaga

SEQ ID NO: 325112 - RNA, 19 nt, Artificial Sequence
  Description of Artificial Sequence: Synthetic oligonucleotide
  Antisense Strand to SEQ ID NO: 325111
ucuuucaagguuugccugg

SEQ ID NO: 325113 - RNA, 19 nt, Artificial Sequence
  Description of Artificial Sequence: Synthetic oligonucleotide
  Sense Strand Starting at position 82 of SEQ ID NO: 315922
ggagacuagaucgguauca

SEQ ID NO: 325114 - RNA, 19 nt, Artificial Sequence
  Description of Artificial Sequence: Synthetic oligonucleotide
  Antisense Strand to SEQ ID NO: 325113
ugauaccgaucuagucucc

SEQ ID NO: 325115 - RNA, 19 nt, Artificial Sequence
  Description of Artificial Sequence: Synthetic oligonucleotide
  Sense Strand Starting at position 82 of SEQ ID NO: 315991
caggaaugcccacacguau

SEQ ID NO: 325116 - RNA, 19 nt, Artificial Sequence
  Description of Artificial Sequence: Synthetic oligonucleotide
  Antisense Strand to SEQ ID NO: 325115
auacgugugggcauuccug

SEQ ID NO: 325117 - RNA, 19 nt, Artificial Sequence
  Description of Artificial Sequence: Synthetic oligonucleotide
  Sense Strand Starting at position 82 of SEQ ID NO: 316352
cucgaaaugcuccaaagag

SEQ ID NO: 325118 - RNA, 19 nt, Artificial Sequence
  Description of Artificial Sequence: Synthetic oligonucleotide
  Antisense Strand to SEQ ID NO: 325117
cucuuuggagcauuucgag

SEQ ID NO: 325119 - RNA, 19 nt, Artificial Sequence
  Description of Artificial Sequence: Synthetic oligonucleotide
  Sense Strand Starting at position 82 of SEQ ID NO: 317419
gggugucccuagagaacga

SEQ ID NO: 325120 - RNA, 19 nt, Artificial Sequence
  Description of Artificial Sequence: Synthetic oligonucleotide
  Antisense Strand to SEQ ID NO: 325119
ucguucucuagggacaccc

SEQ ID NO: 325121 - RNA, 19 nt, Artificial Sequence
  Description of Artificial Sequence: Synthetic oligonucleotide
  Sense Strand Starting at position 82 of SEQ ID NO: 317531
cgggcaucaucucuuaauc

SEQ ID NO: 325122 - RNA, 19 nt, Artificial Sequence
  Description of Artificial Sequence: Synthetic oligonucleotide
  Antisense Strand to SEQ ID NO: 325121
gauuaagagaugaugcccg

SEQ ID NO: 325123 - RNA, 19 nt, Artificial Sequence
  Description of Artificial Sequence: Synthetic oligonucleotide
  Sense Strand Starting at position 82 of SEQ ID NO: 317715
gguaaagccugggcuugaa

SEQ ID NO: 325124 - RNA, 19 nt, Artificial Sequence
  Description of Artificial Sequence: Synthetic oligonucleotide
  Antisense Strand to SEQ ID NO: 325123
uucaagcccaggcuuuacc

SEQ ID NO: 325125 - RNA, 19 nt, Artificial Sequence
  Description of Artificial Sequence: Synthetic oligonucleotide
  Sense Strand Starting at position 82 of SEQ ID NO: 317762
guucuaaaccacuguuagu

SEQ ID NO: 325126 - RNA, 19 nt, Artificial Sequence
  Description of Artificial Sequence: Synthetic oligonucleotide
  Antisense Strand to SEQ ID NO: 325125
acuaacagugguuuagaac

SEQ ID NO: 325127 - RNA, 19 nt, Artificial Sequence
  Description of Artificial Sequence: Synthetic oligonucleotide
  Sense Strand Starting at position 82 of SEQ ID NO: 317771
cacuguuagugacuagaga

SEQ ID NO: 325128 - RNA, 19 nt, Artificial Sequence
  Description of Artificial Sequence: Synthetic oligonucleotide
  Antisense Strand to SEQ ID NO: 325127
ucucuagucacuaacagug

SEQ ID NO: 325129 - RNA, 19 nt, Artificial Sequence
  Description of Artificial Sequence: Synthetic oligonucleotide
  Sense Strand Starting at position 82 of SEQ ID NO: 317833
cagagaacaugguaagaau

SEQ ID NO: 325130 - RNA, 19 nt, Artificial Sequence
  Description of Artificial Sequence: Synthetic oligonucleotide
  Antisense Strand to SEQ ID NO: 325129
auucuuaccauguucucug

SEQ ID NO: 325131 - RNA, 19 nt, Artificial Sequence
  Description of Artificial Sequence: Synthetic oligonucleotide
  Sense Strand Starting at position 82 of SEQ ID NO: 317865
cucaaagucuuagcagaac

SEQ ID NO: 325132 - RNA, 19 nt, Artificial Sequence
  Description of Artificial Sequence: Synthetic oligonucleotide
  Antisense Strand to SEQ ID NO: 325131
guucugcuaagacuuugag

SEQ ID NO: 325133 - RNA, 19 nt, Artificial Sequence
  Description of Artificial Sequence: Synthetic oligonucleotide
  Sense Strand Starting at position 82 of SEQ ID NO: 317936
agcaguauagcauggugau

SEQ ID NO: 325134 - RNA, 19 nt, Artificial Sequence
  Description of Artificial Sequence: Synthetic oligonucleotide
  Antisense Strand to SEQ ID NO: 325133
aucaccaugcuauacugcu

SEQ ID NO: 325135 - RNA, 19 nt, Artificial Sequence
  Description of Artificial Sequence: Synthetic oligonucleotide
  Sense Strand Starting at position 82 of SEQ ID NO: 317937
gcaguauagcauggugauc

SEQ ID NO: 325136 - RNA, 19 nt, Artificial Sequence
  Description of Artificial Sequence: Synthetic oligonucleotide
  Antisense Strand to SEQ ID NO: 325135
gaucaccaugcuauacugc

SEQ ID NO: 325137 - RNA, 19 nt, Artificial Sequence
  Description of Artificial Sequence: Synthetic oligonucleotide
  Sense Strand Starting at position 82 of SEQ ID NO: 318075
cauggugcugagugagaaa

SEQ ID NO: 325138 - RNA, 19 nt, Artificial Sequence
  Description of Artificial Sequence: Synthetic oligonucleotide
  Antisense Strand to SEQ ID NO: 325137
uuucucacucagcaccaug

SEQ ID NO: 325139 - RNA, 19 nt, Artificial Sequence
  Description of Artificial Sequence: Synthetic oligonucleotide
  Sense Strand Starting at position 82 of SEQ ID NO: 318086
gugagaaauucagugagau

SEQ ID NO: 325140 - RNA, 19 nt, Artificial Sequence
  Description of Artificial Sequence: Synthetic oligonucleotide
  Antisense Strand to SEQ ID NO: 325139
aucucacugaauuucucac

SEQ ID NO: 325141 - RNA, 19 nt, Artificial Sequence
  Description of Artificial Sequence: Synthetic oligonucleotide
  Sense Strand Starting at position 82 of SEQ ID NO: 318100
gagauaaacugauaaagug

SEQ ID NO: 325142 - RNA, 19 nt, Artificial Sequence
  Description of Artificial Sequence: Synthetic oligonucleotide
  Antisense Strand to SEQ ID NO: 325141
cacuuuaucaguuuaucuc

SEQ ID NO: 325143 - RNA, 19 nt, Artificial Sequence
  Description of Artificial Sequence: Synthetic oligonucleotide
  Sense Strand Starting at position 82 of SEQ ID NO: 318110
gauaaagugcucugcaccu

SEQ ID NO: 325144 - RNA, 19 nt, Artificial Sequence
  Description of Artificial Sequence: Synthetic oligonucleotide
  Antisense Strand to SEQ ID NO: 325143
aggugcagagcacuuuauc

SEQ ID NO: 325145 - RNA, 19 nt, Artificial Sequence
  Description of Artificial Sequence: Synthetic oligonucleotide
  Sense Strand Starting at position 82 of SEQ ID NO: 318211
gaggcugucccuggaggua

SEQ ID NO: 325146 - RNA, 19 nt, Artificial Sequence
  Description of Artificial Sequence: Synthetic oligonucleotide
  Antisense Strand to SEQ ID NO: 325145
uaccuccagggacagccuc

SEQ ID NO: 325147 - RNA, 19 nt, Artificial Sequence
  Description of Artificial Sequence: Synthetic oligonucleotide
  Sense Strand Starting at position 82 of SEQ ID NO: 318227
guaagaagcccuugggcuu

SEQ ID NO: 325148 - RNA, 19 nt, Artificial Sequence
  Description of Artificial Sequence: Synthetic oligonucleotide
  Antisense Strand to SEQ ID NO: 325147
aagcccaagggcuucuuac

SEQ ID NO: 325149 - RNA, 19 nt, Artificial Sequence
  Description of Artificial Sequence: Synthetic oligonucleotide
  Sense Strand Starting at position 82 of SEQ ID NO: 318314
ggccaugagugaguugaaa

SEQ ID NO: 325150 - RNA, 19 nt, Artificial Sequence
  Description of Artificial Sequence: Synthetic oligonucleotide
  Antisense Strand to SEQ ID NO: 325149
uuucaacucacucauggcc

SEQ ID NO: 325151 - RNA, 19 nt, Artificial Sequence
  Description of Artificial Sequence: Synthetic oligonucleotide
  Sense Strand Starting at position 82 of SEQ ID NO: 318316
ccaugagugaguugaaaga

SEQ ID NO: 325152 - RNA, 19 nt, Artificial Sequence
  Description of Artificial Sequence: Synthetic oligonucleotide
  Antisense Strand to SEQ ID NO: 325151
ucuuucaacucacucaugg

SEQ ID NO: 325153 - RNA, 19 nt, Artificial Sequence
  Description of Artificial Sequence: Synthetic oligonucleotide
  Sense Strand Starting at position 82 of SEQ ID NO: 318353
cgacuucaagucuguggau

SEQ ID NO: 325154 - RNA, 19 nt, Artificial Sequence
  Description of Artificial Sequence: Synthetic oligonucleotide
  Antisense Strand to SEQ ID NO: 325153
auccacagacuugaagucg

SEQ ID NO: 325155 - RNA, 19 nt, Artificial Sequence
  Description of Artificial Sequence: Synthetic oligonucleotide
  Sense Strand Starting at position 82 of SEQ ID NO: 318512
ggccgaaacccaggugaua

SEQ ID NO: 325156 - RNA, 19 nt, Artificial Sequence
  Description of Artificial Sequence: Synthetic oligonucleotide
  Antisense Strand to SEQ ID NO: 325155
uaucaccuggguuucggcc

SEQ ID NO: 325157 - RNA, 19 nt, Artificial Sequence
  Description of Artificial Sequence: Synthetic oligonucleotide
  Sense Strand Starting at position 82 of SEQ ID NO: 318568
caaguuaugggauggguca

SEQ ID NO: 325158 - RNA, 19 nt, Artificial Sequence
  Description of Artificial Sequence: Synthetic oligonucleotide
  Antisense Strand to SEQ ID NO: 325157
ugacccaucccauaacuug

SEQ ID NO: 325159 - RNA, 19 nt, Artificial Sequence
  Description of Artificial Sequence: Synthetic oligonucleotide
  Sense Strand Starting at position 82 of SEQ ID NO: 318569
aaguuaugggaugggucau

SEQ ID NO: 325160 - RNA, 19 nt, Artificial Sequence
  Description of Artificial Sequence: Synthetic oligonucleotide
  Antisense Strand to SEQ ID NO: 325159
augacccaucccauaacuu

SEQ ID NO: 325161 - RNA, 19 nt, Artificial Sequence
  Description of Artificial Sequence: Synthetic oligonucleotide
  Sense Strand Starting at position 82 of SEQ ID NO: 318570
aguuaugggaugggucauu

SEQ ID NO: 325162 - RNA, 19 nt, Artificial Sequence
  Description of Artificial Sequence: Synthetic oligonucleotide
  Antisense Strand to SEQ ID NO: 325161
aaugacccaucccauaacu

SEQ ID NO: 325163 - RNA, 19 nt, Artificial Sequence
  Description of Artificial Sequence: Synthetic oligonucleotide
  Sense Strand Starting at position 82 of SEQ ID NO: 318575
ugggaugggucauugaguu

SEQ ID NO: 325164 - RNA, 19 nt, Artificial Sequence
  Description of Artificial Sequence: Synthetic oligonucleotide
  Antisense Strand to SEQ ID NO: 325163
aacucaaugacccauccca

SEQ ID NO: 325165 - RNA, 19 nt, Artificial Sequence
  Description of Artificial Sequence: Synthetic oligonucleotide
  Sense Strand Starting at position 82 of SEQ ID NO: 318654
cuggguuugcaugacacaa

SEQ ID NO: 325166 - RNA, 19 nt, Artificial Sequence
  Description of Artificial Sequence: Synthetic oligonucleotide
  Antisense Strand to SEQ ID NO: 325165
uugugucaugcaaacccag

SEQ ID NO: 325167 - RNA, 19 nt, Artificial Sequence
  Description of Artificial Sequence: Synthetic oligonucleotide
  Sense Strand Starting at position 82 of SEQ ID NO: 318769
guccuaugcuagucauuag

SEQ ID NO: 325168 - RNA, 19 nt, Artificial Sequence
  Description of Artificial Sequence: Synthetic oligonucleotide
  Antisense Strand to SEQ ID NO: 325167
cuaaugacuagcauaggac

SEQ ID NO: 325169 - RNA, 19 nt, Artificial Sequence
  Description of Artificial Sequence: Synthetic oligonucleotide
  Sense Strand Starting at position 82 of SEQ ID NO: 318772
cuaugcuagucauuagaga

SEQ ID NO: 325170 - RNA, 19 nt, Artificial Sequence
  Description of Artificial Sequence: Synthetic oligonucleotide
  Antisense Strand to SEQ ID NO: 325169
ucucuaaugacuagcauag

SEQ ID NO: 325171 - RNA, 19 nt, Artificial Sequence
  Description of Artificial Sequence: Synthetic oligonucleotide
  Sense Strand Starting at position 82 of SEQ ID NO: 318881
uuagcaguccuagggaacu

SEQ ID NO: 325172 - RNA, 19 nt, Artificial Sequence
  Description of Artificial Sequence: Synthetic oligonucleotide
  Antisense Strand to SEQ ID NO: 325171
aguucccuaggacugcuaa

SEQ ID NO: 325173 - RNA, 19 nt, Artificial Sequence
  Description of Artificial Sequence: Synthetic oligonucleotide
  Sense Strand Starting at position 82 of SEQ ID NO: 318949
ugcuguuuccuagcuaugu

SEQ ID NO: 325174 - RNA, 19 nt, Artificial Sequence
  Description of Artificial Sequence: Synthetic oligonucleotide
  Antisense Strand to SEQ ID NO: 325173
acauagcuaggaaacagca

SEQ ID NO: 325175 - RNA, 19 nt, Artificial Sequence
  Description of Artificial Sequence: Synthetic oligonucleotide
  Sense Strand Starting at position 82 of SEQ ID NO: 318972
uugagaaaguugccucaua

SEQ ID NO: 325176 - RNA, 19 nt, Artificial Sequence
  Description of Artificial Sequence: Synthetic oligonucleotide
  Antisense Strand to SEQ ID NO: 325175
uaugaggcaacuuucucaa

SEQ ID NO: 325177 - RNA, 19 nt, Artificial Sequence
  Description of Artificial Sequence: Synthetic oligonucleotide
  Sense Strand Starting at position 82 of SEQ ID NO: 318973
ugagaaaguugccucauau

SEQ ID NO: 325178 - RNA, 19 nt, Artificial Sequence
  Description of Artificial Sequence: Synthetic oligonucleotide
  Antisense Strand to SEQ ID NO: 325177
auaugaggcaacuuucuca

SEQ ID NO: 325179 - RNA, 19 nt, Artificial Sequence
  Description of Artificial Sequence: Synthetic oligonucleotide
  Sense Strand Starting at position 82 of SEQ ID NO: 318987
cauaucucugagugucagu

SEQ ID NO: 325180 - RNA, 19 nt, Artificial Sequence
  Description of Artificial Sequence: Synthetic oligonucleotide
  Antisense Strand to SEQ ID NO: 325179
acugacacucagagauaug

SEQ ID NO: 325181 - RNA, 19 nt, Artificial Sequence
  Description of Artificial Sequence: Synthetic oligonucleotide
  Sense Strand Starting at position 82 of SEQ ID NO: 319098
gccagacacuaaguaagua

SEQ ID NO: 325182 - RNA, 19 nt, Artificial Sequence
  Description of Artificial Sequence: Synthetic oligonucleotide
  Antisense Strand to SEQ ID NO: 325181
uacuuacuuagugucuggc

SEQ ID NO: 325183 - RNA, 19 nt, Artificial Sequence
  Description of Artificial Sequence: Synthetic oligonucleotide
  Sense Strand Starting at position 82 of SEQ ID NO: 319132
auuugcuacucugaugacu

SEQ ID NO: 325184 - RNA, 19 nt, Artificial Sequence
  Description of Artificial Sequence: Synthetic oligonucleotide
  Antisense Strand to SEQ ID NO: 325183
agucaucagaguagcaaau

SEQ ID NO: 325185 - RNA, 19 nt, Artificial Sequence
  Description of Artificial Sequence: Synthetic oligonucleotide
  Sense Strand Starting at position 82 of SEQ ID NO: 319135
ugcuacucugaugacuuua

SEQ ID NO: 325186 - RNA, 19 nt, Artificial Sequence
  Description of Artificial Sequence: Synthetic oligonucleotide
  Antisense Strand to SEQ ID NO: 325185
uaaagucaucagaguagca

SEQ ID NO: 325187 - RNA, 19 nt, Artificial Sequence
  Description of Artificial Sequence: Synthetic oligonucleotide
  Sense Strand Starting at position 83 of SEQ ID NO: 315358
gugaauacaccuugccauc

SEQ ID NO: 325188 - RNA, 19 nt, Artificial Sequence
  Description of Artificial Sequence: Synthetic oligonucleotide
  Antisense Strand to SEQ ID NO: 325187
gauggcaagguguauucac

SEQ ID NO: 325189 - RNA, 19 nt, Artificial Sequence
  Description of Artificial Sequence: Synthetic oligonucleotide
  Sense Strand Starting at position 83 of SEQ ID NO: 315499
cucgacuucugacucaaga

SEQ ID NO: 325190 - RNA, 19 nt, Artificial Sequence
  Description of Artificial Sequence: Synthetic oligonucleotide
  Antisense Strand to SEQ ID NO: 325189
ucuugagucagaagucgag

SEQ ID NO: 325191 - RNA, 19 nt, Artificial Sequence
  Description of Artificial Sequence: Synthetic oligonucleotide
  Sense Strand Starting at position 83 of SEQ ID NO: 315508
ugacucaagauguggcauu

SEQ ID NO: 325192 - RNA, 19 nt, Artificial Sequence
  Description of Artificial Sequence: Synthetic oligonucleotide
  Antisense Strand to SEQ ID NO: 325191
aaugccacaucuugaguca

SEQ ID NO: 325193 - RNA, 19 nt, Artificial Sequence
  Description of Artificial Sequence: Synthetic oligonucleotide
  Sense Strand Starting at position 83 of SEQ ID NO: 315582
agacaugcuucccuaggua

SEQ ID NO: 325194 - RNA, 19 nt, Artificial Sequence
  Description of Artificial Sequence: Synthetic oligonucleotide
  Antisense Strand to SEQ ID NO: 325193
uaccuagggaagcaugucu

SEQ ID NO: 325195 - RNA, 19 nt, Artificial Sequence
  Description of Artificial Sequence: Synthetic oligonucleotide
  Sense Strand Starting at position 83 of SEQ ID NO: 315586
augcuucccuagguauaaa

SEQ ID NO: 325196 - RNA, 19 nt, Artificial Sequence
  Description of Artificial Sequence: Synthetic oligonucleotide
  Antisense Strand to SEQ ID NO: 325195
uuuauaccuagggaagcau

SEQ ID NO: 325197 - RNA, 19 nt, Artificial Sequence
  Description of Artificial Sequence: Synthetic oligonucleotide
  Sense Strand Starting at position 83 of SEQ ID NO: 315604
agaauacaguagucugcaa

SEQ ID NO: 325198 - RNA, 19 nt, Artificial Sequence
  Description of Artificial Sequence: Synthetic oligonucleotide
  Antisense Strand to SEQ ID NO: 325197
uugcagacuacuguauucu

SEQ ID NO: 325199 - RNA, 19 nt, Artificial Sequence
  Description of Artificial Sequence: Synthetic oligonucleotide
  Sense Strand Starting at position 83 of SEQ ID NO: 315681
gcaauaaaccuuugagggu

SEQ ID NO: 325200 - RNA, 19 nt, Artificial Sequence
  Description of Artificial Sequence: Synthetic oligonucleotide
  Antisense Strand to SEQ ID NO: 325199
acccucaaagguuuauugc

SEQ ID NO: 325201 - RNA, 19 nt, Artificial Sequence
  Description of Artificial Sequence: Synthetic oligonucleotide
  Sense Strand Starting at position 83 of SEQ ID NO: 316168
cuuagaaaguuaguucuuu

SEQ ID NO: 325202 - RNA, 19 nt, Artificial Sequence
  Description of Artificial Sequence: Synthetic oligonucleotide
  Antisense Strand to SEQ ID NO: 325201
aaagaacuaacuuucuaag

SEQ ID NO: 325203 - RNA, 19 nt, Artificial Sequence
  Description of Artificial Sequence: Synthetic oligonucleotide
  Sense Strand Starting at position 83 of SEQ ID NO: 316233
ugguaauuauuacuagaca

SEQ ID NO: 325204 - RNA, 19 nt, Artificial Sequence
  Description of Artificial Sequence: Synthetic oligonucleotide
  Antisense Strand to SEQ ID NO: 325203
ugucuaguaauaauuacca

SEQ ID NO: 325205 - RNA, 19 nt, Artificial Sequence
  Description of Artificial Sequence: Synthetic oligonucleotide
  Sense Strand Starting at position 83 of SEQ ID NO: 316262
uuaauauguuucuuuggga

SEQ ID NO: 325206 - RNA, 19 nt, Artificial Sequence
  Description of Artificial Sequence: Synthetic oligonucleotide
  Antisense Strand to SEQ ID NO: 325205
ucccaaagaaacauauuaa

SEQ ID NO: 325207 - RNA, 19 nt, Artificial Sequence
  Description of Artificial Sequence: Synthetic oligonucleotide
  Sense Strand Starting at position 83 of SEQ ID NO: 316469
aaaggaugguaguuugagu

SEQ ID NO: 325208 - RNA, 19 nt, Artificial Sequence
  Description of Artificial Sequence: Synthetic oligonucleotide
  Antisense Strand to SEQ ID NO: 325207
acucaaacuaccauccuuu

SEQ ID NO: 325209 - RNA, 19 nt, Artificial Sequence
  Description of Artificial Sequence: Synthetic oligonucleotide
  Sense Strand Starting at position 83 of SEQ ID NO: 316487
ucuguaaagugacuaguaa

SEQ ID NO: 325210 - RNA, 19 nt, Artificial Sequence
  Description of Artificial Sequence: Synthetic oligonucleotide
  Antisense Strand to SEQ ID NO: 325209
uuacuagucacuuuacaga

SEQ ID NO: 325211 - RNA, 19 nt, Artificial Sequence
  Description of Artificial Sequence: Synthetic oligonucleotide
  Sense Strand Starting at position 83 of SEQ ID NO: 316488
cuguaaagugacuaguaag

SEQ ID NO: 325212 - RNA, 19 nt, Artificial Sequence
  Description of Artificial Sequence: Synthetic oligonucleotide
  Antisense Strand to SEQ ID NO: 325211
cuuacuagucacuuuacag

SEQ ID NO: 325213 - RNA, 19 nt, Artificial Sequence
  Description of Artificial Sequence: Synthetic oligonucleotide
  Sense Strand Starting at position 83 of SEQ ID NO: 316549
gugcauucugacggauuuc

SEQ ID NO: 325214 - RNA, 19 nt, Artificial Sequence
  Description of Artificial Sequence: Synthetic oligonucleotide
  Antisense Strand to SEQ ID NO: 325213
gaaauccgucagaaugcac

SEQ ID NO: 325215 - RNA, 19 nt, Artificial Sequence
  Description of Artificial Sequence: Synthetic oligonucleotide
  Sense Strand Starting at position 83 of SEQ ID NO: 316736
ugaacaaauugagcucuaa

SEQ ID NO: 325216 - RNA, 19 nt, Artificial Sequence
  Description of Artificial Sequence: Synthetic oligonucleotide
  Antisense Strand to SEQ ID NO: 325215
uuagagcucaauuuguuca

SEQ ID NO: 325217 - RNA, 19 nt, Artificial Sequence
  Description of Artificial Sequence: Synthetic oligonucleotide
  Sense Strand Starting at position 83 of SEQ ID NO: 316771
ccaaaugagucucugauac

SEQ ID NO: 325218 - RNA, 19 nt, Artificial Sequence
  Description of Artificial Sequence: Synthetic oligonucleotide
  Antisense Strand to SEQ ID NO: 325217
guaucagagacucauuugg

SEQ ID NO: 325219 - RNA, 19 nt, Artificial Sequence
  Description of Artificial Sequence: Synthetic oligonucleotide
  Sense Strand Starting at position 83 of SEQ ID NO: 316790
agauccugucaugguuaca

SEQ ID NO: 325220 - RNA, 19 nt, Artificial Sequence
  Description of Artificial Sequence: Synthetic oligonucleotide
  Antisense Strand to SEQ ID NO: 325219
uguaaccaugacaggaucu

SEQ ID NO: 325221 - RNA, 19 nt, Artificial Sequence
  Description of Artificial Sequence: Synthetic oligonucleotide
  Sense Strand Starting at position 83 of SEQ ID NO: 316896
uuaccuuuggugcagaauu

SEQ ID NO: 325222 - RNA, 19 nt, Artificial Sequence
  Description of Artificial Sequence: Synthetic oligonucleotide
  Antisense Strand to SEQ ID NO: 325221
aauucugcaccaaagguaa

SEQ ID NO: 325223 - RNA, 19 nt, Artificial Sequence
  Description of Artificial Sequence: Synthetic oligonucleotide
  Sense Strand Starting at position 83 of SEQ ID NO: 317303
gcauuaugcaccgaagauu

SEQ ID NO: 325224 - RNA, 19 nt, Artificial Sequence
  Description of Artificial Sequence: Synthetic oligonucleotide
  Antisense Strand to SEQ ID NO: 325223
aaucuucggugcauaaugc

SEQ ID NO: 325225 - RNA, 19 nt, Artificial Sequence
  Description of Artificial Sequence: Synthetic oligonucleotide
  Sense Strand Starting at position 83 of SEQ ID NO: 317504
ugguuucucucuuuaugaa

SEQ ID NO: 325226 - RNA, 19 nt, Artificial Sequence
  Description of Artificial Sequence: Synthetic oligonucleotide
  Antisense Strand to SEQ ID NO: 325225
uucauaaagagagaaacca

SEQ ID NO: 325227 - RNA, 19 nt, Artificial Sequence
  Description of Artificial Sequence: Synthetic oligonucleotide
  Sense Strand Starting at position 83 of SEQ ID NO: 317505
gguuucucucuuuaugaaa

SEQ ID NO: 325228 - RNA, 19 nt, Artificial Sequence
  Description of Artificial Sequence: Synthetic oligonucleotide
  Antisense Strand to SEQ ID NO: 325227
uuucauaaagagagaaacc

SEQ ID NO: 325229 - RNA, 19 nt, Artificial Sequence
  Description of Artificial Sequence: Synthetic oligonucleotide
  Sense Strand Starting at position 83 of SEQ ID NO: 317605
uuuauaauggcauggcuga

SEQ ID NO: 325230 - RNA, 19 nt, Artificial Sequence
  Description of Artificial Sequence: Synthetic oligonucleotide
  Antisense Strand to SEQ ID NO: 325229
ucagccaugccauuauaaa

SEQ ID NO: 325231 - RNA, 19 nt, Artificial Sequence
  Description of Artificial Sequence: Synthetic oligonucleotide
  Sense Strand Starting at position 83 of SEQ ID NO: 317640
cuacuuauaguuugggaag

SEQ ID NO: 325232 - RNA, 19 nt, Artificial Sequence
  Description of Artificial Sequence: Synthetic oligonucleotide
  Antisense Strand to SEQ ID NO: 325231
cuucccaaacuauaaguag

SEQ ID NO: 325233 - RNA, 19 nt, Artificial Sequence
  Description of Artificial Sequence: Synthetic oligonucleotide
  Sense Strand Starting at position 83 of SEQ ID NO: 318229
agucaauaguuucuggauu

SEQ ID NO: 325234 - RNA, 19 nt, Artificial Sequence
  Description of Artificial Sequence: Synthetic oligonucleotide
  Antisense Strand to SEQ ID NO: 325233
aauccagaaacuauugacu

SEQ ID NO: 325235 - RNA, 19 nt, Artificial Sequence
  Description of Artificial Sequence: Synthetic oligonucleotide
  Sense Strand Starting at position 83 of SEQ ID NO: 318321
uugagagcuagacaugcau

SEQ ID NO: 325236 - RNA, 19 nt, Artificial Sequence
  Description of Artificial Sequence: Synthetic oligonucleotide
  Antisense Strand to SEQ ID NO: 325235
augcaugucuagcucucaa

SEQ ID NO: 325237 - RNA, 19 nt, Artificial Sequence
  Description of Artificial Sequence: Synthetic oligonucleotide
  Sense Strand Starting at position 83 of SEQ ID NO: 318351
guggauugcuaaucaauag

SEQ ID NO: 325238 - RNA, 19 nt, Artificial Sequence
  Description of Artificial Sequence: Synthetic oligonucleotide
  Antisense Strand to SEQ ID NO: 325237
cuauugauuagcaauccac

SEQ ID NO: 325239 - RNA, 19 nt, Artificial Sequence
  Description of Artificial Sequence: Synthetic oligonucleotide
  Sense Strand Starting at position 83 of SEQ ID NO: 318429
aauagaaaucaucgugucu

SEQ ID NO: 325240 - RNA, 19 nt, Artificial Sequence
  Description of Artificial Sequence: Synthetic oligonucleotide
  Antisense Strand to SEQ ID NO: 325239
agacacgaugauuucuauu

SEQ ID NO: 325241 - RNA, 19 nt, Artificial Sequence
  Description of Artificial Sequence: Synthetic oligonucleotide
  Sense Strand Starting at position 83 of SEQ ID NO: 318498
gcauaaaugucagugaugg

SEQ ID NO: 325242 - RNA, 19 nt, Artificial Sequence
  Description of Artificial Sequence: Synthetic oligonucleotide
  Antisense Strand to SEQ ID NO: 325241
ccaucacugacauuuaugc

SEQ ID NO: 325243 - RNA, 19 nt, Artificial Sequence
  Description of Artificial Sequence: Synthetic oligonucleotide
  Sense Strand Starting at position 83 of SEQ ID NO: 318499
cauaaaugucagugauggu

SEQ ID NO: 325244 - RNA, 19 nt, Artificial Sequence
  Description of Artificial Sequence: Synthetic oligonucleotide
  Antisense Strand to SEQ ID NO: 325243
accaucacugacauuuaug

SEQ ID NO: 325245 - RNA, 19 nt, Artificial Sequence
  Description of Artificial Sequence: Synthetic oligonucleotide
  Sense Strand Starting at position 83 of SEQ ID NO: 318500
auaaaugucagugaugguu

SEQ ID NO: 325246 - RNA, 19 nt, Artificial Sequence
  Description of Artificial Sequence: Synthetic oligonucleotide
  Antisense Strand to SEQ ID NO: 325245
aaccaucacugacauuuau

SEQ ID NO: 325247 - RNA, 19 nt, Artificial Sequence
  Description of Artificial Sequence: Synthetic oligonucleotide
  Sense Strand Starting at position 83 of SEQ ID NO: 318506
gucagugaugguuacgaaa

SEQ ID NO: 325248 - RNA, 19 nt, Artificial Sequence
  Description of Artificial Sequence: Synthetic oligonucleotide
  Antisense Strand to SEQ ID NO: 325247
uuucguaaccaucacugac

SEQ ID NO: 325249 - RNA, 19 nt, Artificial Sequence
  Description of Artificial Sequence: Synthetic oligonucleotide
  Sense Strand Starting at position 83 of SEQ ID NO: 318636
ggugaacagcaauguaauu

SEQ ID NO: 325250 - RNA, 19 nt, Artificial Sequence
  Description of Artificial Sequence: Synthetic oligonucleotide
  Antisense Strand to SEQ ID NO: 325249
aauuacauugcuguucacc

SEQ ID NO: 325251 - RNA, 19 nt, Artificial Sequence
  Description of Artificial Sequence: Synthetic oligonucleotide
  Sense Strand Starting at position 83 of SEQ ID NO: 318767
cagggacagccuggauaua

SEQ ID NO: 325252 - RNA, 19 nt, Artificial Sequence
  Description of Artificial Sequence: Synthetic oligonucleotide
  Antisense Strand to SEQ ID NO: 325251
uauauccaggcugucccug

SEQ ID NO: 325253 - RNA, 19 nt, Artificial Sequence
  Description of Artificial Sequence: Synthetic oligonucleotide
  Sense Strand Starting at position 83 of SEQ ID NO: 318794
cguaauuaccaggacacgu

SEQ ID NO: 325254 - RNA, 19 nt, Artificial Sequence
  Description of Artificial Sequence: Synthetic oligonucleotide
  Antisense Strand to SEQ ID NO: 325253
acguguccugguaauuacg

SEQ ID NO: 325255 - RNA, 19 nt, Artificial Sequence
  Description of Artificial Sequence: Synthetic oligonucleotide
  Sense Strand Starting at position 83 of SEQ ID NO: 318831
ucuaaagucagcgagguau

SEQ ID NO: 325256 - RNA, 19 nt, Artificial Sequence
  Description of Artificial Sequence: Synthetic oligonucleotide
  Antisense Strand to SEQ ID NO: 325255
auaccucgcugacuuuaga

SEQ ID NO: 325257 - RNA, 19 nt, Artificial Sequence
  Description of Artificial Sequence: Synthetic oligonucleotide
  Sense Strand Starting at position 83 of SEQ ID NO: 318835
aagucagcgagguauuauu

SEQ ID NO: 325258 - RNA, 19 nt, Artificial Sequence
  Description of Artificial Sequence: Synthetic oligonucleotide
  Antisense Strand to SEQ ID NO: 325257
aauaauaccucgcugacuu

SEQ ID NO: 325259 - RNA, 19 nt, Artificial Sequence
  Description of Artificial Sequence: Synthetic oligonucleotide
  Sense Strand Starting at position 83 of SEQ ID NO: 318843
gagguauuauucuugcaug

SEQ ID NO: 325260 - RNA, 19 nt, Artificial Sequence
  Description of Artificial Sequence: Synthetic oligonucleotide
  Antisense Strand to SEQ ID NO: 325259
caugcaagaauaauaccuc

SEQ ID NO: 325261 - RNA, 19 nt, Artificial Sequence
  Description of Artificial Sequence: Synthetic oligonucleotide
  Sense Strand Starting at position 83 of SEQ ID NO: 318853
ucuugcaugccugaaucau

SEQ ID NO: 325262 - RNA, 19 nt, Artificial Sequence
  Description of Artificial Sequence: Synthetic oligonucleotide
  Antisense Strand to SEQ ID NO: 325261
augauucaggcaugcaaga

SEQ ID NO: 325263 - RNA, 19 nt, Artificial Sequence
  Description of Artificial Sequence: Synthetic oligonucleotide
  Sense Strand Starting at position 83 of SEQ ID NO: 318970
guucucuuugcugagaaag

SEQ ID NO: 325264 - RNA, 19 nt, Artificial Sequence
  Description of Artificial Sequence: Synthetic oligonucleotide
  Antisense Strand to SEQ ID NO: 325263
cuuucucagcaaagagaac

SEQ ID NO: 325265 - RNA, 19 nt, Artificial Sequence
  Description of Artificial Sequence: Synthetic oligonucleotide
  Sense Strand Starting at position 83 of SEQ ID NO: 319166
acuguuacaguuugaagga

SEQ ID NO: 325266 - RNA, 19 nt, Artificial Sequence
  Description of Artificial Sequence: Synthetic oligonucleotide
  Antisense Strand to SEQ ID NO: 325265
uccuucaaacuguaacagu

SEQ ID NO: 325267 - RNA, 19 nt, Artificial Sequence
  Description of Artificial Sequence: Synthetic oligonucleotide
  Sense Strand Starting at position 84 of SEQ ID NO: 315343
ggauucuguccuuacccua

SEQ ID NO: 325268 - RNA, 19 nt, Artificial Sequence
  Description of Artificial Sequence: Synthetic oligonucleotide
  Antisense Strand to SEQ ID NO: 325267
uaggguaaggacagaaucc

SEQ ID NO: 325269 - RNA, 19 nt, Artificial Sequence
  Description of Artificial Sequence: Synthetic oligonucleotide
  Sense Strand Starting at position 84 of SEQ ID NO: 315539
gaguaaauuggcgauugca

SEQ ID NO: 325270 - RNA, 19 nt, Artificial Sequence
  Description of Artificial Sequence: Synthetic oligonucleotide
  Antisense Strand to SEQ ID NO: 325269
ugcaaucgccaauuuacuc

SEQ ID NO: 325271 - RNA, 19 nt, Artificial Sequence
  Description of Artificial Sequence: Synthetic oligonucleotide
  Sense Strand Starting at position 84 of SEQ ID NO: 315745
acuguagacuucucugaug

SEQ ID NO: 325272 - RNA, 19 nt, Artificial Sequence
  Description of Artificial Sequence: Synthetic oligonucleotide
  Antisense Strand to SEQ ID NO: 325271
caucagagaagucuacagu

SEQ ID NO: 325273 - RNA, 19 nt, Artificial Sequence
  Description of Artificial Sequence: Synthetic oligonucleotide
  Sense Strand Starting at position 84 of SEQ ID NO: 315747
uguagacuucucugaugaa

SEQ ID NO: 325274 - RNA, 19 nt, Artificial Sequence
  Description of Artificial Sequence: Synthetic oligonucleotide
  Antisense Strand to SEQ ID NO: 325273
uucaucagagaagucuaca

SEQ ID NO: 325275 - RNA, 19 nt, Artificial Sequence
  Description of Artificial Sequence: Synthetic oligonucleotide
  Sense Strand Starting at position 84 of SEQ ID NO: 315820
ccaucccuccuugacgaaa

SEQ ID NO: 325276 - RNA, 19 nt, Artificial Sequence
  Description of Artificial Sequence: Synthetic oligonucleotide
  Antisense Strand to SEQ ID NO: 325275
uuucgucaaggagggaugg

SEQ ID NO: 325277 - RNA, 19 nt, Artificial Sequence
  Description of Artificial Sequence: Synthetic oligonucleotide
  Sense Strand Starting at position 84 of SEQ ID NO: 315927
acagauauauggcagaaag

SEQ ID NO: 325278 - RNA, 19 nt, Artificial Sequence
  Description of Artificial Sequence: Synthetic oligonucleotide
  Antisense Strand to SEQ ID NO: 325277
cuuucugccauauaucugu

SEQ ID NO: 325279 - RNA, 19 nt, Artificial Sequence
  Description of Artificial Sequence: Synthetic oligonucleotide
  Sense Strand Starting at position 84 of SEQ ID NO: 315990
gucggaagaccuugauuau

SEQ ID NO: 325280 - RNA, 19 nt, Artificial Sequence
  Description of Artificial Sequence: Synthetic oligonucleotide
  Antisense Strand to SEQ ID NO: 325279
auaaucaaggucuuccgac

SEQ ID NO: 325281 - RNA, 19 nt, Artificial Sequence
  Description of Artificial Sequence: Synthetic oligonucleotide
  Sense Strand Starting at position 84 of SEQ ID NO: 316002
ugauuauuaccuugaucga

SEQ ID NO: 325282 - RNA, 19 nt, Artificial Sequence
  Description of Artificial Sequence: Synthetic oligonucleotide
  Antisense Strand to SEQ ID NO: 325281
ucgaucaagguaauaauca

SEQ ID NO: 325283 - RNA, 19 nt, Artificial Sequence
  Description of Artificial Sequence: Synthetic oligonucleotide
  Sense Strand Starting at position 84 of SEQ ID NO: 316005
uuauuaccuugaucgaacu

SEQ ID NO: 325284 - RNA, 19 nt, Artificial Sequence
  Description of Artificial Sequence: Synthetic oligonucleotide
  Antisense Strand to SEQ ID NO: 325283
aguucgaucaagguaauaa

SEQ ID NO: 325285 - RNA, 19 nt, Artificial Sequence
  Description of Artificial Sequence: Synthetic oligonucleotide
  Sense Strand Starting at position 84 of SEQ ID NO: 317251
cagcgugagcaucauuaau

SEQ ID NO: 325286 - RNA, 19 nt, Artificial Sequence
  Description of Artificial Sequence: Synthetic oligonucleotide
  Antisense Strand to SEQ ID NO: 325285
auuaaugaugcucacgcug

SEQ ID NO: 325287 - RNA, 19 nt, Artificial Sequence
  Description of Artificial Sequence: Synthetic oligonucleotide
  Sense Strand Starting at position 84 of SEQ ID NO: 317529
cuuggagauucuuugcuuu

SEQ ID NO: 325288 - RNA, 19 nt, Artificial Sequence
  Description of Artificial Sequence: Synthetic oligonucleotide
  Antisense Strand to SEQ ID NO: 325287
aaagcaaagaaucuccaag

SEQ ID NO: 325289 - RNA, 19 nt, Artificial Sequence
  Description of Artificial Sequence: Synthetic oligonucleotide
  Sense Strand Starting at position 84 of SEQ ID NO: 317539
cuuugcuuugagcaagacu

SEQ ID NO: 325290 - RNA, 19 nt, Artificial Sequence
  Description of Artificial Sequence: Synthetic oligonucleotide
  Antisense Strand to SEQ ID NO: 325289
agucuugcucaaagcaaag

SEQ ID NO: 325291 - RNA, 19 nt, Artificial Sequence
  Description of Artificial Sequence: Synthetic oligonucleotide
  Sense Strand Starting at position 84 of SEQ ID NO: 317542
ugcuuugagcaagacugaa

SEQ ID NO: 325292 - RNA, 19 nt, Artificial Sequence
  Description of Artificial Sequence: Synthetic oligonucleotide
  Antisense Strand to SEQ ID NO: 325291
uucagucuugcucaaagca

SEQ ID NO: 325293 - RNA, 19 nt, Artificial Sequence
  Description of Artificial Sequence: Synthetic oligonucleotide
  Sense Strand Starting at position 84 of SEQ ID NO: 317728
gcuuguucuagagaugcac

SEQ ID NO: 325294 - RNA, 19 nt, Artificial Sequence
  Description of Artificial Sequence: Synthetic oligonucleotide
  Antisense Strand to SEQ ID NO: 325293
gugcaucucuagaacaagc

SEQ ID NO: 325295 - RNA, 19 nt, Artificial Sequence
  Description of Artificial Sequence: Synthetic oligonucleotide
  Sense Strand Starting at position 84 of SEQ ID NO: 317857
ugaauaaauuuccggaauu

SEQ ID NO: 325296 - RNA, 19 nt, Artificial Sequence
  Description of Artificial Sequence: Synthetic oligonucleotide
  Antisense Strand to SEQ ID NO: 325295
aauuccggaaauuuauuca

SEQ ID NO: 325297 - RNA, 19 nt, Artificial Sequence
  Description of Artificial Sequence: Synthetic oligonucleotide
  Sense Strand Starting at position 84 of SEQ ID NO: 317881
uacuccuucugagugaaug

SEQ ID NO: 325298 - RNA, 19 nt, Artificial Sequence
  Description of Artificial Sequence: Synthetic oligonucleotide
  Antisense Strand to SEQ ID NO: 325297
cauucacucagaaggagua

SEQ ID NO: 325299 - RNA, 19 nt, Artificial Sequence
  Description of Artificial Sequence: Synthetic oligonucleotide
  Sense Strand Starting at position 84 of SEQ ID NO: 317882
acuccuucugagugaaugu

SEQ ID NO: 325300 - RNA, 19 nt, Artificial Sequence
  Description of Artificial Sequence: Synthetic oligonucleotide
  Antisense Strand to SEQ ID NO: 325299
acauucacucagaaggagu

SEQ ID NO: 325301 - RNA, 19 nt, Artificial Sequence
  Description of Artificial Sequence: Synthetic oligonucleotide
  Sense Strand Starting at position 84 of SEQ ID NO: 317997
uuugcaagguuguuauuaa

SEQ ID NO: 325302 - RNA, 19 nt, Artificial Sequence
  Description of Artificial Sequence: Synthetic oligonucleotide
  Antisense Strand to SEQ ID NO: 325301
uuaauaacaaccuugcaaa

SEQ ID NO: 325303 - RNA, 19 nt, Artificial Sequence
  Description of Artificial Sequence: Synthetic oligonucleotide
  Sense Strand Starting at position 84 of SEQ ID NO: 318008
guuauuaaugugcagcaaa

SEQ ID NO: 325304 - RNA, 19 nt, Artificial Sequence
  Description of Artificial Sequence: Synthetic oligonucleotide
  Antisense Strand to SEQ ID NO: 325303
uuugcugcacauuaauaac

SEQ ID NO: 325305 - RNA, 19 nt, Artificial Sequence
  Description of Artificial Sequence: Synthetic oligonucleotide
  Sense Strand Starting at position 84 of SEQ ID NO: 318107
acugaauaacuguguaucu

SEQ ID NO: 325306 - RNA, 19 nt, Artificial Sequence
  Description of Artificial Sequence: Synthetic oligonucleotide
  Antisense Strand to SEQ ID NO: 325305
agauacacaguuauucagu

SEQ ID NO: 325307 - RNA, 19 nt, Artificial Sequence
  Description of Artificial Sequence: Synthetic oligonucleotide
  Sense Strand Starting at position 84 of SEQ ID NO: 318117
uguguaucuggcgaaauga

SEQ ID NO: 325308 - RNA, 19 nt, Artificial Sequence
  Description of Artificial Sequence: Synthetic oligonucleotide
  Antisense Strand to SEQ ID NO: 325307
ucauuucgccagauacaca

SEQ ID NO: 325309 - RNA, 19 nt, Artificial Sequence
  Description of Artificial Sequence: Synthetic oligonucleotide
  Sense Strand Starting at position 84 of SEQ ID NO: 318327
gccuuugcauuauuauaga

SEQ ID NO: 325310 - RNA, 19 nt, Artificial Sequence
  Description of Artificial Sequence: Synthetic oligonucleotide
  Antisense Strand to SEQ ID NO: 325309
ucuauaauaaugcaaaggc

SEQ ID NO: 325311 - RNA, 19 nt, Artificial Sequence
  Description of Artificial Sequence: Synthetic oligonucleotide
  Sense Strand Starting at position 84 of SEQ ID NO: 318413
ugauacauguacuucuaga

SEQ ID NO: 325312 - RNA, 19 nt, Artificial Sequence
  Description of Artificial Sequence: Synthetic oligonucleotide
  Antisense Strand to SEQ ID NO: 325311
ucuagaaguacauguauca

SEQ ID NO: 325313 - RNA, 19 nt, Artificial Sequence
  Description of Artificial Sequence: Synthetic oligonucleotide
  Sense Strand Starting at position 84 of SEQ ID NO: 318463
gacccuugaugaguaggua

SEQ ID NO: 325314 - RNA, 19 nt, Artificial Sequence
  Description of Artificial Sequence: Synthetic oligonucleotide
  Antisense Strand to SEQ ID NO: 325313
uaccuacucaucaaggguc

SEQ ID NO: 325315 - RNA, 19 nt, Artificial Sequence
  Description of Artificial Sequence: Synthetic oligonucleotide
  Sense Strand Starting at position 84 of SEQ ID NO: 318466
ccuugaugaguagguaauu

SEQ ID NO: 325316 - RNA, 19 nt, Artificial Sequence
  Description of Artificial Sequence: Synthetic oligonucleotide
  Antisense Strand to SEQ ID NO: 325315
aauuaccuacucaucaagg

SEQ ID NO: 325317 - RNA, 19 nt, Artificial Sequence
  Description of Artificial Sequence: Synthetic oligonucleotide
  Sense Strand Starting at position 84 of SEQ ID NO: 318467
cuugaugaguagguaauua

SEQ ID NO: 325318 - RNA, 19 nt, Artificial Sequence
  Description of Artificial Sequence: Synthetic oligonucleotide
  Antisense Strand to SEQ ID NO: 325317
uaauuaccuacucaucaag

SEQ ID NO: 325319 - RNA, 19 nt, Artificial Sequence
  Description of Artificial Sequence: Synthetic oligonucleotide
  Sense Strand Starting at position 84 of SEQ ID NO: 318496
auucgaaauugucucccuu

SEQ ID NO: 325320 - RNA, 19 nt, Artificial Sequence
  Description of Artificial Sequence: Synthetic oligonucleotide
  Antisense Strand to SEQ ID NO: 325319
aagggagacaauuucgaau

SEQ ID NO: 325321 - RNA, 19 nt, Artificial Sequence
  Description of Artificial Sequence: Synthetic oligonucleotide
  Sense Strand Starting at position 84 of SEQ ID NO: 318527
ucacuagaauaagaaugaa

SEQ ID NO: 325322 - RNA, 19 nt, Artificial Sequence
  Description of Artificial Sequence: Synthetic oligonucleotide
  Antisense Strand to SEQ ID NO: 325321
uucauucuuauucuaguga

SEQ ID NO: 325323 - RNA, 19 nt, Artificial Sequence
  Description of Artificial Sequence: Synthetic oligonucleotide
  Sense Strand Starting at position 84 of SEQ ID NO: 318543
gaaucugcuguaugagguu

SEQ ID NO: 325324 - RNA, 19 nt, Artificial Sequence
  Description of Artificial Sequence: Synthetic oligonucleotide
  Antisense Strand to SEQ ID NO: 325323
aaccucauacagcagauuc

SEQ ID NO: 325325 - RNA, 19 nt, Artificial Sequence
  Description of Artificial Sequence: Synthetic oligonucleotide
  Sense Strand Starting at position 84 of SEQ ID NO: 318592
cuguuacuuugaucuacau

SEQ ID NO: 325326 - RNA, 19 nt, Artificial Sequence
  Description of Artificial Sequence: Synthetic oligonucleotide
  Antisense Strand to SEQ ID NO: 325325
auguagaucaaaguaacag

SEQ ID NO: 325327 - RNA, 19 nt, Artificial Sequence
  Description of Artificial Sequence: Synthetic oligonucleotide
  Sense Strand Starting at position 84 of SEQ ID NO: 318613
ugaucauuuccacguaguc

SEQ ID NO: 325328 - RNA, 19 nt, Artificial Sequence
  Description of Artificial Sequence: Synthetic oligonucleotide
  Antisense Strand to SEQ ID NO: 325327
gacuacguggaaaugauca

SEQ ID NO: 325329 - RNA, 19 nt, Artificial Sequence
  Description of Artificial Sequence: Synthetic oligonucleotide
  Sense Strand Starting at position 84 of SEQ ID NO: 318625
cguagucaucuccagaagu

SEQ ID NO: 325330 - RNA, 19 nt, Artificial Sequence
  Description of Artificial Sequence: Synthetic oligonucleotide
  Antisense Strand to SEQ ID NO: 325329
acuucuggagaugacuacg

SEQ ID NO: 325331 - RNA, 19 nt, Artificial Sequence
  Description of Artificial Sequence: Synthetic oligonucleotide
  Sense Strand Starting at position 84 of SEQ ID NO: 318790
ggaagaaaguuggcguauu

SEQ ID NO: 325332 - RNA, 19 nt, Artificial Sequence
  Description of Artificial Sequence: Synthetic oligonucleotide
  Antisense Strand to SEQ ID NO: 325331
aauacgccaacuuucuucc

SEQ ID NO: 325333 - RNA, 19 nt, Artificial Sequence
  Description of Artificial Sequence: Synthetic oligonucleotide
  Sense Strand Starting at position 84 of SEQ ID NO: 318837
ucggcaucuccugaauggu

SEQ ID NO: 325334 - RNA, 19 nt, Artificial Sequence
  Description of Artificial Sequence: Synthetic oligonucleotide
  Antisense Strand to SEQ ID NO: 325333
accauucaggagaugccga

SEQ ID NO: 325335 - RNA, 19 nt, Artificial Sequence
  Description of Artificial Sequence: Synthetic oligonucleotide
  Sense Strand Starting at position 84 of SEQ ID NO: 318855
uuggacagguaaucuauua

SEQ ID NO: 325336 - RNA, 19 nt, Artificial Sequence
  Description of Artificial Sequence: Synthetic oligonucleotide
  Antisense Strand to SEQ ID NO: 325335
uaauagauuaccuguccaa

SEQ ID NO: 325337 - RNA, 19 nt, Artificial Sequence
  Description of Artificial Sequence: Synthetic oligonucleotide
  Sense Strand Starting at position 84 of SEQ ID NO: 318881
accuuagcagauugaucau

SEQ ID NO: 325338 - RNA, 19 nt, Artificial Sequence
  Description of Artificial Sequence: Synthetic oligonucleotide
  Antisense Strand to SEQ ID NO: 325337
augaucaaucugcuaaggu

SEQ ID NO: 325339 - RNA, 19 nt, Artificial Sequence
  Description of Artificial Sequence: Synthetic oligonucleotide
  Sense Strand Starting at position 84 of SEQ ID NO: 318884
uuagcagauugaucauaac

SEQ ID NO: 325340 - RNA, 19 nt, Artificial Sequence
  Description of Artificial Sequence: Synthetic oligonucleotide
  Antisense Strand to SEQ ID NO: 325339
guuaugaucaaucugcuaa

SEQ ID NO: 325341 - RNA, 19 nt, Artificial Sequence
  Description of Artificial Sequence: Synthetic oligonucleotide
  Sense Strand Starting at position 84 of SEQ ID NO: 319003
agaacucaguauucuuagu

SEQ ID NO: 325342 - RNA, 19 nt, Artificial Sequence
  Description of Artificial Sequence: Synthetic oligonucleotide
  Antisense Strand to SEQ ID NO: 325341
acuaagaauacugaguucu

SEQ ID NO: 325343 - RNA, 19 nt, Artificial Sequence
  Description of Artificial Sequence: Synthetic oligonucleotide
  Sense Strand Starting at position 84 of SEQ ID NO: 319008
ucaguauucuuaguacaua

SEQ ID NO: 325344 - RNA, 19 nt, Artificial Sequence
  Description of Artificial Sequence: Synthetic oligonucleotide
  Antisense Strand to SEQ ID NO: 325343
uauguacuaagaauacuga

SEQ ID NO: 325345 - RNA, 19 nt, Artificial Sequence
  Description of Artificial Sequence: Synthetic oligonucleotide
  Sense Strand Starting at position 84 of SEQ ID NO: 319034
gccuaugugaaagaacgaa

SEQ ID NO: 325346 - RNA, 19 nt, Artificial Sequence
  Description of Artificial Sequence: Synthetic oligonucleotide
  Antisense Strand to SEQ ID NO: 325345
uucguucuuucacauaggc

SEQ ID NO: 325347 - RNA, 19 nt, Artificial Sequence
  Description of Artificial Sequence: Synthetic oligonucleotide
  Sense Strand Starting at position 85 of SEQ ID NO: 315322
ucaguaagauaaucuguag

SEQ ID NO: 325348 - RNA, 19 nt, Artificial Sequence
  Description of Artificial Sequence: Synthetic oligonucleotide
  Antisense Strand to SEQ ID NO: 325347
cuacagauuaucuuacuga

SEQ ID NO: 325349 - RNA, 19 nt, Artificial Sequence
  Description of Artificial Sequence: Synthetic oligonucleotide
  Sense Strand Starting at position 85 of SEQ ID NO: 315326
uaagauaaucuguagggcu

SEQ ID NO: 325350 - RNA, 19 nt, Artificial Sequence
  Description of Artificial Sequence: Synthetic oligonucleotide
  Antisense Strand to SEQ ID NO: 325349
agcccuacagauuaucuua

SEQ ID NO: 325351 - RNA, 19 nt, Artificial Sequence
  Description of Artificial Sequence: Synthetic oligonucleotide
  Sense Strand Starting at position 85 of SEQ ID NO: 315328
agauaaucuguagggcuua

SEQ ID NO: 325352 - RNA, 19 nt, Artificial Sequence
  Description of Artificial Sequence: Synthetic oligonucleotide
  Antisense Strand to SEQ ID NO: 325351
uaagcccuacagauuaucu

SEQ ID NO: 325353 - RNA, 19 nt, Artificial Sequence
  Description of Artificial Sequence: Synthetic oligonucleotide
  Sense Strand Starting at position 85 of SEQ ID NO: 315333
aucuguagggcuuaucuua

SEQ ID NO: 325354 - RNA, 19 nt, Artificial Sequence
  Description of Artificial Sequence: Synthetic oligonucleotide
  Antisense Strand to SEQ ID NO: 325353
uaagauaagcccuacagau

SEQ ID NO: 325355 - RNA, 19 nt, Artificial Sequence
  Description of Artificial Sequence: Synthetic oligonucleotide
  Sense Strand Starting at position 85 of SEQ ID NO: 315341
ggcuuaucuuaauucuaag

SEQ ID NO: 325356 - RNA, 19 nt, Artificial Sequence
  Description of Artificial Sequence: Synthetic oligonucleotide
  Antisense Strand to SEQ ID NO: 325355
cuuagaauuaagauaagcc

SEQ ID NO: 325357 - RNA, 19 nt, Artificial Sequence
  Description of Artificial Sequence: Synthetic oligonucleotide
  Sense Strand Starting at position 85 of SEQ ID NO: 315500
aucuuagaagcauauuagu

SEQ ID NO: 325358 - RNA, 19 nt, Artificial Sequence
  Description of Artificial Sequence: Synthetic oligonucleotide
  Antisense Strand to SEQ ID NO: 325357
acuaauaugcuucuaagau

SEQ ID NO: 325359 - RNA, 19 nt, Artificial Sequence
  Description of Artificial Sequence: Synthetic oligonucleotide
  Sense Strand Starting at position 85 of SEQ ID NO: 315647
caggaacucccugguuagu

SEQ ID NO: 325360 - RNA, 19 nt, Artificial Sequence
  Description of Artificial Sequence: Synthetic oligonucleotide
  Antisense Strand to SEQ ID NO: 325359
acuaaccagggaguuccug

SEQ ID NO: 325361 - RNA, 19 nt, Artificial Sequence
  Description of Artificial Sequence: Synthetic oligonucleotide
  Sense Strand Starting at position 85 of SEQ ID NO: 315649
ggaacucccugguuaguau

SEQ ID NO: 325362 - RNA, 19 nt, Artificial Sequence
  Description of Artificial Sequence: Synthetic oligonucleotide
  Antisense Strand to SEQ ID NO: 325361
auacuaaccagggaguucc

SEQ ID NO: 325363 - RNA, 19 nt, Artificial Sequence
  Description of Artificial Sequence: Synthetic oligonucleotide
  Sense Strand Starting at position 85 of SEQ ID NO: 315658
ugguuaguaugucccucaa

SEQ ID NO: 325364 - RNA, 19 nt, Artificial Sequence
  Description of Artificial Sequence: Synthetic oligonucleotide
  Antisense Strand to SEQ ID NO: 325363
uugagggacauacuaacca

SEQ ID NO: 325365 - RNA, 19 nt, Artificial Sequence
  Description of Artificial Sequence: Synthetic oligonucleotide
  Sense Strand Starting at position 85 of SEQ ID NO: 315692
auuauugagucuucuuucu

SEQ ID NO: 325366 - RNA, 19 nt, Artificial Sequence
  Description of Artificial Sequence: Synthetic oligonucleotide
  Antisense Strand to SEQ ID NO: 325365
agaaagaagacucaauaau

SEQ ID NO: 325367 - RNA, 19 nt, Artificial Sequence
  Description of Artificial Sequence: Synthetic oligonucleotide
  Sense Strand Starting at position 85 of SEQ ID NO: 315697
ugagucuucuuucuaagaa

SEQ ID NO: 325368 - RNA, 19 nt, Artificial Sequence
  Description of Artificial Sequence: Synthetic oligonucleotide
  Antisense Strand to SEQ ID NO: 325367
uucuuagaaagaagacuca

SEQ ID NO: 325369 - RNA, 19 nt, Artificial Sequence
  Description of Artificial Sequence: Synthetic oligonucleotide
  Sense Strand Starting at position 85 of SEQ ID NO: 315826
auccaauggucagccuuua

SEQ ID NO: 325370 - RNA, 19 nt, Artificial Sequence
  Description of Artificial Sequence: Synthetic oligonucleotide
  Antisense Strand to SEQ ID NO: 325369
uaaaggcugaccauuggau

SEQ ID NO: 325371 - RNA, 19 nt, Artificial Sequence
  Description of Artificial Sequence: Synthetic oligonucleotide
  Sense Strand Starting at position 85 of SEQ ID NO: 315977
aguggagcaugcucuaaca

SEQ ID NO: 325372 - RNA, 19 nt, Artificial Sequence
  Description of Artificial Sequence: Synthetic oligonucleotide
  Antisense Strand to SEQ ID NO: 325371
uguuagagcaugcuccacu

SEQ ID NO: 325373 - RNA, 19 nt, Artificial Sequence
  Description of Artificial Sequence: Synthetic oligonucleotide
  Sense Strand Starting at position 85 of SEQ ID NO: 315985
augcucuaacauggcuaau

SEQ ID NO: 325374 - RNA, 19 nt, Artificial Sequence
  Description of Artificial Sequence: Synthetic oligonucleotide
  Antisense Strand to SEQ ID NO: 325373
auuagccauguuagagcau

SEQ ID NO: 325375 - RNA, 19 nt, Artificial Sequence
  Description of Artificial Sequence: Synthetic oligonucleotide
  Sense Strand Starting at position 85 of SEQ ID NO: 316025
auacucaacugggaucuaa

SEQ ID NO: 325376 - RNA, 19 nt, Artificial Sequence
  Description of Artificial Sequence: Synthetic oligonucleotide
  Antisense Strand to SEQ ID NO: 325375
uuagaucccaguugaguau

SEQ ID NO: 325377 - RNA, 19 nt, Artificial Sequence
  Description of Artificial Sequence: Synthetic oligonucleotide
  Sense Strand Starting at position 85 of SEQ ID NO: 316048
gaaagucacugggagauca

SEQ ID NO: 325378 - RNA, 19 nt, Artificial Sequence
  Description of Artificial Sequence: Synthetic oligonucleotide
  Antisense Strand to SEQ ID NO: 325377
ugaucucccagugacuuuc

SEQ ID NO: 325379 - RNA, 19 nt, Artificial Sequence
  Description of Artificial Sequence: Synthetic oligonucleotide
  Sense Strand Starting at position 85 of SEQ ID NO: 316093
caauucugucuuggucuga

SEQ ID NO: 325380 - RNA, 19 nt, Artificial Sequence
  Description of Artificial Sequence: Synthetic oligonucleotide
  Antisense Strand to SEQ ID NO: 325379
ucagaccaagacagaauug

SEQ ID NO: 325381 - RNA, 19 nt, Artificial Sequence
  Description of Artificial Sequence: Synthetic oligonucleotide
  Sense Strand Starting at position 85 of SEQ ID NO: 316128
gacaaaucagcauguagug

SEQ ID NO: 325382 - RNA, 19 nt, Artificial Sequence
  Description of Artificial Sequence: Synthetic oligonucleotide
  Antisense Strand to SEQ ID NO: 325381
cacuacaugcugauuuguc

SEQ ID NO: 325383 - RNA, 19 nt, Artificial Sequence
  Description of Artificial Sequence: Synthetic oligonucleotide
  Sense Strand Starting at position 85 of SEQ ID NO: 316177
uuucuuuagcuguauaagu

SEQ ID NO: 325384 - RNA, 19 nt, Artificial Sequence
  Description of Artificial Sequence: Synthetic oligonucleotide
  Antisense Strand to SEQ ID NO: 325383
acuuauacagcuaaagaaa

SEQ ID NO: 325385 - RNA, 19 nt, Artificial Sequence
  Description of Artificial Sequence: Synthetic oligonucleotide
  Sense Strand Starting at position 85 of SEQ ID NO: 316179
ucuuuagcuguauaaguuu

SEQ ID NO: 325386 - RNA, 19 nt, Artificial Sequence
  Description of Artificial Sequence: Synthetic oligonucleotide
  Antisense Strand to SEQ ID NO: 325385
aaacuuauacagcuaaaga

SEQ ID NO: 325387 - RNA, 19 nt, Artificial Sequence
  Description of Artificial Sequence: Synthetic oligonucleotide
  Sense Strand Starting at position 85 of SEQ ID NO: 316284
auaaaucaugccuggagag

SEQ ID NO: 325388 - RNA, 19 nt, Artificial Sequence
  Description of Artificial Sequence: Synthetic oligonucleotide
  Antisense Strand to SEQ ID NO: 325387
cucuccaggcaugauuuau

SEQ ID NO: 325389 - RNA, 19 nt, Artificial Sequence
  Description of Artificial Sequence: Synthetic oligonucleotide
  Sense Strand Starting at position 85 of SEQ ID NO: 316376
uugauaagcaaguguagua

SEQ ID NO: 325390 - RNA, 19 nt, Artificial Sequence
  Description of Artificial Sequence: Synthetic oligonucleotide
  Antisense Strand to SEQ ID NO: 325389
uacuacacuugcuuaucaa

SEQ ID NO: 325391 - RNA, 19 nt, Artificial Sequence
  Description of Artificial Sequence: Synthetic oligonucleotide
  Sense Strand Starting at position 85 of SEQ ID NO: 316392
guaaucaauuauguuucca

SEQ ID NO: 325392 - RNA, 19 nt, Artificial Sequence
  Description of Artificial Sequence: Synthetic oligonucleotide
  Antisense Strand to SEQ ID NO: 325391
uggaaacauaauugauuac

SEQ ID NO: 325393 - RNA, 19 nt, Artificial Sequence
  Description of Artificial Sequence: Synthetic oligonucleotide
  Sense Strand Starting at position 85 of SEQ ID NO: 316426
ggaagcauauuccucaaag

SEQ ID NO: 325394 - RNA, 19 nt, Artificial Sequence
  Description of Artificial Sequence: Synthetic oligonucleotide
  Antisense Strand to SEQ ID NO: 325393
cuuugaggaauaugcuucc

SEQ ID NO: 325395 - RNA, 19 nt, Artificial Sequence
  Description of Artificial Sequence: Synthetic oligonucleotide
  Sense Strand Starting at position 85 of SEQ ID NO: 316643
auaguagauuacucggcua

SEQ ID NO: 325396 - RNA, 19 nt, Artificial Sequence
  Description of Artificial Sequence: Synthetic oligonucleotide
  Antisense Strand to SEQ ID NO: 325395
uagccgaguaaucuacuau

SEQ ID NO: 325397 - RNA, 19 nt, Artificial Sequence
  Description of Artificial Sequence: Synthetic oligonucleotide
  Sense Strand Starting at position 85 of SEQ ID NO: 316645
aguagauuacucggcuauu

SEQ ID NO: 325398 - RNA, 19 nt, Artificial Sequence
  Description of Artificial Sequence: Synthetic oligonucleotide
  Antisense Strand to SEQ ID NO: 325397
aauagccgaguaaucuacu

SEQ ID NO: 325399 - RNA, 19 nt, Artificial Sequence
  Description of Artificial Sequence: Synthetic oligonucleotide
  Sense Strand Starting at position 85 of SEQ ID NO: 316646
guagauuacucggcuauuu

SEQ ID NO: 325400 - RNA, 19 nt, Artificial Sequence
  Description of Artificial Sequence: Synthetic oligonucleotide
  Antisense Strand to SEQ ID NO: 325399
aaauagccgaguaaucuac

SEQ ID NO: 325401 - RNA, 19 nt, Artificial Sequence
  Description of Artificial Sequence: Synthetic oligonucleotide
  Sense Strand Starting at position 85 of SEQ ID NO: 316740
auauuuaagcccuguggua

SEQ ID NO: 325402 - RNA, 19 nt, Artificial Sequence
  Description of Artificial Sequence: Synthetic oligonucleotide
  Antisense Strand to SEQ ID NO: 325401
uaccacagggcuuaaauau

SEQ ID NO: 325403 - RNA, 19 nt, Artificial Sequence
  Description of Artificial Sequence: Synthetic oligonucleotide
  Sense Strand Starting at position 85 of SEQ ID NO: 316742
auuuaagcccugugguaau

SEQ ID NO: 325404 - RNA, 19 nt, Artificial Sequence
  Description of Artificial Sequence: Synthetic oligonucleotide
  Antisense Strand to SEQ ID NO: 325403
auuaccacagggcuuaaau

SEQ ID NO: 325405 - RNA, 19 nt, Artificial Sequence
  Description of Artificial Sequence: Synthetic oligonucleotide
  Sense Strand Starting at position 85 of SEQ ID NO: 317012
gagugucauacugguagaa

SEQ ID NO: 325406 - RNA, 19 nt, Artificial Sequence
  Description of Artificial Sequence: Synthetic oligonucleotide
  Antisense Strand to SEQ ID NO: 325405
uucuaccaguaugacacuc

SEQ ID NO: 325407 - RNA, 19 nt, Artificial Sequence
  Description of Artificial Sequence: Synthetic oligonucleotide
  Sense Strand Starting at position 85 of SEQ ID NO: 317187
ggauucuguccuuacccua

SEQ ID NO: 325408 - RNA, 19 nt, Artificial Sequence
  Description of Artificial Sequence: Synthetic oligonucleotide
  Antisense Strand to SEQ ID NO: 325407
uaggguaaggacagaaucc

SEQ ID NO: 325409 - RNA, 19 nt, Artificial Sequence
  Description of Artificial Sequence: Synthetic oligonucleotide
  Sense Strand Starting at position 85 of SEQ ID NO: 317383
gaguaaauuggcgauugca

SEQ ID NO: 325410 - RNA, 19 nt, Artificial Sequence
  Description of Artificial Sequence: Synthetic oligonucleotide
  Antisense Strand to SEQ ID NO: 325409
ugcaaucgccaauuuacuc

SEQ ID NO: 325411 - RNA, 19 nt, Artificial Sequence
  Description of Artificial Sequence: Synthetic oligonucleotide
  Sense Strand Starting at position 85 of SEQ ID NO: 317589
acuguagacuucucugaug

SEQ ID NO: 325412 - RNA, 19 nt, Artificial Sequence
  Description of Artificial Sequence: Synthetic oligonucleotide
  Antisense Strand to SEQ ID NO: 325411
caucagagaagucuacagu

SEQ ID NO: 325413 - RNA, 19 nt, Artificial Sequence
  Description of Artificial Sequence: Synthetic oligonucleotide
  Sense Strand Starting at position 85 of SEQ ID NO: 317591
uguagacuucucugaugaa

SEQ ID NO: 325414 - RNA, 19 nt, Artificial Sequence
  Description of Artificial Sequence: Synthetic oligonucleotide
  Antisense Strand to SEQ ID NO: 325413
uucaucagagaagucuaca

SEQ ID NO: 325415 - RNA, 19 nt, Artificial Sequence
  Description of Artificial Sequence: Synthetic oligonucleotide
  Sense Strand Starting at position 85 of SEQ ID NO: 317664
ccaucccuccuugacgaaa

SEQ ID NO: 325416 - RNA, 19 nt, Artificial Sequence
  Description of Artificial Sequence: Synthetic oligonucleotide
  Antisense Strand to SEQ ID NO: 325415
uuucgucaaggagggaugg

SEQ ID NO: 325417 - RNA, 19 nt, Artificial Sequence
  Description of Artificial Sequence: Synthetic oligonucleotide
  Sense Strand Starting at position 85 of SEQ ID NO: 317771
acagauauauggcagaaag

SEQ ID NO: 325418 - RNA, 19 nt, Artificial Sequence
  Description of Artificial Sequence: Synthetic oligonucleotide
  Antisense Strand to SEQ ID NO: 325417
cuuucugccauauaucugu

SEQ ID NO: 325419 - RNA, 19 nt, Artificial Sequence
  Description of Artificial Sequence: Synthetic oligonucleotide
  Sense Strand Starting at position 85 of SEQ ID NO: 317834
gucggaagaccuugauuau

SEQ ID NO: 325420 - RNA, 19 nt, Artificial Sequence
  Description of Artificial Sequence: Synthetic oligonucleotide
  Antisense Strand to SEQ ID NO: 325419
auaaucaaggucuuccgac

SEQ ID NO: 325421 - RNA, 19 nt, Artificial Sequence
  Description of Artificial Sequence: Synthetic oligonucleotide
  Sense Strand Starting at position 85 of SEQ ID NO: 317846
ugauuauuaccuugaucga

SEQ ID NO: 325422 - RNA, 19 nt, Artificial Sequence
  Description of Artificial Sequence: Synthetic oligonucleotide
  Antisense Strand to SEQ ID NO: 325421
ucgaucaagguaauaauca

SEQ ID NO: 325423 - RNA, 19 nt, Artificial Sequence
  Description of Artificial Sequence: Synthetic oligonucleotide
  Sense Strand Starting at position 85 of SEQ ID NO: 317849
uuauuaccuugaucgaacu

SEQ ID NO: 325424 - RNA, 19 nt, Artificial Sequence
  Description of Artificial Sequence: Synthetic oligonucleotide
  Antisense Strand to SEQ ID NO: 325423
aguucgaucaagguaauaa

SEQ ID NO: 325425 - RNA, 19 nt, Artificial Sequence
  Description of Artificial Sequence: Synthetic oligonucleotide
  Sense Strand Starting at position 85 of SEQ ID NO: 319095
cagcgugagcaucauuaau

SEQ ID NO: 325426 - RNA, 19 nt, Artificial Sequence
  Description of Artificial Sequence: Synthetic oligonucleotide
  Antisense Strand to SEQ ID NO: 325425
auuaaugaugcucacgcug

SEQ ID NO: 325427 - RNA, 19 nt, Artificial Sequence
  Description of Artificial Sequence: Synthetic oligonucleotide
  Sense Strand Starting at position 86 of SEQ ID NO: 315355
gugaauacaccuugccauc

SEQ ID NO: 325428 - RNA, 19 nt, Artificial Sequence
  Description of Artificial Sequence: Synthetic oligonucleotide
  Antisense Strand to SEQ ID NO: 325427
gauggcaagguguauucac

SEQ ID NO: 325429 - RNA, 19 nt, Artificial Sequence
  Description of Artificial Sequence: Synthetic oligonucleotide
  Sense Strand Starting at position 86 of SEQ ID NO: 315496
cucgacuucugacucaaga

SEQ ID NO: 325430 - RNA, 19 nt, Artificial Sequence
  Description of Artificial Sequence: Synthetic oligonucleotide
  Antisense Strand to SEQ ID NO: 325429
ucuugagucagaagucgag

SEQ ID NO: 325431 - RNA, 19 nt, Artificial Sequence
  Description of Artificial Sequence: Synthetic oligonucleotide
  Sense Strand Starting at position 86 of SEQ ID NO: 315505
ugacucaagauguggcauu

SEQ ID NO: 325432 - RNA, 19 nt, Artificial Sequence
  Description of Artificial Sequence: Synthetic oligonucleotide
  Antisense Strand to SEQ ID NO: 325431
aaugccacaucuugaguca

SEQ ID NO: 325433 - RNA, 19 nt, Artificial Sequence
  Description of Artificial Sequence: Synthetic oligonucleotide
  Sense Strand Starting at position 86 of SEQ ID NO: 315579
agacaugcuucccuaggua

SEQ ID NO: 325434 - RNA, 19 nt, Artificial Sequence
  Description of Artificial Sequence: Synthetic oligonucleotide
  Antisense Strand to SEQ ID NO: 325433
uaccuagggaagcaugucu

SEQ ID NO: 325435 - RNA, 19 nt, Artificial Sequence
  Description of Artificial Sequence: Synthetic oligonucleotide
  Sense Strand Starting at position 86 of SEQ ID NO: 315583
augcuucccuagguauaaa

SEQ ID NO: 325436 - RNA, 19 nt, Artificial Sequence
  Description of Artificial Sequence: Synthetic oligonucleotide
  Antisense Strand to SEQ ID NO: 325435
uuuauaccuagggaagcau

SEQ ID NO: 325437 - RNA, 19 nt, Artificial Sequence
  Description of Artificial Sequence: Synthetic oligonucleotide
  Sense Strand Starting at position 86 of SEQ ID NO: 315601
agaauacaguagucugcaa

SEQ ID NO: 325438 - RNA, 19 nt, Artificial Sequence
  Description of Artificial Sequence: Synthetic oligonucleotide
  Antisense Strand to SEQ ID NO: 325437
uugcagacuacuguauucu

SEQ ID NO: 325439 - RNA, 19 nt, Artificial Sequence
  Description of Artificial Sequence: Synthetic oligonucleotide
  Sense Strand Starting at position 86 of SEQ ID NO: 315678
gcaauaaaccuuugagggu

SEQ ID NO: 325440 - RNA, 19 nt, Artificial Sequence
  Description of Artificial Sequence: Synthetic oligonucleotide
  Antisense Strand to SEQ ID NO: 325439
acccucaaagguuuauugc

SEQ ID NO: 325441 - RNA, 19 nt, Artificial Sequence
  Description of Artificial Sequence: Synthetic oligonucleotide
  Sense Strand Starting at position 86 of SEQ ID NO: 316165
cuuagaaaguuaguucuuu

SEQ ID NO: 325442 - RNA, 19 nt, Artificial Sequence
  Description of Artificial Sequence: Synthetic oligonucleotide
  Antisense Strand to SEQ ID NO: 325441
aaagaacuaacuuucuaag

SEQ ID NO: 325443 - RNA, 19 nt, Artificial Sequence
  Description of Artificial Sequence: Synthetic oligonucleotide
  Sense Strand Starting at position 86 of SEQ ID NO: 316230
ugguaauuauuacuagaca

SEQ ID NO: 325444 - RNA, 19 nt, Artificial Sequence
  Description of Artificial Sequence: Synthetic oligonucleotide
  Antisense Strand to SEQ ID NO: 325443
ugucuaguaauaauuacca

SEQ ID NO: 325445 - RNA, 19 nt, Artificial Sequence
  Description of Artificial Sequence: Synthetic oligonucleotide
  Sense Strand Starting at position 86 of SEQ ID NO: 316259
uuaauauguuucuuuggga

SEQ ID NO: 325446 - RNA, 19 nt, Artificial Sequence
  Description of Artificial Sequence: Synthetic oligonucleotide
  Antisense Strand to SEQ ID NO: 325445
ucccaaagaaacauauuaa

SEQ ID NO: 325447 - RNA, 19 nt, Artificial Sequence
  Description of Artificial Sequence: Synthetic oligonucleotide
  Sense Strand Starting at position 86 of SEQ ID NO: 316466
aaaggaugguaguuugagu

SEQ ID NO: 325448 - RNA, 19 nt, Artificial Sequence
  Description of Artificial Sequence: Synthetic oligonucleotide
  Antisense Strand to SEQ ID NO: 325447
acucaaacuaccauccuuu

SEQ ID NO: 325449 - RNA, 19 nt, Artificial Sequence
  Description of Artificial Sequence: Synthetic oligonucleotide
  Sense Strand Starting at position 86 of SEQ ID NO: 316484
ucuguaaagugacuaguaa

SEQ ID NO: 325450 - RNA, 19 nt, Artificial Sequence
  Description of Artificial Sequence: Synthetic oligonucleotide
  Antisense Strand to SEQ ID NO: 325449
uuacuagucacuuuacaga

SEQ ID NO: 325451 - RNA, 19 nt, Artificial Sequence
  Description of Artificial Sequence: Synthetic oligonucleotide
  Sense Strand Starting at position 86 of SEQ ID NO: 316485
cuguaaagugacuaguaag

SEQ ID NO: 325452 - RNA, 19 nt, Artificial Sequence
  Description of Artificial Sequence: Synthetic oligonucleotide
  Antisense Strand to SEQ ID NO: 325451
cuuacuagucacuuuacag

SEQ ID NO: 325453 - RNA, 19 nt, Artificial Sequence
  Description of Artificial Sequence: Synthetic oligonucleotide
  Sense Strand Starting at position 86 of SEQ ID NO: 316546
gugcauucugacggauuuc

SEQ ID NO: 325454 - RNA, 19 nt, Artificial Sequence
  Description of Artificial Sequence: Synthetic oligonucleotide
  Antisense Strand to SEQ ID NO: 325453
gaaauccgucagaaugcac

SEQ ID NO: 325455 - RNA, 19 nt, Artificial Sequence
  Description of Artificial Sequence: Synthetic oligonucleotide
  Sense Strand Starting at position 86 of SEQ ID NO: 316733
ugaacaaauugagcucuaa

SEQ ID NO: 325456 - RNA, 19 nt, Artificial Sequence
  Description of Artificial Sequence: Synthetic oligonucleotide
  Antisense Strand to SEQ ID NO: 325455
uuagagcucaauuuguuca

SEQ ID NO: 325457 - RNA, 19 nt, Artificial Sequence
  Description of Artificial Sequence: Synthetic oligonucleotide
  Sense Strand Starting at position 86 of SEQ ID NO: 316768
ccaaaugagucucugauac

SEQ ID NO: 325458 - RNA, 19 nt, Artificial Sequence
  Description of Artificial Sequence: Synthetic oligonucleotide
  Antisense Strand to SEQ ID NO: 325457
guaucagagacucauuugg

SEQ ID NO: 325459 - RNA, 19 nt, Artificial Sequence
  Description of Artificial Sequence: Synthetic oligonucleotide
  Sense Strand Starting at position 86 of SEQ ID NO: 316787
agauccugucaugguuaca

SEQ ID NO: 325460 - RNA, 19 nt, Artificial Sequence
  Description of Artificial Sequence: Synthetic oligonucleotide
  Antisense Strand to SEQ ID NO: 325459
uguaaccaugacaggaucu

SEQ ID NO: 325461 - RNA, 19 nt, Artificial Sequence
  Description of Artificial Sequence: Synthetic oligonucleotide
  Sense Strand Starting at position 86 of SEQ ID NO: 316893
uuaccuuuggugcagaauu

SEQ ID NO: 325462 - RNA, 19 nt, Artificial Sequence
  Description of Artificial Sequence: Synthetic oligonucleotide
  Antisense Strand to SEQ ID NO: 325461
aauucugcaccaaagguaa

SEQ ID NO: 325463 - RNA, 19 nt, Artificial Sequence
  Description of Artificial Sequence: Synthetic oligonucleotide
  Sense Strand Starting at position 86 of SEQ ID NO: 317300
gcauuaugcaccgaagauu

SEQ ID NO: 325464 - RNA, 19 nt, Artificial Sequence
  Description of Artificial Sequence: Synthetic oligonucleotide
  Antisense Strand to SEQ ID NO: 325463
aaucuucggugcauaaugc

SEQ ID NO: 325465 - RNA, 19 nt, Artificial Sequence
  Description of Artificial Sequence: Synthetic oligonucleotide
  Sense Strand Starting at position 86 of SEQ ID NO: 317501
ugguuucucucuuuaugaa

SEQ ID NO: 325466 - RNA, 19 nt, Artificial Sequence
  Description of Artificial Sequence: Synthetic oligonucleotide
  Antisense Strand to SEQ ID NO: 325465
uucauaaagagagaaacca

SEQ ID NO: 325467 - RNA, 19 nt, Artificial Sequence
  Description of Artificial Sequence: Synthetic oligonucleotide
  Sense Strand Starting at position 86 of SEQ ID NO: 317502
gguuucucucuuuaugaaa

SEQ ID NO: 325468 - RNA, 19 nt, Artificial Sequence
  Description of Artificial Sequence: Synthetic oligonucleotide
  Antisense Strand to SEQ ID NO: 325467
uuucauaaagagagaaacc

SEQ ID NO: 325469 - RNA, 19 nt, Artificial Sequence
  Description of Artificial Sequence: Synthetic oligonucleotide
  Sense Strand Starting at position 86 of SEQ ID NO: 317602
uuuauaauggcauggcuga

SEQ ID NO: 325470 - RNA, 19 nt, Artificial Sequence
  Description of Artificial Sequence: Synthetic oligonucleotide
  Antisense Strand to SEQ ID NO: 325469
ucagccaugccauuauaaa

SEQ ID NO: 325471 - RNA, 19 nt, Artificial Sequence
  Description of Artificial Sequence: Synthetic oligonucleotide
  Sense Strand Starting at position 86 of SEQ ID NO: 317637
cuacuuauaguuugggaag

SEQ ID NO: 325472 - RNA, 19 nt, Artificial Sequence
  Description of Artificial Sequence: Synthetic oligonucleotide
  Antisense Strand to SEQ ID NO: 325471
cuucccaaacuauaaguag

SEQ ID NO: 325473 - RNA, 19 nt, Artificial Sequence
  Description of Artificial Sequence: Synthetic oligonucleotide
  Sense Strand Starting at position 86 of SEQ ID NO: 318226
agucaauaguuucuggauu

SEQ ID NO: 325474 - RNA, 19 nt, Artificial Sequence
  Description of Artificial Sequence: Synthetic oligonucleotide
  Antisense Strand to SEQ ID NO: 325473
aauccagaaacuauugacu

SEQ ID NO: 325475 - RNA, 19 nt, Artificial Sequence
  Description of Artificial Sequence: Synthetic oligonucleotide
  Sense Strand Starting at position 86 of SEQ ID NO: 318318
uugagagcuagacaugcau

SEQ ID NO: 325476 - RNA, 19 nt, Artificial Sequence
  Description of Artificial Sequence: Synthetic oligonucleotide
  Antisense Strand to SEQ ID NO: 325475
augcaugucuagcucucaa

SEQ ID NO: 325477 - RNA, 19 nt, Artificial Sequence
  Description of Artificial Sequence: Synthetic oligonucleotide
  Sense Strand Starting at position 86 of SEQ ID NO: 318348
guggauugcuaaucaauag

SEQ ID NO: 325478 - RNA, 19 nt, Artificial Sequence
  Description of Artificial Sequence: Synthetic oligonucleotide
  Antisense Strand to SEQ ID NO: 325477
cuauugauuagcaauccac

SEQ ID NO: 325479 - RNA, 19 nt, Artificial Sequence
  Description of Artificial Sequence: Synthetic oligonucleotide
  Sense Strand Starting at position 86 of SEQ ID NO: 318426
aauagaaaucaucgugucu

SEQ ID NO: 325480 - RNA, 19 nt, Artificial Sequence
  Description of Artificial Sequence: Synthetic oligonucleotide
  Antisense Strand to SEQ ID NO: 325479
agacacgaugauuucuauu

SEQ ID NO: 325481 - RNA, 19 nt, Artificial Sequence
  Description of Artificial Sequence: Synthetic oligonucleotide
  Sense Strand Starting at position 86 of SEQ ID NO: 318495
gcauaaaugucagugaugg

SEQ ID NO: 325482 - RNA, 19 nt, Artificial Sequence
  Description of Artificial Sequence: Synthetic oligonucleotide
  Antisense Strand to SEQ ID NO: 325481
ccaucacugacauuuaugc

SEQ ID NO: 325483 - RNA, 19 nt, Artificial Sequence
  Description of Artificial Sequence: Synthetic oligonucleotide
  Sense Strand Starting at position 86 of SEQ ID NO: 318496
cauaaaugucagugauggu

SEQ ID NO: 325484 - RNA, 19 nt, Artificial Sequence
  Description of Artificial Sequence: Synthetic oligonucleotide
  Antisense Strand to SEQ ID NO: 325483
accaucacugacauuuaug

SEQ ID NO: 325485 - RNA, 19 nt, Artificial Sequence
  Description of Artificial Sequence: Synthetic oligonucleotide
  Sense Strand Starting at position 86 of SEQ ID NO: 318497
auaaaugucagugaugguu

SEQ ID NO: 325486 - RNA, 19 nt, Artificial Sequence
  Description of Artificial Sequence: Synthetic oligonucleotide
  Antisense Strand to SEQ ID NO: 325485
aaccaucacugacauuuau

SEQ ID NO: 325487 - RNA, 19 nt, Artificial Sequence
  Description of Artificial Sequence: Synthetic oligonucleotide
  Sense Strand Starting at position 86 of SEQ ID NO: 318503
gucagugaugguuacgaaa

SEQ ID NO: 325488 - RNA, 19 nt, Artificial Sequence
  Description of Artificial Sequence: Synthetic oligonucleotide
  Antisense Strand to SEQ ID NO: 325487
uuucguaaccaucacugac

SEQ ID NO: 325489 - RNA, 19 nt, Artificial Sequence
  Description of Artificial Sequence: Synthetic oligonucleotide
  Sense Strand Starting at position 86 of SEQ ID NO: 318633
ggugaacagcaauguaauu

SEQ ID NO: 325490 - RNA, 19 nt, Artificial Sequence
  Description of Artificial Sequence: Synthetic oligonucleotide
  Antisense Strand to SEQ ID NO: 325489
aauuacauugcuguucacc

SEQ ID NO: 325491 - RNA, 19 nt, Artificial Sequence
  Description of Artificial Sequence: Synthetic oligonucleotide
  Sense Strand Starting at position 86 of SEQ ID NO: 318764
cagggacagccuggauaua

SEQ ID NO: 325492 - RNA, 19 nt, Artificial Sequence
  Description of Artificial Sequence: Synthetic oligonucleotide
  Antisense Strand to SEQ ID NO: 325491
uauauccaggcugucccug

SEQ ID NO: 325493 - RNA, 19 nt, Artificial Sequence
  Description of Artificial Sequence: Synthetic oligonucleotide
  Sense Strand Starting at position 86 of SEQ ID NO: 318791
cguaauuaccaggacacgu

SEQ ID NO: 325494 - RNA, 19 nt, Artificial Sequence
  Description of Artificial Sequence: Synthetic oligonucleotide
  Antisense Strand to SEQ ID NO: 325493
acguguccugguaauuacg

SEQ ID NO: 325495 - RNA, 19 nt, Artificial Sequence
  Description of Artificial Sequence: Synthetic oligonucleotide
  Sense Strand Starting at position 86 of SEQ ID NO: 318828
ucuaaagucagcgagguau

SEQ ID NO: 325496 - RNA, 19 nt, Artificial Sequence
  Description of Artificial Sequence: Synthetic oligonucleotide
  Antisense Strand to SEQ ID NO: 325495
auaccucgcugacuuuaga

SEQ ID NO: 325497 - RNA, 19 nt, Artificial Sequence
  Description of Artificial Sequence: Synthetic oligonucleotide
  Sense Strand Starting at position 86 of SEQ ID NO: 318832
aagucagcgagguauuauu

SEQ ID NO: 325498 - RNA, 19 nt, Artificial Sequence
  Description of Artificial Sequence: Synthetic oligonucleotide
  Antisense Strand to SEQ ID NO: 325497
aauaauaccucgcugacuu

SEQ ID NO: 325499 - RNA, 19 nt, Artificial Sequence
  Description of Artificial Sequence: Synthetic oligonucleotide
  Sense Strand Starting at position 86 of SEQ ID NO: 318840
gagguauuauucuugcaug

SEQ ID NO: 325500 - RNA, 19 nt, Artificial Sequence
  Description of Artificial Sequence: Synthetic oligonucleotide
  Antisense Strand to SEQ ID NO: 325499
caugcaagaauaauaccuc

SEQ ID NO: 325501 - RNA, 19 nt, Artificial Sequence
  Description of Artificial Sequence: Synthetic oligonucleotide
  Sense Strand Starting at position 86 of SEQ ID NO: 318850
ucuugcaugccugaaucau

SEQ ID NO: 325502 - RNA, 19 nt, Artificial Sequence
  Description of Artificial Sequence: Synthetic oligonucleotide
  Antisense Strand to SEQ ID NO: 325501
augauucaggcaugcaaga

SEQ ID NO: 325503 - RNA, 19 nt, Artificial Sequence
  Description of Artificial Sequence: Synthetic oligonucleotide
  Sense Strand Starting at position 86 of SEQ ID NO: 318967
guucucuuugcugagaaag

SEQ ID NO: 325504 - RNA, 19 nt, Artificial Sequence
  Description of Artificial Sequence: Synthetic oligonucleotide
  Antisense Strand to SEQ ID NO: 325503
cuuucucagcaaagagaac

SEQ ID NO: 325505 - RNA, 19 nt, Artificial Sequence
  Description of Artificial Sequence: Synthetic oligonucleotide
  Sense Strand Starting at position 86 of SEQ ID NO: 319163
acuguuacaguuugaagga

SEQ ID NO: 325506 - RNA, 19 nt, Artificial Sequence
  Description of Artificial Sequence: Synthetic oligonucleotide
  Antisense Strand to SEQ ID NO: 325505
uccuucaaacuguaacagu

SEQ ID NO: 325507 - RNA, 19 nt, Artificial Sequence
  Description of Artificial Sequence: Synthetic oligonucleotide
  Sense Strand Starting at position 87 of SEQ ID NO: 315336
aagucagugcaagguauuu

SEQ ID NO: 325508 - RNA, 19 nt, Artificial Sequence
  Description of Artificial Sequence: Synthetic oligonucleotide
  Antisense Strand to SEQ ID NO: 325507
aaauaccuugcacugacuu

SEQ ID NO: 325509 - RNA, 19 nt, Artificial Sequence
  Description of Artificial Sequence: Synthetic oligonucleotide
  Sense Strand Starting at position 87 of SEQ ID NO: 315521
gugaauacaccuugccauc

SEQ ID NO: 325510 - RNA, 19 nt, Artificial Sequence
  Description of Artificial Sequence: Synthetic oligonucleotide
  Antisense Strand to SEQ ID NO: 325509
gauggcaagguguauucac

SEQ ID NO: 325511 - RNA, 19 nt, Artificial Sequence
  Description of Artificial Sequence: Synthetic oligonucleotide
  Sense Strand Starting at position 87 of SEQ ID NO: 315662
cucgacuucugacucaaga

SEQ ID NO: 325512 - RNA, 19 nt, Artificial Sequence
  Description of Artificial Sequence: Synthetic oligonucleotide
  Antisense Strand to SEQ ID NO: 325511
ucuugagucagaagucgag

SEQ ID NO: 325513 - RNA, 19 nt, Artificial Sequence
  Description of Artificial Sequence: Synthetic oligonucleotide
  Sense Strand Starting at position 87 of SEQ ID NO: 315671
ugacucaagauguggcauu

SEQ ID NO: 325514 - RNA, 19 nt, Artificial Sequence
  Description of Artificial Sequence: Synthetic oligonucleotide
  Antisense Strand to SEQ ID NO: 325513
aaugccacaucuugaguca

SEQ ID NO: 325515 - RNA, 19 nt, Artificial Sequence
  Description of Artificial Sequence: Synthetic oligonucleotide
  Sense Strand Starting at position 87 of SEQ ID NO: 315745
agacaugcuucccuaggua

SEQ ID NO: 325516 - RNA, 19 nt, Artificial Sequence
  Description of Artificial Sequence: Synthetic oligonucleotide
  Antisense Strand to SEQ ID NO: 325515
uaccuagggaagcaugucu

SEQ ID NO: 325517 - RNA, 19 nt, Artificial Sequence
  Description of Artificial Sequence: Synthetic oligonucleotide
  Sense Strand Starting at position 87 of SEQ ID NO: 315749
augcuucccuagguauaaa

SEQ ID NO: 325518 - RNA, 19 nt, Artificial Sequence
  Description of Artificial Sequence: Synthetic oligonucleotide
  Antisense Strand to SEQ ID NO: 325517
uuuauaccuagggaagcau

SEQ ID NO: 325519 - RNA, 19 nt, Artificial Sequence
  Description of Artificial Sequence: Synthetic oligonucleotide
  Sense Strand Starting at position 87 of SEQ ID NO: 315767
agaauacaguagucugcaa

SEQ ID NO: 325520 - RNA, 19 nt, Artificial Sequence
  Description of Artificial Sequence: Synthetic oligonucleotide
  Antisense Strand to SEQ ID NO: 325519
uugcagacuacuguauucu

SEQ ID NO: 325521 - RNA, 19 nt, Artificial Sequence
  Description of Artificial Sequence: Synthetic oligonucleotide
  Sense Strand Starting at position 87 of SEQ ID NO: 315844
gcaauaaaccuuugagggu

SEQ ID NO: 325522 - RNA, 19 nt, Artificial Sequence
  Description of Artificial Sequence: Synthetic oligonucleotide
  Antisense Strand to SEQ ID NO: 325521
acccucaaagguuuauugc

SEQ ID NO: 325523 - RNA, 19 nt, Artificial Sequence
  Description of Artificial Sequence: Synthetic oligonucleotide
  Sense Strand Starting at position 87 of SEQ ID NO: 316331
cuuagaaaguuaguucuuu

SEQ ID NO: 325524 - RNA, 19 nt, Artificial Sequence
  Description of Artificial Sequence: Synthetic oligonucleotide
  Antisense Strand to SEQ ID NO: 325523
aaagaacuaacuuucuaag

SEQ ID NO: 325525 - RNA, 19 nt, Artificial Sequence
  Description of Artificial Sequence: Synthetic oligonucleotide
  Sense Strand Starting at position 87 of SEQ ID NO: 316396
ugguaauuauuacuagaca
